United States Patent Application Publication US 2006/0134663 A1 - sequence listing, part 91

SEQ ID NO: 258748 - DNA, 1344 bp, Homo Sapiens
  misc_feature (958)..(958): n is a, c, g, or t
gggattgcgagccgaacccgggagctggcgccatggtgctgttgcacgtgctgtttgagcacgcggtcggctacgcgctgctggcgctgaaggaagtggaggagatcagtctgctgcagccgcaggtggaggagtccgtgctcaacctgggcaaattccacagcatcgttcgtctggtggccttttgtccctttgcctcatcccaggttgccttggaaaatgccaacgccgtgtctgaaggggttgttcatgaggacctccgcctgctcttggagacccacctgccgtccaaaaagaagaaagtactcttgggagttggggatcccaagattggtgccgcaatacaggaggagttagggtacaactgccagactggaggagtcatagctgagatcctgcgaggagttcgtctgcacttccacaatctggtgaagggtctgaccgatctgtcagcttgtaaagcacagctggggctgggacacagctattcccgtgccaaagttaagtttaatgtgaaccgggtggacaatatgatcatccagtccattagcctcctggaccagctggataaggacatcaataccttctctatgcgtgtcagggagtggtacgggtatcactttccggagctggtgaagatcatcaacgacaatgccacatactgccgtcttgcccagtttattggaaaccgaagggaactgaatgaggacaagctggagaagctggaggagctgacaatggatggggccaaggctaaggctattctggatgcctcacggtcctccatgggcatggacatatctgccattgacttgataaacatcgagagcttctccagtcgtgtggtgtctttatctgaataccgccagagcctacacacttacctgcgctccaagatgagccaagtagccccccagcctgtcagccctaattggcgaagcggtaggtgcacgtctcnatcccacatgctggcagcctcaccaacctgggccaagtatccagcattccacagcgcagaatccttggggctgaaaaaggccctgttcacagccctgaaaaccaagggttaccactcccaaaacatggactcattttcccactccacctttcatttggcccagcacctggccacgaacaaatgtccgcatcctccctataccctgccaaacacctggcacaattgccctccacaaacccgactgccttctccgcgaggcggcccccccattgttatttcgttggagcaccctttcaaaaaatatctttgaaaaagcgactgggtcctttccaagaaaaattgggagaaaaaccccacgaaaacaaacctcggatgttccacgaaag

SEQ ID NO: 258749 - DNA, 782 bp, Homo Sapiens
gggattgcgagccgaacccgggagctggcgccatggtgctgttgcacgtgctgtttgagcacgcggtcggctacgcgctgctggcgctgaaggaagtggaggagatcagtctgctgcagccgcaggtggaggagtccgtgctcaacctgggcaaattccacagcatcgttcgtctggtggccttttgtccctttgcctcatcccaggttgccttggaaaatgccaacgccgtgtctgaaggggttgttcatgaggacctccgcctgctcttggagacccacctgccgtccaaaaagaagaaagtactcttgggagttggggatcccaagattggtgccgcaatacaggaggagttagggtacaactgccagactggaggagtcatagctgagatcctgcgaagagttcgtctgcacttccacaatctggtgaagggtctgaccgatctgtcagcttgtaaagcacagctggggctgggacacagctattcccgtgccaaagttaagtttaatgtgaaccgggtggacaatatgatcatccagtccattagcctcctggaccagctggataaggacatcaatacccttctctatgccggtccagggaagtggtaccgggtatcactttcccggagccgggggaagatcatcaaccgacaatgcccacataccggccgtcttggcccagtttaattggaaaacccgaaggggaactggaaggaggacaaagctgggaaaaactgggaaggacctgaccatgcgatggggggccaaggcctaaag

SEQ ID NO: 258750 - DNA, 979 bp, Homo Sapiens
aggtagcgaggcctgggtggcgaattcggcacgaggtggagactcacatggctgcagaacactgtcaggtgacctgcaaatgtaacaagaagttggagaagaggctgttaaagaagcatgaggagactgagtgccctttgcggcttgctgtctgccagcactgtgatttagaactttccattctcaaactgaaggaacatgaagattattgtggtgcccggacggaactatgtggcaactgtggtcgcaatgtccttgtgaaagatctgaagactcaccctgaagtttgtgggagagagggggaggaaaagagaaatgaggttgccatacctcctaatgcatatgatgaatcttggggtcaggatggaatctggattgcatcccaactcctcagacaaattgaggctctggacccacccatgaggctgccgcgaaggcccctgagagcctttgaatcagatgttttccacaatagaactaccaaccaaaggaacattacagcccaggtttcaattcagaataatctgtttgaagaacaagagaggcaggaaaggaatagaggccaacagccccccaaagagggtggtgaagagagtgcaaacttggacttcatgttggccctaagtctgcaaaatgaaggccaagcctccagtgtggcagagcaggacttctggagggccgtatgtgaggccgaccagtctcatggcggtcccaggtctctcagtgacataaagggtgcagctgacgagatcatgttgccttgtgaatttttgtgaggagctctacccagaggaactgctgattgaccatcagacaagctgtaacccttcacgtgccttaccttcactcaatactggcagtccttcccccccaaaagggggggaagaaacctgatggccatcttccagaaatttcttgcaacagggtgccaagtaaccggtaaaaactcctttgaaggggcctgaacaatttccccccc

SEQ ID NO: 258751 - DNA, 1425 bp, Homo Sapiens
  misc_feature (561)..(561): n is a, c, g, or t
gagtatagaacaagcctgttgctagtgtaaaagaagcaggctggtacgggtccggaatctcgggaatatcgtcgacccacgcgtcgccggcgggcaagagtgagccatggagctacggtgtggggaacaagtaccgcctgggacggaagatcgggagcgggtccttcggagatatctacctgggtgccaacatcgcctctggtgaggaagtcgccatcaagctggagtgtgtgaagacaaagcacccccagctgcacatcgagagcaagttctacaagatgatgcagggtggcgtggggatcccgtccatcaagtggtgcggagctgaaggggcgactacaacgtgatggtcatggagctgctggggcctagcctcgaggacctgttcaacttctgttcccgcaaattcagcctcaagacggtgctgctcttggccgaccagatgatcagccgcatcgagtatatccactccaagaacttcatccacacgggacgtcaagcccgacaacttcctcatggggctggggaagaagggcaacctggtcttacatcatcgacttncggcctggccaagaagtaccgggacgcccgcacccaccagcacattccctaccgggaaaacaagaacctgaccggcacgcccgctacgcttccatcaacacgcacctgggcattgagcaaagccgtcgagatgacctggagagcctgggctacgtgctcatgtacttcaacctgggctccctgccctggcaggggctcaaagcagccaccaagcgccagaagtatgaacggatcagcgagaagaagatgtcaacgcccatcgaggtcctctgcaaaggctatccctccgaattctcaacatacctcaacttctgccgctccctgcggtttgacgacaagcccgactactcttacctacgtcagctcttccgcaacctcttccaccggcagggcttctcctatgactacgtctttgactggaacatgctgaaattcggtgcagcccggaatcccgaggatgtggaccgggagcggcgagaacacgaacgcgaggagaggatggggcagctacgggggtccgcgacccgagccctgccccctggcccacccacgggggccactgccaaccggctccgcagtgccgccgagcccgtggcttccacgccagcctcccgcatccagccggctggcaatacttctcccagagcgatctcgcgggtcgaccgggacaggaaggtgagtatgaggctgcacaggggtgcgcccgccaacgtatcctcctcagacctcactgggcggcaaaaggtctcccggatcccagcctcacagacaagtgtgccatttgaccatctcgggaagtgaggagagcccccattggaccagtgtttgcttagtgtcttcactgtattttcgttacaaaaaaaa

SEQ ID NO: 258752 - DNA, 2073 bp, Homo Sapiens
  misc_feature (1166)..(1166): n is a, c, g, or t
  misc_feature (1337)..(1337): n is a, c, g, or t
  misc_feature (1389)..(1389): n is a, c, g, or t
  misc_feature (1395)..(1395): n is a, c, g, or t
gtaccggtccggaatttcgggatatcgtcgaacccacgctgtcgggtcagctgaaaggggatttaggccctgaagagtcgagtccatccgcggcggggagagggcaatgcggtgaccggttaggggcctggagcagcggcggcggcgctcggactgtcccatccgccccgtattgaggcgctgggagcggcggggcgacatggaaagcgatggctgaaagcggggccgtgaggggggcggagccgggagccggacccgcagtagcggcagcagcggcgccgcctcccagagttcagacccaggaagcggccgggagggcaggagcgaatcgggccgccgccgccatggagctgagagtcgggaacaggtaccggctgggccggaagatcggcagcggctccttcggagacatctatctcggtacggacattgctgcaggagaagaggttgccatcaagcttgaatgtgtcaaaaccaaacaccctcagctccacattgagagcaaaatctacaagatgatgcagggaggagtgggcatccccaccatcagatggtgcggggcagagggggactacaacgtcatggtgatggagctgctggggccaagcctggaggacctcttcaacttctgctccaggaaattcagcctcaaaaccgtcctgctgcttgctgaccaaatgatcagtcgcatcgaatacattcattcaaagaacttcatccaccgggatgtgaagccagacaacttcctcatgggcctggggaagaagggcaacctggtgtacatcatcgacttcgggctggccaagaagtaccgggatgcacgcacccaccagcacatcccctatcgtgagaacaagaacctcacggggacggcgcggtacgcctccatcaacacgcaccttggaattgaacaatcccgaagagatgacttggagtctctgggctacgtgctaatgtacttcaacctgggctctctcccctggcaggggctgaaggctgccaccaagagacagaaatacgaaaggattagcgagaagaaaatgtccacccccatcgaaagtgttgtgtaaaggctacccttccgaatttgccacatacctgaatttctgccgttccttgcggtttgacgacaagcctgactactcgtacctgcggcagcttttccnggaatctgttccatcgccaggggcttctcctatgactacgtgttcgactggaacatgctcaaatttggtgccagccgggccgccgatgacgccgagcgggagcgcagggaccgagaggagcggctgagacactcgcggaacccggctacccgcggcctcccttctaacacntccggccgctgcgggggacgcaggaagtggctccccccacacccctcacctntacctnacacacggctaacacctccccccggcccgtctccggcatggagagagagcggaaagtgagtatgcggctgcaccgcggggcccccgtcaacatctcctcgtccgacctcacaggccgacaagatacctctcgcatgtccacctcacagaatagcattcctttcgaacaccacggcaagtagctgctcgtctcccatcggaaggcagcactggattcctggtcgggtggcttccagtggtcttcagtctgtcgtgcaccgatgagaactctccttattgctgtgaagggcagacaatgcatggctgatctactctgttaccaatggctttactagtgacacgtcccccggtctaggatcgaaatgttaacaccgggagctctccaggccactcacccagcgacgctcgtgggggaaacatactaaacggacagactccaagagctgccaccgctggggctgcactgcggccccccacgtgaactcggttgtaacggggctgggaagaaaagcagagagagaattgcagagaatcagactccttttccagggcctcagctccctccagtggtggccgccctgtactccctgacgattccactgtaactaccaatcttctacttggttaagacagttttgtatcattttgctaaaaattattggcttaaatctgtgtaaag

SEQ ID NO: 258753 - DNA, 1424 bp, Homo Sapiens
  misc_feature (1322)..(1322): n is a, c, g, or t
ttcccgggatgtagaggtgatgcagtgctgaagacctgggcccctgctcagtgcctttgctctagaatgggtccagcttggctttggctactgggaacagggatcctggcctctgtccactgtcagccccttcttgcccatggagataaaagtctgcaggggcctcaaccccccaggcatcagctctcagagccagcccccgcctaccacagaatcacacccaccattaccaattttgctttgcgtttgtataaagagctggcagcagacgcccccggaaacatcttcttctcgccagtgagcatctccaccaccctggccctgctctctcttggggcccaagctaacacctcagctctgatcctggagggcctgggattcaacctcacagaaacccctgaagccgacatccaccagggcttccggagcctcctccacacccttgccctgcccagccccaaactcgaactaaaagtaggaaactccctgttcctagacaagcgactaaagcctcggcagcactatttggacagcatcaaggagctttatggagcttttgctttttctgccaacttcacagattctgttacaactgggaggcagattaatgactatttgagaaggcaaacatacgggcaagtcgtggactgcctcccggagttcagccaggacacgttcatggttcttgccaattacatcttcttcaaagccaagtggaagcaccctttcagtcgctaccagacccagaagcaggcaagtttctttgtggatgagaggacttctctccaggtccccatgatgcaccaaaaggaaatgcacagattcctctatgaccaggatttggcttgcactgtcctccagatagaatacagaggaaatgccttggcgctgctggtcctccctgacccggggaaaatgaagcaggtggaggctgctctgcagccacagaccctgagaaaatggggccaattgctcctgcccagtctgttggatttgcacttgccaaggttttcaatttctggaacatataacctggaagacatacttccccaaattggtctcaccaacatactcaacttagaagctgacttctcaggagtcactgggcagctcaacaaaaccatctccaaggtgtcacacaaggcgatggtggacatgagtgagaaggggaccgaggccggggctgcttcaggcctcctctcccagcccccatctctgaacaccatgtcagacccacatgcccacttcaacaggcctttcctcttgctcctttgggaggtcaccacccagagcttactcttcctgggaaaagttgtcaaccnagttgcagggtaaccatggtgggaggccaggagttatcttatctcatcctggaccaaacagataggccagaaccagcctgcatcctggggctgctatgtggt

SEQ ID NO: 258754 - DNA, 986 bp, Homo Sapiens
  misc_feature (46)..(46): n is a, c, g, or t
gaaagagagaggaagaaaaagaaaatcccggccccccacacacccnagcatgaggcctgggtggcgaattcggcacgagggcccaaccttctgggccacacgaaccaggaggacgcaggcctagaggtgcaccagttctatccgctggtgaaggtgcagtgctcgcccgaactgcgcttcttcctgtgctccatgtacgcacccgtgtgcaccgtgctggaacaggccatcccgccgtgccgctctatctgtgagcgcgcgcgccagggctgcgaagccctcatgaacaagttcggttttcagtggcccgagcgcctgcgctgcgagcacttcccgcgccacggcgccgagcagatctgcgtcggccagaaccactccgaggacggagctcccgcgctactcaccaccgcgccgccgccgggactgcagccgggtgccgggggcaccccgggtggcccgggcggcggcggcgctcccccgcgctacgccacgctggagcaccccttccactgcccgcgcgtcctcaaggtgccatcctatctcagctacaagtttctgggcgagcgtgattgtgctgcgccctgcgaacctgcgcggcccgatggttccatgttcttctcacaggaggagacgcgtttcgcgcgcctctggatcctcacctggtcggtgctgtgctgcgcttccaccttcttcactgtcaccacgtacttggtagacatgcaagcgcttcccgctacccaaaagcgggcctaatcattttttctggtcggggcttgcctaccccaatgggggtcgggggggcctaacattcggcgggccttccgtgcttccaaggaaaccggcggggtggtggcaaccaaagcggctttcttcccagggacggggttacccccaacgggcggggtttaagggatcgccacacgaatagcgaagggagtctcgacaccgctccctctcttcaactaataggcctcctacacacaccc

SEQ ID NO: 258755 - DNA, 1479 bp, Homo Sapiens
gggatggccacagttgtgtcctaggtctgaagaaaagcttgcagactctgcctttggcaggattttctgcagttagccccgtccagagcagaacgaaagggtattccctagcctatttcctgggcaggctcctcaaatccagggatgaactactttctgcagtggccagccctccttttgattttattgtggccccaattccagggctttgggggttacagagaatcaggcttccggtggaagtagattgttttccatctataggtggagaaaattccaggaggagaatattgtctggcttccccgttctctctgggcaattgtttccttggttctctctccaactccatgttgtcttagtctcccagcaccccttcaggccttccatgtgggcccctagaccacactacccaccttcacacttgcattccacaactcagtccagtggccagcttgttgatgcctccataattctcagccagagcaaatccttgattggcccaccaggtcttgctgctccagaagttgccttgtgggcattccctggcaccatttcctctctgggtcctatactttcccaagtgcaggaggtcctgggggtatgcctgtgtgcctggcaacatccagcattgtgtttctgctccatctaggtgtcccatttctccagttgcccctcataaggcatcaaacctccagcaaaggaaggcaacaacccatggcctgaccacgggatctacaggttcagatctcaccagggatagcccagacttcaattcttgcttttttgggtatcagggccccaatcccttagtggccagggactcaaagtttggaataatcccagccctgccaagcattaagggtgctggtggggagtgtttgctggctgttcatgaacctctggtgtcctgggcctctctccactagacatggcagcatctctgagttacagattgcaatgtgttgccctgcatggttgaactgcttcggacatctgctaggcatcccatgtgccctgtcccctcttcaatgccagtgagtcacaatggcctatgcttattcacagcaataatacctagggagtccccatgaagcccttttgtcctggtccctcactctgcgtgggtctcctggggaggcagctgctgagtgggtcagttcatgagaacctgcatttatgaagccctgggctgtgtaggcatcaccctgggatgcagacaggttagaggcccagcccttaggggagccatggcagggagagtgccttccaccctgaggccacccagacctggaggagatgcaggccccagctctgctaaagggcctttgaggtgggtgggactgtctcccagttgggcagctcttgagaaggacacacgaccggtttgtgcgcccattgcctgctctgtgtctccgttggtccctctgtctcttccttttcacatttgtgcacataaaatatactggtgtttgtgttcc

SEQ ID NO: 258756 - DNA, 283 bp, Homo Sapiens
ttggacggagaggagagagttgtgttcctgaggggtcgctacgtggaggaagggctaccacctgccagtacgtgcaaggtgttagtggagagcaaacttcgaggacgtaccctggaggaggtggtcatggcagaggaggaagatgagggcacggacagacctgggtccccagcctgaggagggagcgtgagcctcccagagccccaggactgggccagagcacttaggtttctttttccatggtttccaggtaataaaaggaacttgttttgttggtaccagt

SEQ ID NO: 258757 - DNA, 1080 bp, Homo Sapiens
actatgaaggctgacttgacgcccaagacacaatggggcacggtaaccagactggtccgtaagggttccaggaaggaatgcagtttcaagagaacagtttgaatctttattcgaatttgaattttggtacaatgaagagagtcagctgcaacttgacaatcgaaatcttcagaaaagcgacacaaatacgttcgcctcgaggaatattgggtcttctgcgcggccgtagagctccgccaagtgcgcctgcgcggaggagaagtggcgtcgagtccggccgggcagtagaggaaattgcggtagtgaccctcgggcctcgccatgaagagccgctttagcaccattgacctccgcgccgtactcgcggagctgaatgctagcttgctaggaatgagagtaaacaatgtttatgatgtggataataagacataccttattcgtcttcaaaaaccggactttaaagctacacttttacttgaatctggcatacgaattcatacaacagaatttgagtggcctaagaatatgatgccgtctagttttgccatgaagtgccgaaaacatttgaagagtcggagattagtcagtgcaaaacagcttggtgtggatagaattgtagattttcaatttggaagtgatgaagctgcttaccatttaatcattgagctctatgatagggggaacattgttcttacagattatgagtacgtaattttaaatattctaaggtttcgaactgatgaggcagatgatgttaaatttgctgttcgtgaacgctatccacttgatcatgctagagctgctgaacctttgcttactttggaaaggttgactgaaatagtagccagcgcacctaagggtgaactactgaagagggtgcttaacccattacttccctatggaccagctctcattgaacactgtcttttagaaaatggattctcggggtaatgtcaaagttggatgaaaaaccttgaaacctaaagatattggaaaaaagtactttggtttctcctgcagaaaggcagaagactatatgaaaaacaacatccaaactttcagtggggaaagggaatatac

SEQ ID NO: 258758 - DNA, 482 bp, Homo Sapiens
  misc_feature (29)..(29): n is a, c, g, or t
  misc_feature (31)..(31): n is a, c, g, or t
cctttcccacaggggcagcctgtagcgantngtggcagctgggcctcaccccggcaggcctgtgcgtgaccccctgagtgggggaaggcaggctgttgccatggtggcctgagcgagcagaattcctccagggacaatggcgtctcttggccacatcttggttttctgtgtgggtctcctcaccatggccaaggcagaaagtccaaaggaacacgacccgttcacttacgactaccagtccctgcagatcggaggcctcgtcatcgccgggatcctcttcatcctgggcatcctcatcgtgctgagcagaagatgccggtgcaagttcaaccagcagcagaggactggggaacccgatgaagaggagggaactttccgcagctccatccgccgtctgtccacccgcaggcggtagaaacacctggagcgatggaatccggccaggactcccctggcacctgacatctcccacgctccacctg

SEQ ID NO: 258759 - DNA, 301 bp, Homo Sapiens
  misc_feature (23)..(23): n is a, c, g, or t
  misc_feature (52)..(52): n is a, c, g, or t
  misc_feature (250)..(250): n is a, c, g, or t
acagacggcggatggagctgcgnaaagttccctcctcttcatcgggttcccnagtcctctgctgctggttgaacttgcaccggcatcttctgctcagcacgatgaggatgcccaggatgaagaggatcccggcgatgacgaggcctccgatctgcagggactggtagtcgtaagtgaacgggtcgtgttcctttggactttctgccttggccatggtgaggagacccacacagaaaaccaagatgtggcnaagagacgccattgtccccaatcgggctgtcccctgctgaaagaaggcccc

SEQ ID NO: 258760 - DNA, 1195 bp, Homo Sapiens
  misc_feature (13)..(13): n is a, c, g, or t
  misc_feature (378)..(405): n is a, c, g, or t
  misc_feature (902)..(902): n is a, c, g, or t
  misc_feature (907)..(907): n is a, c, g, or t
  misc_feature (1082)..(1082): n is a, c, g, or t
tgttttgtttttnatttcctctaagactttgcaagcagcagcaccagagagggaacctgccctcctggccctggaagcgaccgacccccaacccctaacccaggacacagctggcacctcaggcccctttccttctgaaaggagggctgtgtctctctcacattcacacatacacagacacatgcatgtgtgcacactcatggcacatgggacctcaggggtagcctgtttgccgatccccccaagaggtaccaggaggcagaccgctagaaggagataagaggcaccctggtctcctccaacccaaggaggaagaaagctcaacccctctaggatagggactgtcttcagtcaatggagcgttgacttagggggcgnnnnnnnnnnnnnnnnnnnnnnnnnnnngcagtctttacaaaaatagaacttctcttggtatttataaatctacggccatggctctatgtgcatgttacaggtagaaaagccatatggggcactccttttggttgctcaggccttgattgcctgtcatccaggtcccttggtctgagaagtctatgcggtcacctcagagccgctaagcaccttcagtgggcccatcccattggcggcgtactcctgctggagccgggcaacggtaatagaagaggtaggaaggcaacaggaatcccaggagtgagaatagcaggaggcccagattcacccagaagggctctcctttcaggggtcccaccatcgccatgaaaagtggctgctgaagcaaggcgaacacagcactgatgagggactgcaggcctgtcagcgtcccaaagtggttggatgggaacactgcagcatagagactcccacaggctgagtggaagaaacctcgaacaatggttttcagggcccaaggttcncaaantggaggtgtaagttgttgatgagacaggtgatgccaaaacccacaagcagcaggttggtcagggtgaaggcactgatggcattggtgagcttttggatcttgcagtagcgtggtctgatggatttggtagcaaccccgtccctggcatctccgaggacagtgccctgagttgggngtccacgcagtccttgatccgccagtccatgatgtagccaatgagggggcaggtgagaaggcacaacagctgcatggccccgaagacggaggagtagaacccaactgtctctc

SEQ ID NO: 258761 - DNA, 542 bp, Homo Sapiens
gtgtgggcaccaccaggccctgccacttgttatacctgagaagtctcatctcagccactttgcagaattgctgaacattaagtgagatactggtggaacaatgactacacataataagtactagctgtatttattctggctccaggacctggagaaaaatggccgcctttctcctccctgtgggaggcttaagggcagatgactacctacttgactctgtttctctctccttgccctaaaggtgaatctggggcctcctgctattcttcactcctgggattcctgttgccttcctacctcttctattaccgtgcccggctccagcaggagtacgccgccaatgggatgggcccactgaaggtgcttagcggctctgaggtgaccgcatagacttctcagaccaagggacctggatgacaggcaatcaaggcctgagcaaccaaaaggagtgccccatatggcttttctacctgtaacatgcacatagagccatggccgtagatttataaataccaagagaagttctatttttgtaaagactg

SEQ ID NO: 258762 - DNA, 466 bp, Homo Sapiens
  misc_feature (264)..(264): n is a, c, g, or t
  misc_feature (329)..(329): n is a, c, g, or t
  misc_feature (385)..(414): n is a, c, g, or t
  misc_feature (416)..(416): n is a, c, g, or t
cttccctttttatttcctctaagacttgcaagcagcagcaccagagagggaacctgccctcctggccctggaaggccgaccccccaacccctaacccaggacacagctggcacctcaggcccctttccttctgaaaggagggctgtgtctctctcacattcacacatacacagacacatgcatgtgtgcacactcatggcacatgggacctcaggggtagcctgtttgccgatccccccaagaggtaccagggaggcagaccgntagaaggagataagaggcaccctgggtctcctccaacccaaggaggaaggaaagctcaacccctntagggataggggacttgtctttcagtcaatgggagcgttgactttagggggggcgnnnnnnnnnnnnnnnnnnnnnnnnnnnnnngnagtctttacaaaaataggacttctcttgggatttataaaatctacgggcc

SEQ ID NO: 258763 - DNA, 1407 bp, Homo Sapiens
  misc_feature (214)..(214): n is a, c, g, or t
  misc_feature (239)..(239): n is a, c, g, or t
  misc_feature (991)..(991): n is a, c, g, or t
  misc_feature (1259)..(1259): n is a, c, g, or t
  misc_feature (1315)..(1315): n is a, c, g, or t
  misc_feature (1405)..(1405): n is a, c, g, or t
atccctgctcagtgtattttgttcttgtaagaagtcatgggtaactgagagtatcacatactatctgtggcttcacacgtggaagatgggaggctctggaaggaagaggggattgctgaccccttggcctctccccactccttctctctgtctcttccctctctccagggggtgacatccgttcaccacctaggaggggagctccttggaccanacagcagacgttgtctgggtgacanaaatggagatgttcagcagaacagccgtgccatgagcataggactgacatcttccccctgtggtgtctccttctgcaggtgccttattaagtggctggaggttcgtaaagtgtgtcccctgtgcaacatgccagttctacagctggcccagttgcacagtaagcaggaccgtggaccccctcaggggccccttcctggggcagagaacattgtatagcttaccgcaaggatcagactgttgctggacacgacgtctgtgtggagccaggaggaacacatgtggtgtctgtatggctgctctctacctaggacaccagctgccacttcttttgcctcatgaagaactcttgggccagccaaactgggaacctaggtgtctgggtcttgtgacaaccaaagcactttgacactaccccctgccgagagaagaggagtggatgagcctgcgggtttgcctcaagaaacttcatgagggtctcttactaactccattacactctctctcctggagcctcatctccatgtcaagcaggagggtaaagaagggaactaagagcaggtctttcaagccacacccccacctgcggatggatgggtttctctgtaggccatgcaggcctttgtcgcagcaaaccttcccagcagcccttgagccaagtaaaaacagcacaaccagccaccagtggttggtgaggcagtacccacaaggctcatgttgtatgcctttgataaggccatcttggctttgagtngcagtgttcctcgtcacccatttccccctcaggattacaacacctgctatcaaatcatctaagctgaaaacatgagatgcgcttggaaaggcctagtcagaagccatttcctcttatcatttccctctcctatgcaccagtaaggcccgtccagagccccagcagggagtgggccctgagtccaaactgtccctgagtgatccaggaggctgcccacatccccacatgtgcactgtggttccagtgtggctgctgtgagcccactgcnactgcctcagaagggagccactgtgaacctctcgagtggctccaaagagcagtggntttttgagaatggcccatacttctggcccggctggatgaagggaatgccgaccctttggcctctccccctccttccatctcttttttttntt

SEQ ID NO: 258764 - DNA, 1201 bp, Homo Sapiens
  misc_feature (1121)..(1129): n is a, c, g, or t
aatgcgcgttgttgcttaacgaagcagagtcctacacactgtctgctgctctcctgatcatggcttctccgagttctttcacctactattgccctccatcttcctcccccgtctggtcagagccgctgtacagtctgaggcccgagcacgcgcgagagcggttgcaggacgactcggtggaaacagtcacgtccatagaacaggcaaaagtagaagaaaagatccaagaggtcttcagttcttacaagttcaaccaccttgtaccaaggcttgttttgcagagggagaagcacttccattatctgaaaagaggccttcgacaactgacagatgcctatgagtgtctggatgccagccgcccatggctctgctattggatcctgcacagcttggaactgctagatgaacccatcccccagatagtggctacagatgtgtgtcagttcctggagctgtgtcagagcccagaaggtggctttggaggaggacccggtcagtatccacaccttgcacccacatatgcagcagtcaatgcattgtgcatcattggcaccgaggaggcctatgacatcattaacagagagaagcttcttcagtatttgtactccctgaagcaacctgacggctcctttctcatgcatgtcggaggtgaggtggatgtgagaagcgcatactgtgctgcctccgtagcctcgctgaccaacatcatcactccagacctctttgagggcactgctgaatggatagcaaggtgtcagaactgggaaggtggcattggcggggtaccagggatggaagcccatggtggctataccttctgtggcctggccgcgctggtaatcctcaagagggaacgttccttgaacttgaagagcttattacaatgggtgacaagccggcagatgcgatttgaaggaggatttcagggccgctgcaacaagctggtggatggctgctactccttctggcaggcggggctcctgcccctgctccaccgcgcactgcacgccccaaggtgacccctgccctttagcatggagccactgggatggttccatccagcaggcccctggcaaggagtacaatccctgaatggtgcttggccagttggcccctgcccnnnnnnnnnccctttcctgggataaaaaccctgggcaaagtctcgccgttgatatttctctacccacaacccgtgggctaa

SEQ ID NO: 258765 - DNA, 1282 bp, Homo Sapiens
gggcagttccaaaatggcggcaggggtggccgggtggggggttgaggcagaggagttcgaagatgctcctgatgtggagccgctggagcctacacttagcaacatcatcgagcagcgcagcctgaagtggatcttcgtcgggggcaagggtggtgtgggcaagaccacctgcagctgcagcctggcagtccagctctccaaggggcgtgagagtgttctgatcatctccacagacccagcacacaacatctcagatgcttttgaccagaagttctcaaaggtgcctaccaaggtcaaaggctatgacaacctctttgctatggagattgaccccagcctgggcgtggcggagctgcctgacgagttcttcgaggaggacaacatgctgagcatgggcaagaagatgatgcaggaggccatgagcgcatttcccggcatcgatgaggccatgagctatgccgaggtcatgaggctggtgaagggcatgaacttctcggtggtggtatttgacacggcacccacgggccacaccctgaggctgctcaacttccccaccatcgtggagcggggcctgggccggcttatgcagatcaagaaccagatcagccctttcatctcacagatgtgcaacatgctgggcctgggggacatgaacgcagaccagctggcctccaagctggaggagacgctgcccgtcatccgctcagtcagcgaacagttcaaggaccctgagcagacaactttcatctgcgtatgcattgctgagttcctgtccctgtatgagacagagaggctgatccaggagctggccaagtgcaagattgacacacacaatataattgtcaaccagctcgtcttccccgaccccgagaagccctgcaagatgtgtgaggcccgtcacaagatccaggccaagtatctggaccagatggaggacctgtatgaagacttccacatcgtgaagctgccgctgttaccccatgaggtgcggggggcagacaaggtcaacaccttctcggccctcctcctggagccctacaagccccccagtgcccagtagcacagctgccagccccaaccgctgccatttcacactcaccctccaccctccccaccccctcggggcagagtttgcacaaagtcccccccataatacagggggagccacttgggcaggaggcagggaggggtccaattccccctggtggggctggtggggagctgtagttgccccctacctctcccacctcttgctcttcaataaaatgatcttaaactgcaa

SEQ ID NO: 258766 - DNA, 1061 bp, Homo Sapiens
  misc_feature (217)..(217): n is a, c, g, or t
  misc_feature (229)..(232): n is a, c, g, or t
  misc_feature (640)..(902): n is a, c, g, or t
  misc_feature (932)..(932): n is a, c, g, or t
  misc_feature (962)..(962): n is a, c, g, or t
  misc_feature (971)..(971): n is a, c, g, or t
  misc_feature (1002)..(1002): n is a, c, g, or t
  misc_feature (1017)..(1017): n is a, c, g, or t
  misc_feature (1019)..(1019): n is a, c, g, or t
  misc_feature (1023)..(1023): n is a, c, g, or t
  misc_feature (1034)..(1034): n is a, c, g, or t
  misc_feature (1037)..(1037): n is a, c, g, or t
  misc_feature (1045)..(1045): n is a, c, g, or t
  misc_feature (1054)..(1054): n is a, c, g, or t
  misc_feature (1058)..(1058): n is a, c, g, or t
  misc_feature (1060)..(1061): n is a, c, g, or t
gtcagaaagaaacatttaatagggacttatgcacagaagccatgtctcaggcagtgatccccacagttaccccccgacccagggcttatatgccatagagaaaagggggtacatgaaggaacatgtgagacactgaagtcacctcctcagggaaaggcaagaatgctgtttacaacttagcctataacttgcttaaggccaggatttacagtgtgtntttgtttttgtnnnntcttttaatagataaaagtagaaatcttagagggcattccaggaactggttatcagaagtcaacatggtagattagcatccaagatggaagttactttagcctcatactgtgcctgtgaatttctttgaggaggggatggggtggccccacacctcttccaggttgtacatacccaagtgctaggcagttcctgtagctggtgagaagcccaggggcaggaagtgagacatccccagagcaagaggcaaggttcagccctgcttgaaactggttgccacatcagtgactttagtatgaaggccaagaggattggaagtgacacacaggaggtctcaaacactgctcttataaatggcctgtgtgtcctaatgccatcagaagtgataaagttggtactaggatgtggnnnnnnnnnnnnnnnnnnnnnnnnnnnnnnnnnnnnnnnnnnnnnnnnnnnnnnnnnnnnnnnnnnnnnnnnnnnnnnnnnnnnnnnnnnnnnnnnnnnnnnnnnnnnnnnnnnnnnnnnnnnnnnnnnnnnnnnnnnnnnnnnnnnnnnnnnnnnnnnnnnnnnnnnnnnnnnnnnnnnnnnnnnnnnnnnnnnnnnnnnnnnnnnnnnnnnnnnnnnnnnnnnnnnnnnnnnnnnnnnnnnnnnnnnnnnnnnnnnnnnnntaataataataataattcactacgatgacnctgacaatagtttctaatctcatttactangtaagttanagtttggtatactttagattgcatttttttnaatgttaaatatttngntttntttggaaaaanaantgaaaaanaaaatggantccntnn

SEQ ID NO: 258767 - DNA, 373 bp, Homo Sapiens
  misc_feature (12)..(12): n is a, c, g, or t
  misc_feature (21)..(21): n is a, c, g, or t
  misc_feature (46)..(46): n is a, c, g, or t
  misc_feature (172)..(172): n is a, c, g, or t
ggtaaaattaancatcccaanatggaaattaactttaaccctcaanactgtgccctgtgaaatttcctttgaaggaggggaatggggttggccccccaacaccctcctccccaggttgtaacataccccaagtgcctaggcagttccctgtaagctggtgaagaaacccacngggcaggaaagtgagacatccccccagagcaagaggcaaggttccagccctgccttgaaactggttgcccacagcagtgactttagtatgaaggcccaagaggattggaagtgacacacaggaggtctcaaacactgctcttataaatggcctgtgtgtcctaatgccatcagaagtgataaagttggtactaggatgtgg

SEQ ID NO: 258768 - DNA, 956 bp, Homo Sapiens
  misc_feature (91)..(123): n is a, c, g, or t
  misc_feature (264)..(275): n is a, c, g, or t
  misc_feature (707)..(720): n is a, c, g, or t
  misc_feature (834)..(891): n is a, c, g, or t
gggtgttcaccttgagtctccagcccacagccaaggtggacgtacctctccaggagcctttgccttaatgtatctctgcctggacaacttnnnnnnnnnnnnnnnnnnnnnnnnnnnnnnnnnagttaaatccagtcttatgaagtattgttattaaatgtctttttaaaaagagaaatataaacatatatttttactattaaaatattcagttttttaaatgaagtagaacttgagttcatgttttatatgaaatatttaccnnnnnnnnnnnntgaggtaaactgtatttaaaacctttgacttgagtctgctggtaaagcttctgaatattgagtttgctgagaaataaaaatcaaaacttctttaagctggtaaagtgaggggcccaccagcagtgatctcctgatgccttactggaaactttgtttacttgtctgctaccctctgatttgtttttagttagtttttattgtgagcacacatagtacctagttacatcttaagatcaggtttataaaactgtggagtggagcggtatggtatggaatgattggaatgtaagctgtcagggaaaaaatgttgttacacctttggctaaaactggggggttctttcatattcctggctggtggaaccagttgaaccacaaatgcttgccagtactggccaaagcactgttggtgaaatggcgaggtccttgtgannnnnnnnnnnnnnaatgactcttcctctcggaaatacaaattttccccaggcccctcgggtaatagctggcctgggcttggcgggggagagggtctgtagtgcttgttaatgtgtgtggggacgttnnnnnnnnnnnnnnnnnnnnnnnnnnnnnnnnnnnnnnnnnnnnnnnnnnnnnnnnnncgcagtgggagtggcgggtggcatggaggtgcagaggagagaggcgagttagagagggcgcggta

SEQ ID NO: 258769 - DNA, 1130 bp, Homo Sapiens
  misc_feature (9)..(9): n is a, c, g, or t
  misc_feature (13)..(13): n is a, c, g, or t
  misc_feature (15)..(15): n is a, c, g, or t
  misc_feature (17)..(18): n is a, c, g, or t
  misc_feature (27)..(28): n is a, c, g, or t
  misc_feature (32)..(33): n is a, c, g, or t
  misc_feature (42)..(42): n is a, c, g, or t
  misc_feature (69)..(69): n is a, c, g, or t
  misc_feature (71)..(71): n is a, c, g, or t
  misc_feature (79)..(89): n is a, c, g, or t
acctttgancccngngnngagatgcannagcnngattccccnccgcactccgcctggcaacagaacaancnccgtctcnnnnnnnnnnngagaatatgcattaggcaagacaattataaacctccaattacaaaaatcaattaagaaaggttaactgttctcgcacttgtgggatgaacatgaagatctgaatgggccatgaatagtctggctgggggttttgaagcaggaagtcttggaagccagtaaattgtaaagttgtccaagagacccagagcccaactcaaaagtccaatcctcccatagccactgtctatcccaagacaaagtcgaaaaaagctaattagtacccacacccagctctaagtcacacaagaacaaatctctccctgggccctgtgcaggccaggccagaagagcaagggcaactcaggatactccatttattgaactccaaatctaacaaaattaagatcgctgcagtgtttcaaaaggaccttgaccttgttcccactgctatgctcactaaagtcagctcatttatgtttctgtagcctctgtatctgtagcttctgcatctgttttctgagaagctaacaggacttcacgtgcccgtttccttcgcagtctctcagcatttgtgatcatcataggatgcagagggaaaaagccagcaagacccagaagcttttccataggcttagagaggtgggccccgcagccaatccaatgacggatcctgtctaggttgagggcaacgagtttttctccatgactgttgggcaatggatcataggagcccagctgctctacgaaacggccatccctgggacacttgttgtgagcagccacaatgcggtagaacggccgattggtgcagccacccagggcaaggcggatggttaagtggcccccacggtaggccttgcagaggagagtagtgaggtggaccatggtgccgccggcgtgcggctcctcggagagccccgctacccgcacgcaccagctctacggccttggcagggcagagaacaaacacagaaagaacctgcaagccgacaccaggccgcaccgccaagcggtacaagcccgaaaacctcgactccggaagcggatgatccgctcgccac

SEQ ID NO: 258770 - DNA, 1753 bp, Homo Sapiens
  misc_feature (136)..(166): n is a, c, g, or t
tacattcaatacttaagaatggcaaaggtggggagaggaggagaggaagccagtttggcctggaagcatcaacagttgactccaacaaaggaagcccagctgggctggaggaagttgggggtggaggtccggttgnnnnnnnnnnnnnnnnnnnnnnnnnnnnnnnggccacccacaaggaagcagagtgagcgtgcatgttcctgggggagggcaggaggctcagctgacatgctgctgctgggcactggagctcaggcgggctccgagttggtggggggcaggtttttatgcttgaaatactgcacaacttgttggggcagctccgccagcacagctttggccaaggtctcttttgctgcgttgcggaactctcgaaagggaacgaactgcacaatatcgcgggctgcctcctccccgtgtgggagcgcacatgcggctgtccccatccaggaactcccaaggcagcgaaggccgcattgcccaagcccacgatgatgatgggacatgggcaagcctggaagcctgcaccacgggcatgccggggtctcctccatgtcactggatgaccccgtccggtgatgatgaggaggatgaagtactgcggtggccgtccgctgttgtgtggcctgggccgcaaaccgggccacgtggttgacgatgggggagaaattggtaggaccgtagaagcggatgtggggcaggcaagctgagtacgcctgggcaataccatccacacctgagcagaaggggttggtggggttgaagttgatggcaaactcatgggagaccttccagtctgggggtaactgggccccgaatcccagagctggaaacatcttatcactgtcgtagtcctgaatgatctgcccaacagcccagatggccgacagatattcgttggtgcccatagggttgatatagtgcaaagaggaagggtcgaggggattcccgttggaagctgtaaagtctattccaacggtgaacatgagctggcagcctcccaggatgtagtcaaggaaggagtagtctcggtttatcttgcaggatcgcaggatgatgatgcccgagtttttatagttcttcttcttcctctgcttcttggggttgatgcactcgaactccagcgggacgctgtctcgagcctcacacatctgtgacactgaggtctggaactcgccgatgaagtcatggcccccatcattgtcatagtcgtagcacatgacctggatgggcttctccatgtccccatcacacagggacaccaagggcactgtgaatggcttccacacagggtccagtgtgtacttgatcacctcagtcctgtggaccagcatccacttgccatcgtctcctggcttataaaactccagaaaggggtctgacttcccaaagaggtccttcttgtccagcctcctgcccgccaggcttagtgtgatgacgcggttgtcggacagctcctgggcagcgatcgtaatcaagcccttccccgcaggcttgtcattcagcagcagcagaggcctagtgatcttcttgctggagacgatcgtgcccaggctgcaggagaactggcccaggaagtcatgctcgtccagccgcatactggacttgtcctggtcaaagagcgcgaacttgagcttctgtacctcctcgaagtggtagtcaagcacgaacttcttggagaaggcggggttgaggttgttgatcgcggtttctgtcctgtcgtactcgatccatctgccattgttctctg

SEQ ID NO: 258771 - DNA, 870 bp, Homo Sapiens
  misc_feature (687)..(687): n is a, c, g, or t
cggcgccacgggactttgacgcgtgctctgcgcttgccatgagactcctgggagctgcagccgtcgcggctctggggcgcggaagggcccccgcctccctaggctggcagaggaagcaggttaattggaaggcctgccgatggtcttcatcaggggtgattcctaatgaaaaaatacgaaatattggaatctcagctcacattgattctgggaaaactacattaacagaacgagtcctttactacactggcagaattgcaaagatgcatgaggtgaaaggtaaagatggagttggtgctgtcatggattccatggaactagagagacaaagaggaatcactattcagtcagcagccacttacaccatgtggaaagatgtcaatattaacattatagatactcctgggcatgtggacttcacaatagaagtggaaagggccctgagagtgttggatggtgcagtccttgttctctgtgctgttggaggggtacagtgccagaccatgactgtcaatcgtcagatgaagcgctacaacgttccgtttctaacttttattaacaaattggacccgaatgggctccaacccagccaagggcccctgcagcaaatgaggtctaaactaaatcataatgcagcgtttatgcagatacccatgggtttggaggggaattttaaaggatttgggnagaacctttttggagggaacgagccatctattttgatgggggactttggggcacttcctgaaggggatttccctccctctgctatgggaatggggatcgccagttctggcagtcaaattgtttcgatatggtgaggatcccagctgaaataaggggcgcgggccactgcccacccgcaggagc

SEQ ID NO: 258772 - DNA, 547 bp, Homo Sapiens
cagatactgcctgagcagccgcctgagggtctcggccaccttctggcagaacccccgcaaccacttccgctgtcaagtccagttctacgggctctcggagaatgacgagtggacccaggatagggccaaacccgtcacccagatcgtcagcgccgaggcctggggtagagcagactgtggctttacctcggtgtcctaccagcaaggggtcctgtctgccaccatcctctatgagatcctgctagggaaggccaccctgtatgctgtgctggtcagcgcccttgtgttgatggccatggtcaagagaaaggatttctgaaggcagccctggaagtggagttaggagcttctaacccgtcatggtttcaatacacattcttcttttgccagcgcttctgaagagctgctctcacctctctgcatcccaatagatatccccctatgtgcatgcacacctgcacactcacggctgaaatctccctaacccagggggaccttagcatgcctaagtgactaaaccaataaaaatgttctggtctggcctgaa

SEQ ID NO: 258773 - DNA, 1096 bp, Homo Sapiens
ggggggcttgctttccggtagcgtgggctgacgcctcgctcaatttctcacagggctgcgcaggtttcccccgtctgcgaatggaccactggaggggttcaaaggttcgcgtcccagtacgggaatgagcctctttgatctcttccggggctttttcggctttcctggacctcggagccacagagatcccttttttggagggatgactcgagatgaagatgatgatgaggaagaagaagaagaagggggctcatggggccgtgggaacccaaggttccatagtcctcagcacccccctgaggaatttggcttcggcttcagcttcagcccaggaggagggatacgtttccacgataacttcggctttgatgacctagtacgagatttcaatagcatcttcagcgatatgggggcctggaccttgccttcccatcctcctgaacttccaggtcctgagtcagagacacctggtgagagactacgggagggacagacacttcgggactcaatgcttaagtatccagatagtcaccagcccaggatctttgggggggtcttggagagtgatgcaagaagtgaatccccccaaccagcaccagactggggctcccagaggccatttcataggtttgatgatgtatggcctatggacccccatcctagaaccagagaggacaatgatcttgattcccaggtttcccaggagggtcttggcccggttctacagccccagcccaaatcctatttcaagagcatctctgtgaccaagatcactaaaccagatgggatagtggaggagcgccggactgtggtggacagtgagggccggacagagactacagtaacccgacacgaaagcagatagcagtccctagggggggatccaaaatcaccaaggaactccaaccccgggaagatgcccttttccatcctggaacttattcctggggaccgttgggtcccggtcccgggaagccctggtttaaccctcagaagggcctttcaggtcccttttccaccttctcaccccatttgccccaccattaaaataaagcttaagctttctccttgcccaccctccaggggggctttggac

SEQ ID NO: 258774 - DNA, 1750 bp, Homo Sapiens
  misc_feature (963)..(1057): n is a, c, g, or t
  misc_feature (1061)..(1062): n is a, c, g, or t
  misc_feature (1064)..(1065): n is a, c, g, or t
  misc_feature (1076)..(1084): n is a, c, g, or t
  misc_feature (1171)..(1183): n is a, c, g, or t
  misc_feature (1264)..(1272): n is a, c, g, or t
  misc_feature (1300)..(1313): n is a, c, g, or t
  misc_feature (1426)..(1440): n is a, c, g, or t
  misc_feature (1442)..(1454): n is a, c, g, or t
  misc_feature (1456)..(1470): n is a, c, g, or t
  misc_feature (1472)..(1474): n is a, c, g, or t
  misc_feature (1476)..(1481): n is a, c, g, or t
  misc_feature (1483)..(1483): n is a, c, g, or t
  misc_feature (1485)..(1493): n is a, c, g, or t
  misc_feature (1495)..(1495): n is a, c, g, or t
  misc_feature (1497)..(1497): n is a, c, g, or t
  misc_feature (1499)..(1501): n is a, c, g, or t
  misc_feature (1503)..(1504): n is a, c, g, or t
  misc_feature (1506)..(1507): n is a, c, g, or t
  misc_feature (1512)..(1512): n is a, c, g, or t
  misc_feature (1519)..(1534): n is a, c, g, or t
  misc_feature (1541)..(1541): n is a, c, g, or t
  misc_feature (1551)..(1655): n is a, c, g, or t
  misc_feature (1680)..(1680): n is a, c, g, or t
  misc_feature (1706)..(1706): n is a, c, g, or t
agccacagagatcccttttttggagggatgactcgagatgaagatgatgatgaggaagaagaagaagaagggggctcatggggccgtgggaacccaaggttccatagtcctcagcacccccctgaggaatttggcttcggcttcagcttcagcccaggaggagggatacgtttccacgataacttcggctttgatgacctagtacgagatttcaatagcatcttcagcgatatgggggcctggaccttgccttcccatcctcctgaacttccaggtcctgagtcagagacacctggtgagagactacgggagggacagacacttcgggactcaatgcttaagtatccagatagtcaccagcccaggatctttgggggggtcttggagagtgatgcaagaagtgaatccccccaaccagcaccagactggggctcccagaggccatttcataggtttgatgatgtatggcctatggacccccatcctagaaccagagaggacaatgatcttgattcccaggtttcccaggagggtcttggcccggttctacagccccagcccaaatcctatttcaagagcatctctgtgaccaagatcactaaaccagatgggatagtggaggagcgccggactgtggtggacagtgagggccggacagagactacagtaacccgacacgaagcagatagcagtcctaggggtgatccagaatcaccaagacctccagccctggatgatgccttttccatcctggacttattcctgggacgttggttccggtcccggtagccttgttaaccctcagaggccttcaagtcctttccacctctcacccattgcccaccattaataagcttagcttctcttgccacctcaggggcttggatatgtggaatagtgaactggggccatgtcagtttgtcactcacccaaactgaccaataaaacctttatttatgctannnnnnnnnnnnnnnnnnnnnnnnnnnnnnnnnnnnnnnnnnnnnnnnnnnnnnnnnnnnnnnnnnnnnnnnnnnnnnnnnnnnnnnnnnnnnnnaggnngnnacccaaaaccnnnnnnnnntattcccaaacccttgcgttgggggcgcggccacaagtggttgggggcccccgggcccccccggaatcctttagaaaaccttgtccnnnnnnnnnnnnnccgcaaatctaaaaaaaaaaaacggccaggggtgcccccaggaaaacaaacggaatgcaaaaggggtgtggctgccccccnnnnnnnnnccccccgggggagccccaggggcttctnnnnnnnnnnnnnngggccggcccgaccgccttgcgggttctgccgaaggcgcagggtcctcaaaaagaaacccccccgcctcaccagtgcacaaactgccgcccggagcagctctaaacaaaaaannnnnnnnnnnnnnngnnnnnnnnnnnnngnnnnnnnnnnnnnnngnnncnnnnnngncnnnnnnnnngngngnnngnncnnggggngtggccnnnnnnnnnnnnnnnncctggcngcgcccgggnnnnnnnnnnnnnnnnnnnnnnnnnnnnnnnnnnnnnnnnnnnnnnnnnnnnnnnnnnnnnnnnnnnnnnnnnnnnnnnnnnnnnnnnnnnnnnnnnnnnnnnnntccggtgccgcggtgcgctggtggntgctggcgcgctgcgtgcgcgcggcngttcggcgtccgttggcgtcggtcgctgcctgcccgcccgcgaa

SEQ ID NO: 258775 - DNA, 858 bp, Homo Sapiens; identical to SEQ ID NO: 165569

SEQ ID NO: 258776 - DNA, 792 bp, Homo Sapiens
gggacagggctgcgcaggtttcccccgtctgcgaatggaccactggaggggttcaaaggttcgcgtcccagtacgggaatgagcctctttgatctcttccggggctttttcggctttcctggacctcggagccacagagatcccttttttggagggatgactcgagatgaagatgatgatgaggaagaagaagaagaagggggctcatggggccgtgggaacccaaggttccatagtcctcagcacccccctgaggaatttggcttcggcttcagcttcagcccaggaggagggatacgtttccacgataacttcggctttgatgacctagtacgagatttcaatagcatcttcagcgatatgggggcctggaccttgccttcccatcctcctgaactttccaggtcctgagtcagagacacctggtgagagactacgggagggacagacacttccggactcaatgcttaagtatccagatagtcaccagcccagggatctttggggggggtccttggagaatggatgcaaaaagtgaatcccccccaaccagcaccagactgggggctccccagagggccattttcataaggtttgatggatggatgggcctatgggaccccccattccctagaaaccaggagaaggaccatggatctttggattcccagggtttccccaggaaggggtcttgggcccccggtttctataagccccccaagccccaaattccctatttttcaaagaaacatccctctgggggacccaaaaatcccccttatacccccaaat

SEQ ID NO: 258777 - DNA, 1726 bp, Homo Sapiens
  misc_feature (87)..(87): n is a, c, g, or t
  misc_feature (92)..(92): n is a, c, g, or t
  misc_feature (95)..(95): n is a, c, g, or t
  misc_feature (112)..(112): n is a, c, g, or t
  misc_feature (124)..(124): n is a, c, g, or t
  misc_feature (126)..(126): n is a, c, g, or t
  misc_feature (135)..(135): n is a, c, g, or t
  misc_feature (139)..(140): n is a, c, g, or t
  misc_feature (159)..(160): n is a, c, g, or t
  misc_feature (183)..(183): n is a, c, g, or t
  misc_feature (251)..(251): n is a, c, g, or t
gcacttgcaaatgccccctgaccctaaaccacccccagaagcttgacagtgctggcaaccagcagccacacagagctggacgtcccncaggnaancgagggcagaatggagnaggcgccacctncngccagcacnccgnncaggccacagcccagagcnncctcggtgtgtgatgaacccttncccccggaggttggccagggtggggctccacacagggcaccatgctccctgagccggagtccagtccncagcagtcgagccctaagacgctaaccaggaggtgtggagagccatggaggcaggtccgggcgactcaccggctgcgatcctggccgccttggcgtagttcccattctcgatgcaggagatcagctcactgcggtcctccagcgtgtgccgtcgcacaagagccggtttgccccgcccacatttgggcgcattaaagcttcgggaggaagagcagagggagtcaggcgccccgcccctgccttcagcctcactcgggcttcgtcccgtgagctgtccgccaccaagctggccacgcatcctgcctgacacccccgcggccagacgggcctgtgggtgcgcaggtctggagggagtgaacctgtggcaggggggactcaggaggccaaagtggccttcacagggcagacaggcagggctgtgctcattgccagattctgggaggtaaagatcaagtgtaaaacctcattgcagattctaaaagtgtgttcctatttcacgcagtgtttttcctacttctgcttgaattctataaagcagattaatatgcagcatgggaaactgtccacaagggcagagcacacatgaatcccaggccagaatttttcagagaacactaagatgggagctggaatgtcccggcttccaggacagccaggcggggcgggcggtgctgggagctgcgtggtgggaagcgcagggccgcggtgcccacctcgagtcgcagagcgggctgttgctggaggagatgctggactcggaggcacagcgtcgtcggggtgtggccttcctccccaggccgccgcccggctcctgctcgctcctcgcacccccaaagccgttggtgagacctggaacacaggcgggcaggccctgagctcagcacaaccagggcacactgaagcatgactcaacgacgttacacttggaacacatcttacaaagcacgtttcacagacaggtaagacagcatcttccttttcactcccaagttcccgagcatagtccttacagtaagcagacaccaaagttactcgttaaatgaaatcaacttaacaaactgcagtcggctccgatcgtagtagtttgctgagcaccatgaagatgctcctcttgacaagcccgggtctttagacaggctctgtgaaggcaaagaaaggatgccgtgagcctgccatgggggcagatgtgcaacctgtgagtgcaaacacgggggcggcctgtccacgtgggcaccggccgcgtttgaacggaaacttcaccaggccgaaggggccaccaaagacacaaaaacatgttcacaggagcagagctccagggaataggaaatcaggttttaaaaagaaaaaaccttggttcaaaagacaagtgttaacatgaagtcaaaaatgctgacgaaacactttaaaacacaaaatccggggccatcgccgtgtctgagtgtgtctggcctcactcaccatgaagctgcaagtac

SEQ ID NO: 258778 - DNA, 1343 bp, Homo Sapiens
  misc_feature (1309)..(1309): n is a, c, g, or t
ttggagggtcctcggatgaccatataatttactgcccaaaccaggcctctgagagtgggaaaaaaggaacaattcattattccactgggacaacatggtaaaccagatgtcacatttgggacaaaatggagctgctggtcactttatctgttgtccattggccaatttcagagtcaaagaaggcagccatcactatgcatctcctttctccatcatttttgggagctgccaataactttgagaacaagcccagcaaaatctcaacctgggtgagagccagcaactgccccgcaccatctagaagtccagaaactcaatgaacatggacaccctccccaccctcgcatctcctccccaaaccagaaaagagtcagactctggtcctagctcttggcatctgtcaccacccctcacgtgctacagagcagctgtctccccagcaagacatcagccatcctttctgcctcctggatgttgcctcttacctcaggtgtcccaggctgtagaagcgggactcgccatcggtggagcggaccacctgcagcgtgaacatgggctgcagctgcctgagctccagcaggacgatggccaggtaatggatgaagaggagggcatccacaagggagactgcatattgcacaatgccctggtaattccggtcccgagagtccaaaatgcggaccccgtaaaaaagccaataggaaaccacaaagagaaagatgaggaccaacaaaagggcacgaaacacaaacacccgtggcatgtcagctctccgcttgcggaaaaaaagtgcccaggtccctatgagcagaatgaggagtttgaatgccatggagataaagagcccctcacaaattgtgccacaaggctccagctcatccctccacaggatcggaggtaaaaggatgaaggcaataggggtgaggaaaactagaagtccaagaaaagaggcgacggtgaggcccaggtagcgtttgcaatccagccccacgctgtcctccatgtccttgctgatcctggcaatgtcctcttgggatatgctgtgctccgaggtgcctgtgatggccgtggtggtctctccccagttgtcatcctgaacttcctctgtccgagtagaatcatttcccaacaggggctctccagtgggaggttgaatggtgacagacttttctgaccctctgccgtctttattccggggtgacttgtgtctctctctagttctttccccttgtctgtgagattttttcgaatgacttgaatagtaagaatatccagaataagtggattcggtatccatagcaatggaggnttgcgcttgaggaaggagcaggtactgtttctcc

SEQ ID NO: 258779 - DNA, 814 bp, Homo Sapiens
  misc_feature (135)..(135): n is a, c, g, or t
ctatgcaagagtattgatgtatgtgctgaatcttcacagacttgtcaatacacaggcagtattctaaaatagcactgaacagggagtcaggagactattgtctcctaaacccaggactagagttccctcgtactntcactcctttggtcattaaatgcactgggcttgcccgcactttggccttcctagaacgctgcttcataacctctctgtctgacttctgcatctccttccaggtcagctcattcacaagagttgctcccaagcctggatgagttgcaccttgcatcttgagcatgcatttctcacaataattattaagctgtgtgataatttctgctttcaggacactcatcccattatcttgggctgtgagctcctggggtacgggtacctggtatgtttaattttatatccctagcacaaagccaagtgcctggcacatagtcagtgccctaagtatttgtagagtgaagaatgccagcctctcttgtccctggtttccttatgtgttgaatgtggttgagtttgtccattgctagggagagacttccagtaataaaatttacgtattctagatgcttcgtactgttatgttttatctgcccatttatctttcttagttaccaggagaaatgtgtgacacctatattataatgaaaacaatcttattacttatagtttatctatattaaacaaatttaattgcatttaaagcattctttgatattgttgcttttgcaataaatatggataatcttggttataagggagttaaaacaatgctgtaataaataaagtgtttcatgtgatc

SEQ ID NO: 258780 - DNA, 1827 bp, Homo Sapiens
  misc_feature (1660)..(1660): n is a, c, g, or t
  misc_feature (1662)..(1663): n is a, c, g, or t
  misc_feature (1666)..(1666): n is a, c, g, or t
  misc_feature (1704)..(1704): n is a, c, g, or t
  misc_feature (1746)..(1746): n is a, c, g, or t
  misc_feature (1771)..(1771): n is a, c, g, or t
  misc_feature (1797)..(1797): n is a, c, g, or t
  misc_feature (1799)..(1799): n is a, c, g, or t
gggagtctatgcctgtcgtggaagctggcctggcccccggagctccctggagtcggtactgggggcttcgttttgtacgcaccgttttctctctgtgctatgggagatgtcaaggaatcaaagatgcaaataacaccagaaactccaggaaggatccctgttttaaatccttttgaaagtcctagtgattattctaatctccatgaacaaactctcgccagtccttctgtttttaaatcaacaaaattaccatttttcactaaagatgtcatcgtaccctctccttggactgatcatgaagggaaacagctttcacaatgtcattccagtaaatgcactaacataaatagtgactctccagttggaaaaaagctgaccattcattctgagaaaagcgatgctgcttgtcagacattgctgtctcttcctgtggattttaatttagaaaatatattaggtgactattttagagctgatgaatttgcagatcaatctcctggaaacctcagttcttcatccctcagaagaaagctgtttttagatgggaacggaagcatctccgactccttaccttcggcttctcccggaagtcctcacagtggtgttcaaacatcactagagatgttttattcaatagatttgtctcctgtaaagtgtaggagccccttgcagacaccaagttcggggcagttttcttctagccctattcaggctagtgcaaaaaaatacagcttgggaagcataactagtccttcgcctatttcttcacccactttctcaccaattgaatttcagataggagagactccactctcagaacaaaggaagtttactgttcattctcctgatgcttcatctggaacaaattctaatgggataactaatccgtgtatcagaagtccttatatagatggctgctcgccaattaaaaattggtctcctatgagacttcagatgtatagtggtggtactcagtatcggacctcagtgattcagataccttttactcttgagactcaaggtgaagatgaggaagataaagagaatattccttccacagatgtctcatcccccgccatggatgctgctggaatacacctacggcagtttagtaatgaggcttctacccatggtacacatttggttgtgactgccatgtctgttacacaaaatcagtccagtgcttctgagaaagaattagcactgttgcaggatgttgaaagggagaaagacaataacactgtggatatggttgatcctatagagatagcagatgagaccacttggattaaggagccggttgataatggcagtttacccatgactgattttgtaagtggcattgccttcagtattgaaaactctcatatgtgcatgtcacctcttgctgaaagcagtgtcattccttgtgaaagcagcaacattcagatggatagtggctataatacgcagaattgtggaagcaatattatggatacagctggggcagaaagttactgcaaagaaagtgatgcacaaacatgtgaagttgagagtaaatctcaagcatttaatatgaagcaagaccacacaacacagaggtgttggatgaaaacagcaagcccttttcaatgcagcagtccatagaatacctctgtcagaatcaaagactaagcttaanannacntcgcatatatcgttgtgaacaggatcaacatgatggtnactgggaaaaaataacttcaagtaacatgcttagctttcccnccttaatgtgaaaaatcaagggctnactcacataggaacaacagaaatgcncnctggaacttcaagaaaaaaataataagt

SEQ ID NO: 258781 - DNA, 1539 bp, Homo Sapiens
  misc_feature (241)..(286): n is a, c, g, or t
  misc_feature (365)..(365): n is a, c, g, or t
  misc_feature (440)..(440): n is a, c, g, or t
  misc_feature (476)..(476): n is a, c, g, or t
  misc_feature (562)..(562): n is a, c, g, or t
  misc_feature (961)..(961): n is a, c, g, or t
  misc_feature (1044)..(1044): n is a, c, g, or t
  misc_feature (1071)..(1071): n is a, c, g, or t
caggtcatcaggtcccatcccttggtctaaggatggtgaaacattgtcacagccagcagctgccgtgttctgggactgtctcatggggcaatgtgtcctcacccccagcagtgccagcccaggtcagaaggcttcattcagaaggggggtgtcacagcacctggctgagcccccatggaggatggagacccacagatacacacaaacacacagagacatctccaaatctctgactcagacnnnnnnnnnnnnnnnnnnnnnnnnnnnnnnnnnnnnnnnnnnnnnnggcctttattctattacacagagtagggctggggccagggcaggtcattctcaggctgcgtcagaaggtgcagagcgtncgggggacacaggccgaaccccaaagtgataataagttacggggggatttctcaggctgttgtcaggctggagcnagggcaggacgccatgtgaggaccccagagccactnccagctgcccagctcagccgtcccaggcaagcctggttccaggacagactcggcctccacaggccctcagttcagctcctgcagantctcgtaatctggagccccctcttcctccacttcctctgcctcctgggaactcagggcggcaggctcagtcttagccgctccaggatgcagtacctgggacacattaacaaactcccggctgccatccagagacgcttctgcgctctccccgctctccggaacgttcacgtaatcatcaatggactccatggagaaggcactgtctcggatgccaggggtgctgagtgcaggagctgatggggcagcagtgctagtggccggggtgctgtcaggaagcaccaccaggtagcctgggttgtgatagtcgtcctcatcctcatctgcatcctcacaggctggttcctcgttctcgtagctcgccacactgttggcaccatcagaatcccgccgggaagatngcgtccggtgggagcccccaaggggctgcggggatcttgggatggggagcaggtctggctggctcaggggtgggtaggaggtnacaggtgggtaggcaggtggccagggngcaaccgtgtgaggccgtttgaactggatgccccttggatacaaactatctgaggatgtgctgtcgtaggagcctggcagtctgtggcagtgcacacacagtgccatcaacatggccaggatgggcagcagcaggagccccagcacgcaggggaccaggatggcctcctccatctgcaggggagctcggagcaggctggctgcacccctaggcccctcaagggcagagtcaaggccagatgaagatggggtgaggaccggacccggcagggagcagggggcaggtaggcaccaggtggcaggggagcccgggaggaggcagctgtgccctccccggggctcccgggatgggtcccctcttttactgggctgagtgtgcgtccagctgactgtggaaagtccctgctcccagggtggtcagaccagggcctgggctgaagtcgggggatccagttacccctgcgatccc

SEQ ID NO: 258782 - DNA, 1300 bp, Homo Sapiens
  misc_feature (15)..(15): n is a, c, g, or t
  misc_feature (17)..(17): n is a, c, g, or t
  misc_feature (31)..(31): n is a, c, g, or t
  misc_feature (34)..(34): n is a, c, g, or t
  misc_feature (41)..(41): n is a, c, g, or t
  misc_feature (46)..(46): n is a, c, g, or t
  misc_feature (48)..(50): n is a, c, g, or t
  misc_feature (60)..(61): n is a, c, g, or t
  misc_feature (83)..(83): n is a, c, g, or t
  misc_feature (87)..(87): n is a, c, g, or t
  misc_feature (104)..(104): n is a, c, g, or t
  misc_feature (106)..(106): n is a, c, g, or t
  misc_feature (118)..(118): n is a, c, g, or t
  misc_feature (129)..(129): n is a, c, g, or t
  misc_feature (133)..(133): n is a, c, g, or t
  misc_feature (140)..(140): n is a, c, g, or t
  misc_feature (166)..(166): n is a, c, g, or t
  misc_feature (182)..(182): n is a, c, g, or t
  misc_feature (245)..(245): n is a, c, g, or t
  misc_feature (261)..(261): n is a, c, g, or t
  misc_feature (313)..(313): n is a, c, g, or t
gggacgtaaaacggngnagcggaaactttgnccncatactnaaagntnnnggaggtccgnnaccacgtctccactcggcgagngtgnacgaagtggagttcttncnccgaatctccanccaggcgtggnaagntgtgganccgtcccagttctgggccacctgctnccacaggtgtttgaangtgggcacactgcctgtgaagttgatgccacagaggtgctctgagctggtgacagtgtccccnaaataggggcccatcngctggcacaaactggatgatgttggggggcaggccagcctcccgaaggatancggtagacagcatagctggccagcatggaagtgtcactgggcttccataggaccacgttgcccatcagggccagtgcccccgccaggttgccgccgattgcagtgaagttaaagggcgagatggccgccacgaagccctccagaccccggtacaccgtgctgttggtgctcgggggcacgctgatggctgctgcccctccagctccaccgcatacttggcattgaaccggaagaagtcgatgagttccgctgcagcgtcaatctccgcttggatcacggtcttaccctgtcccaccatggtcttggcgaggatctcagccctgcgcggcccactcagcatttctgccgccttcaggaagatctgggcccggtctgcaataggcttcaggtcccactctttccgggcagccagggcagcctcaatggctttgttgagcaggctcttgtctgcataacagaacttggccaccttatgtccatggttaaaaggcgacacttggtactgcacgtccgacgtccacacctcctcatcccccaccacgcatgggatggcttccatccggcccttcaggtccttcaaggccttttgcagggcatctcgctcagggctgccctgcgtgaaggctaagacgggctcgttggccaccttcagggaggaggtgtgcttccaccgcaggccggccccggtccaggggcgggacagcagggcgcggcggagcgcgggcgccggcagcagcatctcgggttagaagcggggctgttcgctggatcgtccgcccgggcgcggcgagaatgcacaaccccgtccagagcgcaccacctcgatcctcggggggaaacggatcaccccggctgtcctccgagctcgggatcagccaaagtcccactatacttagcttcggctaataaaaaatatttctagtgccataacgggggcattacacaacacaggacaagggaacccgaaagcgaagtcctgaaaaaaat

SEQ ID NO: 258783 - DNA, 995 bp, Homo Sapiens
gacaggtgccaaggggggcccccgccccaccaggaccaggggcagtgcgggaagcccaccatggtacttcacaagtgttcaaggcctccctcccctgtccaaccttgaactgctcctgtttttgagctgcgatgcgcttctggtccctcttccgccaggctgggttcgtgcaggtgacgaaatgtcttgtagcccagttgtgattcccgaggggcggaaaagctggagcccagctcccttaatgcgccggtagaactcgtcgtcctcgcggccccagccccagaagcggttggacatcccattgcacacccggtagtgctgcttggagagcagcaggatgccgccgacataggtcttgtagtggtagagagggtggagctcccggggaggccacgtggaagggcccagcctcaggaaagccatagtccagctcctcgttgagagggagcaggtcaacgtcgtgcatggcaatgtagtccgtgctgttgctgctctccaggaagcccacgttgatgagcgctgcccggttgaacctgaagtggtccacctggttgagcacgtagatgtggtgccggatcttcttcctgctcaggaagcggcgcatgtggggcacgaagaccaggagctcctcgaagcgttcgcggaagggcaccagcactgccaggcggtgggggccccaggatgcgtcttcttcccagtgctcagggggcggctctggggggcaggcacggggagggcccgaggtctcctgcccttgtcccctgactgcccgggccacgtccccagagcagctgagctgcagccagagtagggagaagaagcccagcgagaggcaggccacgaacaggtggaagacggaacacttccgagggaggccgccggagagcaacccggacctgccgtcctcccagggcagctgcgccgctttcctccgcgaggggaacatcgtgcggagaggcggcggcgcatggggcaggcgctcgcagcccggccgg

SEQ ID NO: 258784 - DNA, 1009 bp, Homo Sapiens
  misc_feature (796)..(796): n is a, c, g, or t
  misc_feature (957)..(957): n is a, c, g, or t
  misc_feature (973)..(973): n is a, c, g, or t
gtagcgaggcctgggtggcgaattcggcacgagggaccatcctggggcccccaccgcctggcagtgctggtgcccttccgcgaacgcttcgaggagctcctggtcttcgtgccccacatgcgccgcttcctgagcaggaagaagatccggcaccacatctacgtgctcaaccaggtggaccacttcaggttcaaccgggcagcgctcatcaacgtgggcttcctggagagcagcaacagcacggactacattgccatgcacgacgttgacctgctccctctcaacgaggagctggactatggctttcctgaggctgggcccttccacgtggcctccccggagctccaccctctctaccactacaagacctatgtcggcggcatcctgctgctctccaagcagcactaccggctgtgcaatgggatgtccaaccgcttctggggctggggccgcgaggacgacgagttctaccggcgcattaagggagctgggctccagcttttccgcccctcgggaatcacaactgggtacaagacatttcgccacctgcatgacccagcctggcggaagagggaccagaagcgcatcgcagctcaaaaacaggagcagttcaaggtggacagtggagggaggcctgaacactgtgaagtaccatgtggcttcccgcactgccctgtctggggggcggggtcccctgcactgtcctcaacatcatggtgggactgtgacaagaccgccacaccctggtgcacattcagctgagctggatggacagtgaggaagcctgtacctacangccatattgctcaggctcaggacaaggcctcaggtcgtgggcccagctctgacaggatgtgggagtggccagggaccaagacagcaagctacgcaattgcagccacccggccgccaaggagggctttggggctggggccagggacacgtgggggttgcctnggggacggttgctttnccattgcacaattgattcaagagaagaggtttgggg

SEQ ID NO: 258785 - DNA, 935 bp, Homo Sapiens
  misc_feature (15)..(15): n is a, c, g, or t
  misc_feature (36)..(36): n is a, c, g, or t
  misc_feature (132)..(132): n is a, c, g, or t
atttacagagaagtngcagagatagtacaaagagtncctgtatacccttcacccagcctaccccaaggtcaacatcttacatcaccatggtacaactgtcaaaaccaagagactgaaattggtaaataaacnaaaattcagacttttttcagaattccaattttcccactaatgtcctgtttttgttccaagacccaatccaggatgccacaatgcactgaagacactctcccttttcaattctataactggtcacctcagtcaactttcccggggaaagagaatgcatgggaaaagctcttgtccttattattgaactggagaaactgaggcttaaaagtgccgagtgaccaagtgcccttagagggcagtgagaacaaggcctgccttactctgtgccctttccccagggactcttggttttcagaagcccccctggaatgtcctacctggcctaaccccataccagcagtgcagacaaggaggcactcctacgacagtgggtccagcccatggagagactcacttcctgccccaacacctctgcccctagaccctgagggccaggacaatgtcttagtgcctgccaacttggcagagtgaggccccaggagacagagagaaagggggaagagggaaatacctttatccaaataaatacccatccaaaattatttgtgataggtgaaaaatggccacaagctctttgtggttcccctcatcaagacatgtagtctgtttctcatcccttgaatctgggtaaagccttgtgatttgctctgaccaaaagaacttagcagaagtgacactgtcctagtcccagttccaggccaagaactcaagaagtctttcagcttctactctcactctctttggaatcctgaagccatcatgtgaataagcctgagcgagcctgctggagaggccacatggag

SEQ ID NO: 258786 - DNA, 814 bp, Homo Sapiens
aaagcctcctggtagaagatgcagatacacaaagcaaggtgcaccagctatatgaaactatacagcgctgagccccattgcctccaccctccctgagctgattgcagagacttgtcaccatcaagcagcttgcacgagcaagccatgcagtgttggctcagctcctgacacacttggataccacccagcagatgattgctaattccttgaaggacaataccaccctcttgacccaggtgcagacaaccatgcgtgaaaacctggccacagttgaggggaactttgccagcattgatgaacggactgatagaagctgggaaagtgagcacatttgggagctggagaacaggggttatccctacccctgtgaactctgttaacagcttacatagggtttcccctttactataactctagcatccccatcccatttgacactgggggcaagggttcttcttgcatgtggggtttatacccctcccctgatgaatacagagtggtagctaggggttggttatcatcagaaggtggtctcccctcaggcctgggggataaggacgtgggcccagccacatgccaactcatgtccaatactgctttgcctggtgtggggaaggattgggtcttgtcccccaacacagcttctgtggctgactgtaatactgtacaactgtttctgaccattaaatgctgttgtactctgtgtggcctctgctgtgtttcctggggaggaagcagcactaggatatagatacttcatgtcgtcataacaggcaatctaagccactctatataacacgagggggatttaaac

SEQ ID NO: 258787 - DNA, 1510 bp, Homo Sapiens
gctgtgctactgctgtcgcgagacttcctgctcatctgccgctccctttgccgccgccttagcccgggacccgaacccagcctctcccctacccgaacaccggccccggctccaccgaggcccgggtcccccagcccgtctcgccgccgccatggcggaccctaaatacgccgaccttcccggcattgccaggaatgagccagatgtttatgaaactagcgacctacctgaggatgatcaagcggagttcgatgcggaggagctgacaagcacaagtgtggaacacatcattgtcaatcctaatgctgcctatgacaagttcaaggacaagagagtggggacaaagggacttgatttctcagatcgtattggaaaaaccaagaggacaggatatgaatctggagaatatgagatgcttggagagggtctgggagtgaaggagacaccccagcaaaagtaccagcgcctactgcatgaggtccaagagctgacaactgaagttgaaaaaatcaagacgacagtgaaggagtcagccacagaggagaagctgacccctgtgttgctggctaaacagctggcagccctgaagcagcagctggttgcttcccacctggagaagctgctgggaccagatgctgcaatcaaccttaccgaccccgatggcgccctggctaagcgcctactactgcagctggaagcaacaaagaacagcaaagggggatcagggggaaaaaccactgggacccccccagatagcagccttgtcacttatgaactacattctcggcctgagcaggacaagttctctcaagctgccaaagtcgcagaacttgaaaagcgcctgacagagctggagacagctgtacgttgtgatcaggatgctcagaatcccctttctgcaggtctacagggagcctgtctcatggagactgtagagctgttgcaagcaaaggtgagcgccctagaccttgcagttttggatcaagtggaggctcggctacagagtgtcctgggaaaggtgaacgagattgccaagcataaagcctctgtagaagatgcagatacacaaagcaaggtgcaccagctatatgaaactatacagcgctggagccccattgcctccaccctccctgagctggtgcagagacttgtcaccatcaagcagctgcacgaagcaagccatgcagtttggtcagctcctgacacacttgggataccacccagcagatgattgctaattccttgaagggacaataccaccctcttgacccaggtgcagacaaccatgcggggaaaaacctggccccagttgaaggggaaattttgcccagcatggatgaccggctgcaacaagctggggaaagggcgacacctttgggggagccttggagaaactgggccttaggcccctacccccgggggcaacttcgggttaacaggctgtacctaagggcctttccccttttgacacaaaagcgcctagggaccccccactcccccttggagcagc

SEQ ID NO: 258788 - DNA, 971 bp, Homo Sapiens
  misc_feature (843)..(843): n is a, c, g, or t
gtgatataaacctgcttaaaagcagctggtacggtccggaattccgggatatcgtcgaccacgcgtcggttgtgatcaggatgctcagaatcccctttctgcaggtctacaggggagcctgtctcatggagactgtagagctgttgcaagcaaaggtgagcgccctagaccttgcagttttggatcaagtggaggctcggctacagagtgtcctgggaaaggtgaacgagattgccaagcataaagcctctgtagaagatgcagatacacaaagcaaggtgcaccagctatatgaaactatacagcgctggagccccattgcctccaccctccctgagctggtgcagagacttgtcaccatcaagcagctgcacgagcaagccatgcagtttggtcagctcctgacacacttggataccacccagcagatgattgctaattccttgaaggacaataccaccctcttgacccaggtgcagacaaccatgcgtgaaaacctggccacagttgaggggaactttgccagcattgatgaacggatgaagaagctgggaaagtgagcacatttgggagctggagaacaggggttatccctacccctgtgaactctgttaacagcttacatagggtttcccctttactataactctagcatccccatcccatttgacactgggggcaagggttcttcttgcatgtggggtttatacccctcccctgatgaatacagagtggtagctaggggttggttatcatcagaaggtggtctcccctcaggcctggggggataaggacgtggggcccagccacatggccaacttcatgttccaatacttgcttttngcctgggtgttgggggaaaggatttggggtctttgtccccccaacacaggctcctggtggctgactggtaatactggtacaacctggtttcctggaccattaaaatgcctgtttggaactcctttacc

SEQ ID NO: 258789 - DNA, 1494 bp, Homo Sapiens
  misc_feature (1198)..(1198): n is a, c, g, or t
actcagtggtttcttggtgacactggatagaacagctcaagccttgccacttcgggcttctcactgcagctgggcttggacttcggagttttgccattgccagtgggacgtctgagactttctccttcaagtacttggcagatcactctcttagcagggtctgcgcttcgcagccgggatgaagctggtttccgtcgccctgatgtacctgggttcgctcgccttcctaggcgctgacaccgctcggttggatgtcgcgtcggagtttcgaaagaagtggaataagtgggctctgagtcgtgggaagagggaactgcggatgtccagcagctaccccaccgggctcgctgacgtgaaggccgggcctgcccagacccttattcggccccaggacatgaagggtgcctctcgaagccccgaagacagcagtccggatgccgcccgcatccgagtcaagcgctaccgccagagcatgaacaacttccagggcctccggagctttggctgccgcttcgggacgtgcacggtgcagaagctggcacaccagatctaccagttcacagataaggacaaggacaacgtcgcccccaggagcaagatcagcccccagggctacggccgccggcgccggcgctccctgcccgaggccggcccgggtcggactctggtgtcttctaagccacaagcacacggggctccagcccccccgagtggaagtgctccccactttctttaggatttaggcgcccatggtacaaggaatagtcgcgcaagcatcccgctggtgcctcccgggacgaaggacttcccgagcggtgtggggaccgggctctgacagccctgcggagaccctgagtccgggaggcaccgtccggcggcgagctctggctttgcaagggcccctccttctgggggcttcgcttccatagccttgctcaggtgcaagtgccccagggggcggggtgcagaagaatccgagtgtttgccaggcttaaggagaggagaaactgagaaatgaatgctgagacccccggagcaggggtctgagccacagccgtgctcgcccacaaactgatttctcacggcgtgtcaccccaccagggcgcaagcctcactattacttgaactttccaaaacctaaagaggaaaagtgcaatgcgtgttgtacatacagaggtaactatcaatatttaagttntgttgctgtcaagattttttttgtaacttcaaatatagagatatttttgtacgttatatattgtattaagggcattttaaaagcaattatattgtcctcccctattttaagacgtgaatgtctcagcgaggtgtaaagttgttcgccgcgtggaatgtgagtgtgtttgtgtgcatgaaagagaaagactgattacctcctgtgtggaagaaggaaacaccgagtctctgtataatctatttacataaaatgggtgatatgcgaacagcaaaccaataaactgtctcaatgctgaa

SEQ ID NO: 258790 - DNA, 1378 bp, Homo Sapiens
ggtaccggtccggaattacgggatatcgtcgacccacgcgtcgcggagtgcaggttcgggggtggaatccttgggccgctgggcaagcggcgagacctggccagggccagcgagccgaggacagagggcgcacggagggccgggccgcagccccggccgcttgcagaccccgccatggacccgttcctggtgctgctgcactcggtgtcgtccagcctgtcgagcagcgagctgaccgagctcaagttcctatgcctcgggcgcgtgggcaagcgcaagctggagcgcgtgcagagcggcctagacctcttctccatgctgctggagcagaacgacctggagcccgggcacaccgagctcctgcgcgagctgctcgcctccctgcggcgccacgacctgctgcggcgcgtcgacgacttcgaggcgggggcggcggccggggccgcgcctggggaagaagacctgtgtgcagcatttaacgtcatatgtgataatgtggggaaagattggagaaggctggctcgtcagctcaaagtctcagacaccaagatcgacagcatcgaggacagatacccccgcaacctgacagagcgtgtgcgggagtcactgagaatctggaagaacacagagaaggagaacgcaacagtggcccacctggtgggggctctcaggtcctgccagatgaacctggtggctgacctggtacaagaggttcagcaggcccgtgacctccagaacaggagtggggccatgtccccgatgtcatggaactcagacgcatctacctccgaagcgtcctgatgggccgctgctttgcgctggtggaccacaggcatctacacagcctggactttggttctctccaggaaggtagcccagcactgtgaagacacagcaggaagccaggctgagtgagccacagaccacctgcttctgaactcaagctgcgtttattaatgcctctcccgcaccaggccgggcttgggccctgcacagatatttccatttcttcctcactatgacactgagcaagatcttgtctccactaaatgagctcctgcgggagtagttggaaagttggaaccgtgtccagcacagaaggaatctgtgcagatgagcagtcacactgttactccacagcggaggagaccagctcagaggcccaggaatcggagcgaagcagagaggtggagaactgggatttgaacccccgccatccttcaccagagcccatgctcaaccactgtggcgttctgctgcccctgcagttggcagaaaggatgttttgtcccatttccttggaggccaccgggacagacctggacactagggtcaggcggggtgctgttgtggtggggagaggcatggctgggtgggg

SEQ ID NO: 258791 - DNA, 1577 bp, Homo Sapiens
gtacggtctggaatcttgggatatcgtcgaccacgcgtcgatggctgcggccgtggcggggatgctgcgagggggtctcctgccccaggcgggccggctgcctaccctccagactgtccgctatggctccaaggctgttacccgccaccgtcgtgtgatgcactttcagcggcagaagctgatggctgtgactgaatatatccccccgaaaccagccatccacccatcatgcctgccatctcctcccagccccccacaggaggagataggcctcatcaggcttctccgccgggagatagcagcagttttccaggacaaccgaatgatagccgtctgccagaatgtggctctgagtgcagaggacaagcttcttatgcgacaccagctgcggaaacacaagatcctgatgaaggtcttccccaaccaggtcctgaagcccttcctggaggattccaagtaccaaaacctgctgcccctttttgtggggcacaacatgctgctggtcagtgaagagcccaaggtcaaggagatggtacggatcttaaggactgtgccattcctgccgctgctaggtggctgcattgatgacaccatcctcagcaggcagggctttatcaactactccaagctccccagcctgcccctggtgcagggggagcttgtaggaggcctcacctgcctcacagcccagacccactccctgctccagcaccagcccctccagctgaccaccctgttggaccagtacatcagagagcaacgcgagaaggattctgtcatgtcggccaatgggaagccagatcctgacactgttccggactcgtagccagcctgtttagccagccctgcgcataaatacactctgcgttattggctgtgctctcctcaatgggacatgtggaagaacttggggtcgaggagtgtgtttgtcacttggttttcactagtaatgatattgtcaggtatagggccacttggagatgcagaggattccatttcagatgtcagtcaccggcttcgtccttagttttcccaacttgggacgtgataggagcaaagtctctccattctccaggtccaaggcagagatcctgaaaagatagggctattgtcccctgcctccttggtcactgcctcttgctgcacgggctcctgagcccacccccttggggcacaacctgccactgccacagtagctcaaccaagcagttgtgctgagaatggcacctggtgagagcctgctgtgtgccaggctttgtgctgagtgctgtacatgtattagttcctttactgctgaccacattgtacccatttcacagagaaggagcagagaaattaaagtggcttgctcaaggtcatgcagttagtaagtggcagaacaagggacttgaaccaagccctctgctctgaagaccgcgtcctgaatttcttcactagagcttcctcatcaggttacccagaagtgggtcccatccaccatccaggtgtgcttggatgttagttctccaccctcgaggtgtacgctgtgaaaagtttgggagcactgctttataataaaatgaaatatattctacttc

SEQ ID NO: 258792 - DNA, 1302 bp, Homo Sapiens
  misc_feature (510)..(510): n is a, c, g, or t
  misc_feature (1277)..(1277): n is a, c, g, or t
  misc_feature (1289)..(1289): n is a, c, g, or t
  misc_feature (1297)..(1297): n is a, c, g, or t
gtcccaggctccacacggctgcaagatgcagctccctcgaggccaccactcttaggctaggcgggacccaggctgaggggcttcacacactacccacgtcccaccgggcccttccgtgaggctgccctgcgggccgccctggcatcagccgccccagggctctggatatgccacttggccccgttggcaccctgtgcagccaggagccagggcggctgacagcagagccccggggactgggccttccccgccccagcatccaggcgaggctctcccggagttgggagagcgtgcccacagcatcacctgcctccaggagcaccgaggagaagtccaggggccagagccgcaggaagccgtcctcagagcccacagcacacatggccggggagacgctgagactgctgatggcaatgccggggcctgggggcagggaggcgtcagtgcctcggtgtccctgccaccctggccacgtggtgggcgccctcttacctgagctgaaggtctgcntctgtgggtggggaccgcctggagtccgtgtggggagcaggcggcgggcatgccgcacgaccatgcgctgacagtcaatctccaagatgtggccactgcggctgcacacgaagctgcccgaggaggcggcagggaagtccacggggcaggaacgcagcgccccgccacgcagccgccagagccgcacactgccctgcccgcacgacgccatcctgcaagaaatgaggactgagcactgccgcagctcgcagcgccctgacccaccgggagacgcagagacgcacagccaagccagggggaggtgctcgggcctcggcccccactccgggcccagaccctctcccaacatcgtggatgggcggctgcatcacctggtttcatcaaaaaaggtgacccggaaggcctggacgtcaaagtcagtgtgcgcctttgccagaacgaccacctcgccaccgaggcccacctggccggtgccccaggccaccaccatctgcaacaagcccaggctgagcccgcacggcagggccagtcggggccacctcgattctgcaaggcccagccgagccccacccggaggtggcttttctctcatgcggagaccagcctctgagcgtgcggccgtggagagtggaaggaaaccagcccctccatcttctcatcctgaagctttgggacttctacagagacccgcaatgctgagcactgcaacccattcgcagagaagtacaaacccccccgcaagcccggaaggtggataaaaagccgcncgtggctgggcncagtggcncattc

SEQ ID NO: 258793 - DNA, 1498 bp, Homo Sapiens
  misc_feature (517)..(527): n is a, c, g, or t
  misc_feature (617)..(635): n is a, c, g, or t
ttgatattcagcacaggcagctaggatttaaaccctccctgatcttgagacagagaactttacccaaaagatgggactgagttcagatttcagatacattaatcactcatcattgcttagattgatgaaagtatcttttccctctgttaataattaaaagggaaaaaaattctttgttaatgctgtatttttctgtccaaacaggttgaaacagttcctcaggctacagtgaagactggattacagaaagggtcggcggaccggggagtgcagggctctgtcagattcagtgacagctccgtctccgcagcgattgaggaaactgtggactgagattcctgtacaatttcatcccagaaactccagacttgtagtctccatgcaagatttctttgtcggcggcttgataaacagtttctttgttttcgattttgatttcgccaatcatcattattggcattttcctgcctggtttcttcttcaagactctgaacaattgctttaacagtcaaatgannnnnnnnnnncggtttgagctggatgggtacagcttaaatcatgggtccagcctaaaaaccaccatttaacttacactgatcaatttcaacatggactgnnnnnnnnnnnnnnnnnnnaaataaagcatcattaatgcacatctgcaggggtttgccaaacagcccaaactgtatacattacaatcattaaaagttcttattttttttaatattagtgccgttatcatggagaacagcatgacagctgtctttggcagtctgtcatttttctagcattttcagaaactcatcggaaatggcggtacctgtgtttcccttcgaaagcctctcagtacagcactcctgttcctctgttaaaactccttgttaatccagtgatcttttaggccaaggaaatattttgtgatggtgttctgggtccatacaccagcaatgaaggagatagatttgtgtacttgtgttttttaatcagcattaacatgggcaggcacccctcatttataaatgtcaggaaaacattcagtgaaaaacttgttagaatgggatgtgataacgaggttccagtaatctgagcagtctaacgaggcccacctcctccaccacagaacgtggctatgttccaagtgctactctcactcagcctgttgcggatcttcatggcctcaggagacttgtttctccatgggctcttctggactgcacacttccaccatagcttgctgggttgatctagatgtctgtttgttgtatggaaattttgggggaaaaaatccaaaacacaaactgtgggttgaaatattaaccgtctccttggttccttggtattcgaccgtgcctgatctgcacatttcatcgtggctgtttctgtatagcctatactgcattagcccaagagattgttgctttgtaactttttgcactattgttttggctggatttgtattacacacagttttaaaaaaaacaattccacactaaaa

SEQ ID NO: 258794 - DNA, 1387 bp, Homo Sapiens
  misc_feature (603)..(603): n is a, c, g, or t
  misc_feature (1029)..(1029): n is a, c, g, or t
  misc_feature (1056)..(1056): n is a, c, g, or t
  misc_feature (1071)..(1071): n is a, c, g, or t
  misc_feature (1100)..(1100): n is a, c, g, or t
  misc_feature (1285)..(1325): n is a, c, g, or t
tggttcttcccaaccatcttacgacgctttattactgtgatttcagagaagaaacaggcttacagaggttaagggcttgagaccactcaactggttttaagtggaatccagaccagaggtgccggctccacgtctactgccctttccacggtgccatgctgcctcccacaaaacatccacagtgcccttggccaatgaggggccgccatcggaggtcacaggaagccttttcacagtccctctggggcatgagtggggagcagctcttctccccagagctttaaagccccatcgaggaaggggtgagaactgacctcctgaagtgcccgagtgtgtgtgtacgggggagagtgggactcaatttttatttttgaaaacctcatggcacagagtttccttatattccccaggtcccacaagagtaccaggtgccatttcagaaccacctttctaaacctctgcccacccactgaaagcaacacggcccttcacagcctggcttccttcttttgacacacagcccttccgctccagtggagaatcgccaaagatcatgaagggtaaatagtctcctctgaacccctggtctgggaaacccgtttnaaccccggggggagcccagtggccactggtgctgcccaggggctgctgtggggcagagataacacacagaggaagggtggggtggcaggagccctcccaggagcagggcttgcctgtaaacaatgagctgccgcctcgccaaggcaggaggtgattcatctcccccgctgctcagctcctgctggctgcgctcaccgggcaccaaaggactgggggcagccctggccaggcgctgacgcctccccactctctgcacaggtcaggatctcaccccagcccttctggaaactggcttgacttcaaaagccttcctgggtgtgtccaaaaagtgatctggtctggggagtgctcaagtgcactcaagggagcacagctccaccatcacccgagaaccctgctggtttttggatcaagggcgcagatggngcatacgttggggctcgggactcccgnctgttcatgcccagnagcatacaccgataacaaccgtgacttcntgggttacccccttttgacaacgttccaaggcttcattaccctgttgtaaccctggggcaaagttccaaccaaaacttttgatctttgggggacaattgagcttaaactttttcctgccaacacaatgcccgggaaggccccgcctttttgaaatcccccaagtgaagaaaacggggcctttttnnnnnnnnnnnnnnnnnnnnnnnnnnnnnnnnnnnnnnnnnccctttcccaaaagcccggggttccccgggtggcctgtgctttccatttggggaaggcccac

SEQ ID NO: 258795 - DNA, 436 bp, Homo Sapiens
  misc_feature (42)..(42): n is a, c, g, or t
gagatcctgacctgtgcagagagtggggaggcgtcagcctgngccagggctgccccagtcctttggtgcccggtgagcgcaccagcaggagctgagcagcgggggagatgaatcacctcctgccttggcgaggcggcactcattgtttacaggcaagccctgctcctgggagggctcctgccaccccacccttcctctgtgtgttatctctgccccacagcagcccctgggagcaccagtggccactgggcttccccccggggtttgaaacgggtttcccagaccaggggttcagaggagactatttacccttcatgatctttgggcgattcttccactgggagcggaagggctgtgtgtcaaaagaaggaagccagggtgttaaaggggccttgtttgttttcagtggggttgggcagaagttttagaaaaggtt

SEQ ID NO: 258796 - DNA, 1156 bp, Homo Sapiens
  misc_feature (91)..(91): n is a, c, g, or t
  misc_feature (478)..(478): n is a, c, g, or t
  misc_feature (573)..(573): n is a, c, g, or t
agagtgttctgcagaggctgcgtattgagggctgctctctgaagctccctgccccaggtcacgccgccggttccagatgaatccagagtgngggcaggccttcgtgcacgtggccgtggccggtggcctctgtgccgtggctgtgttcacgggcattttcgacagtgtttccgtgcaagtgggctatgagcactacgccgaggcgcccgtggccggcctccctgccttcctggccatgccgttcaactcactcgtgaacatggcctacacgctgctggggctgtcgtggctgcacaggggcggcgcgatggggctgggtccccgctacctgaaggacgtgttcgcagccatggccctgctctatggccccgtgcagtggctgcgcctgtggacgcagtggcgccgtgccgcggtgctggaccagtggctcacactgcccatctttgcatggcccgtggcctggtgcctctacctaganccgcggctggcggcccgtggctgttcctctctcttgaggtgcgtctccctggccagttatggcctcgctctgctacatccccagggcttcgaggntcgcactgggtgctcacgtggtggccgctgtggggcaggcgctgcgcacccacaggcactatggcagcaccacctcggctacctacttagctttgggggtgctctcttgcctgggctttgtggtcctcaagctgtgtgaccatcagctcgcacggtggcgtctcttccagtgcctcacaggccacttctggtccaaggtctgtgacgtgctccagttccactttgcgtttttgtttctgacgcatttcaacactcacccaagattccatccctctggcgggaagacgcgttgaacccagggaagaacctgctgaaaaccgatgacccccagcattgaaatggactctgagatggcagcgtggtgccagtgtcagacatcctgtgtgtgatgatatgcactgattacacaagactgccctttcctgagaagctgcgggcttcggtgtggaggggtggagtgctgtgatctcgacaacttactttcaaagacataaagcacagatctccgcacaggggatgtgtgtgttcctgatgtaatttgcataacttttctgtagtttgaaatgtttccaaataaatattg

SEQ ID NO: 258797 - DNA, 914 bp, Homo Sapiens; identical to SEQ ID NO: 73314

SEQ ID NO: 258798 - DNA, 878 bp, Homo Sapiens
cctttctgaaaaaaacagcatgggcacctttcctatatcaaaaagagacacctcccaatccataaaaataaaggtcaccctgattaaaccctaaacaaagccaaaaaaaattgcaaccccacaaacgcccaaaggcccagattcccaagtagatcagagtttttgaagcccaagttcaaagtaaaaacacttccactacacctttagaataaaagtaatacataaagatagccacaaatcctttcaaggtaaaagaacccttacctgaccacacaaaaccaacgggtgtctggcaccaccgaagggcagcccagcgcctgctgttgttgatcacaacagtccagtacataggggcaattcaaagccagtcctcctgggacgccagaagggcatatgaaaaaacccgtgccagagccccagcgcaaggcgacccctcccctgcccagaaagaaaacctcagggacgcagggaataaaaggccacctcaagggtgcacagccaatcgtgcaacatcacataccaccaaccaatttgaagacagttcctgttgagaataaaccacggtttccatgaaaacacagcagcgctgaagctttagacccaggacgaggccatgcaagatgcaaccgcgccagggaacgaccgagtcggcacacaggagccagccccagtgcctattgaaccgtttgaacaacactacctacaagaacctgcagcatcatgactacagcacgtacaccttcttagacctcaacctcgaactctcaaaattcaggatgcctcagccctcctcaggccgggagtcacctcgacactgagggctcctcggtgtgaagatgaaccttccaccgtcttcactgcatcctggagtgcaaaaa

SEQ ID NO: 258799 - DNA, 442 bp, Homo Sapiens
  misc_feature (352)..(352): n is a, c, g, or t
  misc_feature (381)..(381): n is a, c, g, or t
  misc_feature (391)..(391): n is a, c, g, or t
  misc_feature (421)..(421): n is a, c, g, or t
  misc_feature (429)..(429): n is a, c, g, or t
gcttggtgcgcccgctgtcaccgccatggctgccccgtgtttgctgcggcaaggacgagccggggcgctgaagatgtagtggaaccaaaggagaggggcaagctcctagccacccagacagcagctgaattgtctaaaaacttatcttcacccagttcttacccgccagctgtgaataagggcaggaaggtagctagtcccagtcccagtggcagcgtgctattcacagatgaaggggttccgaaatttttgtcaagaaagactttggtagagtttccacagaaagttctgtctccatttcagaaaacagggctctgattcagaagctcgtcaggttggggtcggaaagtgnacgtcgcctttcgtctttcatccttcgtncaggttcctntgaattctggaattctgaatggattgaggncttgaacntttttcagaaggg

SEQ ID NO: 258800 - DNA, 716 bp, Homo Sapiens; identical to SEQ ID NO: 15544
  misc_feature (473)..(482): n is a, c, g, or t
  misc_feature (485)..(485): n is a, c, g, or t
  misc_feature (488)..(491): n is a, c, g, or t
  misc_feature (495)..(553): n is a, c, g, or t
  misc_feature (626)..(626): n is a, c, g, or t

SEQ ID NO: 258801 - DNA, 1037 bp, Homo Sapiens
ctttgcccaaagacccctgtgtggggcagctgagcagcctggagcctcagggagagcaggtcgaggtggacagctggtgaaagaatgatgctcgagttgctgcaactgaagctctgccccaggggtgcttggagatctcgaagggatgcattctgagccgagaatgtccactgtgctgcgtgggggaaggacacattgtactccaccgccatgtagctcaggtagacaaccttctgctggaggtcctgcatgaatccaaagctgaggtgtccataggggaatgagagaagcaggtggggatgggcaccctcacagcttccctggaccttggttttgttggggttcagtacagagatgccccaggcctctcctccaccctgggttgtgtacatgactcgaatctgaatctgggcttggaggtggacacagggctgggaaccattggtccacgtgtagtctccaatggtctccttggaggttgggctaggactcggagagggtggaggtggttctgggtgggcagaactggtgaatcctgggctggtggcagtgctgttgcttgttggatgaaccgtggcatttccatgactagtggtggcaggactgtgagtggcagttgagggtccctggctggtggcagtgctattgcttgttggatgaactgtgacgtttccatggctggtggtggtggggttgtgagtggcagtcgtgggtccgtggctggtggtgcctgtggtggttgtcctgtgagtggtggttttgtggctcttggtagtcctgtggctggttgttccagtgctctctgtaaccgtgggtgtcaccgtgaaggatggcagcaaagtagctgattttttgtgaggacagtcattccctgtcccctgggctgccagtagccccagcagggcccccgagaaaagcacagccagcctcatggctgaaccgcctcacccaaagtccagctaggctgtctgcaccagttgctcaaccctgctccctcagccctctcttggaaaggaggaaatgaaagtctcacatcc

SEQ ID NO: 258802 - DNA, 950 bp, Homo Sapiens
  misc_feature (295)..(295): n is a, c, g, or t
  misc_feature (368)..(368): n is a, c, g, or t
  misc_feature (607)..(607): n is a, c, g, or t
  misc_feature (619)..(619): n is a, c, g, or t
  misc_feature (636)..(636): n is a, c, g, or t
  misc_feature (695)..(695): n is a, c, g, or t
  misc_feature (717)..(717): n is a, c, g, or t
  misc_feature (726)..(726): n is a, c, g, or t
  misc_feature (908)..(908): n is a, c, g, or t
ggaagacgcctcgcaagagaggaatctgttctctggacgatattaattagcattttgaaactggtacttgaaattctcttttgagtcgttgaccacactctgggatataaaaccctccatctgtgaagctgattgcagtttgctgtgaaccttgctacttgtacttggttgaagttctaggtacctttagtcaagggatggaaaaataaagccatacgcagttttgttacctcagttaccccaaaaataggaaaagcagcaagcacagtattttaaagatcataattcctataanaggactgttcacaaagtgtttagactccattttcattaggcaggttgactaaaaagttacaggtttatataanatagagcaacctttcatgctgtgacacaaatcaaaaggttgataactttgtaattttactctggagattctaaccgaagttggtgtaagttttcaagagttactaaaatcaagttggaaatgatttacgtacacttccctgagcctggactaaagcctcatgcctgtgccccaagtaggtgatggtacttttctatacaaaaaggatttcctggcaggcaggtatttacaaagtttgtncctgtaccagtncaataatgacaactctnaatccagctgcaccaaatcttagtgggccatttgtcatacctatgaaaattcttcagtnattaaataactttgtcagtgcnacctatggnaggccggaaacaatgtagattaggaagtttcatgaaaattaacttttggggttatggagaaacagttaagtatcttaagttactaaacatttccactgaatttttggagtgagccaaggttactataaaatactttggaagatgaattctctacctggagttagtttcgagagtaagcgtantttctaacagaaataactgcagattttaagctcataatttgc

SEQ ID NO: 258803 - DNA, 1714 bp, Homo Sapiens
catgtacaagaagagcctccacataacggcgggggcagcgcagctgagcagcgtgagaagatcaagcagttctcccagcaggaggagaagaggcagaagtcggagcggctgcagcaacagcagaaacacgagaaccagatgcgggacatgctggcgcagtgtgagagcaacatgagcgagctgcagcagctgcagaatgaaaagtgccacctcctggtagagcacgaaacccagaaactgaaggccctggatgagagccataaccagaacctgaaggaatggcgggacaagcttcggccgcgcaagaaggctctggaagaggatctgaaccagaagaagcgggagcaggagatgttcttcaagctgagcgaggaggcggagtgcccaaacccctccaccccaagcaaggccgccaagttcttcccctacagttctgcggatgcttcttaacaaccgcccggggctgtggctggcagcttggtgggccccagggccttctccttcattctctgtgaacatgtaactcaggaccccttttccctcttgcgtctgtgccagctcaaatccagcccctcgccctgtgccaccccaactgtgcctgatagacctgccccagcgttcctgacttcttgctggcctgtggagggtgaggtgtaattatttgtcacctgaacctaatgtatattctccttgagccccagatcccttcaagctggaagggatggggctgttggtggggtcagggtccaagaggaatgggtgttctgtggcctcgagtcctctcctgtttgcgaaaataccagttttgctctctgtgggacaaagcactgctgatgaagtccccgtgggctcatccaggctggaattcttggtttttcagccattccctgcagagtcactcaatcatcaagtccctcacagccatttctgttcccagaggagccaggcctgcagctggctgctcaggagatggcctcattcctcctgttctcccagtttgctttccacttaagacaaagccttgtctatgtggggggcggggaccggggaaagagggaggctgaaatgtttattctgcttctcccgtgtttcatgccatctcgcgtcccccttcctgcacatgggtgtgaatgcacacacatacgcgtacacacaggacttggtctgctggcctggcctcttctgcccaggtgggttggaacacgtttgctgcctgagcctgtgccactgagcatgttaggtggagcagttggtgtggcacgtgcggggtgttggcaccggaggcatggaaaagcacaggctgtactgccaggctgcgatgcgtgctggcccccgcacaggctcctgtgtgcagggactgattcctcagcacacgaggcttccacaacccagtctgctccatagcactctggcccaccctgtctgcaggtgaaacaggagggctgtttgcctctgccccatccccccgactgtgttcaggagtcccaccttgcatttcagacctgggctggcagtctgttggacttctcttcaggaagaaaaagcatcagggggaaatggaatgcccctgccccaggaacatggcagaagcacaggttctgtacctcagatggactcctgctgggcttcggggtctcagttggcttcccccagattctgattctacagctgcagaatgtatataacgcaataaaagcaaatgtttgaaccagta

SEQ ID NO: 258804 - DNA, 467 bp, Homo Sapiens
  misc_feature (302)..(302): n is a, c, g, or t
  misc_feature (454)..(454): n is a, c, g, or t
gagattgctgataattaaaattcactgagatttatttctgtatagagtgtgcattctagaaactaactaaaagtattacatatgcacaaaatacataaaagagttgcacaatgaatccaaagtgctgggattacaggcatgagccaccgtgcctgcctttcattgcctcttgaaaagagcttgtcttgtttatactgtagaaattccttgagctcataggcattgctcagggtcagatgacagttctgagacttcactgagttgctgggaacgaggggagaggctgccacggcccgacaaantgtccctggtgaggtgaagacttcctttgtcttttccctggaccccactatcctgctgtgggagaggggcagcccccaccagccctggtttttccttctaggtctatcatctcatgaagaactgctgggagacagaggcgtcctttcggccnaaccttcgaggaa

SEQ ID NO: 258805 - DNA, 588 bp, Homo Sapiens
ctgacgcactgtgactccagccagagcccccccacgatattcccttgagctcatacgcattgctcagggtcagatgacagttctgagactcactgagttgctggaacgaggggagaggctgccacggcccgacaaatgtccctgtgaggtctatcatctcatgaagaactgctgggagacagaggcgtcctttcgcccaaccttcgagaacctcatacccattctgaagacagtccatgagaagtaccaaggccaggccccttcagtgttcagcgtgtgctgaggcacaatgggcagccctgccttgggaggactggaccaggcagtggctgcagagggagcctcctgctccctgctcccaggatgaaaccaagagggggatgtcagcctcacccacaccgtgtgccttactcctgtctagagaccccacctctgtgaacttatttttctttcttggccgtgagcctaaccatgatcttgagggacccaacatttgtaggggcactaatccagcccttaaatcccccagcttccaaacttgaggcccaccatctccaccatctggtaataaactcatgttttctctga

SEQ ID NO: 258806 - DNA, 1589 bp, Homo Sapiens
  misc_feature (43)..(43): n is a, c, g, or t
  misc_feature (86)..(86): n is a, c, g, or t
  misc_feature (93)..(93): n is a, c, g, or t
  misc_feature (216)..(216): n is a, c, g, or t
  misc_feature (222)..(222): n is a, c, g, or t
  misc_feature (235)..(235): n is a, c, g, or t
  misc_feature (238)..(238): n is a, c, g, or t
  misc_feature (260)..(260): n is a, c, g, or t
  misc_feature (280)..(280): n is a, c, g, or t
  misc_feature (306)..(306): n is a, c, g, or t
  misc_feature (595)..(595): n is a, c, g, or t
ggcggtcctcggagtacagctggtggtgaccctgctcactgcnaccctcatgcacaggctggcgccacactgctccttcgcgcgcnggctgcnctgtaacggcagtgtgttccgatacaagcacccgtctgaggaggagcttcgggccctggcggggaagccgaggcccagaggcaggaaagagcggtgggccaatggccttagtgaggagaagcnactgtntgtgccccgagangcnccgttccagctggagagctgcnccctcacgaccgtggatgcnctggtcctgcgcttcttcctggagtnccagtggtttgtggactttgctgtgtactcgggcggcgtgtacctcttcacagaggcctactactacatgctgggaccagccaaggagactaacattgctgtgttctggtgcctgctcacggtgaccttctccatcaagatgttcctgacagtgacacggctgtacttcagcgccgaggaggggggtgagcgctctgtctgcctcacctttgccttcctcttcctgctgctggccatgctggtgcaagtggtgcgggaggagaccctcgagctgggcctggagcctggntctggccagcatgacccagaacttagagccacttctgaagaagcagggctgggactgggcgcttcctgtggccaagctggctatccgcgtgggactggcagtggtgggctctgtgctgggtgccttcctcaccttcccaggcctgcggctggcccagacccaccgggacgcactgaccatgtcggaggacagacccatgctgcagttcctcctgcacaccagcttcctgtctcccctgttcatcctgtggctctggacaaagcccattgcacgggacttcctgcaccagccgccgtttggggagacgcgtttctccctgctgtccgattctgccttcgactctgggcgcctctggttgctggtggtgctgtgcctgctgcggctggcggtgacccggccccacctgcaggcctacctgtgcctggccaaggcccgggtggagcagctgcgaagggaggctggccgcatcgaagcccgtgaaatccagcagagggtggtccgagtctactgctatgtgaccgtggtgagcttgcagtacctgacgccgctcatcctcaccctcaactgcacacttctgctcaagacgctgggaggctattcctggggcctgggcccagctcctctactatcccccgacccatcctcagccagcgctgcccccatcgggctctggggaggacgaagtccagcagactgcagcgcggattgccgggggccctgggtggcctgcttactcccctcttcctccgtggcggtcctggcctacctcatctggggggacggctgcctgccagctgctcgccagccttttccggcctctacttccacaagcacttggcaggctcctagctgcctgcagaccctcggggggcccctgaggtctggtcctggggcaacggggacactagcctggccccctctgtttggcgccccctggtccccaacttggcaaggggggggccggaattccccgggggtttcccttcaccacagc

SEQ ID NO: 258807 - DNA, 1062 bp, Homo Sapiens
agagtgcccggagccctaggccggtgggtgagtgcaccgcgttctcgcacgcgtcatggcggtcctcggagtacagctggtggtgaccctgctcactgccaccctcatgcacaggctggcgccacactgctccttcgcgcgctggctgctctgtaacggcagtttgttccgatacaagcacccgtctgaggaggagcttcgggccctggcggggaagccgaggcccagaggcaggaaagagcggtgggccaatggccttagtgaggagaagccactgtctgtgccccgagatgccccgttccagctggagacctgccccctcacgaccgtggatgccctggtcctgcgcttcttcctggagtaccagtggtttgtggactttgctgtgtactcgggcggcgtgtacctcttcacagaggcctactactacatgctgggaccagccaaggagactaacattgctgtgttctggtgcctgctcacggtgaccttctccatcaagatgttcctgacagtgacacggctgtacttcagcgccgaggaggggggtgagcgctctgtctgcctcacctttgccttcctcttcctgctgctggccatgctggtgcaagtggtgcgggaggagaccctcgagctgggcctggagcctggtctggccagcatgacccagaacttagagccacttctgaagaagcagggctgggactgggcgcttcctgtggccaagctggctatccgcgtgggactgggcagtggtgggctctgtgctgggtgccttcctcaacttcccaggcctgcggctggcccagacccaccggggacgcactgaccatgttcggaggacagacccatgctgcagttccctcctgcacaccagcttcctgtctcccctgttcatcctgtggctctggacaaagcccattgcacgggacttcctgcaccagccgccgtttgggggagaccgcgttttctccctgctgtccgatttctgccttcgactctggggcgccctctggtttgcctggtgggtgctgggccctggcttgccggccttgccgggtg

SEQ ID NO: 258808 - DNA, 956 bp, Homo Sapiens
  misc_feature (636)..(636): n is a, c, g, or t
gcgttctcgcacgcgtcatggcggtcctcggagtacagctggtggtgaccctgctcactgccaccctcatgcacaggctggcgccacactgctccttcgcgcgctggctgctctgtaacggcagtttgttccgatacaagcacccgtctgaggaggagcttcgggccctggcggggaagccgaggcccagaggcaggaaagagcggtgggccaatggccttagtgaggagaagccactgtctgtgccccgagatgccccgttccagctggagacctgccccctcacgaccgtggatgccctggaggcctactactacatgctgggaccagccaaggagactaacattgctgtgttctggtgcctgctcacggtgaccttctccatcaagatgttcctgacagtgacacggctgtacttcagcgccgaggaggggggtgagcgctctgtctgcctcacctttgccttcctcttcctgctgctggccatgctggtgcaagtggtgcgggaggagaccctcgagctgggcctggagcctggtctggccagcatgacccagaacttagagccacttctgaagaagcagggctgggactgggcgcttcctgtggccaagctggctatccgcgtgggactgngcagcggtgggctctgtgctgggtgccttcctcaccttcccaagcctgcggctggcccacacccaccgggacgcacggaccatgtcggaggacagacccatgctgcagttcctcctgcacaccagcttcctgtctcccctgttcatcctgtggctctggacaaagcccattgcacgggacttcctgcaccagcccgccgttttgggggagaacgcgtttcctcccctgctgtcccgatttctgccccttcgactcctggggcgccctctgggtttgcctgggtgggtgcttgttgccctgcctgccggggctgggcggta

SEQ ID NO: 258809 - DNA, 1087 bp, Homo Sapiens
  misc_feature (94)..(94): n is a, c, g, or t
  misc_feature (237)..(237): n is a, c, g, or t
  misc_feature (268)..(268): n is a, c, g, or t
  misc_feature (490)..(490): n is a, c, g, or t
  misc_feature (541)..(541): n is a, c, g, or t
  misc_feature (1018)..(1018): n is a, c, g, or t
  misc_feature (1048)..(1048): n is a, c, g, or t
  misc_feature (1071)..(1071): n is a, c, g, or t
  misc_feature (1082)..(1082): n is a, c, g, or t
agaagagtagagctgtggcatctccagactaggcctttccacccacccacccccagttaccctcccagccacctgctgcatctgttcctgcctncagccctaggatcagggcaaggttttgcaagaaggaagatctgcactactttgcggcctctgctcctccggatcccccacccccagcttcctgctcaatgctgttcagggacaggttggcgcaggtgagcctgacaggccccnacaggagcccagatggacaagcctcagcgtnaccctgcaggcttcttcctgtgaggaaagccagcatcacggatctcagccagcaccgtcagaagctgaaccagcaccgtatgggctagggtgggaggctcagccacaggcagaagggtgggaagggcctggagtctgtggctggtgaggaaggaaggagggtgtattgtctagactgaacatggtacacattctgcatgtatagcagcgcagccagcaggtngcaatcctggctgtccttctatgctggatcccagatggactctggcccttncctccccacctgagattagggtgagtgtgtttgctctggctgagagcagagctgagagcaggtatacagagctggaagtggaccatggaaaacatcgataacccatgcatcctcttgcttggccacctcctgaaactgctccacctttgaagtttgaactttagtccctccacactctgactgctgcctccttcctcccagctctctcactgagttatcttcactgtacctgttccagcatatccccactatctctctttctcctgatctgtgctgtcttattctcctccttaggcttcctattacctgggattccatgattcattccttcagaccctctcctgccagtatgctaaaccctccctctctctttcttatcccgctgtcccattggcccagcctggatgaatctatcaataaaacaactagagaatggtggtcagtgagacactatagaattactaaggagaagatgcntctggagtttggatcgggtgtaacaggtanaagtagtatgttgcagagaaaanaaatatcaaantgtat

SEQ ID NO: 258810 - DNA, 1295 bp, Homo Sapiens
ggggcatttgcagagtgagacaaagcggagaacgctggtgggcctgttgtggagtacgctttggactgagaagcatcgaggctataggacgcagctgttgccatgacggcccaggggggcctggtggctaaccgaggccggcgcttcaagtgggccattgagctaagcgggcctggaggaggcagcaggggtcgaagtgaccggggcagtggccagggagactcgctctacccagtcggttacttggacaagcaagtgcctgataccagcgtgcaagagacagaccggatcctggtggagaagcgctgctgggacatcgccttgggtcccctcaaacagattcccatgaatctcttcatcatgtacatggcaggcaatactatctccatcttccctactatgatggtgtgtatgatggcctggcgacccattcaggcacttatggccatttcagccactttcaagatgttagaaagttcaagccagaagtttcttcagggtttggtctatctcattgggaacctgatgggtttggcattggctgtttacaagtgccagtccatgggactgttacctacacatgcatcggattggttagccttcattgagccccctgagagaatggagttcagtggtggaggactgcttttgtgaacatgagaaagcagcgcctggtccctatgtatttgggtcttatttacatccttctttaagcccagtggctcctcagcatactcttaaactaatcacttatgttaaaaagaaccaaaagactcttttctccatggtggggtgacaggtcctagaaggacaatgtgcatattacgacaaacacaaagaaactataccataacccaaggctgaaaataatgtagaaaactttatttttgtttccagtacagagcaaaacaacaacaaaaaaacataactatgtaaacaagagaataactgctgctaaatcaagaactgttgcagcatctcctttcaataaattaaatggttgagaacaatgcataaaaaaagttgcacaagttccttattttccttaatatttcacttctatttaatacaagctgggacataaaaattctgttggggatacctgggggaagatgtgagaaactaatgctgaattcagcttatacatgatgaaaagaaaaaccagacaaaaggagcacataaatatgcatacagtgtaactgttattattttaatacccacgataagggatttttgttagcatgtttagggggaacgaggattggtgggatccttgggccacaggaatctgaggc

SEQ ID NO: 258811 - DNA, 1315 bp, Homo Sapiens
  misc_feature (1024)..(1033): n is a, c, g, or t
  misc_feature (1047)..(1047): n is a, c, g, or t
ctgcgcggatcggcgtccgcagcgggcggctgctgaggtgccccctgataagtgccgatgtgccgtgggcagcatcctgagtgaaggtgaggaatcgccctcccctgagctcatcgacctctaccagaaatttggcttcaaggtgttctccttcccggcacccagccatgtggtgacagccaccttcccctacaccaccattctgtccatctggctggctacccgccgtgtccatcctgccttggacacctacatcaaggagcggaagctgtgtgcctatcctcggctggagatctaccaggaagaccagatccatttcatgtgcccactggcacggcagggagacttctatgtgcctgagatgaaggagacagagtggaaatggcgggggcttgtggaggccattgacacccaggtggatggcacaggagctgacacaatgagtgacacgagttctgtaagcttggaagtgagccctggcagccgggagacttcagctgccacactgtcacctggggcgagcagccgtggctgggatgacggtgacacccgcagcgagcacagctacagcgagtcaggtgccagcggctcctcttttgaggagctggacttggagggcgaggggcccttaggggagtcacggctggaccctgggactgagcccctggggactaccaagtggctctgggagcccactgcccctgagaagggcaaggagtaacccatggcctgcaccctcctgcagtgcagttgctgaggaactgagcagactctccagcagactctccagccctcttcctccttcctctgggggaggaggggttcctgagggacctgacttcccctgctccaggcctcttgctaagccttctcctcactgccctttaggctcccagggccagaggagccagggactattttctgcaccagcccccagggctgccgcccctgttgtgtctttttttcagactcacagtggagcttccaggacccagaataaagccaatgatttacttgtttcacnnnnnnnnnnacccacctaaaaanaaccctgttcggccgccctccggccctcgaaaaaactttcctaaaccatttcggtttggccgcccgggccccactaggttaagtggaacatgggttcttaacctgtttcccaaggaagattccgggccatgaactaagtggcttggaattcctcccccaataaaaaaaccgcccgggcgggaaacccgaagggttcttgaaacaaattccagaaggggaagtcttgaaggccccttcaccggggaactcttcaacccgggagttccca

SEQ ID NO: 258812 - DNA, 990 bp, Homo Sapiens
ggtttcagtccccaggggtcccagcccgtgacttcccctaaggggccccctcggccctccaagtcccagttcctcaaaagaggagcccgctggcacctgactcgcggtagctgtgctcgctgcgggtgtcaccgttcatcccagccacggctgctcgccccaggtgacagtgtggcagctgaagtctcccggctgcccagggctcacttccaagccttacagaactcgtgtcactcattgtgtcagctcctgtgccatccacctgggtgtcaatggcctccacaagcccccgccatttccactctgtctccttcatctcaggcacatagaagtctccctgccgtgccagtgggcacatgaaatggatctggtcttcctggtagatctccagccgaggataggcacacagcttccgctccttgatgtaggtgtccaaggcaggatggacacggcgggtagccagccagatggacagaatggtggtgtaggggaaggtggctgtcaccacatggctgggtgccgggaaggagaacaccttgaagccaaatttctggtagaggtcgatgagctcaggggagggcgattcctcaccttcactcaggatgctgcccacggcacatcggcacttatcagggggcaccatgtgggggttgtcatagtagacagcgatggagcggagcttgggagagatgctgcagctctcagtgaaaagccgcccagtctcaccatagagccccatgtggaacttgtaggccacagtgacgttgcggatggggggtgacccagcactcacttccaccccagccagtagccctgagtacccggcaaaggccagcagcgtcagcagcagtaagagagtcaggcccccaatcaggcccagtagtagcaggtccgacatggctctggatccccaacactgcacctcaaggcagctcagcagccgcccgctgcggacgccgatccgcgcaggcggctcagggttcggttacg

SEQ ID NO: 258813 - DNA, 865 bp, Homo Sapiens
  misc_feature (90)..(90): n is a, c, g, or t
  misc_feature (92)..(92): n is a, c, g, or t
  misc_feature (113)..(114): n is a, c, g, or t
  misc_feature (155)..(155): n is a, c, g, or t
  misc_feature (157)..(158): n is a, c, g, or t
  misc_feature (166)..(166): n is a, c, g, or t
  misc_feature (176)..(176): n is a, c, g, or t
  misc_feature (181)..(184): n is a, c, g, or t
  misc_feature (187)..(187): n is a, c, g, or t
tccggaattcccgggatctgccgtcggctccgcggggggggcgggccgggcaccccggggcgcggaggagcgctcctcgcttctctcctncncccctgccgcactccgccggnncctcccgccggcccgcgccgctgcactcgccctctcctctnanngcccggtnaagtttgggngcgtnnnngcncctcgcccgttattcgtcgtggctcaagcccggccacgccgccccaagggctcctcccgacctcccggcctgccgctccggccactgcgggatccagaaacatgtcgaccacacttctgtccgccttctacgatgtcgacttcttgtgcaagacagagaaatccctggccaacctcaacctgaacaacatgctggacaagaaggcggtggggacgcctgtggccgccgcacccagctcgggcttcgcgccgggattcctccgacggcactcggccagcaaactgcatgcactcgcccaccccgcgcccagccccggcagctgctcgcccaagttcccgggcgccgctaacggcagcagctgcggcagcgcggcggccggcggtccgacctcctacggcacccttaaggagccgtcggggggcggcggcacagccctgctcaacaaggagaacaaattccgggaccgctcgtttagcgagaacggcgatcgcaaccaacacctcctgcacctgcagaagcagcacaacgggggcggcggagtctcagattaactccccgcgctccaagaccgagctgtgcccccccttccagcacacggcacgagccaaatacagagaaacagaccagtgcgaggaagggcttcaccgagatgcggaagcggagtggcgtcccaagggc

SEQ ID NO: 258814 - DNA, 1197 bp, Homo Sapiens
  misc_feature (11)..(11): n is a, c, g, or t
  misc_feature (33)..(33): n is a, c, g, or t
  misc_feature (61)..(61): n is a, c, g, or t
  misc_feature (65)..(65): n is a, c, g, or t
  misc_feature (79)..(79): n is a, c, g, or t
  misc_feature (113)..(113): n is a, c, g, or t
  misc_feature (136)..(136): n is a, c, g, or t
agatgtatgtnatgggggagggtagaagcagtnggtatgggaaaaaacaaaggggaatgtnaganctgggctggggcangggctagtccatctcataatccatactaccagcntcaaatgtccttgagtgcaaganagcaatcgtcatcacccacgatggccctggaccaaacgaaggcagtttgggcctataccccaagtcaatatggtggcttccatcatccaggatggctgccctgcagagtccagtgtggtagctgatggcagttcaggatggctgttcacatggtccagtgtggccccttgatcctctctagcgcatagaagcttcctctgcatatgatgtatagcagctcttttcctccaagtcctcttgtttgagaatgtagtgggcagactagatccttcttggcccagccaaaggagcttcagccttcagaagccaaggagcatgggagggaggagacatttgccagtgcccaactctgggctcctcctcccatgtgcctacggcaggtgggatctccccaggtggaacgtctacccctgtcgggaccttgttctggttccgcttggtcccatgtggccaggccctcaggggcctaggcttttcatgctggtgcctgtgcccgcagaagctgagctcagggcctggccaggacatagcggctggcagctgagaggtcccactggtaatgctccaggatgcgccagcagtcagctctggaccggctactcaggtggaagagctgatctaccttgaggttccggatggcagaaaccacatctcccccagtggctcctagtgctgtctggcactcctggtgggtgaccccatgcacactcagctccatctttcatcctctccaggggcatgttcctcctcttggccccgtgctgggggcgcatcccaaagatttgccttctttctgtctccatctatgcttcctgggtgttgatctccccggccaggggtgcctctgtggactggacgggtggctggcaagccccccgcatctgccagcgtcactgccgaggctgggaagctgcccactttgaaggtgcgaccattctggcccttccagattgtggagtcggggctgccctcgatgactgtgatggggtcaccagtctccatcctcagggcgcctggttctgtgacatccctcacacaacatgcttccgaaggcccggcct

SEQ ID NO: 258815 - DNA, 1243 bp, Homo Sapiens
  misc_feature (87)..(87): n is a, c, g, or t
  misc_feature (89)..(89): n is a, c, g, or t
  misc_feature (439)..(439): n is a, c, g, or t
  misc_feature (568)..(568): n is a, c, g, or t
  misc_feature (611)..(611): n is a, c, g, or t
  misc_feature (1213)..(1213): n is a, c, g, or t
gcgagacgccggagcgtgtccccgtccggcagactactctcccccatggcggacttcgctgggccgtcttctgccggccgcaagcgngnctccccgctgctctcgaaaagccgcagtactaaacagacaagtactttgaaacaagaagatgcttctaaaaggaaagctgaactagaagcagctgtgagaaagaagattgaatttgagaaaaaagctctacatattgttgaacagcttttagaggagaatattacagaagagttcctaatggagtgtgggaggttcattacacctgctcactacagtgatgtcgtggatgaacgttctattgtcaaactctgtggttatcctttatgtcagaagaagctgggaattgtaccaaaacagaaatataaaatttctaccaaaaccaataaagtctatgatattactgaaaganagtctttttgcagcaatttttgttatcaagcatctaagtttttgaagcacaaattcccaaaactccagtatgggttcgagaagaagagaggcatcctgattttcaactgctaaaggaagaacaaagtgnccattctggagaagaagtacagttatgcagtaaagccattaanacatcagatatcgacaatcctagccactttgaaaagcaatatgaatctagttcttctagcactcacagtgatagtagcagtgacaatgagcaagactttgtttcctccattctaccaggaaacagaccaaattcaacaaatattagaccacagctgcaccaaaaaagcataatgaaaaagaaagctggtcacaaagctaactccaaacacaaagacaaagaacagacagtagtagatgtcactgagcagttaggcgattgcaaattagatagtcaggagaaagatgctacatgtgaacttcctttacagaaagtaaatactcagagttcttcaaatagcactttgcctggaagattaaaagcgtcagaaaattctgaaagtgaatacagtaggtcagaaataactctagtaggcataagtaagaaaagtgcagagcattttaagagaaaatttgccaaatcaaaccaagtgtctaggtcagtgtctagttcagtgcaggtgtgtcctgaagttgggaaagagaaacttacttaaagttttgaaggagactttgattgagtgggaagacaggaggaaacctttgaggttttttgtatgggccngatttatgcttctgtgtgtctggaaacccg

SEQ ID NO: 258816 - DNA, 1782 bp, Homo Sapiens
  misc_feature (1111)..(1111): n is a, c, g, or t
  misc_feature (1747)..(1747): n is a, c, g, or t
  misc_feature (1756)..(1756): n is a, c, g, or t
gtccgtcggcacgtcggccctgcctcccggaccaccctgcggggcgcaccagcgatctggggtgcggggctcggcctccctgcgctcctggctgacggtgtgaccttgggcaagtctggcctgctgggccttagtttccctctctgcagcagggacttgggggtggtgaacttaatgagccgtatactcccacccagcgctcacttcctgaggctttgtgactttctgggagggatggggacgtggaaggggccttaaagcagtcccccctcgtcactgccccccacaggtcttaaccatgaacttctctggaggagggaggcaggaagcagcagggtccaggggtagaagggctcccagaccccgagaacaggaccgagacgtgcagctgtccaaggctctgtcctatgccctgcgccatggggccttgaagctggggcttcccatgggagctggtaagtaggggccttggaggctggggcttgagcccagagagaaacgtgagcctgtctgcgactcctccctgatggctgcctccaccgctccctgaggaaggcacagagtgcacttcctccccatgcacagaggagagcaaggcctagagcccctgtcatgtccacagcagactgaggagagttcttgtctgggccaggcctggtgaccgccccctccagccaagcagccagatcagcacttaccccgagggcgagccctggagggtacggtgcagctggtggtgtgagtgtgcactccgggccagcgctatgctgggcactcacctccctgcccctccgtgaggcagatcctctttttatgtaagttgaaaaaactgcggcccagaaaggggagactttctaaaggtcccacagaggatgcccaagcgatctccaagcacagactttgtttcggttgcctgtggctccctgttaaccctggcccagtccagagcaaggttagctcctgagcaccctgcctgcccacagatggcttcgtgcccctgggcaccctcctgcagttgccccagttccgcggcttctctgctgaagatgtgcagcgcgtggtggacaccaataggaagcagcggttcgccctgcagctgggggatcccagnactggccttctcatccgggccaaccagggccattccctgcaggtacctaagttggagctgatgcccctggagacaccgcaggccctgcccccgatgctagtccatggtacattctggaagcactggccatccatcctactcaaaggcctgtcctgccagggaaggacgcacattcacctggccccaggactgcctggagaccccggtatcatcagtggtcagtgccctcccctccacctagctactcccacccactctgtcctcccaggtccccttcaaaggttacaacacttgtctggggccaccccatgtccggcatggagcagcacccctgcatcccccagcccaggaccccagtctgcctaggttgctgactgcactccaggtgcccaggcctcagctccagctgtctctgcaggcatgcggtcccattgtgaaatagctgtgttcatcgatggacccctggctctggcagatggaatacccttctcccgctctgccaatggggtgattctgactccagggaatactgatggcttcctccttcccaagtacttcaaggaggccctgcagtacgccctacccgaaagcccctttccttggctggtgatgaagagacagagtgtcagagtagcnccaagcacngctccagagaaaggaggaggatccaa

SEQ ID NO: 258817 - DNA, 958 bp, Homo Sapiens
  misc_feature (9)..(9): n is a, c, g, or t
  misc_feature (22)..(22): n is a, c, g, or t
  misc_feature (30)..(30): n is a, c, g, or t
  misc_feature (33)..(33): n is a, c, g, or t
  misc_feature (44)..(45): n is a, c, g, or t
  misc_feature (49)..(49): n is a, c, g, or t
  misc_feature (51)..(51): n is a, c, g, or t
  misc_feature (57)..(57): n is a, c, g, or t
  misc_feature (63)..(63): n is a, c, g, or t
  misc_feature (75)..(75): n is a, c, g, or t
  misc_feature (104)..(104): n is a, c, g, or t
  misc_feature (135)..(135): n is a, c, g, or t
  misc_feature (140)..(140): n is a, c, g, or t
  misc_feature (168)..(168): n is a, c, g, or t
  misc_feature (215)..(215): n is a, c, g, or t
  misc_feature (946)..(946): n is a, c, g, or t
  misc_feature (950)..(951): n is a, c, g, or t
agactgttnttccatatcactntgatttgncanaggaatctganntttntncctgtnttttcnagtagagttatngaaggctgccagggatttcgaagttgcancctttataggataactgatggcaatattaantcagncgcctgcttttgctaatttcttacaagnctgtaaattccaaagatctgaatggggctttcctgatgttggtatcntaaggcttaggccctatagattgatttaccctttggaattgtgctccaaatgtctactgaagcttaaccgaagaactaataaatggactacagtagctcacgttacagggaaggagggtaggcagggaggctctgtgtgttaaaatgagggtctcactgctttaggattgaagtggctggaaagagtgatgcctggggaaggagatggagttatgagggtactgtggctggtactttctgtactaaacatttcctttttctattttaccactaattttgttttaaactgtgagccgtccaagtcagaagaagacagcaaaaaaagcaacttttccaacatacaatttacttttaataaagtatgaatatttcattttgagaacattccctggaattgccacataattcattaaaaacatttttttaagcaacacttggaacagtgtttactttaaatccttaatggccttaattaattctcagattcctgccccatcacttacagaaccaattcactttagagtgactaaaaggaaacgatagcctagctttctaaagccacgctgtgtccctcaattacagagggtaggaatgggtatacctctaactgtgcaaagcagagtgaaattcaattcatagaataacaactgctgggaatatccgtgccaggaaaagaaaaatttctggcaaatattttgtcactgctgtaaagcaaaatattgtgaaatccncccnntaaagtc

SEQ ID NO: 258818 - DNA, 1134 bp, Homo Sapiens
ttacggccggaatctcgggatatcgtcgacccacgcgtcggttgaaaggagctccagaggagtggagttctgtgttgctcacatgttaaaatcttgctcaccttcagagcagagggaatacctatcttcagatatccgtccattttcatctcttaattgtagtcaaaagtatgacttgagagtgttgctctggtattctgggttctgaagtctggtattctggtattctgggttcaaaagtatgacttgagagtgttgctctggtattctgagagttgctctgtattctgggttctgaagattatttgaaaaataactcctactacattgaaatgcagacttaaaaatttaaacattggattaggcagtcaaaaaaaccaagcaagcataaaaggtcaataagttgtaatcttgatagtaaaggtggaaaacttattataaatggaaagaaagttttatttccttttttgtttgatgggcagtatgccatattatacccaaagttcttttaaaaaatatttccatcaaccatttttatttaaaataaacatttgagggaagttaccaaggcagcttttttcctcaaaagtaacctgttcctctttggaatagcacattttaggggcatggttaatacctgagatttttactcagtaaatcctgatggttactgtgtgtaaaatatctttaagtaggattgaaggcctctgtgggggaataaaatattaccaaagtctataaaaataaattttacatgttctcttttatgacagagagcagcactggttctgttatttttaaaatgaataattgatttcttgataggtgtttaatatttcttccctcactgctgattcttagatagaaaccattctttatatttgatagactgctttcagaaaacccttatcaacaagtgtacaatacttatctaaaactatacatttagaatggagcagtttaatactagatctcagaagttttgaaaaatagcaaagaagactggatttggaaagcatggtctacaattggttgttaaattctgaagctatgaagaataaatgtttcaactttggattatgaaaccccatttatgattttttaaatacacttgaaataaaaatgattaaacta

SEQ ID NO: 258819 - DNA, 1587 bp, Homo Sapiens
  misc_feature (103)..(160): n is a, c, g, or t
  misc_feature (1162)..(1162): n is a, c, g, or t
  misc_feature (1167)..(1167): n is a, c, g, or t
  misc_feature (1283)..(1283): n is a, c, g, or t
  misc_feature (1289)..(1289): n is a, c, g, or t
  misc_feature (1328)..(1328): n is a, c, g, or t
  misc_feature (1342)..(1342): n is a, c, g, or t
  misc_feature (1346)..(1346): n is a, c, g, or t
  misc_feature (1359)..(1359): n is a, c, g, or t
  misc_feature (1367)..(1367): n is a, c, g, or t
  misc_feature (1372)..(1372): n is a, c, g, or t
  misc_feature (1384)..(1385): n is a, c, g, or t
  misc_feature (1387)..(1387): n is a, c, g, or t
  misc_feature (1392)..(1392): n is a, c, g, or t
  misc_feature (1397)..(1397): n is a, c, g, or t
  misc_feature (1425)..(1425): n is a, c, g, or t
  misc_feature (1441)..(1441): n is a, c, g, or t
  misc_feature (1444)..(1444): n is a, c, g, or t
  misc_feature (1459)..(1459): n is a, c, g, or t
  misc_feature (1473)..(1473): n is a, c, g, or t
  misc_feature (1490)..(1490): n is a, c, g, or t
  misc_feature (1515)..(1515): n is a, c, g, or t
  misc_feature (1518)..(1518): n is a, c, g, or t
  misc_feature (1521)..(1521): n is a, c, g, or t
  misc_feature (1542)..(1542): n is a, c, g, or t
  misc_feature (1549)..(1549): n is a, c, g, or t
  misc_feature (1556)..(1556): n is a, c, g, or t
  misc_feature (1564)..(1564): n is a, c, g, or t
  misc_feature (1568)..(1568): n is a, c, g, or t
ccttaaaatccccccacaaaaaatggccggaaatggcaaaaagccttttgccccttttcaagatcgggtttgggacagatcccacaattcccaaaaagggctnnnnnnnnnnnnnnnnnnnnnnnnnnnnnnnnnnnnnnnnnnnnnnnnnnnnnnnnnngggtttaaagcccacccaccggccatgtcggccgccacggggacaagcacctcacggccacctcggccggcatggtgcccaaaacgggcttccttcgcacaatccccaagcccactgaaacgcccagggccacggcaaactcctgggcacaacccgggagcccaccccttcggtgaccggcgcgcaggccatcttcgcgcagagggtgctctgccgctcccagagggaccctctcggacctgctgcgcaaccccaaaccctggagcaaactcaaatccggcggggagaccttccggaggatgtggaagtggctgcaggagccggagttccagcgcatgtccgcgctccgcttagcagggacagcgagggaagctcgtacggcctgaggcggagagaaatccccgcacctggtgagacactctgcgccacctctcagttcagcgatccgggtttgggaagagggatgcaacgcgtgcgtggaatcgcacgcaaatgttcctcgcaggtacctctgacacatcccaggcgctgggctggagcgtgccggagcagcgtcgatgtttggccgaactggctgctgtgaccccctcccgcgctcattcttttggcgctggctggggtgacctcaatctaagagtatgggcaaaaagtttcagagccattgcgcggtgggtgtgtagcacagacgagttgtaagggttaggacgctctctgcgcatggaattggctgtggaaaggagagggaggctgaccgtcccaaggtcccagtgagagctgcaaagcaatagccatgtcctgggaccgactccgctgccgactccctgaggactttgcattttgtgtttattattcctcttcgcgattttcgtctgaatccccgtgcgggaggggggtttggggatgagagtgtgtaaatgacccccaagtctaggagcagaggtctcctgcccgaaaccccaagccccaggtgtttctgagttcagctggaagctctccttggcncagcncagacaccgcgcctggctccccgagaccgcggataggcagagaagaaagctgagcccagcccgaaccccaccggggatttcaggaggattcggcgacccttgaggctcttgtgctnccggcnccatatctccacccgtgggctgcccgcgagcaactgagnttccggagggagtnggcnaaggggcttctcntcttcctnactgntccttttctccnntntccangcggnagagtggtggcttctccacgcccttctntcctccagtttcctgnttnttgttgcagaggttnaaaaccttcttgcncttggcgctttgtttgnggaggctccttccggtcacgaaatnacngcngctggtggaagaagggctacnggagganattcccnccaaattnactnccttttaaaaatcaatata

SEQ ID NO: 258820 - DNA, 960 bp, Homo Sapiens
  misc_feature (462)..(462): n is a, c, g, or t
  misc_feature (508)..(508): n is a, c, g, or t
  misc_feature (512)..(512): n is a, c, g, or t
  misc_feature (958)..(958): n is a, c, g, or t
ggggcttcctcttggcgggtgggctgcagctatggagggcgagcctccacctgtggaggagcggcggcggctgcaggaggagctgaacgagttcgtggagagcggctgccggacgttggaggaggtgaccgcgtccctgggctgggacctagatagtctggatcccggggaagaggaggcggcggaggatgaagttgtgatatgtccatacgattccaatcatcacatgcctaaatcatctttggcaaagcacatggcatcttgtagattgaggaaaatgggctataccaaagaagaagaggatgaaatgtataatcctgagtttttctatgaaaatgtgaagataccttcgattactttgaataaggactcacaattccagataattaaacaagctagaactgcagttgggaaagacagtgattgttataatcaaagaatttattcttcattacctgttgnaagttcctttgaatcacaaatcggttttgtttggtgatctaactcnaagnctgatcgtcttgccctctatgatttcgtagttgaggagacaaagaaaaagcgctctgattctcaaattattgaaaatgacagcaatctctttgtagacttgactgccaaaatcaatcaagacaatagtcgaaaaagtccaaaatcctaccttgaaatcctggcagaagtacgagattataaaagaagacgccagtcctatagagccaagaatgttcacataaccaagaaatcatatactgaggtgattcgagatgtgataaatgtgcacatggaagaactcagcaatcattggcaagaagagcaagagaaggcagaggatgatgccgaaaagaatgaagaaaggcgatcagcttcagtagattcacggcagtctggtggaagctatttggatgctgagtgttcacgacatagaagggataggagtagaagcccacataaaagaagnag

SEQ ID NO: 258821 - DNA, 1169 bp, Homo Sapiens
ccgcgtctgtggggtcgagactgcgcggccgttgggcgtgcagcggcgccagtcggcggacgaggggcccccgggagttgctggactgagacatgagcctccaactgtgtggttgggctcggtagcacatcgtgggacttgggtgtgcgcccacagatggtttggccctgcagtgaccagagcagcccaagccgccaccatggtgaaattgctagtggccaaaatcctgtgcatggtgggcgtgttcttcttcatgctgctcggctccctgctccccgtgaagatcatcgagacagattttgagaaggcccatcgctcgaaaaagatcctctctctctgcaacacctttggaggaggggtgtttctggccacgtgcttcaacgctctgctgcccgctgtgagggaaaagctccagaaggtcctgagcctcggccacatcagcaccgactacccgctggccgaaaccatcctcctgctgggcttcttcatgaccgtcttcctggagcagctgatcctgaccttccgcaaggagaagccgtccttcatcgacctggagaccttcaacgccggatcggacgtgggcagcgactcggagtatgagagccccttcatggggggcgcgcggggccaccccctgtacgtggaaccccaccggccacggccccagcctgagcgtgcagggcctctcgcgcgccagccccgtgcgcctgctcagcctggccttcgcgctgtcggcccactcggtctttgagggcctggccctgggcctgcaggaggagggggagaaagtggtgagcctgttcgtgggggtggccgtccacgagacactggtggccgtggccctgggcatcagcatggcccggagtgccatgcccctgcgggacgcggccaagctggcggtcaccgtgagcgccatgatccccctgggcatcggcctgggcctgggcatttgagagcgcccagggccgtgccggggcaccgtggcgtcccggctgctggcaggcctgggggggcggcacctttcccttaatccccctcctggagaacctgggcccagggacctgcggcgacaaaaattgaccgttttagaccgcagagcttcttcccgggagactggcgcccacccttcccggaaccgccacaagtcctcccgtcaacggtgccacagg

SEQ ID NO: 258822 - DNA, 1043 bp, Homo Sapiens
ttgattgttcttcaggggcatgaggaagaggcgcttcctcccttcccttgggtgagggggcccagggtgattgggtggctgtttacccggcagccagtcgggccttcccaggtcaaacagttcccatctgggtttggaggaaggacccaggggcccttgtggctcactcccccacatcctgtctttgcaattgtcagaaagtgagaaacgaaaggatggctgtgagctgtgacctcagctgggcctgggctgcagaggtggcttccgctggagtaaagcaagagggcccagggttcatgctcttccctggaaggtagaaaaggacagaccaccagggagcctccaccgcaaactgacctgtgctgcctacacactaactttcctgggcctggggcctgcacaggctgaatggtccttgagccttcactctgcatctgagcggtcttgggcccgctgagtggcagtggcaggaagtcggtggaagcagatccctgtgcagaagttgaattaccagggcggccacacacgggctgcacaacctttgcagtcgtgcacggcaagtgggatgtggcctccgcccatgattgggcacctggtcaggctgggagatccaaatagcacccagtgggcagctgtccgacccctggaggggcaagccaggaaagaaacttagggcccgctgtgaccagatgtccctcccagttgggaagactaaactggtttggccaatatctcccaggattcccctgtccaaattattcctgggatctgacccatttcctggaaaggggcgagcctgggttttgaagttcaaactagagtttaaatcacaactctgcccctaatcccacgtaaccctgtgcaccttatcctctgagccttcgtctcctcgtgtgtaagcctgctaactcctgagagactggacaagatgccgtggagagccttggctctgagtagctctgctgctggacagttcagttggcagtccccaaacgtaaggcgtaagagtttaagaagtatcggccaggcacagtggctcacac

SEQ ID NO: 258823 - DNA, 1491 bp, Homo Sapiens
  misc_feature (227)..(227): n is a, c, g, or t
  misc_feature (545)..(545): n is a, c, g, or t
atcgcctttctgaatgaagagccctcttcactgccccaccctcaccttagaattctctcctctttccaaagaatggcagttgaacctcactggcccctctggggaggctgggggctactcctgcattttttcccctccattacagtctccctgcttcaccttcaccaggcggctttacttacctacccctgggaaaagaggagataatggccttaatatatccaaanaccacaccctgactacccaagaattagctcttaccatcaccctttctcttctctcactttcctagggggtgctgggtggtgtctccttgggggaaagaaatgactaggtgggggggaaaggaatatttgtaaccatattcccatctctgctttcccaacctctccaagtgagactgagggtgtgcccagtactgccatccgagagatctctctgcttaaggagcttaaccatcctaatattgtcaagctgctggatgtcattcacacagaaaataaactctacctggtttttgaatttctgcaccaagatctcaaganattcatggatgcctctgctctcactggcattcctcttcccctcatcaagagctatctgttccagctgctccagggcctagctttctgccattctcatcgggtcctccaccgagaccttaaacctcagaatctgcttattaacacagagggggccatcaagctagcagactttggactagccagagcttttggagtccctgttcgtacttacacccatgaggtggtgaccctgtggtaccgagctcctgaaatcctcctgggctgcaaatattattccacagctgtggacatcctggagcctgggctgcatctttgctgagatggtgactcgccgggccctattccctggagattctgagattgaccagctcttccggatctttcggactctggggaccccagatgaggtggtgtggccaggagttacttctatgcctgattacaagccaagtttccccaagtgggcccggcaagattttagtaaagttgtacctcccctggatgaagatggacggagcttgttatcgcaaatgctgcactacgaccctaacaagcggatttcggccaaggcagccctggcttcaccctttcttccaggatgtgaccaagccagtaccccatcttcgactctgatagccttcttgaagcccccagccctaatctcaccctcttctccagtgtgggcttgacccagcttggccttgggctatttggactcaggtgggccctcttgaacttgcctttatcactcaccttctagtcttggccagccactccggcatccgggtcacccgcggccctgacatggcaggcagttccgttagatgcctaagttgctccccctttctctttcttgttttgcggagggggttcatatttagagccccagttgattggcatctcgtgccattttcggtgggccgtccccccccgttacccacgcgtg

SEQ ID NO: 258824 - DNA, 534 bp, Homo Sapiens
gaggaatgccagtgagagcagaggcatccatgaatttcttgagatcttggtgcagaaattcaaaaaccaggtagagtttattttctgtgtgaatgacatccagcagcttgacaatattaggatggttaagctccttaagcagagagatctctcggatggcagtactgggcacaccctcagtctcagtgtccaggcggattttcttaagcgccaccacctctcccgtcaacttgtttctggctttgtacacaactccgtacgtgccctctccgatcttttccaccttttggaagttctccatgaagcgccagcgagtcgggtcagcccggccctggagcgggggcctgggaaccctgcagaaggcggaccctggctctcgggggccgaggagggggaaacagggcccagtaccgtggccccgggtcgggatggaacgcagtatacctctcgctcttgtcaatttggccaacttgaaacaatgttgccgcctcccaccgagttcccgaccgccaccagaggccccgcccctgcttc

SEQ ID NO: 258825 - DNA, 1666 bp, Homo Sapiens
  misc_feature (75)..(75): n is a, c, g, or t
  misc_feature (122)..(122): n is a, c, g, or t
  misc_feature (365)..(365): n is a, c, g, or t
  misc_feature (440)..(440): n is a, c, g, or t
  misc_feature (494)..(494): n is a, c, g, or t
  misc_feature (525)..(525): n is a, c, g, or t
  misc_feature (791)..(791): n is a, c, g, or t
  misc_feature (821)..(821): n is a, c, g, or t
cggctcttcctggacagtgagaacagggctgggcgcctctgtcctggcccgggagccgcagggcccctcctccanagcctgggcgcaacgacacaggctgccgctgctctcccaggtgaaanccacaccagtccacgccgggtcgcctgccctgtctccctacttagacccagtcattctagagggatccaccgccacactggccggcccacgtcctgggtgctgtcatgcccagcttggagtgccacgtggccgctgcccacgtcccgggcactgtcatgcccagcttggagtgccacatggccgctgcccacgtcccgggcactgtcatgcccagcttggagtgccacgtggccgctgctgtnacaggcagttttcttgggggtggggctgcatccaaggctttgtaaaccggctggaccacgtctccctggccccantaaccgggggaaactgaacccctccctcctgtgtttgctcccattactcaaaangcaggacaaaacaggtcagagcccaggaatnctcacaggttcacccagcgccctctacctcctagcaagtactttgtcttgatcctcactgagaaggccccagggcagcggtcttctccatctccgctgttttggggtcttagggtacagcccaggcggtcactgcccacctgccaggctgcagggacagttgggtgtgagaataacactggctttgggtagtgccatggccaggagtgggtttccctgcgtctcctcgtcccgagggcgcctgggtcctcccagctgacggcagtnaatccacagtgagttggggcgactgtgaanttggaatgctgttactttcataattactttccagcaggtgttttccttcacaatggttttgtttctttccttctgatctgagaagacatgaacgttttctcttcaccgccgtggggtgtattgactggtcccccatgggctgctggaaaggcccggagatgcatctgtggcctggggccatccaagatcaaagaaccaggaggcctgggagatgcagctggatggggcggcctgcagaccctgccagggggtttgaggaccctcccaggtttcccactgcggaacaggagtgactctggctgccaagataccttcatggtgttcatgacaagtggaatcattattttcaaccattgaagggggatgcaggcaagacaccttcccagctgctcctagaggggacaagccagggccctctctgcagtcctcggcagctccggaaggacacagtcaggggccgggcaaacactttggccacagccccaaacaagcgccaccgtgggagaggagaggctgctgtcactggtaccggatgcagaccccacccctgtcttgcaggccacccccacctccctgcagctttgaggctggcggggtctgctccttgggaatggggtgggagccacagggacgacccggggcgggctgatgtcttcttgggggcagaccagagagctcaagtttcagagtcagaattaggcacttggagcgtttttgctggcttgcactttcttattttcttattttagagcgcttaaaaaatccggaaaaatggggtttaaaagaactgtctctttcagtctacatttttgtttaatacgcttgagcaataaacgctgacttgc

SEQ ID NO: 258826 - DNA, 362 bp, Homo Sapiens
ctccccgccaaccagcttggccttcaagcctcacggcattcctgctgagcaccgtggggcacccagggagcaggggctgtcagggatcctgctgccgcacccctgtgtcgctggcatgagggccgtgtccccactgtgaaggatgaagagcaaggccctcaggacccgtgtcctcagagcaccacacactgagcacccagagacagcgggcctggcagcgggccgggccatgcagggagcgcctccctatgttgcctgccactctgggcaccggccagcaccctctggtgagaagaggtcccccctttttatgtgcactaccccaccatctgtgattataataaatttattattcctgtgtt

SEQ ID NO: 258827 - DNA, 1246 bp, Homo Sapiens
  misc_feature (411)..(448): n is a, c, g, or t
  misc_feature (604)..(604): n is a, c, g, or t
  misc_feature (627)..(627): n is a, c, g, or t
  misc_feature (639)..(639): n is a, c, g, or t
  misc_feature (668)..(668): n is a, c, g, or t
  misc_feature (707)..(707): n is a, c, g, or t
  misc_feature (715)..(716): n is a, c, g, or t
  misc_feature (754)..(754): n is a, c, g, or t
  misc_feature (767)..(768): n is a, c, g, or t
  misc_feature (774)..(774): n is a, c, g, or t
  misc_feature (792)..(792): n is a, c, g, or t
  misc_feature (800)..(800): n is a, c, g, or t
  misc_feature (802)..(803): n is a, c, g, or t
  misc_feature (806)..(807): n is a, c, g, or t
  misc_feature (809)..(809): n is a, c, g, or t
  misc_feature (815)..(815): n is a, c, g, or t
ccgacgggcccgctcggcctagtcccctcggcggctccagggctcgccccttgcgcttctcaccagccctcccgtctgtctcccggccctcagggtcctcgcgcattctgcgcagttacttctcggaaaggggaaccatgcgttgaaagttgtttcccgcgaataaagatgtggccgaccaaagaggcagcgtgactggcccactggtgctgtaggcccaagcactttccaccaaagcaatcgtggcggagggggtaggcgggaggcgggaggcggagggtacccctggtggagtacccctttcttccaacaaatggaaagatgccacgaagaagggctgttgatttgtgggggattttgaagagaggaggaataggaggaaggggttgaggggctgcctctggcatatgnnnnnnnnnnnnnnnnnnnnnnnnnnnnnnnnnnnnnnataccatgttctccatccccccaggtccagccctcagtgctgtcccatccagcagggctaccctgaagctgtggctgcagccctcccgtccagtgggcaggcggcttcatccctcctttctctcccaaagcccaactgctgtcactgcatgctctnccaaggaggagggaactgcagtnacagcaggagtnagagtgggaggcaggacagagctgggacncaggtatggagagggggttcagcgagcctagagagggcngactatcnnggtgccggcggtgagaatccagggagaggagcggaaanagaagaggggccnncgaccngggcacttgtgggttgcngacccccncnnccnncntggganccaagccacactggctaccaggtcccctacacagtcccgggccgcccttggttctggtgcttctggccctgggggccgggtgggcccaggaggggccagagcccgtcctgctggagggggagtgcctggtggtctgtgagcctggccgagctgctgcaggggggcccgggggagcagccctgggagaggcaccccctgggcgagtggcatttgctgcggtccgaagccaccaccatgagccagcaggggaaaccggcaatggcaccagtggggccatctacttcgaccaggtcctggtgaacgagggcggtggctttgaccgggcctctggctcatgcgtagcccctgtccggggtgtctacagcttccggttccatgtggtgaaggtgtacaaccgccaaactgtccaggtgagcctgatgctgaacacg

SEQ ID NO: 258828 - DNA, 379 bp, Homo Sapiens
cagattcctctggacagggtccagcagcccaagctcctcctcagtgaagatcacagccacatccttgaaggtcagtccctccttgaatgtggtcatttttcctcctgtttctgggaatttgcagagtcctgagttatgccatttgagagaaggcagaatcgtgcctggaacagtggagctttgctttcagtagccaagaagtcagtccgcgcagtcctttttcaggctctgctctcccacgaggcttcttttcccataaccggaccaccaggtcccagcgagccccaatcttaagtccctgacattaggaggggcccgcgagtcgcggaactggaagaaactaccgtggaatgtgccgtgacaatcgccccctcttccc

SEQ ID NO: 258829 - DNA, 693 bp, Homo Sapiens
cagttggaaattcttgattttcaatgatactggaatgatcccctatgtgattcactagacagttgtcatccacagaagcttgaatagattctcctgctcccacttgacagggggaatcatggtgcttggggaactgagagctctttccttcaatatttatcatggagtcttgacttctggctaatttgctcgcaatgtgtctcttgatttgccagcatgaaagctctcccagtgaaaagcaccttaatcctgctttgtgaagagttgccatctcattttgattcctgtctcctctttgggtttgaagctccttcatccaaagcttttcttccctctccaactgggatatcatatctggtttgaaggactgatgtcccactgaaaccaggttcctaaagttctccagcatcacatctcggtacagcttcctctgggcagggtccagcagccccagctcctcctcagtgaagaccacagccacatccttgaatgtcactgcctctttgaatgtggtcatttttccttctacttcagggaatttgcagagtcctgaatgaagcagttcaagtgaaggtgaaatcatgcctttgctttccgacggtgcttcctttcctctaaatctatcgctagctcgttgagggttcagagagtaggtccaggaaattcagaagggccctcgagacgcagaacagc

SEQ ID NO: 258830 - DNA, 525 bp, Homo Sapiens
aaaatacacaaagacacaagccaggtccccaccgcgcttggcgatgcatccatagcagccttggtgctgtggacactccctggggcccagcgaaggggagagtttgctcccaaaggcgcaccaatgaccaacatttgccccccggaggaaagaactggaaccagcctctgacctgtccaggtgccctgtccagctgactgcaaggacagagaggagtcctgcccagctcttggatcagtctgctggccgaggagcccggtggagccaggggtgaccctggagcccagcctgccccgaggaggccccggctcagagccatgccaggtgtctgtgatagggcccctgacttcctctccccgtctgaagaccaggtgctgaggcctgccttgggcagctcagtggctctgaactgcacggcttgggtagtctctgggccccactgctccctgccttcagtccagtggctgaaagacgggcttccattgggaattgggggccactacagccttcacgagtactcctggg

SEQ ID NO: 258831 - DNA, 451 bp, Homo Sapiens
gttgccgctgcgcacctggctcaggtgagctgccccgcccccgcccggcgcgagccccaggtcctggcagcagcctctgacctgtccaggtgccctgtccagctgactgcaaggacagagaggagtcctgcccagctcttggatcagtctgctggccgaggagcccggtggagccaggggtgaccctggagcccagcctgccccgaggaggccccggctcagagccatgccaggtgtctgtgatagtggcccctgacttcctctccccgtctgaagaccaggtgctgaggcctgccttgggcagctcagtggctctgaactgcacggcttgggtagtctctgggccccactgctccctgccttcagtccagtggctgaaagacgggcttccatcgggaattgggggccactacagcctccacgagtactcctgggtcaaggccaacctgtc

SEQ ID NO: 258832 - DNA, 1664 bp, Homo Sapiens
  misc_feature (1650)..(1650): n is a, c, g, or t
gggagagctgggagcccgacgtttccgggagcgccgcgtggttagcgtcggcggcttttggcatggcgactttttctggcccggctgggccaatcctgtcgcttaatccgcaggaagatgtcgagtttcaaaaggaggtggcgcaggttcgcaagcgcataacccagcgaaaaaaacaagaacaacttactcctggagtagtctatgtgcgccacctacctaacctacttgacgaaacccagatcttttcatatttctcccagtttggcactgtgacacggttcaggctgtccagaagtaaaaggactggaaatagcaaaggctatgcatttgtggagtttgagtctgaggatgttgccaaaatagttgctgaaacaatgaacaactacctgtttggtgaaagactcttggagtgtcattttatgccacctgaaaaagtacataaagaactctttaaagactggaatattccatttaagcagccatcatatccatcagtgaaacggtataatcggaatcggacactaacacaaaagctacggatggaggagcgatttaaaaagaaagaaagattactcaggaagaaattagctaaaaaaggaattgactatgattttccttctttgattttacagaaaacggaaagtatttcaaaaactaatcgtcagacgtctacaaaaggccaggttttacgtaagaagaagaaaaaagtttcaggtactcttgacactcctgagaagactgtggatagccagggccccacaccagtttgtacaccaacatttttggagaggcgaaaatctcaagtggctgaactgaatgatgatgataaagatgatgaaatagttttcaaacagcccatatcctgtgtaaaagaagaaatacaagagactcaaacacctacacattcacggaaaaaaagacgaagaagcagcaatcagtgattttcaatgtattatatttcttttgaaaaatataatatttttatgagagtggactttgtatttcactaggtacaatggaatacaacctttgacaagattttcagaggaaaaatacactgtttggtcaagttaaggaaagcagtgtgtaattttggattgcctgcccttggctgaaatacaggggtgcataccagcttgcagtggcttggctgacattgcctctttgtcctggcctctagttttcttttgatatttcatagctctccttagtttactctgcctggatagaaagttgaccactaactgcaggtttaagtactaaactgcagccttttctgtcgccagcaattaaagaccaccaatcttgtttgtccatctacatggtttgtcggggacatttaactcatggaggtgctttagatttcaacatcagatggttgaagctggaagtttaattatatgtagagtgagaaggcagttccagttttagcacagatttgtttatgtgttcagattttaatagagattcaaaaatgactcatttttaccaataatgttaaattagttttggttgtgctagcatgaattaataaccaccattttataccagtatcatcagtgaagaattgtatttcaagattcaaacaataaccagcaattaaacttttttctacaatgtatttgtttgcgagtaggacttgggagncattgggaaaaaaa

SEQ ID NO: 258833 - DNA, 931 bp, Homo Sapiens
  misc_feature (9)..(9): n is a, c, g, or t
  misc_feature (17)..(17): n is a, c, g, or t
  misc_feature (57)..(57): n is a, c, g, or t
  misc_feature (93)..(93): n is a, c, g, or t
  misc_feature (104)..(104): n is a, c, g, or t
  misc_feature (136)..(136): n is a, c, g, or t
  misc_feature (199)..(199): n is a, c, g, or t
  misc_feature (229)..(229): n is a, c, g, or t
  misc_feature (335)..(383): n is a, c, g, or t
  misc_feature (393)..(393): n is a, c, g, or t
  misc_feature (406)..(406): n is a, c, g, or t
  misc_feature (414)..(427): n is a, c, g, or t
  misc_feature (438)..(438): n is a, c, g, or t
aagatctgnactgaggnaacaacaatttagacaaccacctccgttttccctccaggngctcctccaactcaccttccactcctccatttcttncacctcctccnactgtcagaactgctccacctctgattccacnaccgggttttcctcctccaccaggcgctccacctccatctcttataccaacaatagaaagtgnacattcctctggttataatagtcgttctgnacgtgcatttccatatggcaatgttgcctttccccatcttcctggttctgctccttcgtggcctagtcttgtggacaccagcaagcagtgggactattatgccagnnnnnnnnnnnnnnnnnnnnnnnnnnnnnnnnnnnnnnnnnnnnnnnnncgtgatcggnaaagagaaagagnacgcaccnnnnnnnnnnnnnnggagcgtgatnacagtcctacaccaagtgttttcaacagcgatgaagaacgatacagatacagggaatatgcagaaagaggttatgagcgtcacagagcaagtcgagaaaaagaagaacgacatagagaaagacgacacagggagaaagaggaaaccagacataagtcttcctcgaagtaatagtagacgtcgcccatgaaagtgaagaaggagatagtcacaggagacacaaacacaaaaaatctaaaagaagcaaagaaggaaaagaagccggcagtgagcctgcccctgaacaggagagcaccgaagctacacctgcagaataggcatggttttggccttttgtgtatattagtaccagaagtagatactataaatcttgttatttttctggataatgtttaagaaatttaccttaaatcttgttctgtttgttagtatgaaaagttaacttttttttccaaaataaaagagtgaatttttcatgttaagttacaaaacac

SEQ ID NO: 258834 - DNA, 1506 bp, Homo Sapiens
  misc_feature (155)..(155): n is a, c, g, or t
  misc_feature (256)..(297): n is a, c, g, or t
  misc_feature (579)..(579): n is a, c, g, or t
  misc_feature (592)..(592): n is a, c, g, or t
  misc_feature (1036)..(1036): n is a, c, g, or t
  misc_feature (1084)..(1084): n is a, c, g, or t
ggggttgtccccaacaaagggcctaagggcccacgggaaaggaggcagggaaccccggaaaggatggggggaaaaggccaaccatttgcccataagggaaaagccacgtgccagaaggggactatcaataaccaggaaggaaggtcccactttcnttattggttggtataaggagatgggaggttgaggcgcctggtgggaggaaggaaaaccccggtggtggaatcagagggggagcagtgctgacagtcggagnnnnnnnnnnnnnnnnnnnnnnnnnnnnnnnnnnnnnnnnnnctctgggaggggaaaaacggaggtggtttgctaaaattgttgtctacttcagtagcagatctttcagaaaggacctgtatgttgctgttctcatttgcccgtcgcctgccttctactcggctgatagttatagtctgaccgataacatcaattgccccaggtaatctccttagatcaggtgattcggccctcccatatcgatcctgccacttcccaacgcttgaattggcttttctggaggcagtacttgtctgagactgagaagaagtgctgttactgctncggtggaagcccnagtcttgaacaaagaaggaggagaagtaaactcagcttttgtagatggaagggcagtctctttctctgagtttccagttctcccctgctgtaccgtaattttatttgtagtagaggttactggtataacttcaagtcccattcgtatcctcttttgtttttcacagtaagctttccaggtatcttcattaaacccataattaaaataatcagaaagatcagcaccaggtttacgccatggtttatcttcaaaagaatccaaatctacctctaagagtggaactccattaatgcttccaggtgcatcaaggtctactcctttgacttttgtccctgtagttccataaactcttccccctgtcttgatgttaagatttacaggtgctgtaccataactcccatactgtggtgctcccgttttaatgtctcctatagtgacatgaanatcatcttcatcatcatagctgtaactatcactatcatcttcggtctnagtaactttcggttttggtacaccattttcagcagtttcatcttcaattccagatggaggattagcactggcattttcttcttctggcctttcaacttcattttcatctaggtcctttgccaaatcactgtggacatgcacgtcccatgggccgccatagagccactcttcctcctcatcccctccggtcccgccgctcagctccgacactaggcgctcgacctcgccggccgacatggccgccccgagcgcaacttaaacgcggcgatcaacagccccctccaaccccttccccagcctcgcagccccgaggcgcgagaagggcgcgaacccgccgacgaacgaacgaagaaagctcgagactccaatcccaggaaggcgacggcagcggcggcaaagatgaagcctccagcgcaggtccg

SEQ ID NO: 258835 - DNA, 1160 bp, Homo Sapiens
  misc_feature (91)..(91): n is a, c, g, or t
  misc_feature (267)..(267): n is a, c, g, or t
tcccgggatccggtcaaccgtcaaaatgtccaaagaacctctcattctctggctgatgattgagttttggtggctttacctgacaccagtnacttcagagactgttgtgacggaggttttgggtcaccgggtgactttgccctgtctgtactcatcctggtctcacaacagcaacagcatgtgctgggggaaagaccagtgcccctactccggttgcaaagaggcgctcatccgcactgatggaatgagggtgacctcaagaaagtnagcaaaatatagacttcaggggactatcccgagaggtgatgtctccttgaccatcttaaaccccagtgaaagtgacagcggtgtgtactgctgccgcatagaagtgcctggctggttcaacgatgtaaagataaacgtgcgcctgaatctacagagagcctcaacaaccacgcacagaacagcaaccaccaccacacgcagaacaacaacaacaagccccaccaccacccgacaaatgacaacaaccccagctgcacttccaacaacagtcgtgaccacacccgatctcacaaccggaacaccactccagatgacaaccattgccgtcttcacaacagcaaacacgtgcctttcactaaccccaagcacccttccggaggagccacaggtcttctcactcccgagccttctaaggaagggcccatcctcactgccagaatcagaaactgtcctccccagtgattcctggagtagtgctgagtctacttctgctgacactgtcctgctgacatccaaagcatctgatacagcagtccctgagcagaacaaaacaacaaaaacaggacagatggatggaatacccatgtcaatgaagaatgaaatgcccatctcccaactactgatgatcatcgccccctccttgggatttgtgctcttcgcattgtttgtggcgtttctcctgagagggaaactcatggaaacctattgttcgcagaaacacacaaggctagactactattggagatagtaaaaatgtcctcaatgacgtgcagcatggaagggaagacgaagacggcctttttaccctctaacaacgcagtagcatgttagattgaggatgggggcatgacactccagtgtcaaaataagtcttagtagatttccttgtttca

SEQ ID NO: 258836 - DNA, 490 bp, Homo Sapiens
  misc_feature (374)..(374): n is a, c, g, or t
  misc_feature (424)..(424): n is a, c, g, or t
ctaaggaagggcccatcctcactgcagaatcagaaactgtcctccccagtgattcctggagtagtgctgagtctacttctgctgacactgtcctgctgacatccaaagagtccaaagtttgggatctcccatcaacatcccacgtgtcaatgtggaaaacgagtgattctgtgtcttctcctcagcctgggagcatctgatacagcagttcctgatcagaacaaaacaacaaaaacaggacagatggatggaatacccatgtcaatgaagaatgaaatgcccatctcccaacttactgatgatcatcgccccctccttgggattttgtgctctttcgcattggtttgtgggcgtttctcctgaggaggggaaantcatgggaaacctatttgtttcgcagaaacacacaagggttaggattacntgggagatagttaaaattgttcctcaatgacgtggcaggcttggagggggagacgaagacggcctt

SEQ ID NO: 258837 - DNA, 857 bp, Homo Sapiens
  misc_feature (224)..(224): n is a, c, g, or t
tgagcctggaagagctgaaagaggcaaatttcaacattgacactgattacaggcccgcgtttcccctgtccgccctcatgccggccgagagctaccaggagtacatggacaggtgcacggcgagcatggtgcaaatcgtcaacacctgtccgcaggacacgggtgtcatcctaattgtgagtcacggctccactctggactcctgcacgcggccactgcttcgntgccgccccgggaatgtggggattttgcccaactcgtgagaaagatcccttccctgggcatgtgcttctgtgaagaaaataaagaggaaggaaaatgggagttggtgaacccaccggtgaagaccctgacccacggggcgaacgcagcatttaactggaggaactggatctcaggcaactgagagccacggtgatgttgtcataacctcagagtggagaggcagaaaccatgtgcagaggctgggagatgctgctgtttccagaggcgtcttagtctcacccaatgtgatttgtagaagcacgagacgcacttttatatcccggaatatttccctccggctttcgcctttgtaactcccatctgtggacccatcgtccaccagcccagctgcggggagcacagggcaggtggctgggtgaggatgccgccctgcagcatgtacaccgagtgtctgcagctggggaaacaactgcccgggactctaacttccaggaattaaagactcaccacacacgaaggatctaaccacttcattttccatggtctaatcattaaattcccaatcgttttttctttttctgggtccatcactctttagccatatccacatgggctaaaacaggtgtaatagt

SEQ ID NO: 258838 - DNA, 1040 bp, Homo Sapiens
  misc_feature (11)..(11): n is a, c, g, or t
  misc_feature (14)..(14): n is a, c, g, or t
  misc_feature (20)..(20): n is a, c, g, or t
  misc_feature (26)..(26): n is a, c, g, or t
  misc_feature (45)..(45): n is a, c, g, or t
  misc_feature (51)..(51): n is a, c, g, or t
  misc_feature (62)..(62): n is a, c, g, or t
  misc_feature (65)..(65): n is a, c, g, or t
  misc_feature (98)..(98): n is a, c, g, or t
  misc_feature (123)..(123): n is a, c, g, or t
ccccgccacanagnagcttnatctgntttgccatccagccccatntggatntgaggtgggtnganacatcattgggtgattgcagaaagggggagtgncgcccacgcagcttctgctgaggantgaccgctctgagctgttctgtttcgtattgctgctctgtgtctgcatgtattgtgaccgtgcggctccacctcttccagctgctgctacagctgaggcctggatcccggcctttccctgtgacttacgtgtctgtcaccggcaggcagccctacaaatcctggtgacctgctctcccaagaacagagcctgtccccagatgtcccagtagcgatgagtaacagaggtggctgtggacttcctctacttctccttgctggatcagggccttcctgcctcccgctgggcaggtctggccttgctctcttggcagggccccagcccctctgaccactctgcagctcaccatgcagctgatgccaaagttgtggtgtccagtgtgcagcagccctgggagccactgccaccttcagaggggttccttgctgagacccacattgcttcacctggccccaccatggctgcttgcctggcccaacctagcgttctgtgccatgctagagcttgagctgttgctcttcttcaggggaggaaatagggtggagagcgggaagggtcttgctcctaagtgttgctgctgtggcttttttgccttctccaaagacgcactgccaggtcccaagcttcagactgctgtgcttagtaagcaagtgagaagcctggggtttggagcccacctactctctggcagcatcagcatcctactcctggcaacatcaggccaacgtccaccccagcctcacattgccagatgttggcagaagggctaatattgaccgtcttgactggctggagccttcaaagccactgggatgtcctccaggcacctgggtcccatgaccagctccccgtctccataggggtaggcatttcactggtttatgaagctcgagtttcattaaatatgttaagaatca

SEQ ID NO: 258839 - DNA, 1225 bp, Homo Sapiens
  misc_feature (79)..(79): n is a, c, g, or t
cgggattgccagccggctgtaggcattcagggcagtgtcttctgcatctcctaggaacctcgggagcggcagctccggncgcctggtagcgagaggcgggttccggagatcccggcctcacttcgtcccactgtggttaggggtgagtcctgcaaatgttaagtgatttgctcaaggtgcccatttcgcaggaattggagcccaggccagttctctgagcctatcattagggctaaaggagtgcgtgatcagaatggtgtctggacggttctacttgtcctgcctgctgctggggtccctgggctctatgtgcatcctcttcactatctactggatgcagtactggcgtggtggctttgcctggaatggcagcatctacatgttcaactggcacccagtgcttatggttgctggcatggtggtattctatggaggtgcgtcactggtgtaccgcctgccccagtcgtgggtggggcccaaactgccctggaaactcctccatgcagcgctgcacctgatggccttcgtcctcactgttgtggggctggttgctgtctttacgtttcacaaccatggaaggactgccaacctctactcccttcacagctggctgggcatcaccactgtcttcctcttcgcctgccagtggttcctgggctttgctgtcttcctcctgccctgggcgtccatgtggctgcgcagcctcctaaaacctatccacgtcttttttggagccgccatcctctctctgtccatcgcatccgtcatttcgggcattaatgagaagcttttcttcagtttggaaaacaccaccaggccataccacagcctgcccagtgaggcggtctttgccaacagcaccgggatgctggtggtggcctttgggctgctggtgctctacatccttctggcttcatcttggaagcgcccagagccggggatcctgaccgacagacagcccctgctgcatgatggggagtgaagcagcaggaaggggctcccaagagctcctggtggtgcagcctgtgctcccctcagaagctctgctcttcccagggctcccggctggtttcagcaggcgactttcttccaatgctgggcccagacttcttgcctgggtgctggcctgccctctccgggccgcttgctgcctgtctgctttccctggggggctttgccctgggtggctggggcctgcccctcttccggccggttggctgcctgg

SEQ ID NO: 258840 - DNA, 603 bp, Homo Sapiens
  misc_feature (98)..(98): n is a, c, g, or t
  misc_feature (122)..(122): n is a, c, g, or t
  misc_feature (336)..(336): n is a, c, g, or t
aggaccttcgaccctcctgctcggaggacccggagacgaagccccagtgtttctatggttcatctccccaccatctcgaggacccctccctctccgancttgagaatttttcttccgaaatnatcagcttcaagtccatggaggacctcgtaaatgaatttgatgagaagctcaatgtctgctttcggaactacaacgccaagaccgagaacctagctcccgtgaagaaccagttacagatccaagaggaggaggagacccttcaggacgaggagtaaggaagtcttaattgccctctcctgcttcagtcgagagccctgtagtccttggtctccnttgacatagtgctgggtttctggctaataggtttatggggctattactttcattttcgtgttgccagcggagcagtgccctggtacttgctgtcatagctctatatatgtccctttacagtcccctgaggagaactttcttaaattgaaaccttagaggaatgaaggttttcctagatacaaaatggaatttcaggagcacagtaaatttcagggtctgtctatcttaagctttctttatatcagtggaaatccagcgagatattag

SEQ ID NO: 258841 - DNA, 716 bp, Homo Sapiens
  misc_feature (128)..(128): n is a, c, g, or t
  misc_feature (136)..(148): n is a, c, g, or t
  misc_feature (417)..(425): n is a, c, g, or t
  misc_feature (476)..(518): n is a, c, g, or t
  misc_feature (674)..(674): n is a, c, g, or t
  misc_feature (678)..(678): n is a, c, g, or t
  misc_feature (696)..(696): n is a, c, g, or t
atgcagatggttattccagctctggtcacccaactcctttcaccaaattgctcctaactggaagatctcactttccccttgtggggtaggaaccgatgccagtgggagggatgtgcccctgaccattnacgactgnnnnnnnnnnnnnaaagaatggagctgttggggagggacatgcacacaatgtaaaacagacaaaatgcattacaactgtggtgtaatgtggccactatgaatccctatgtataagaggaaagaggcaggctgcagcttcagccacagaatggggactagggaagacagagcaggagctcatttcctctgcacattttggctgttagacctgtgtgtgtgtttaaaaaaagagaagtcagtgctcactttttgtatttaaatattaaaaatgattccaactgnnnnnnnnnggcttttccccaaaataaacacagaatacagtaaaataattattgtgtaannnnnnnnnnnnnnnnnnnnnnnnnnnnnnnnnnnnnnnnnnngcagaaaatataatcaagttattaactgattatatttctaaagactataaatgtaatttctattcatactaaattggaatgtattcttagaaagggacttagacgtacatatggtataggaagtacgtgcttgtggtcagtttgtatctggcaatnctgnacttaatttggatcaagnctcgtgccgaaaactggggc

SEQ ID NO: 258842 - DNA, 828 bp, Homo Sapiens
  misc_feature (534)..(548): n is a, c, g, or t
  misc_feature (793)..(793): n is a, c, g, or t
tcctttccgcttccggtgtcccctacagtcatggctgccgccgtcgctgctgccggtgcaggggaaccccagtccccggacgaattgctcccgaaaggcgacgcggagaagcctgaggaggagctggaggaggacgacgatgaggagctagatgagaccctgtcggagagactatggggcctgacggagatgtttccggagagggtccggtccgcggccggagccacttttgatctttccctctttgtggctcagaaaatgtacaggttttccagggcagccttgtggattgggaccacttcctttatgatcctggttcttcccgttgtctttgagacggagaagttgcaaatggagcaacagcagcaactgcagcagcggcagatacttctaggacctaacacagggctctcaggaggaatgccaggggctctaccctcacttcctggaaagatctagattgttattgctgtttgagctgtctcagtgggataagtttgaaattcaagtgtttgaactgctgataatttggannnnnnnnnnnnnnnaactttggcacattgatctatctaaacctggtggggagaattatccccacattgtctcatggaaagactcaacttgcaactgtgccctccacactatccttacttctgtctccactctgataccagagtgcagccatgcagatggttattccagctctggtcacccgaactcctttcaccaaattgctccctaactggaaaaatctcacttttcccccttgtggggggaaggaaaccgatgtccntgtgggaagggaatgtggcccccctgaacccatta

SEQ ID NO: 258843 - DNA, 835 bp, Homo Sapiens
gtgtcagccattgcacccagcccagattgtcttaatttctatcttgttccaaggccagggacagtaataagaatggaaaagagatatgggaacactggcagactgtgtaaaatgtaatgcaactacccaaaacaagcctggtaggaaagggcaagtctttaggtctttgtaagaactaaagaagatctgtaatttttattttcaccctctgtaccccatgaccttatccttcctctccttccttgttacccatgaaaaactggcaacattccaagaatagcatctgtacaaaggggaaagaacataaaggtaaaacaaaacaaaacaacattttgagaacaaagatgaccataaccactgaagggaatcacatcttttaagacaaattcatattcttttatttgttatggcagatgacaagatggtacaacctttattcttttccaaaataaaacaaagggcacagcatctgtagtcagccgacaactatttcggccttttgggggtgggtctggccgtacttgtgatttcgatggtacgtgaccctctgctgaagacttgccccctgcccgtgtacatagtgcattgtttctgtgggcgggcccagcactttccgtcaacgttgtactgtatgtgatgaattgcgttggtctctgcatttttctgcagaagaggagtaaccgctccaggtaccttgacctttgtacagcccagaggccaacactgtgggtgtgtgactctttagcaaaaaaaacccatgtggtgatgatgtgtatatatatgtgaggatgtatcgggaagatttctaaataaaagttttacaaaggggaaaaaa

SEQ ID NO: 258844 - DNA, 1821 bp, Homo Sapiens
  misc_feature (7)..(7): n is a, c, g, or t
  misc_feature (30)..(30): n is a, c, g, or t
  misc_feature (511)..(511): n is a, c, g, or t
gcccganctgcccgcccggcggcgactgcnccggccgccgcccagcaagccgggtcgcggacctcgccggccgccatgtggagctgcagctggttcaacggcacagggctggtggaggagctgcctgcctgccaggacctgcagctggggctgtcactgttgtcgctgctgggcctggtggtgggcgtgccagtgggcctgtgctacaacgccctgctggtgctggccaacctacacagcaaggccagcatgaccatgccggacgtgtactttgtcaacatggcagtggcaggcctggtgctcagcgccctggcccctgtgcacctgctcggccccccgagctcccggtgggcgctgtggagtgtgggcggcgaagtccacgtggcactgcagatccccttcaatgtgtcctcactggtggccatgtactccaccgccctgctgagcctcgaccactacatcgagcgtgcactgccgcggacctacatggccagcgtgtacaacacgcggncacgtgtgcggcttcgtgtggggtggcgcgctgctgaccagcttctcctcgctgctcttctacatctgcagccatgtgtccacccgcgcgctagagtgcgccaagatgcagaacgcagaagctgccgacgccacgctggtgttcatcggctacgtggtgccagcactggccaccctctacgcgctggtgctactctcccgcgtccgcaggaaggacacgcccctggaccgggacacgggccggctggagccctcggcacacaggctgctggtggccaccgtgtgcacgcagtttgggctctggacgccacactatctgatcctgctggggcacacggtcatcatctcgcgagggaagcccgtggacgcacactacctggggctactgcactttgtgaaggatttctccaaactcctggcttctccagcagctttgtgacaccactttctctaccgctacatgaaccagagcttccccagcaagctccaacggctgatgaaaaagcttgctgcggggaccggaactgctccccggaccacatgggggtgcagcaggtgctggcgtaggcggcccagccctcctggggagacgtgactctggtggacgcagagaacttagttaccctggacgctccccacatccttccagaaggagacgagctgctggaagagaagcaggaggggtgtttttcttgaagtttcctttttcccacaaatgccactcttgggccaaggctgtggtccccgtggctggcatctggcttgagtctccccgaggcctgtgcgtctcccaaacacgcagctcaaggtccacatccacaaaagccgcctcgccttcagcctcctcagcattcagtttgtcaatgaagtgatgaaagcttagagccagtatttatactttgtggttaaaatacttgattcccccttgtttgttttacaaaaacagatgtttcctagaaaaatgacaaatagtaaaatgaacaaaaccctacgaaagaatggcaacagccagggtggccgggccctgccagtgggcggcgtgtgctagcaaggcctgccgggtgtgccgcagtcaccacagggttctgagaacatttcacagaagtgcctgagacgcggagacatggctggtgttaaatggagctattcaatagcagtgacgcgctctcctcagccaccaaatgtccctgacaccctccccagcccccacagataacatcagctgaggtttttttcagtatgaacctgtcctaaatcaattcctcaaagtgtgcacaaaactaaagaatataaataaacaaaagaaaggtg

SEQ ID NO: 258845 - DNA, 1517 bp, Homo Sapiens
  misc_feature (38)..(38): n is a, c, g, or t
  misc_feature (74)..(113): n is a, c, g, or t
  misc_feature (161)..(161): n is a, c, g, or t
  misc_feature (210)..(210): n is a, c, g, or t
  misc_feature (212)..(212): n is a, c, g, or t
  misc_feature (224)..(224): n is a, c, g, or t
  misc_feature (240)..(240): n is a, c, g, or t
  misc_feature (318)..(318): n is a, c, g, or t
  misc_feature (445)..(445): n is a, c, g, or t
  misc_feature (485)..(485): n is a, c, g, or t
  misc_feature (506)..(506): n is a, c, g, or t
  misc_feature (861)..(861): n is a, c, g, or t
  misc_feature (1157)..(1157): n is a, c, g, or t
  misc_feature (1178)..(1178): n is a, c, g, or t
acaaaggggcggattcagcctacctcctgggcagttanctacggtctgaggcccctgcccagctggaaaccacnnnnnnnnnnnnnnnnnnnnnnnnnnnnnnnnnnnnnnnnaaccgtcatggggccttggagtcaaatcagggttaccaaatgccaaangctggtcacctgcttctattatcttgataacagctgctgggcctctctntngccaccatggtnactattacctacttcngggcccactttgctgtcatccgccgagcgtccctggagaagaacccgtaccaggctgtgcaccaatgggccttctctncggggttgagcctggtgggcctcctgactctttctagagcgctgcagccaccgtgagggaggcccagggcctcatggcaaggggcttccttttcttctccctggcgttctgcgcacaggtgcaggtngtgttctggagactccacaaccccacccaggtggaggacnccatgctggacacctacaacntggtatataaacaggcgatgaaaggtacgtcccacgtccggcggcaggagctggcggccatccaggacgtgtttctgtgctgtgggaagaagtctcctttcagccgtctggggagcacagaggctgacctgtgtcagggagaggaggcggcgagagagaactgccttcagggcatccgggagcttcctggaggacacaccagcaggtcgcctccagcctgaccagcatcggcctggccctcacggtaccctctcgcctccctaactgccccttcccacctcctgcccctcagcctgcccagcccccgactaagatggaagggtgacccgggacaggatctctggtcttgagcctnactggctgccaacctcagggagctgttctggtgtgacagggcctgcctcctacagctgggccgcccccttacactgcagagtcctgatgcttcctggggaggggcgcccgcaccctggggcagtggggcagccgcgggtgtctccctcccaggtgtccgccttgctcttcagctccttcctgtggtttgccatccgctgtggctgcagcttggaccgcaagggcaaatacaccctgacccaacgagcatgtggccgccagccccagcctcttgagatgctcccagggtggacccanacattgtctccactccgaagnagttgctattggtccaagaggatgctcgggtagtcttcggtggctgcaggagagcgaatgtgcgcctctgcccctctcctgccacctggctgcccacagagctctccagggcagaagtcgcggtgggctcagtgggtgccctgagcggggtctctcagactgacgtcaggccttggtgggctgcactctcacctggaggctccggggaagcatctgcctccaggaccattcaggctgttgacaagtcaactcctcatggctgtaggactgaggttcccaagtccttgtccctggtcctgtggtccctccaccttcaaaccagcaatggtgcattgagca

SEQ ID NO: 258846 - DNA, 472 bp, Homo Sapiens
tagctcaccaaatccctccatgggaacgggctgggagcaagcacaaaggaaaccacactggaggcagcagcccagggcagactgcaagacactggatgcccacggcctggagggctccacccagacacaagctgcactggttttctatgctgcgtaagaagcagcatggatgtaaggactgcaagcagtgcccatttatgatctcgcagctctccagggcagaagtcgcggtgggctcagtgggtgccctgagcggggtctctcagactgacgtcaggccttggtgggctgcactctcacctggaggctccggggaagcatctgcctccaggaccattcaggctgttgacaagtcaactcctcatggctgtaggactgaggttcccaagtccttgtccctggtcctgtggtccctccaccttcaaaccagcaatggtgcattgagcaaattgtggtcaaatatacatcacat

SEQ ID NO: 258847 - DNA, 496 bp, Homo Sapiens
  misc_feature (461)..(461): n is a, c, g, or t
gcacagcagctccataatcccctccagaacattctgcaacagccccatgatcccctctagaacattccacaatagcctcacaggtcccctgtagaacattccaccacagccccatgatccccttgctcctcagagatgtggccgccagccccaggagcccagcctcttgagatgctcccagggtggacccacacattgtctccactccgaagcagttgctattggtccaagaggatgctcgggtagtcttcggtggctgcaggagagcgatgctgcgcctctgcccctctcctgccacctggctgcccacagaggtgaagacgcccctgctgtcagccctcatgggatccctgaggggagggtccgagctgtgaggagggaagggagtgaaaggcccagccagagagccaggctccatttggggaacagattgcaagggtaaggggtagctcaccaaattncctccatgggaacgggctgggaagaagcacaaagg

SEQ ID NO: 258848 - DNA, 1447 bp, Homo Sapiens
  misc_feature (1101)..(1384): n is a, c, g, or t
gggatgatttggcatcttgcaaagatgagactgatgaaagctcaaaagaagaaactgagcctcaagtgctgaagtttagagtcacatgcaacagggcaggagagaaacattgctttacctcaaatgaggctgcaagagattttgggggtgctgttcaagattattttaagtggaaggccgacatgaccaactttgatgtggaggttcttttgaacatccatgataatgaagtcattgtgggcattgcattgactgaagagagtctccaccgaagaaatataacacattttggacctacaactcttagatcaactcttgcctatgggatgctcaggctctgtgatcctctaccttatgatataatagtcgatccaatgtgtggaactggggcaataccaatagagggggccactgaatggtctgactgcttccatattgctggtgataataatccactggctgtgaatagagcagcaaataacattgcatctttattgaccaagagccaaattaaagaaggcaaacccctcctggggcttgcccatagatgctgttcagtgggatatctgcaatctgccattgagaactggctctggtggatattattgtaacagatttgccatttggaaaaaggatgggatccaagaaaaagaaactggaaacctttatcccagcttgcctacgggagatgagccgtgtctgcacacctaccacaggccgagctgtactacttactcaagacacaaaatgctttaccaaggcgttatctggaatgcgacacgtatggcgaaaggtggatacagtctgggtgaacgttggtggtcttcgtgctgcagtttacgttctgatacgtacacctcaagcttttgttcatccttcagaacaagacggagaaagaggaactctttggcaatgcaaagaatgaagatgactaatagtacttgtacttcccaccactggaaatgttagcataaaagaacttggagaggaaaaaagtattaacaaaactgcagtctgcactctttaaacctgtttaaggctcttcatcctggttagcaaaaggtgtgaatgtaatgtgatggaatttaaaagttttatgannnnnnnnnnnnnnnnnnnnnnnnnnnnnnnnnnnnnnnnnnnnnnnnnnnnnnnnnnnnnnnnnnnnnnnnnnnnnnnnnnnnnnnnnnnnnnnnnnnnnnnnnnnnnnnnnnnnnnnnnnnnnnnnnnnnnnnnnnnnnnnnnnnnnnnnnnnnnnnnnnnnnnnnnnnnnnnnnnnnnnnnnnnnnnnnnnnnnnnnnnnnnnnnnnnnnnnnnnnnnnnnnnnnnnnnnnnnnnnnnnnnnnnnnnnnnnnnnnnnnnnnnnnnnnnnnnnnnnnnnnnnttttataagaaagcagagcttttccttgaagctcttttgaagtggtagcttaattagtatttt

SEQ ID NO: 258849 - DNA, 1141 bp, Homo Sapiens
agtttagtctatcgctgcggttgcgagcgctgtagggagcctgtgctgtgccgcgcagttaggcagcagcagccgcggagcagtagccgccgtgggagggagccatgaagcattacgaggtggagattctggacgcaaagacaagggagaagctgtgtttcttggacaaggtggagccccacgccaccattgcggagatcaagaacctcttcactaagacccatccgcagtggtaccccgcccgccagtccctccgcctggaccccaagggcaagtccctgaaggatgaggatgttctgcagaagctgcccgtgggcaccacggccacactgtacttccgggacctgggggcccagatcagctgggtgacggtcttcctaacagagtacgcggggccccttttcatctacctgctcttctacttccgagtgcccttcatctatggccacaaatatgactttacgtccagtcggcatacagtggtgcacctcgcctgcatctgtcactcattccactacatcaagcgcctgctggagacgctcttcgtgcaccgcttctcccatggcactatgcctttgcgcaacatcttcaagaactgcacctactactggggcttcgccgcgtggatggcctattacatcaatcaccctctctacactccccctacctacggagctcagcaggtgaaactggcgctcgccatctttgtgatctgccagctcggcaacttctccatccacatggccctgcgggacctgcggcccgctgggtccaagacgcggaagatcccataccccaccaagaaccccttcacgtggctcttcctgctggtgtcctgccccaactacacctacgaggtggggtcctggatcggtttcgccatcatgacgcagtgtctcccagtggccctgttctccctggtgggcttcacccagatgaccatctgggccaagggcaagcaccgcagctacctgaaaggagttccgggaactacccgcccctgcgcatgcccatcatccccttcctgctctgagcgctcacccctgctgaggctcagcccctcaacccggtggcattctgggggaggagtggggcccacagctctccagcacccggaataaagcccgcctgccccagtcgg

SEQ ID NO: 258850 - DNA, 1759 bp, Homo Sapiens
agtttctgccgcggctttgcggggacgggggagtggtagtgggggctgcagctgccggacccaggtgcggaagtgcgagggcccaggtggctgaaggggccgttaggaacatccaagcggtggggcacaggcagatccccgacctgacctggaccacccttctcctcttggcccgccccttcaactcgcctccgcttaggtctggattggccccgccccctgacctgagcctggtccttcttcaggcactgacccttgacctccggtggctcccccatctctcaggcgcgatggctacgggcgcggatgtacgggacattctagaactcgggggtccagaaggggatgcagcctctgggaccatcagcaagaaggacattatcaacccggacaagaaaaaatccaagaagtcctctgagacactgactttcaagaggcccgagggcatgcaccgggaagtctatgccttgctctactctgacaagaaggatgcacccccactgctacccagtgacactggccagggataccgtacagtgaaggccaagttgggctccaagaaggtgcggccttggaagtggatgccattcaccaacccggcccgcaaggacggagcaatgttcttccactggcgacgtgcagcggaggagggcaaggactacccctttgccaggttcaataagactgtgcaggtgcctgtgtactcggagcaggagtaccagctttatctccacgatgatgcttggactaaggcagaaactgaccacctctttgacctcagccgccgctttgacctgcgttttgttgttatccatgaccggtatgaccaccagcagttcaagaagcgttctgtggaagacctgaaggagcggtactaccacatctgtgctaagcttgccaacgtgcggggctgtgccaggcacagaccttaagataccagtatttgatgctgggcacgaacgacggcggaaggaacagcttgagcgtctctacaaccggaccccaaagcaggtggcagaggaggagtacctgctacagtgagctgcgcaagattgaggcccggaagaaggagcgggagaaacgcagccaggacctgcagaagctgatcacagcggcagacaccactgcagagcagcggcgcacggaacgcaaggcccccaaaaagaagctaccccagaaaaaggaggctgagaagccggctgttcctgagactgcaggcatcaagtttccagacttcaagtctgcaggtgtcacgctgcggagccaacggatgaagctgccaagctctgtgggacagaagaagatcaaggccctggaacagatgctgctggagcttggtgtggagctgagcccgacacctacggaggagctggtgcacatgttcaatgagctgcgaagcgacctggtgctgctctacgagctcaagcaggcctgtgccaactgcgagtatgagctgcagatgctgcggcaccgtcatgaggaactggcccgggctggtgtgctagggggccctgccacaccagcataaggcccaggcccggcctctgctgagccggcagtgactgaacccggacttggtcctgaccccaaggacaccatcattgatgtggtgggcgcacccctcacgcccaattcgagaaagcgacgggagtcggcctccagctcatcttccgtgaagaaagccaagaagccgtgagaggccccacggggtgtgggcgacgctgttacgtaaatagagctgctgagttccgaaaaaacg

SEQ ID NO: 258851 - DNA, 1120 bp, Homo Sapiens
  misc_feature (14)..(14): n is a, c, g, or t
  misc_feature (16)..(16): n is a, c, g, or t
  misc_feature (22)..(22): n is a, c, g, or t
  misc_feature (31)..(31): n is a, c, g, or t
  misc_feature (36)..(37): n is a, c, g, or t
  misc_feature (41)..(41): n is a, c, g, or t
  misc_feature (46)..(46): n is a, c, g, or t
  misc_feature (49)..(49): n is a, c, g, or t
  misc_feature (52)..(52): n is a, c, g, or t
  misc_feature (54)..(54): n is a, c, g, or t
  misc_feature (80)..(81): n is a, c, g, or t
  misc_feature (85)..(85): n is a, c, g, or t
  misc_feature (88)..(88): n is a, c, g, or t
  misc_feature (93)..(93): n is a, c, g, or t
  misc_feature (114)..(114): n is a, c, g, or t
  misc_feature (131)..(131): n is a, c, g, or t
  misc_feature (137)..(137): n is a, c, g, or t
  misc_feature (143)..(143): n is a, c, g, or t
  misc_feature (960)..(968): n is a, c, g, or t
gcctgccgagttgngncaattncccgcccancctanncaantaagnctnttngnagagtcaccttttaccgcaaagagtnncttnccnaaaancctactcccgggtgagtctgnagtcaaggtgtccgtanggcctnatcgtnggctcgtccactctatgtccagacggctcagagcttctgcgacagccctggggagaagggggtgccacaccacctgccctgctcctgctgctctcccgcctctgcctggactacgagacggccaccatctcctacatcctcactctcactgatgaacagtttctggtgcaggatcagttcccagtgacgcccgtgagcacgctgtgtgcagaggccagggaaacggcgcggcggctgctgacccactacgtgaaggtgcagggcctggtcatatcacagatgctgcgcaagagcgtggagactcgcgactggctcagcactctggagccccggaatgtgcgggccgtcatgaagcgggtggtggaggataccaccgccatcgacgtgcaggtggggctcctgtacgaagagggtgttcgcaaggcccagaagcagcgactccagcaagaggactttctccgtgtacagcagctctcggcagcagggcccgctacgcccccagctataccccccagtgccccgatggacaccaacctcttgagcaatatccagaagctattctctgaacgtattgattgtgtttcagccctgtggagttcaacaaggtgtcggtgcctgaccggcatcatcaagaaccagcctggaaaaccctgctggaagtgtgtgcgggcttgccccacctttgggcgccttcgggcttggccagcaaggtgcaaagtggaacttgcccccttttcttgcagcctctaccctgtgggcggttttgtgggcccgaaccaaagaacctccgtggcactttgtctggctgggaccaaannnnnnnnnccctctgccttgccccttgcgcctgccccaataacccctgtgtgcccctgggaaacccccatggggggggttgtaaggtccattcctgccaaaccgcgggtttaaggcgcccatcccccctgtcccatgggcacccgggtcttggtcccctg

SEQ ID NO: 258852 - DNA, 1092 bp, Homo Sapiens
  misc_feature (400)..(400): n is a, c, g, or t
tagggaggatgtcgggttcgtcgctgcccagcgccctggccctctcgctgttgctggtctctggctccctcctcccagggccaggcgccgctcagaacgagccaaggattgtcaccagtgaagaggtcattattcgagacagccctgttctccctgtcaccctgcagtgtaacctcacctccagctctcacacccttacatacagctactggacaaagaatggggtggaactgagtgccactcgtaagaatgccagcaacatggagtacaggatcaataagccgagagctgaggattcaggcgaataccactgcgtatatcactttgtcagcgctcctaaagcaaacgccaccattgaagtgaaagccgctcctgacatcactggccataaacggagtangaacaagaatgaagggcaggatgccactatgtattgcaagtcagttggctacccccacccagactggatatggcgcaagaaggagaacgggatgcccatggacattgtcaatacctctggccgcttcttcatcatcaacaaggaaaattacactgagttgaacattgtgaacctgcagatcacggaagaccctggcgagtatgaatgtaatgccaccaacgccattggctccgcctctgttgtcactgtcctcagggtgcggagccacctggccccactctggcctttcttgggaattctggctgaaattatcatccttgtggtgatcattgttgtgtatgagaagaggaagaggccagatgaggttcctgacgatgatgaaccagctggaccaatgaaaaccaactctaccaacaatcacaaagataaaaacttgcgccagagaaacacaaattaagtactgcttacaatatctttaggttcctgaaactggtggcaacatgacctgctaaaattttctgcttggacctctttggttctctcccctttcaagtgagcaacaccacaatgactgtctaaagcatgccttatttagcctctcctgtaagggtgatctagccaggtacattttaaacaatgcttcagtgtagaaagtgtaaactattttgggcttgatgtgctgtgaatgttgc

SEQ ID NO: 258853 - DNA, 920 bp, Homo Sapiens
  misc_feature (319)..(344): n is a, c, g, or t
ggctggaccggtccggaattccgggatgtgacgggtaggcgagacgcgcacgcgcagagagccccagccacgccggcccaggtggcctcagcgagggatgcggagacgcccctgaacgaccatggcatcggccgacgagctgaccttccatgaattcgaggaggccactaatcttctggctgacaccccagatgcagccaccaccagcagaagcgatcagctgaccccacaagggcacgtggctgtggccgtgggctcaggtggcagctatggagccgaggatgaggtggaggaggagagtgacaaggccgcgctcctnnnnnnnnnnnnnnnnnnnnnnnnnncgggattctggaccttcagctactatcagagcttctttgacgtggacacctcacaggtcctggaccggatcaaaggctcactgctgccccggcctggccacaactttgtgcggcaccatctgcggaatcggccggatctgtatggccccttctggatctgtgccacgttggcctttgtcctggccgtcactggcaacctgacgctggtgctggcccagaggagggacccctccatccactacagcccccagttccacaaggtgaccgtggcaggcatcagcatctactgctatgcgtggctggtgcccctggccctgtggggcttcctgcggtggcgcaagggtgtccaggagcgcatggggccctacaccttcctggagactgtgtgcatctacggctactccctccttgtcttcatccccatggtggggcctgtgggctcatcccctgtgcctttgggctgcaagtggcctcttttgggggccgcttggccccctgtggacctgcccagcccgccccggggtctgtggaatttcaccccctcctgggccccggtgggggccccggtgaagggga

SEQ ID NO: 258854 - DNA, 999 bp, Homo Sapiens
  misc_feature (5)..(5): n is a, c, g, or t
  misc_feature (11)..(11): n is a, c, g, or t
  misc_feature (13)..(13): n is a, c, g, or t
  misc_feature (16)..(16): n is a, c, g, or t
  misc_feature (21)..(21): n is a, c, g, or t
  misc_feature (63)..(63): n is a, c, g, or t
  misc_feature (76)..(76): n is a, c, g, or t
  misc_feature (79)..(79): n is a, c, g, or t
  misc_feature (89)..(100): n is a, c, g, or t
  misc_feature (159)..(159): n is a, c, g, or t
  misc_feature (178)..(179): n is a, c, g, or t
  misc_feature (270)..(270): n is a, c, g, or t
  misc_feature (717)..(717): n is a, c, g, or t
tcaanaaatgncnggngcccnaactaaaatccctccagcctccttgaacctcccaccaccccntatttccttaatntcncagtctgctnnnnnnnnnnnnaaccccaccagctgggcaagaagtctgcaaaagcgcatctgcagctgtctctaactctncccagccatctcccgtatnntttggtaccttgattccttgactcttaataagccaagccaccttatctctgtagttcttatttttttgttgactaaatttggggggttctnttttatggtcatgtcactgacctattaaattggggcttggtgcttttccaccttccccctctgaatgaaagccaaggaatgggggaagagcgggaactctgccgcggaggtggagcaagaacggtgaagggccctggtcccagagaggctggtgggtccctctcccaaaggaaggcagacagtctctgctttgccttggaccttggtgctgggggtggggaggcctgggggggacactccccactcccattccccttcctttgtcctaatcctggaattaagtacaggggtttataggttctatttcttcccaagagccctgcaaagaaccccagtttcctatttggatgcccctacactgttgtgtttcagtggaatgtattatcatttaaaaaacaacctttgaatggggcactttttctttccctgttttaaaaattgaaaaantccttacagtacaaacaggactgtcagggtgggggtgttggtgctgtaagaggtcactcttgagtgcattttggcactgggatgggatggctggggtgggaagacccccatccccacccccaacttcttttctaatatttaaggagtgttttgtaggattcaacaaccaccacaacttgaatttgtatcatgggaggtgggagggagtggcttagaggtgtctgcctatgcttaaagccaactgtggaagttttgttttcccttttttgtataataaagtga

SEQ ID NO: 258855 - DNA, 273 bp, Homo Sapiens
  misc_feature (37)..(37): n is a, c, g, or t
  misc_feature (212)..(212): n is a, c, g, or t
  misc_feature (215)..(215): n is a, c, g, or t
  misc_feature (217)..(218): n is a, c, g, or t
  misc_feature (235)..(235): n is a, c, g, or t
ggtctcccctgttcatctgagaggccaagctgggcanccctaggctcagaacctgggcttcaagaaatgtgctgggagctcctaacttacacatccctccagccttccttgaatcctcccaccaccccctatttcctttaatttctcaggtctgctccctcctcccccaaccccacagctcgggcaagaagtctgcaaaagctgcatctgcntgntnntctaactcttcccagcnatctcccgtatttattggtaccttgattccttgactct

SEQ ID NO: 258856 - DNA, 979 bp, Homo Sapiens
  misc_feature (57)..(57): n is a, c, g, or t
  misc_feature (223)..(223): n is a, c, g, or t
  misc_feature (961)..(961): n is a, c, g, or t
agcagaattctgcgcttcttggtgaagaaagagaggcacgtccttgaatgggcgggnggagacacaaaagggaccccccaaaatccacatggggtgctgggaaccccaaaatccagtggaaggcacatcaggcacaaattccagagaggttctgagtggaatccctgccacaaatcccagccattggagatggaggagctcccaaaatttagaagtatccccnaaacccaagaggaaaaccaaatgatggaggaaaacagggggcctcaatctttggcgggggtcccccaattcccagaagaactggaaaagcacatggggaccccctcatctcccagggtggggaatgggggatcctgaggcagcatcagggcagagacgaacattgattggctggtgggcaaggctccttggcgtggagggctgagattggctccctggtggcttgggcggggcctaaggcacaaggcgggctgcgctgagtaggcaggcaggcaactcatcggcctgggtgcggtgcaaggagggttccgaggcactccgctcaatcttggggagtgaccgttgcagcagctcaattgtggccaggatctgggggaagaggggccgctcctcccgctggaacttgaggcagtcaaacaacaggcgccgcatggccttggggcagttgctggagattttgctgaggtccggggacaaataaccacggcccaccataaagataatctggtcacggcagccaatgtgtgctgtaaggcagggagccagtcataagctcgtagagaacaaccccgtaagcgatagacgtctgactgggagctggaggggttcgggtcctgcatacggatcacctcagctgccatccacagcacagatcctgaaggctgctccaagggctggggcccgctccatcgagtcttcactgtggccaagccaaagtcaccgatcttcaccgtgagcncctcatgtagggagatgt

SEQ ID NO: 258857 - DNA, 437 bp, Homo Sapiens
  misc_feature (21)..(21): n is a, c, g, or t
  misc_feature (55)..(55): n is a, c, g, or t
  misc_feature (64)..(64): n is a, c, g, or t
aagcccaaggaaccttgcccnaccaacccaaacaaagttcgtctctgcccctgangctgccctnaggaatcccccaattcccccaccccgggaagatgagggggtccccatgtgcttttccagttcttctggaattgggggacccccgccaaagactgagccccctgtctcctccatcatttggtttcctcttggctttggggatacttctaaattttgggagctcctccatctccaatggctgggatttgtggcagggattccactcagaacctctctggaatttgtgcctgatgtgccttccactggattttggggttcccagcaccccatgtggattttggggggtcccttttgtgtctcccccgccattcaaggactcctctctttcttcaccaagaagcacagaattctgctgggcctttgcttgtacattc

SEQ ID NO: 258858 - DNA, 1856 bp, Homo Sapiens
  misc_feature (1775)..(1775): n is a, c, g, or t
ctgcaagccacagtggctgccctgtgcgtgctgcgaggtgggggaccctgggcaggaagctggctgagccccaagaccccgggggccatgggcggggatctggtgcttggcctgggggccttgagacgccgaaagcgcttgctggagcaggagaagtctctggccggctgggcactggtgctggcaggaactggcattggactcatggtgctgcatgcagagatgctgtggttcggggggtgctcgtgggcgctctacctgttcctggttaaatgcacgatcagcatttccaccttcttactcctctgcctcatcgtggcctttcatgccaaagaggtccagctgttcatgaccgacaacgggctgcgggactggcgcgtggcgctgaccgggcggcaggcggcgcagatcgtgctggagctggtggtgtgtgggctgcacccggcgcccgtgcggggcccgccgtgcgtgcaggatttaggggcgccgctgacctccccgcagccctggccgggattcctgggccaaggggaagcgctgctgtccctggccatgctgctgcgtctctacctggtgccccgcgccgtgctcctgcgcagcggcgtcctgctcaacgcttcctaccgcagcatcggcgctctcaatcaagtccgcttccgccactggttcgtggccaagcttgacatgaacacgcaccctggccgcctgctgctcggcctcacgcttgacctctggctgaccaccgcctgggtgctgtccgtggcccgagaggcaggctgttaatgccactgggcacctttcagacacactttggctgatccccatcacattcctgaccatcggctatggtgacgtggtgccgggcaccatgtggggcaagatcgtctgcctgtgcactggagtcatgggtgtctgctgcacagccctgctggtggccgtggtggcccggaagctggagtttaacaaggcagagaagcacgtgcacaacttcatgatggatatccagtataccaaagagatgaaggaatccgctgcccgagtgctacaagaaacccgggatgttctacaaacatactccccaggaaggagtctcatgctgcccgcaggcatcagcgcaacgctggccgccatcaacgcgtgagggccgctttgtatgcacacgtgtccatgtgcacccatgtccaagtcacctctctgcacggctgtgtgtgtgcatgtccatgcctgtccaggtcaggacacccaggtgtggtctcactcaacatccaggtctcacctggatctgaccgtgcatgactctatgtgtctgtgctggtttgtctccgcatatctcggtgtgtctgcggacctgggtacctgggtttctactggggatgggggctcgtggggaggcagggtgcatcccctcccactctttcagctcttcgacaactttgtttctttgttttgtttcttcatgtgcctctcctcccttcattcctcccctgagctacagctacattcagggaccaggcttgtaaaactgactccccacttcttcccacaggttccgccaggtgcggctgaaacaccggaagctccgggaacaagtgaactccatggtggacatctccaagatgcacatgatcctgtatgacctgcagcagaatctgagcagctcacaccgggccctggagaaacagattgacacgctggcggggaagctggatgccctgactgagctgcttagcactgccctggggccgaggcagcttccagaaccagcaacagtcaantagctggtgaggggctgggattgggcaggaagcatctggagaagggtctgtggcacacctatgtgctaaggggcggggatg

SEQ ID NO: 258859 - DNA, 1097 bp, Homo Sapiens
  misc_feature (4)..(4): n is a, c, g, or t
  misc_feature (26)..(26): n is a, c, g, or t
  misc_feature (31)..(31): n is a, c, g, or t
  misc_feature (33)..(33): n is a, c, g, or t
  misc_feature (35)..(35): n is a, c, g, or t
  misc_feature (43)..(44): n is a, c, g, or t
  misc_feature (47)..(47): n is a, c, g, or t
  misc_feature (54)..(54): n is a, c, g, or t
  misc_feature (59)..(59): n is a, c, g, or t
  misc_feature (62)..(62): n is a, c, g, or t
  misc_feature (71)..(71): n is a, c, g, or t
  misc_feature (76)..(76): n is a, c, g, or t
  misc_feature (79)..(79): n is a, c, g, or t
  misc_feature (109)..(109): n is a, c, g, or t
  misc_feature (112)..(112): n is a, c, g, or t
  misc_feature (116)..(116): n is a, c, g, or t
  misc_feature (137)..(137): n is a, c, g, or t
  misc_feature (145)..(145): n is a, c, g, or t
  misc_feature (153)..(153): n is a, c, g, or t
  misc_feature (164)..(164): n is a, c, g, or t
  misc_feature (168)..(168): n is a, c, g, or t
  misc_feature (179)..(179): n is a, c, g, or t
  misc_feature (195)..(195): n is a, c, g, or t
  misc_feature (202)..(202): n is a, c, g, or t
  misc_feature (335)..(335): n is a, c, g, or t
  misc_feature (367)..(367): n is a, c, g, or t
  misc_feature (392)..(392): n is a, c, g, or t
  misc_feature (445)..(445): n is a, c, g, or t
  misc_feature (535)..(535): n is a, c, g, or t
  misc_feature (617)..(618): n is a, c, g, or t
  misc_feature (636)..(636): n is a, c, g, or t
  misc_feature (674)..(674): n is a, c, g, or t
tgtncccaattccttgactggctgancttancntngcgagcgnnccnttattanttccngtntgggggacncagtnccncagacccctccttatgcccttgaacagcgnctntctngagatgaggacctgcagctgnccatgccnacagcctntcatagatgangtcngctgggaaganacccgcagatttgttntgagctngatgccgggtccagaatcgctgcacagttcccgacaggacagcgccttccccccatgcgctgggaggggaccctccatttctccccctcacccatgctgagtgtagagccggggcctgggtggcgggtggggnccgggtgggaggtggcagtagtcttagcctgngcactctcttccttgggtgtttggngctggctcctggggactacaaatcccagagtgcggtgtgcccggcctcatttntgatagatcccgcttgggggaggtggtgtatggttacggagctgtgcttcttgggacatgtagtagcccaggtcggcttgtaactcgctntgagatggggagattttgtcttttgatttatccctgtagcgctggcaggtttgtagatgaagggggaattatctgagccttnnttcaccctaacacatctngctacccccagggttagagtgggcagggcagagccgcncagcacctgggagcggtacctttcccttgggcagcctggggtcccaggaacaagccagggcgagtggcatgtctgcctgagcagggtgtggccccagaaagctgaggagtgtgggctggcagagagcttcgagggcaaggccacccgcgggggcgtgtgtgtggtggggcttggcatgtgatggcagctccaggcatgccgctgcttgtatggctttctttggcctctgaccctgctgcccattctttccaacatcacagatgaactgcctctcctcctccctgcctggggagcccagtggccagggaggggagtggtggagccagtcgctgtaacactgagcctcagagacgaaccaaaaccagctgggctgagctcagatccagggggaaatgctggaagtcaataaaactgagttttgag

SEQ ID NO: 258860 - DNA, 672 bp, Homo Sapiens
  misc_feature (3)..(3): n is a, c, g, or t
  misc_feature (8)..(8): n is a, c, g, or t
  misc_feature (18)..(18): n is a, c, g, or t
  misc_feature (24)..(24): n is a, c, g, or t
  misc_feature (31)..(31): n is a, c, g, or t
  misc_feature (44)..(44): n is a, c, g, or t
  misc_feature (58)..(58): n is a, c, g, or t
  misc_feature (68)..(68): n is a, c, g, or t
  misc_feature (74)..(75): n is a, c, g, or t
  misc_feature (83)..(83): n is a, c, g, or t
  misc_feature (90)..(90): n is a, c, g, or t
  misc_feature (95)..(95): n is a, c, g, or t
  misc_feature (99)..(99): n is a, c, g, or t
  misc_feature (105)..(105): n is a, c, g, or t
  misc_feature (110)..(110): n is a, c, g, or t
  misc_feature (112)..(112): n is a, c, g, or t
  misc_feature (114)..(114): n is a, c, g, or t
  misc_feature (131)..(131): n is a, c, g, or t
  misc_feature (164)..(165): n is a, c, g, or t
  misc_feature (168)..(168): n is a, c, g, or t
  misc_feature (174)..(174): n is a, c, g, or t
  misc_feature (206)..(206): n is a, c, g, or t
  misc_feature (208)..(208): n is a, c, g, or t
  misc_feature (216)..(216): n is a, c, g, or t
  misc_feature (240)..(240): n is a, c, g, or t
  misc_feature (256)..(256): n is a, c, g, or t
  misc_feature (275)..(275): n is a, c, g, or t
  misc_feature (291)..(291): n is a, c, g, or t
acntaatnacattctctntaatancaaaatncaaatatatcaantacctatcaaattnctaaaaatantttacnnacccctantataaanaagantgancgcaancccanananaaacacagagagaagtncagaagagccaaaattagaagaagaggccaggnncgngaagtncgtaaagaagagcaacgtaataggggtgaatnanctggcatncgagcaggagttaaaaagagcatnaagcttaaatgaagtnttttgcttagcataaggtntttggcagttttggancaataaatttttacttttaactaaagtcattgtattaatatataatactttaaattttaaaaattcttgtccacaaggaaatttgtctgggttattggacaatttataagaactatgggagcaatatgaaggtgcttgagaaaagagatgatgttgaagttttccaatattctgttgaagttttccaatagcttagggaaatttcacagttcattgtggagtgttaaacttagaacatgtgtaacttttcacataaagagaatgcatctttgacagttatcttatttgtaaggcagcctataaaatagttctgaagtattttatttacctaactataattattgggccagatacttgttaataaatgggcttaatgttacc

SEQ ID NO: 258861 - DNA, 1064 bp, Homo Sapiens
  misc_feature (724)..(724): n is a, c, g, or t
  misc_feature (726)..(726): n is a, c, g, or t
  misc_feature (730)..(730): n is a, c, g, or t
  misc_feature (738)..(762): n is a, c, g, or t
  misc_feature (764)..(765): n is a, c, g, or t
  misc_feature (768)..(768): n is a, c, g, or t
  misc_feature (770)..(770): n is a, c, g, or t
  misc_feature (776)..(778): n is a, c, g, or t
  misc_feature (780)..(782): n is a, c, g, or t
  misc_feature (784)..(794): n is a, c, g, or t
  misc_feature (799)..(799): n is a, c, g, or t
  misc_feature (804)..(805): n is a, c, g, or t
  misc_feature (824)..(825): n is a, c, g, or t
gcctgggtggcgaattcggcacgaggtcgacctctgctgcagcccgtgccgccgccgcctcctgggaagagaggaagcgggagaggagcccacgtcgcctgtcacccaatatctccagccgcgcagtcccgaagagtgtaagatgttcgcctgcgccaagctcgcctgcaccccctctctgatccgagctggatccagagttgcatacagaccaatttctgcatcagtgttatctcgaccagaggctagtaggactggagagggctctacggtatttaatggggcccagaatggtgtgtctcagctaatccaaagggagtttcagaccagtgcaatcagcagagacattgatactgctgccaaatttattggtgcaggtgctgcaacagtaggagtggctggttctggtgctggtattggaacagtctttggcagccttatcattggttatgccagaaacccttcgctgaagcagcagctgttctcatatgctatcctgggatttgccttgtctgaagctatgggtctcttttgtttgatggttgctttcttgattttgtttgccatgtaacaaattactgcttgacatgttggcattcatattaattacggatgtaattctgtgtatcttactgtgactccgaaaactgtagtattggtgtcatgggaatgtacgttatttccaaagtcatttcattaaagatgaaaactttaaaaaaacacncnccgnacgaaaannnnnnnnnnnnnnnnnnnnnnnnnannaananaaaaannnannnannnnnnnnnnnttggnaaaanncctcccaccccacaaaaanntttcctaaaccattcctttttggccccccggccccccaaaaaggaaaaggggaccatggggcaaaagcctggtttccccaaagaagaacccggggtacaggaccaagggggcctgggattcctcccccgaataaaaaaaccgcccccgggggggaacaacccggagcgggtttcgtggacaaacacacccccaggaagggaagggttccgcggagaggtcctttttactggcggcaact

SEQ ID NO: 258862 - DNA, 587 bp, Homo Sapiens
  misc_feature (468)..(468): n is a, c, g, or t
  misc_feature (542)..(542): n is a, c, g, or t
  misc_feature (555)..(555): n is a, c, g, or t
gggactccttcgacctctgctgcagcccgtgccgccgccgcctcctgggaagagaggaagcgggagaggagcccacgtcgcctgtcacccaatatctccagccgcgcagtcccgaagagtgtaagatgttcgcctgcgccaagctcgcctgcaccccctctctgatccgagctggatccagagttgcatacagaccaatttctgcatcagtgttatctcgaccagaggctagtaggactggagagggctctacggtatttaatggggcccagaatggtgtgtctcagctaatccaaagggagtttcagaccagtgcaatcagcagagacattggatactgctgccaaatttattggtgcaggtgctgcaacagtagggagtggctggttctggtggctggtattgggaacagtctttgggcagcctttatcattggttatgcccagaaaccctttcgctgaaggcagncagctgtttcttcattactggtattccgggggattttgccttgttttgaaagctatgggtctctttttgttttnatgggttgctttncttgaatttgttttgccatgtaacaaattact

SEQ ID NO: 258863 - DNA, 545 bp, Homo Sapiens
  misc_feature (22)..(22): n is a, c, g, or t
  misc_feature (32)..(32): n is a, c, g, or t
  misc_feature (40)..(40): n is a, c, g, or t
  misc_feature (82)..(82): n is a, c, g, or t
  misc_feature (106)..(106): n is a, c, g, or t
aagggccccccagggaataaangggccccccnaaaagggntgccccaaagccaaacccccaaagggagttccaagacccaangcaaccaagcaggagacaatgganacctgcctgcccaaaataatgggtgcaaggtgcctgcaaacaagtagaagtggctggtcctgggtgctgggaattgggaacaagccttgggcagccctatcaatgggtatgcccagaaacccctccgctgaaagcagcagctgttcctcatacgcctaccccctgggatttgcccttgtctgaagctatgggtctcttttgtttgatggttgctttcttgattttgtttgccatgtaacaaattactgcttgacatgttggcattcatattaattacggatgtaattctgtgtatcttactgtgactccgaaaactgtagtattggtgtcatgggaatgtacgttatttccaaagtcatttcattaaagatgaaaactttccaccaaaaactaccaccaaacccatcaacatcacaaccccccccaacaataatctggt

SEQ ID NO: 258864 - DNA, 1045 bp, Homo Sapiens
  misc_feature (12)..(12): n is a, c, g, or t
  misc_feature (18)..(18): n is a, c, g, or t
  misc_feature (26)..(26): n is a, c, g, or t
  misc_feature (48)..(48): n is a, c, g, or t
  misc_feature (52)..(52): n is a, c, g, or t
  misc_feature (56)..(56): n is a, c, g, or t
  misc_feature (60)..(60): n is a, c, g, or t
  misc_feature (67)..(67): n is a, c, g, or t
  misc_feature (79)..(79): n is a, c, g, or t
  misc_feature (91)..(91): n is a, c, g, or t
  misc_feature (108)..(108): n is a, c, g, or t
  misc_feature (111)..(111): n is a, c, g, or t
  misc_feature (128)..(129): n is a, c, g, or t
  misc_feature (133)..(133): n is a, c, g, or t
  misc_feature (164)..(164): n is a, c, g, or t
  misc_feature (176)..(176): n is a, c, g, or t
  misc_feature (182)..(182): n is a, c, g, or t
  misc_feature (193)..(193): n is a, c, g, or t
  misc_feature (199)..(199): n is a, c, g, or t
  misc_feature (214)..(215): n is a, c, g, or t
  misc_feature (218)..(218): n is a, c, g, or t
  misc_feature (232)..(232): n is a, c, g, or t
  misc_feature (238)..(238): n is a, c, g, or t
  misc_feature (249)..(250): n is a, c, g, or t
  misc_feature (307)..(307): n is a, c, g, or t
  misc_feature (341)..(341): n is a, c, g, or t
  misc_feature (349)..(349): n is a, c, g, or t
  misc_feature (368)..(368): n is a, c, g, or t
  misc_feature (382)..(383): n is a, c, g, or t
  misc_feature (386)..(386): n is a, c, g, or t
ctgtgagggaantatatnggctgatncatcgagcagaaagcacggggngggnaagnaacngagccgncaaactctcccngtaaacttaaancgaatataaccgatgtntcntaccctgagaaggcatnnctancaggttgtccaccacgttcagggcaaacttncccgtcctattnaactcnaatatgggcancttttnacaggcacctttctnntgntagatgatagaggnccaccnccgctcctgtnntgtgggaggtccgagaatgatgcctcaagaagagaacatacagctgcccgtatatgntagccattgcgatgtctctttcggaaaggctggntttagttnacttaggcgcagctggtanttcaatctcaaatnnggncagcttcgacatagtgccagccctaaagtggaaaaggctccaggacattctccaggaccgtgggtagaaagcaagatcacggcgctctcggggcaggtacatgtaccaattcacattgaggattgtggctcttcaagagtttcagactccgtttctctggtaatacctggtaaaattcgatcccttgatctgttatgaagacaatttcagttgaactagtccagcagaatcctagaatgttggcattcttagtcttgcactcctgtgtgtattccagctgggaattatcagggataaaattacaaaaatccacagtctttgaggtcctctgaacagccaatatcttattttctaaggaaaacttaatgcacttcacttctcctttgtcatccattctaaatgagatgggattcctatcatctgggcctttaactaccacgccagtagctccaccagatcgaacagcaaaaacctgcttgttggcctcatcgaagaagacgcagttgaaagggttcgccttctcgaactgcaccggccgctcgcacagctccagatagtagtcctcctcgcccatggcgggcgccgcgcccgcggcgggggccccgggggcggtcgccagagtggagcaggatgcgcggtggagcccggcccggactccc

SEQ ID NO: 258865 - DNA, 1625 bp, Homo Sapiens
  misc_feature (25)..(25): n is a, c, g, or t
  misc_feature (49)..(49): n is a, c, g, or t
  misc_feature (94)..(94): n is a, c, g, or t
  misc_feature (104)..(104): n is a, c, g, or t
  misc_feature (106)..(106): n is a, c, g, or t
  misc_feature (210)..(210): n is a, c, g, or t
  misc_feature (228)..(228): n is a, c, g, or t
  misc_feature (271)..(271): n is a, c, g, or t
  misc_feature (282)..(282): n is a, c, g, or t
  misc_feature (1020)..(1020): n is a, c, g, or t
gatcacagaaaccaacctgaccggncacgatgagaaggttatctttganaacttcgagctgctcaaagtgctgggcacgggatcctacggcaangtgttccttntncggaatgcgggcgggcacgacgcggggaatctgtacgccatgaaggtgctgcgcaaagcggcgctggttcagccgccaaaacgcaaaaacacacgcgcaccgancgctcggtgctggaactngttcgccaggcgcccttcctggtcacactgcactacgctttcnatacggattcnaagctgcacctcatcctggactatgtgaacggcggggaaatgttcacccacctctaccagcgccagtacttcaaggaggctgaggtgcgcgtgtatgggggtgagatcgtgctggccctggaacacctgcacaaactcggcatcatttaccgagacctgaaactggagaatgtgctgctggactccgaaggccacattgtcctcacggacttcgggctgagcaaggagttcctgacggaggagaaagagcggaccttctccttctgtggcaccatcgagtacatggcccccgaaatcatccgtagcaagacggggcatggcaaggctgtggactggtggagcctgggcatcttgctcttcgagctgctgacgggggcctcgcccttcaccctggaaggcgaaaagaacacgcaggctgaggtgtctcgacggatccttgaagtgctcccctcccttcccccctcggatcgggcccgtggcgcaggacctgctgcagcggctgctttgtaaggatcctaagaagcgattgggcgcggggccccagggggcacaagaagtccggaaccatcccttcttccagggcctcgattgggtggctctggctggccaggaagattccagccccattccggccccaaatccgctcagagctggatgtgggcaactttgcggaggaattcactcggctggagcctgtctactcaccccctggcagcccccccacctggggacccccgnaatctttcagggatactccttttgtggcaccctccattctctttgaccacaacaacgcggtgatgaccgatgggctggaagcgcctggtgctggagaccggccaggtcgggcagcggtggccaggagcgctatgatgcaggactcgcccttcttccagcagtacgagctggacctgcgggagcctgcgctgggccagggcagcttttctgtgtgtcgccgctgccgccagcgccagagcggccaggagttcgcagtcaagatcctcagtcgcaggctggaggcgaacacgcagcgcgaagtggctgccctgcgcctgtgccagtcacaccccaacgtggtgaatctgcacgaggtgcatcacgaccagctgcacacgtacctggtcctggagctgctgcggggcggggagctgctggagcacatccgcaagaagcggcacttcagcgagtcggaagcaagccagatcctgcgcagcctccgtgtcggccgtgagcttcatgcacgaggaggcgggcgtggtgcaccgcgactcaagccggagaacatcctgtcgccgacgacacgcccggggcccggtgaaatcatcgacttcgggttcgcgcgg

SEQ ID NO: 258866 - DNA, 2289 bp, Homo Sapiens
  misc_feature (194)..(282): n is a, c, g, or t
  misc_feature (1962)..(2032): n is a, c, g, or t
aagatgagtggcgctcgcggtggggggtggccgcaggcgaccgagggggtagaaaagagcaagcgcggtgctgtcgaccttcaccagcgttcgccgcctcgtcttggcggaggaaagcgctggtaggaacgacaaatatgggggtggggtgtgtgggcggcgatcttaatgtaatcgcgatactactcttttannnnnnnnnnnnnnnnnnnnnnnnnnnnnnnnnnnnnnnnnnnnnnnnnnnnnnnnnnnnnnnnnnnnnnnnnnnnnnnnnnnnnnnnngggtggggtgtgcaaccacagggtaaggcgggggagggatttcttgtttaggtggtgaggccccgttttgtctttcgccggagcagggtgcttgtgatagtaaggggggggttgtcgattcaaagccttctccggggggtattttggttgggtcgatccctgtgcattcctggcggtattcgcgcccccaccctggtaagctcgcccctgatagggggggcgcgtccgtcacttcaaaaaggtccgcattccttccgcctttctccaggacaccgagggcgaggagggtggtaccaagcggcgcccgccctcagagcactacttccatctctgattggcttcgctgggtgcccgtcgctactccactcgccgctgataggccattcaaccgccgctctgcgcggcgccggctccgcccccgtcgggtgtttgtggtggggctgcggagtcgccgatcccgccggaagcgccaggacaatggggacccgggacgacgagtacgactacctattcaaagtggtgctcatcggggactcaggcgtgggcaagagcaacctgctgtcgcgcttcacccgcaacgagttcaacctggagagcaagagcaccatcggcgtggagttcgccacccgcagcatccaggtggacggcaagaccatcaaggcgcagatctgggacaccgctggccaggagcgctaccgcgccatcacctccgcgtactaccgtggtgcagtgggcgccctgctggtgtacgacatcgccaagcacctgacctatgagaacgtggagcgctggctgaaggagctgcgggaccacgcagacagcaacatcgtcatcatgctggtgggcaacaagagtgacctgcgccacctgcgggctgtgcccactgacgaggcccgcgccttcgcagaaaagaacaacttgtccttcatcgagacctcagccttggattccactaacgtagaggaagcattcaagaacatcctcacagagatctaccgcatcgtgtcacagaaacagatcgcagaccgcgctgcccacgacgagtccccggggaacaacgtggtggacatcagcgtgccgcccaccacggacggacagaagcccaacaagctgcagtgctgccagaacctgtgacccctgcgcctccacccagcgtgcgtgcacgtcctccgcccgcccccgccacggtatcctctggcccctccctgctgtccctctgtggccggctcgttccagccctcccagtgagctctgcacggccgggccggggcccaggaaggacaggagccagtgctaccccgtcctgcccggggaaaagctagaagccccggtttgctgcacccatgaaactcgggtccccacagcgtcttggcggggtggggagggcggcaggatggacggggctggccagaggcgaggaggacgggcggacggcgccgccttctccccttttccttggccgactctagggagcgattgcctccctccctctgtgaccgggtggcccagccagcccgtcgtccccacccagaaccgtgctctgggccaaagcccgaagaaccaggcagcgggggccggggcaggcggaccccccgggctctcagcgcccacccgctcctccgcacacagcagctcgcacaggcctcccacctctgcctgttgattgatgcagggagaagnnnnnnnnnnnnnnnnnnnnnnnnnnnnnnnnnnnnnnnnnnnnnnnnnnnnnnnnnnnnnnnnnnnnnnncctcctctgtctcgtctccccatctggtctggaacctgtttgcaagtgaagcaatatctccgtgttttgtatatacaaccgctcttgtagcctttggtttttgttaatgtagagaaacacagattctttatacactttgtaagatttacgccaaaccccagctctcgatctcttcttctccctgtggcccctgcgctgttgccccgtccccgtcaccccgcccgttactgaaatgtataatctgacttcctgtacag

SEQ ID NO: 258867 - DNA, 213 bp, Homo Sapiens
cctctcccctctcccctcccctctcctgcacgcaacgcgccctctcggccctccctgtcccccccctctgtctcgtctccccatctggtctggaacctgtttgcaagtgaagcaatatctccgtgttttgtatatacaaccgctcttgtagcctttggtttttgttaatgtagagaaacacagattctttatacactttgtaagatttacgcc

SEQ ID NO: 258868 - DNA, 944 bp, Homo Sapiens
  misc_feature (8)..(8): n is a, c, g, or t
  misc_feature (16)..(16): n is a, c, g, or t
  misc_feature (24)..(24): n is a, c, g, or t
  misc_feature (30)..(30): n is a, c, g, or t
  misc_feature (54)..(54): n is a, c, g, or t
  misc_feature (76)..(76): n is a, c, g, or t
  misc_feature (157)..(157): n is a, c, g, or t
tttcttantattgtcntactcctnacacanaaaatacgcttggagaagattgtntcaaaattaatgagaagagtgnaaaaatacctgtaaatgatgtggaccagaccaatgtgccatatgtctatgctgttggtgatattttggaggataagccagngcttactcctgtcgccatacagtcaggcaagctgctagctcagagactttttggggcctctttagaaaagatatatcatacttggttctgccctcttgaatggaccagtagctggcagagagaccaacacttgttacgcaaagataatctgcaataaattcgaccatgatcgggtgataggatttcatattcttggaccaaacgccggtgaggttacccaaggatttgcagctgcaatgaaatgtgggctcacaaaacagctacttgatgacaccattggaattcaccccacatgtgggaaggtgttcacgactttggaaatcacaaagtcgtcaggactagacatcactcagaaaggctgctgaggctaggcctgctgctgtttagttctccttgtcatattctcatttctctcaaagataagaatgctctcggataaaatgagcctgtgctcatgacagctgctctgttactcagggaccagtgcagggctgtcttacgacacttagatgagaaagtagacaaggaaagaggacagcagtgggcatctgccttgtggtcttgctgacagcgagaagcagtgggactgcttccttgacgccttagcttggagccccgttatgaggtgagccaaggctgactctcgcaagccaggactgagcttccctcggaaagacctttgagtggcaccattcacctaagttagcttttctggtcgctattgtttttatcccctttgctttgttgtttctgtgaaaatatattttcagttaagaaatgcaaaaaa

SEQ ID NO: 258869 - DNA, 1105 bp, Homo Sapiens
  misc_feature (937)..(954): n is a, c, g, or t
  misc_feature (967)..(1004): n is a, c, g, or t
  misc_feature (1016)..(1016): n is a, c, g, or t
  misc_feature (1027)..(1027): n is a, c, g, or t
  misc_feature (1041)..(1041): n is a, c, g, or t
  misc_feature (1074)..(1074): n is a, c, g, or t
  misc_feature (1089)..(1089): n is a, c, g, or t
  misc_feature (1093)..(1093): n is a, c, g, or t
tcggcattccgggctcgaaggctgtgcggtctgccaggagctgcggccccgtccggcccgggctggcatgggttggaattggagcctatcccccaacccgaaggctaacagcatcatgtggttactaactgttcctcattcaccggttgatgcctcccagaaaaaaacgccgccagccttcccagaaagccccgctgctgttccaccaacaaccactggagggccccaaacacagctgtgcatctacacagcttcccatcactcacactcgacaggtgcccagcaagcccattgaccacagcaccatcacttcctgggtatcacctgattttgatacagcagcaggaagcttgttcccagcctaccagaaacaccaaaaccgggcgagacactcaagtcgaaaacctaccacctccaagtttccacatctaacttttgagagtccgcaatcttccagttcagagacattggggatccccttaatccgagagtgccccagtgaatcagaaaaggatgtttccagaagacccttagttccagtgctcagtccccaaagctgtgggaacatgtcagtgcaggcacttcagagcttaccttatgtgttcattccacctgatatccagaccccagagtcatcgtctgtgaaggaagaactcattccccaagatcagaaggaaaacagccttctaagctgcactcttcacactggcactcctaatagcccagagcctggacctgttctggttaaagacacccccgaggacaagtatggaataaaggtcacatggaggagacgacagcacctgcttgcttacctcagggagagaggggaagctgagcagaagccaattccttgtgaaaagctgactgccatcagtaatctcaatagaaaagagatatgttttctggagtcataaaggaattcaattcctagggnnnnnnnnnnnnnnnnnngagatgtaatatnnnnnnnnnnnnnnnnnnnnnnnnnnnnnnnnnnnnnnaccttactgcancaccacttctngggttaagcgattntctgcctcagctcccagtggctggattacgggncagcaccatgcctgntaanttttttgatttt

SEQ ID NO: 258870 - DNA, 1787 bp, Homo Sapiens
  misc_feature (895)..(1165): n is a, c, g, or t
attccgggctcgaaggctgtgcggtctgccaggagctgcggccccgtccggcccgggctggcatgggttggaattggagcctatcccccaacccgaaggctaacagcatcatgtggttactaactgttcctcattcaccggttgatgcctcccagaaaaaaacgccgccagccttcccagaaagccccgctgctgttccaccaacaaccactggagggccccaaacacagctgtgcatctacacagcttcccatcactcacactcgacaggtatcacctgattttgatacagcagcaggaagcttgttcccagcctaccagaaacaccaaaaccgggcgagacactcaagtcgaaaacctaccacccccaagtttccacatctaacttttgagagtccgcaatcttccagttcagagacattggggatccccttaatccgagagtgccccagtgaatcagaaaaggatgtttccagaagacccttagttccagtgctcagtccccaaagctgtgggaacatgtcagtgcaggcacttcagagcttaccttatgtggtcattccacctgatatccagaccccagagtcatcgtctgtgaaggaagaactcattccccaagatcagaaggaaaacagccttctaagctgcactcttcacactggcactcctaatagcccagagcctggacctgttctggttaaagacacccccgaggacaagtatggaataaaggtcacatggaggagacgacagcacctgcttggcttacctcagggagagaggggaagctgagcagaacccaattcccttggtgaaaagctgactgccatcagtaattctcaatagaaaagagatatgtttttctggagtcataaaggaattcaattcctagggnnnnnnnnnnnnnnnnnnnnnnnnnnnnnnnnnnnnnnnnnnnnnnnnnnnnnnnnnnnnnnnnnnnnnnnnnnnnnnnnnnnnnnnnnnnnnnnnnnnnnnnnnnnnnnnnnnnnnnnnnnnnnnnnnnnnnnnnnnnnnnnnnnnnnnnnnnnnnnnnnnnnnnnnnnnnnnnnnnnnnnnnnnnnnnnnnnnnnnnnnnnnnnnnnnnnnnnnnnnnnnnnnnnnnnnnnnnnnnnnnnnnnnnnnnnnnnnnnnnnnnnnnnnnnnncccagccgaggatttgttttctaagatactttgtgtcatgaacagttcagtttagtgtcatgaactattcacttcatatttttcttgtattaactgtttaaatttttaaaatatcttgtagtaactctttaaaatgtatgtaagtaaatggctgcagaaagtttttttagagaatcctgcttccatcagtaatacagcaatattaccccatccactaatggtctttgtttccttaaccactactcatttaatccttaatcacctcattccaaactaattcattctgcatttttgagtaccaactcttgtcaggctcagtggcagcttctacgacctgatggatggaaaaaaatcaaactctgtgactctatggttgactgccacctctgcaaccttgactcatctgctgaaaaggcaagaagaagaaagggcagcaagccctgttttagggactacataagatgaggggagataagggggacatagatgagttctttaggattgcgtgtgttttgagtttttgtttctaactgaagaaatctgtcaatattaaatagggtgggaaaatggtttcttagaataactgttcaactgtgtgtaaataaggaaagttttcaatgaa

SEQ ID NO: 258871 - DNA, 1795 bp, Homo Sapiens
ggagcgaggcctgggtggcgaattcggcacgaggccagcgtccaagaagttgaataaagaggagcttcctgtaatcccgaaggggaagcccaaatcggggcgagtgtggaaggaccgctccaagaaaagattctcccagatgcttcaggacaagcccctgcgcacatcgtggcagcggaagatgaaggaacgacaggagaggaagctggccaaggactttgcccgtcacctggaggaggagaaggagaggcgccgccaggagaagaaacagcgccgggctgagaacctgaaacgccgcctggagaatgagcggaaggcagaggtcgtccaagtgatccgaaaccccgccaagctcaagcgggcaaagaagaagcagctgcgctccattgagaagcgggacaccctggccctgctgcagaagcagccgccccagcagccggcagccaagatctgagctcaggacggcccgaggccttccatggccaacaaacatgtcagacacagcacctcaggccgctgctcagatgcctctgctggagctggcactccaaacccatggctccagaacagggacccccaccccgaccggggctcctcagcctttgaaggcttccaggcaggtctgtgtgggacagaagcccagagggggcctgggacctggcagagatgggggcgggaagagattcagctcccatccctccttcctctccttctccaagtgccttcaaaccaagaactgtacattcttctggttcctcagtgagctggtgactggcaggtgactccctcagcagtgtatgccctttctcagcatcctaggtccatcccaggcctggaggctgacagttggggaatccagcttcccccacaccttcccaaaggctgctctgagcacctccacaccccactgcctctgtccccagcaaactgaatccggttcctctccacttttcaatactgaaagattaaaatggggaggttgcagggagcagagcttttccctagcacccactttcccaaaccagtctctgcagaagccccagagaatctaactcatgcctgtccagtctacagcaaaaatatttattgagtgcctgttgcatacaggcacaatcctaggcaccggcaaatacagacaatagaccaaagtccctgccctcgaggagctttcattctgatggagagaaaacataataaacaagcaaaatgcaccacgtgtccaatgggggaagtgctatgagtaaagggggaagggatgggagggagcaggggcgaggtgtcaacacagggtggctctgcagctagctgggcacctcactgttccctttgctcagcacctgctgtgggccaggccttcagtgaccctggcctttggttggcagaaaaaacacaggaccaagatctcaagagtttctcatctgcttcttccactgacatttcatccaccaagcaaaattcattgacaccaacttttcggtccctgggctgcagagctcaaacacagcagtctctgaccccaagtccacggcaggtggaggaatgagacggggtgcagtggaagtgataggtcagaggtgcaagttacccctcccatcagcaaaagggaaatggtagctgcccagccccatgtggactggaggcggggctgcacagatcttgggattaccatgtgcccagagggatcccacagaacaccaggccgacagggaggctggtccgcttagctaagaaatgacgtgtgctgtagtcttagagttgctgtgcccattcaacttctaacgaccgaagactttta

SEQ ID NO: 258872 - DNA, 897 bp, Homo Sapiens
  misc_feature (773)..(773): n is a, c, g, or t
tagcgaggcctgggtggcgaattcggcacgaggggggtgtggaaacttaccggctgagccatggatacaccgttaaggcgcagccgacggctgggaggcctaaggcccgaatcccccgagagcctcacctcagtttcgcggacgagacgggcccttgtggagttcgagtcgaacccagaagaaacgagggagcccgggtctcctccgagtgtgcagcgggctggcctggggtcccccgaaaggccgccgaagacaagcccaggatcaccccgtctgcagcagggtgcaggcttggagtcaccccaagggcagccagagccaggcgcagcgtccccccagcgtcagcaagacctacacctggagtcgcctcaaagacagccagagtacagtcctgaatccccacgatgtcagccgaagccaagtgaggaggcaccgaagtgttctcaggaccagggagtactggcctcggagttggcccagaataaggaggagctgaccccgggggccccccagcatcagctaccgccggtcccaggatcaccagagccttaccccggtcagcaagctcccggtccggagccctctcagccactactggagctgacacccagggcacctggctccccccggggtcagcatgagccgagcaagccacctccagctggggagacggtgacaggcggcttcggggcaaagaagcgaaaaggttcttcatcccaggccccagcgtccaagaagttgaataaagaggagcttcctgtaatcccgaagcnacagcccaaatcggggcgagtgtggaaggaccgctccaagaaaagattctcccagatgcttcaggacaagcccctgcgcacatcgtggcagcggaagatgaagggatggcgggagggaggggga

SEQ ID NO: 258873 - DNA, 1936 bp, Homo Sapiens
  misc_feature (1893)..(1893): n is a, c, g, or t
gctgggtggcgaattcggcacgaggcaggatgttggcacaaaaatacctgtgttttcattctccccctctctccctcctgtgtcttgcgctttatgttttcttccgtttgataattagttggttaaaagctgagggaaccggaaggaaagtgctaggtgttttttaggaactagggtggcggggggacgaacttctcttcctcacatgaggttactgtttctttcctctgtggggcattggatcctcccacagttgccctggtgatgacttagggcttcccatctgtgtacatcccactttgaatcttgatcgtgacaagaaataccttaggccttcagtcaattccgaagctccttcagttgtttttataatgggcgttttcacatgcacatatgtgtatgcatgtatacgcccatacagacatgcacacacagactcctactccattagctaacataccctccctctccacaacccctgtcacatacctttcaggaggtgacagttgtcttagttgtcatctacccagacaaacgtcctgggcccgtcctccctcctgatactgtagcctcttggtacccagggtgagttggtggagaacagagagatgagaagcagagggcttggggaaagcctgttcctctctgactcagccctttttggcattattgcaagagcttgactcctggttgccttttcccagccagttttcagttggggtgaaggtttctgcaagtgtgaggtccagatgctgctgctcatgttgggctttccttttgggaactatttctctttatttatagtgtcgggcttccggggaaagcaatcattggtgtgtatgtgtatgtgcatgcacacacgtgcatatacacatttgtgtatgtggaaatgtgctgggcaagtcaaaactatagaagagttgcctcctgtctctcgaatcttccagagatatcacttaattgttaacagcttttgtgttaatccccttcagcccctagctcttttattctaccacggctggagagttgatacctgcagtcagcctgccagtgactcttagtgtctgtttctgacttatttttcctgtctctgtcttccaacccccaataatatttccaccggggatgcatcatttttactcccaatattctgtagagagggagtcaggatgctgtcttcccacgaatagtactcagtaacaaaccaattgcattttagttgggcagtgctcccacccaccctccagatcccttccagctaaaacccttcccccttccctccatgtgtttctcagtttcccgtttcgtttgttggactgttccactgcccctcctcctcaccctatcacccatggatcgtaatgtaaaattcttttaccatgtcaagaaattattaaaaatacaggtactttgacctctttctaaagccgcagaccctggtgcaatgctctggtggctagggatgtactcatgctcatatgtgtgcacgcttggacacccacctccatggacacctagccaccctgttgtgtgtccttatgccagttgagctgaatcttttccccagtatagtggaaagactgaggcttctgcctactgagcaaggttgggtgcttcatttgtgttcagtctgaattatgagaaagttagctcttcccagacctaagctgccttctctccctactttcagaagatcctagttccttccttcccgagtgatacccatgaactgccagtagaggctgctatcgttccatgtgtaaggaatgaactggttcaaggcgcgtcctacccagtcattttctttaccttatactaattcttcctgaataatgtcttcagtttcttgaggagactcctagttttggttttcaaattacttggagggctgcnctaggaatctatctccctctgacataaagtttcctcatcttcc

SEQ ID NO: 258874 - DNA, 1711 bp, Homo Sapiens
  misc_feature (547)..(584): n is a, c, g, or t
  misc_feature (1335)..(1335): n is a, c, g, or t
  misc_feature (1382)..(1400): n is a, c, g, or t
  misc_feature (1409)..(1447): n is a, c, g, or t
  misc_feature (1494)..(1565): n is a, c, g, or t
  misc_feature (1610)..(1621): n is a, c, g, or t
  misc_feature (1659)..(1669): n is a, c, g, or t
ggatggcgcgggccgaccgggcgcaccgaccatggcctccaaatgccccaagtgcgacaagaccgtgtacttcgccgagaaggtgagctccctggggaaggactggcacaagttctgcctcaagtgcgagcgctgcagcaagacgctgacgcccgggggccacgccgagcatgacgggaagccgttctgccacaagccgtgctacgccaccctgttcggacccaaaggcgtgaacatcgggggcgcgggctcctacatctacgagaagcccctggcggaggggccgcaggtcaccggccccatcgaggtccccgcggcccgagcagaggagcggaaggcgagcggccccccgaagcccagcagagcctccagtgtcaccactttcaccggggagcccaacacgtgcccgcgctgcagcaagaaggtgtacttcgctgagaaggtgacgtctctgggcaaggattggcagccggccctgcctgcgctgcgagcgctgcgggaagacactgacccccggcgggcacgcggaggtgaggggagtgcaacnnnnnnnnnnnnnnnnnnnnnnnnnnnnnnnnnnnnnnatgagggtgagaggcgcgcctagaggggatggggggtggtgcttctgggagctgcgctgccctctcccccacggcgagccggcctgcacgttctggaagcctccaggtgatgggtcgggggagtctgtggactcctccctcagcacccaccttctgccccagcacgacggccagccctactgccacaagccctgctatggaatcctcttcggacccaagggagtgaacaccggtgcggtgggcagctacatctatgaccgggaccccgaagcaaaggtccagccctaggctacagcggctctcatgatgtgggctcacctgcgccccagaccctgcaggggcccccctgcttggctctgctgggagagtgctcagccgcccagtcctgcctgcaagcccagggcgagtattggaggaggggcagccacgggcagagcaccatgcccatccccgagtctctggtgtgtctgccccctctggcatcctctgggcgtcccatgatcccttctgtgtctgcgtgtccgaatccccgtgtgaccctgtcccagcattttcccgccgaccctgcgtgtccccgtggcgctgtccgctctccctctcctgctgcccacccacctgccagtgttatttatgctcccttcgtgggtgatggccacgccctcaccatgtccctggcagagggcttccctccgggatcccctgcctggtgcccacactgcctcgcaagcgctcgccaccctcacgtggctcnacctgctgttgagccttgtgctgtcaataaacggtttgaggattgcnnnnnnnnnnnnnnnnnnnctcgaggcnnnnnnnnnnnnnnnnnnnnnnnnnnnnnnnnnnnnnnncatggtcatagctgtttcctgacccagctttcttgtacaaagtggtnnnnnnnnnnnnnnnnnnnnnnnnnnnnnnnnnnnnnnnnnnnnnnnnnnnnnnnnnnnnnnnnnnnnnnnngtgcagtacccggggaatttaacccccccctaatgaagcgggccnnnnnnnnnnnngggatcccaaaagggaatccttccttggagaaaccccnnnnnnnnnnnctgggcgaaagtaaaatcctggccttgcctttggcaaaaacc

SEQ ID NO: 258875 - DNA, 1061 bp, Homo Sapiens
gcgggccgaccgggcgcaccgaccatgggcctccaaatgccccaagtgcgacaagaccgtgtacttcgccgagaaggtgagctccctggggaaggactggcacaagttctgcctcaagtgcgagcgctgcagcaagacgctgacgcccgggggccacgccgagcatgacgggaagccgttctgccacaagccgtgctacgccaccctgttcggacccaaaggcgtgaacatcgggggcgcgggctcctacatctacgagaagcccctgggcggaggggccgcaggtcaccggccccatcgaggtccccgcggcccgagcagaggagcggaaggcgagcggccccccgaaggggcccagcagagcctccagtgtcaccactttcaccggggagcccaacacgtgcccgcgctgcagcaagaaggtgtacttcgctgagaaggtgacgtctctgggcaaggattggcaccggccctgcctgcgctgcgagcgctgcgggaagacactgacccccggcgggcacgcggagcacgacggccagccctactgccacaagccctgctatggaatcctcttcggacccaagggagtgaacaccggtgcggtgggcagctacatctatgaccgggaccccgaaggcaaggtccagccctaggctacagcggctctcatgatgtgggctcacctgcgccccagaccctgcaggggcccccctgcttggctctgctgggagagtgctcagccgcccagtcctgcctgcaagcccagggcgagtattggaggaggggcaccctcggggaaaacaccatgcccatccccgagtctctggtgtgtctgccccctctggcatcctctaggcgtgccatgatcccttctgtgtctgcgggaccaaatccccgtgtggacctggccccccattttccccccgaaccgtgctagtaccccggggtggctgccccgtcttcctctcctggaggcccacccccccgcaaggtgttatatcttgccccctccctggggggaagtcccaggcccttcataaggaccctgggctcgagaaaaa

SEQ ID NO: 258876 - DNA, 1027 bp, Homo Sapiens
  misc_feature (13)..(13): n is a, c, g, or t
  misc_feature (30)..(31): n is a, c, g, or t
  misc_feature (41)..(42): n is a, c, g, or t
  misc_feature (49)..(49): n is a, c, g, or t
  misc_feature (68)..(68): n is a, c, g, or t
  misc_feature (137)..(137): n is a, c, g, or t
gccacatcgcatntctgacctggactactnngcatgtgccnnaggccanaccatcaaagggcgtgtgngcaccgtgggttacatggctccggaggtggtgaagaatgaacggtacacgttccagccctgactggtgngcgctcggctgcctcctgtacgagatgatcgcaggccagtcgcccttccagcagaggaagaagaagatcaagcgggaggaggtggagcggctggtgaaggaggtccccgaggagtattccgagcgcttttccccgcaggcccgctcactttgctcacagctcctctgcaaggaccctgccgaacgcctggggtgtcgtgggggcagtgcccgcgaggtgaaggagcaccccctctttaagaagctgaacttcaagcggctgggagctggcatgctggagccgccgttcaagcctgacccccaggccatttactgcaaggatgttctggacattgaacagttctctacggtcaagggcgtggagctggagcctaccgaccaggacttctaccagaagtttgccacagcaagtgtgcccatcccctggcagaacgagatggtggagaccgagtgcttccaagagctgaatgtctttgggctggatggctcagttcccccagacctggactggaagggccagccacctgcacctcctaaaaagggactgctgcagagactcttcagtcgccaagattgctgtggaaactgcagcgacagcgaggaagagctccccacccgcctctagcccccagcccgaggcccccaccagcagttggcggtagcagctactccgagcgccgtttacagttttgcacagtgatcttccccattgtccactcaagtcgtggcctggggaacacagacggagctgtccccagtgtcctccgtccctcagcccctggcctggctgagtttggcagggcctgggccatccctgggacaaaggtgcgtcccttcagctcttctccgtggagctcggggctttctgtatttatgtatttgtacgaatgt

SEQ ID NO: 258877 - DNA, 503 bp, Homo Sapiens
  misc_feature (23)..(23): n is a, c, g, or t
  misc_feature (40)..(40): n is a, c, g, or t
  misc_feature (129)..(129): n is a, c, g, or t
  misc_feature (167)..(167): n is a, c, g, or t
aagggaacggttaaataacaaangcccaacccaactggantaaaccacgtgcctgacccaacaaattgcccactgaaaccgaacctgaaaaccatttgggaagatgaaccataaaggttggaacacccnggcaaaactgccaggaatgaatggggatgttggacgtnatagaagagcttgatgggataggtgttgtactggccacggtagcgggccgacttgattggcaggtccactcggaagccctggaaatagatgacccactgcaaagacaaagatggtggcgatgagattcatgaggttgggaagattctggcggtagaacgcctcccgaagggctcggaccttgtctgtgcgtgtggccagcagatggaaaagtgcgatgatagcaccttcaaattccattcctgttggcagaggaggagacatatatgaaggaacgaacaggcaactcaatttgcttctagccttcttagcagacaaataaaaagaggaaaacaaaa

SEQ ID NO: 258878 - DNA, 391 bp, Homo Sapiens
  misc_feature (285)..(285): n is a, c, g, or t
  misc_feature (287)..(288): n is a, c, g, or t
  misc_feature (338)..(338): n is a, c, g, or t
  misc_feature (340)..(340): n is a, c, g, or t
cagtagaatccattgagatgtcccatcaagctctatgatttctacctcttcaaatgcccccagagtgtgaaaggccggaatgacaccttttacctgacacctgagccagtggtggcccccaacagcccaatctggtactcagtccagcctatcagcagagagcagatgggacaaatgctgacgcggatcctggtgataagagaaattcaggaggccatcgcagtggccaatgcaagcactatgcactgagatgccttggccatggcacaagagaaaccagccagnannaaccagacagactttcacactaaagaagaggcctccatttttttgtttcntngtttattggtgtagttacgaagcctttcaggtggcttctgtttaaaatata

SEQ ID NO: 258879 - DNA, 906 bp, Homo Sapiens
  misc_feature (231)..(250): n is a, c, g, or t
  misc_feature (732)..(743): n is a, c, g, or t
ttgacacctgagccagtggtggcccccaacagcccaatctggtactcagtccagcctatcagcagagagcagatgggacaaatgctgacgcggatcctggtgataagagaaattcaggaggccatcgcagtggcaactgcaagcactatgcactgagatgccttggcatggacaagagaaaccagccaggaaaaaccagacagactttcacactaaagaagaggcctccannnnnnnnnnnnnnnnnnnnattggtgtagttacgaagcctttcaggctgcttctgtttaaaatataaaagaaaactttgccccctttgcatcttcataaacctgctgcggcagactcctcagccgatggtggctctgggtttccttgagtgtcatatgtcctagaaagttgctggctgactcttttttgtctggggcctggggaaagggcttggactgtgaaaagaaatgtggcccctttccatcttcaagagagatggaattaatgatggatggaccctggagggaatctccccagccgacttccactgggctgacagactttgctgaccacaggggaacgatgttcttttctttcttcatgatcagacataaacttagcatcttaatggaagaaaaatgaggggaacttcaattatgatttattaaagacaatttctattacaccctcctttatgacaagtgacattttagatgtaaaagtaaaaactttaccatgccnnnnnnnnnnnngttggcctaacattgaggccttaaaacctgaggctcctgtgcctgatggaattcttgtaacatacacttgtgtatcatataaagataccactctgtttctcttatgtattcttactctagttgtttattaagaatgacaagcacgtcttttcaacaaaaaaaa

SEQ ID NO: 258880 - DNA, 953 bp, Homo Sapiens
  misc_feature (67)..(67): n is a, c, g, or t
  misc_feature (156)..(185): n is a, c, g, or t
  misc_feature (323)..(323): n is a, c, g, or t
  misc_feature (374)..(374): n is a, c, g, or t
  misc_feature (384)..(384): n is a, c, g, or t
  misc_feature (771)..(771): n is a, c, g, or t
  misc_feature (774)..(774): n is a, c, g, or t
  misc_feature (777)..(777): n is a, c, g, or t
  misc_feature (780)..(780): n is a, c, g, or t
  misc_feature (786)..(786): n is a, c, g, or t
  misc_feature (793)..(793): n is a, c, g, or t
  misc_feature (795)..(795): n is a, c, g, or t
  misc_feature (802)..(802): n is a, c, g, or t
  misc_feature (804)..(804): n is a, c, g, or t
  misc_feature (813)..(813): n is a, c, g, or t
  misc_feature (828)..(828): n is a, c, g, or t
  misc_feature (831)..(831): n is a, c, g, or t
  misc_feature (836)..(836): n is a, c, g, or t
  misc_feature (838)..(839): n is a, c, g, or t
  misc_feature (869)..(869): n is a, c, g, or t
  misc_feature (879)..(880): n is a, c, g, or t
  misc_feature (882)..(883): n is a, c, g, or t
  misc_feature (889)..(889): n is a, c, g, or t
  misc_feature (896)..(896): n is a, c, g, or t
  misc_feature (898)..(898): n is a, c, g, or t
  misc_feature (900)..(900): n is a, c, g, or t
  misc_feature (923)..(923): n is a, c, g, or t
  misc_feature (926)..(926): n is a, c, g, or t
  misc_feature (933)..(933): n is a, c, g, or t
  misc_feature (942)..(942): n is a, c, g, or t
cacctggacccctgcattggaactggaggcagggaacatggggaggaggagggtcggtgccttcaanaaaacaggcactgccctggtggccctctcccctgccccctgcaggaaggagctgcctggacccgttcatgggggagggggcagaagtgnnnnnnnnnnnnnnnnnnnnnnnnnnnnnnaagctctgagctgtcaacgagacgtttcctaccgatctcggctgccgtctctgttgtcatttctgggagagggagggtttaggggtagatttggaaccttttaaaaatggtcttgatgtatgtggaagagagtatgtntatgtgtgttcctgtacatagcatgggtgcagctgtggatgtgtgcaaaanagtgtgagtntgtgtttgtgtgtgtaaaggggtctgtcctagagcccacatcagtttgttgtgaatctggaaaaagggtcggtgagggccgggagatgttgaccctggtgggagcaggctgaggctgccccgttctccacatcctctgttttgcccagtctctgattccattagggggagtgtgctgaagccattctcggatgcttcccagaccaggctccctctgccagagtcacatgcatccgagctgctggtctccattgtccagcaggaaggcggaaaggcaggcaagatggtgtgaagcttaaagcttgtatttgatggaaaaggtctcccctgttcatctgagaggccaagcctggccaccccaggctcagaacctgggcttcaagaaatnttntgnggngctctnactctcncntccctcnanctttctttntattctcctctcctnccnttatntnnctatatattctcaggtctgctctctcctcnctctatcccnnanntggggnaagaagntngnaaagtgtgttttgtgtggttttnaantctctcnatcttctcncgtttttttgg

SEQ ID NO: 258881 - DNA, 917 bp, Homo Sapiens
  misc_feature (6)..(6): n is a, c, g, or t
  misc_feature (9)..(9): n is a, c, g, or t
  misc_feature (11)..(12): n is a, c, g, or t
  misc_feature (18)..(18): n is a, c, g, or t
  misc_feature (20)..(20): n is a, c, g, or t
  misc_feature (23)..(23): n is a, c, g, or t
  misc_feature (26)..(26): n is a, c, g, or t
  misc_feature (30)..(30): n is a, c, g, or t
  misc_feature (34)..(34): n is a, c, g, or t
  misc_feature (47)..(47): n is a, c, g, or t
  misc_feature (51)..(51): n is a, c, g, or t
  misc_feature (63)..(63): n is a, c, g, or t
  misc_feature (69)..(69): n is a, c, g, or t
  misc_feature (75)..(75): n is a, c, g, or t
  misc_feature (80)..(80): n is a, c, g, or t
  misc_feature (88)..(88): n is a, c, g, or t
  misc_feature (93)..(93): n is a, c, g, or t
  misc_feature (103)..(103): n is a, c, g, or t
  misc_feature (107)..(108): n is a, c, g, or t
  misc_feature (117)..(117): n is a, c, g, or t
  misc_feature (120)..(120): n is a, c, g, or t
  misc_feature (124)..(124): n is a, c, g, or t
  misc_feature (127)..(127): n is a, c, g, or t
  misc_feature (137)..(137): n is a, c, g, or t
  misc_feature (139)..(139): n is a, c, g, or t
  misc_feature (141)..(141): n is a, c, g, or t
  misc_feature (145)..(145): n is a, c, g, or t
  misc_feature (160)..(162): n is a, c, g, or t
  misc_feature (168)..(168): n is a, c, g, or t
  misc_feature (170)..(170): n is a, c, g, or t
  misc_feature (172)..(172): n is a, c, g, or t
  misc_feature (179)..(179): n is a, c, g, or t
  misc_feature (185)..(185): n is a, c, g, or t
  misc_feature (188)..(189): n is a, c, g, or t
  misc_feature (237)..(237): n is a, c, g, or t
  misc_feature (241)..(241): n is a, c, g, or t
  misc_feature (250)..(251): n is a, c, g, or t
  misc_feature (253)..(253): n is a, c, g, or t
  misc_feature (265)..(279): n is a, c, g, or t
  misc_feature (290)..(293): n is a, c, g, or t
  misc_feature (297)..(297): n is a, c, g, or t
  misc_feature (299)..(299): n is a, c, g, or t
  misc_feature (303)..(303): n is a, c, g, or t
  misc_feature (307)..(307): n is a, c, g, or t
  misc_feature (331)..(331): n is a, c, g, or t
  misc_feature (357)..(357): n is a, c, g, or t
  misc_feature (380)..(380): n is a, c, g, or t
  misc_feature (382)..(382): n is a, c, g, or t
  misc_feature (394)..(394): n is a, c, g, or t
  misc_feature (399)..(399): n is a, c, g, or t
  misc_feature (404)..(404): n is a, c, g, or t
  misc_feature (410)..(410): n is a, c, g, or t
  misc_feature (412)..(414): n is a, c, g, or t
ttccantgnanntttcancntgnganagtntaanatgtgtgaatggnagantgagcctgtttngttttnctaganaagtntgtaaaanaaggngtgggttagntaannagtgaagtnttntagnttntgggattatnantnaccnttagggcccttccannntgaagntngnaggtttngttttnagnntgccactgattgccaacctcaccaacatcaccacaataatctcccaancatnaaaatcaanntncatccaccaacnnnnnnnnnnnnnnncaccacacctnnnncccncnaaanaatntccaataatcccaaacaccacaantaactaaatcaaaaaacccgaattanacattcaagcccaatctaacttncntcatccctcgancactnttctntccctnannnttgtcactaaaaagtgggcacactgcacctcctcaccccctctccacacctttaacccatccctcgtttctctgaacacacaacacccatcgtcctcttttatgttacttgaaatatcaaaagaattattacagctgaaaacaaatctatgtaaatcggatcttgaaagagagaaagctttctccagttttgaaaggcgccatttttaactttgatcttgtaatgacaaataagaatgttgaatcggctggcttttttctatcctaggtaatgtggactgtggagctctgtgctggtcactttcaaccctgaacctgatgctacttattttgcagttctaagtgcaaagtcggcctggtggatgcttcccattataatattaaatttgcttcttcgtgaggtcacacctcacatccccagtgtcactttaataactagtgttttttacatggtgggccatgacccattagtggactctgcatttaaaaataaataaataaatg

SEQ ID NO: 258882 - DNA, 1393 bp, Homo Sapiens
  misc_feature (659)..(659): n is a, c, g, or t
  misc_feature (664)..(664): n is a, c, g, or t
  misc_feature (676)..(676): n is a, c, g, or t
  misc_feature (694)..(694): n is a, c, g, or t
  misc_feature (704)..(704): n is a, c, g, or t
  misc_feature (739)..(739): n is a, c, g, or t
  misc_feature (763)..(763): n is a, c, g, or t
  misc_feature (842)..(842): n is a, c, g, or t
  misc_feature (844)..(844): n is a, c, g, or t
  misc_feature (912)..(912): n is a, c, g, or t
  misc_feature (957)..(957): n is a, c, g, or t
  misc_feature (985)..(985): n is a, c, g, or t
  misc_feature (990)..(990): n is a, c, g, or t
  misc_feature (995)..(995): n is a, c, g, or t
  misc_feature (1002)..(1002): n is a, c, g, or t
  misc_feature (1005)..(1005): n is a, c, g, or t
  misc_feature (1014)..(1014): n is a, c, g, or t
  misc_feature (1016)..(1016): n is a, c, g, or t
  misc_feature (1018)..(1018): n is a, c, g, or t
  misc_feature (1025)..(1025): n is a, c, g, or t
  misc_feature (1037)..(1037): n is a, c, g, or t
  misc_feature (1101)..(1101): n is a, c, g, or t
  misc_feature (1111)..(1111): n is a, c, g, or t
  misc_feature (1129)..(1129): n is a, c, g, or t
  misc_feature (1228)..(1228): n is a, c, g, or t
  misc_feature (1260)..(1260): n is a, c, g, or t
tcccaaaatacttaagaggaaacacaggtgtggtctccccccaagcctttcccatgatggaggatgcacccctgactccctcatgcttggcagacaaactgtgctgatgttggcagaccttggcactcagtggcagcctcaaaaccaaccctgcacacttcagcatggaagggcccctaagggtcagttataatcccagaacctagaagacttcactgattagctaacccacgccttgttttacagacttgtctaggaaaaccagaccggctccttctaccattcacaccatgttaacctgtccacaggtgaaaactgctatggaaagtaatactaagtatacaggtgacatctgaaccaaaacatatcaacatgtatggggcagggagaaactaaacacagatcacacaatttaaacgtgtgagaaacgcctcttgagagtgtcaaagggtgctcagaaggcacaactaattatttctaatcctaaaaataagctaaaatgatgctctaaagtgaactcactgtggggttcccgaatagaacattcatctcaagacaccagtaggactagggcctgctcagataacacctccctgctcctaactttccccagactctgcccagggcagttgagacaacagcttcaatcatggagaatnttatnacatttgagggnttctttcccatacaaatnccacctggtntcagtccagtgtctttcctggagatgagaaccatncctctaactccccactgggacacnggagggacatatgggtgatggctcaggcttaggtccagcagcaccttggaagcccatgtctttcctcactggacttctncntgtccagacactgactgctggctccaagcgagctccccggagccgggaaaaccctctgagttatactntctggccttcatacctgctcatgcaggaccagcatcagcaacaanataaagctgctgggggtccctctgtggnacctncctcncaaaatnatncccacctanananccccccnaaccctccaaancacactgcagctgcagccagaggataggaggtggtgtaggagcctgggcaaggtaatcggttcncctctctgcncctcagtttcttcatctnttaacccccagggctgttgcatgaattaggcgagttatgcctataaaagtgcaacgtgtaacagtcaatactggcattacttcctgcactactctatcntggccctggggtgttctgggcaggctgacagngggcaggtctcagtctaccaggcaaaacgcacctagtaacgctgcctctttacagaaatgcagttaaaactaccggggcaagtgacagacagggtttaaaggaaactgagtgcctctcacacaatccacagca

SEQ ID NO: 258883 - DNA, 1958 bp, Homo Sapiens
  misc_feature (1774)..(1785): n is a, c, g, or t
  misc_feature (1787)..(1795): n is a, c, g, or t
ggcctgggtggcgaattcggcacgaggctacaagcatttttgcttctggttcagagcttcatagttctctaatatcagaaattcatttcttgaggaagcagaaccaggccctcaatgcaatgctcattaaaggatccagagataaacagaaggagaatgacaaattacgagagtccctctccaggaagaccgtgagcctggagcaccttcagcgggagtatgccagcgtgaaggaagaaaatgaaaggctgcagaaagaaggcagcgagaaggagagacacaaccagcagctgatccaggaggtccgctgcagcggccaggagctgagcagggtgcaggaggaggtgaagttgaggcagcagctgctctcacagaatgacaagctattgcagtctctccgagtggagctgaaggcgtatgagaagctggatgaagagcacaggagactgagagaggcgtcgggagaaggctggaaggggcaggatcctttcagggacctgcacagcctcctgatggagatccaggctctgcgcttgcaactagaaaggagcatcgaaaccagcagcactctgcagagcaggctcaaggaacagctggcaaggggggcagagaaggcacaggaaggagccctcactctggctgtccaagccgtgtccatccctgaggtgccccttcagcctgacaaacacgatggtgacaaatatcccatggaaagtgataattcatttgatctgtttgattcctcccaggcagtgacaccaaaatcagtttcagagactcctccactctctgggaatgacacggactccctctcctgcgacagtggcagttcggcaactagcactccgtgtgtgtcccgcctggtcactggccaccacctgtgggccagcaagaatggccgccatgtcctgggcctgattgaggactatgaggccctgctcaaacagatcagccagggacagaggctccttgctgaaatggacattcaaacccaagaggctcccagctccacaagtcaagagctgggaacaaagggtccacacccagcaccactgagcaagtttgtgagcagtgtgagcacggccaagctgaccctggaagaggcctacaggcggctgaagcttctctggagagtctcactccccgaggatggccagtgcccccttcactgtgagcagattggagaaatgaaggcagaggtcaccaaactacataaaaaattgtttgaacaagaaaagaagttgcaaaacaccatgaagcttttgcagctgagcaagcgccaggaaaaagtcatctttgatcaattggtcgtaacccacaaaatccttcggaaggccagaggaaacctggagcttaggcctgggggagcccatccaggaacatgcagtcccagcagaccaggctcctgagaagaactttcagccaataaagcttgtgcttcccccaccgagctcacgctgtctctttgttccaagtgtggttcctatttattgaggaagaaagagctgtctggccaaaggaaatctattttttcccttcatgttttctctctgaaagttggcttgagagttgttgtcagaaaggtgcaggtgctccacaaacgggtggtaaaaaggcctcgagctcttggatgttgtatttcagatcaggggcaggcaccggagttgaggctgtgcgccttggtgggcttcacgtcttcccctggatttgcttagtactcagccagtgccacagtttgaagattctcattaaatgattcatttcattgcaaaannnnnnnnnnnnannnnnnnnnaaacatgtcggcccggcctcggccctcggagaagcttttctagaaccattcggttttggcgcgccgggccccagtcagggtaagtgaaccatgggtcataagctggtttccctagggagatccctgggccatggactaagtgcttgggaattcctcaccaaat

SEQ ID NO: 258884 - DNA, 2412 bp, Homo Sapiens
  misc_feature (966)..(966): n is a, c, g, or t
  misc_feature (2008)..(2023): n is a, c, g, or t
  misc_feature (2324)..(2333): n is a, c, g, or t
gtataaactgtctaaaaagcaggtggtacggtcggaatctcgggatatcgtcgaccacgcgtcgggctgctgaaagaacgcctcctctgctcaggccacgatgtcagtgacggaggcctcgtcacatgcctgctggagatggccttgctggaaattgcgggctacaggtggatgtgcctgtccccagggttgatgtcctgtctgtgctgttcgctgaggagccaggcctcgtgctggaggtgcaggagccagacctggcccaggtgctgaagcgttaccgggatgctggcctccattgcctggagctgggccacacaggcgaggccgggccccacgccatggtccgggtgtcagtgaacggggctgtggttctggaggagcctgttggggagctgcgagccctctgggaggagacgagtttccagctggaccggctacaggcagagcctcgctgtgtggcagaggaggaacggggcctgagggagcggatggggcccagctattgcctgccccccacctttcccaaagcctccgtgccccgtgagcctggtggtcccagcccccgagtcgccatcttgcgagaggagggcagtaatggagaccgggagatggccgatgccttccacttagctgggtttgaggtatgggacgtgaccatgcaggacctctgctctggggcaattgggctggacactttccgtggcgtggccttcgtgggcggcttcagctatgcagatgtcctgggctctgccaaagggtgggcagctgctgtgacctttcatcccagggctggggctgagctgaggcgcttccggaagcggccagacaccttcagcctgggcgtgtgtaatggctgtcaactgctggctctgctcggctgggtgggaggcgaccccaatgaggatgctgcagagatgggccctgactcccagccagcccggccaggccttctgctacgccacaacntgtctgggcgctacgagtctcgctgggccagcgtgcgtgtggggcctgggccagccctgatgctgcgagggatggagggcgccgtgctgcccgtgtggagtgcgcacggggaaggttacgtagcattttcttctccggaactccaagctcagattgaggccaggggcttggctccactgcactgggctgatgatgacgggaaccccacagagcagtaccctctgaatcccaatgggtccccagggggcgtggctggcatctgctcctgtgatggccgccacctggctgtcatgcctcaccctgagcgggccgttaggcctgggcagtgggcatggcgaccccctccatttgatactctgaccacctccccctggctccagctctttatcaatgcccgaaactggaccctggaagggagctgctgactggccacaggggctcacctgggccccatggcttttcacctaagtgggtcctgccccctcccccatgaccttcaggagcaccccatattatttccaaaaatatcttggacagacaaggaccaaaatgccaaaatctcagcggactcgataatctgcctgctgatgttccttctgtggctgtgtctattttcagttctgctctaacatggcatgccctttctcagcccaggaaacagcatgtggttcagagaaaagagcgacaaggaaaagttaggactcctgaggtccgaacaggggcttctgttgcccacttcacaacacccagtgatcaccggtgtgcaattgcctccttggctctgagggatgttttgcgctcccttttctcatcattggggttagcgggtgcagacaaattcagcaatagtatgcagatcagcccctcaccacctcattgttctcatctggaactgaaactttctggatttctcttgaagtgctacactgcactgaatgtaaggaattgttgcttgtggaagtttctcagcgtttctggctgtcttagggctggcctcagaacccagcattcctgttatttgcttctaaattagcagctctcnnnnnnnnnnnnnnnnggaggcagtctcactctgtccacccaggctgggtacaagggggtgatctcggcccattgaacctttgcctcctgggttcgggcgggttcctggcctcagcttcccgagtagtgggagtcggggcacaccaccagcccggtaaaatgggtttctgcgcagaaaggggttcaccaggtccccagggcgggtccaaaaacaaccaaggaggccggccgggacccaggggggtaccgggggcgcccagagggccccgccgtttgctaaagggggggccaccccaaacacctgagggggacccccnnnnnnnnnnagatagaagcgcacggaatgtgaaaacgggtgccccccgggggggatccaacagagcccccggggggaaaaaacgcgcg

SEQ ID NO: 258885 - DNA, 846 bp, Homo Sapiens
gggtattggggtagtgcgggggttggggaaatagtagaattggtgtcgtgagttccccaagggatgggggggagattttagtttaaaatggttccgcaggtcctatttgggttggtttccctttaattaattctcaaatttacaagagtccagactgtctggacagcccaacagggacacagagagttttacacactgatgtctcaacagcacagggttccatcgggacttcgtgagaaaatcaggatccatgtacgttcttgaagagctgtctctcggcctaagataagtggagaaggttgccttggaagcgtggggtagaggtaggaacagctggctctctggccaaggcctttggctttttcgcggaagcaaaaaccgaaccacgggaaggctgctccgagtctggggtcagaatttcctatcagtgagtgcagcaggccagggagaggcgaaagggagtggagaggactgtggcgaaagggagaggggcggcccctgcacagcttcaccaggcgtcagtgcaggctcagacggccggactggcgagttttcaagagaaactccaaatccagacaggtgtgtgtgatctcttggttttaaatgcagacaaattccaaatgtctcaaatactgaatggagccagctagacctaccttctcaccaagtaaggcccacaggcccctgccgcaacctctaccctccacagacaaggttctgcaaaacagtcatgggaccttgtttcacctcccccacaggcacccaaaataaccttcctgacctgcagcagcattttgcaatctttgagaacccctgcccactgctgacaaacaaaaatggcggagc

SEQ ID NO: 258886 - DNA, 1361 bp, Homo Sapiens
tcaactatccaaaaagataagcattatcataatcccatttttcagaggggaaaactgacaatgaagtaaatcgacttaaggttgctggtaaagggtatagcagaaaatggtatgtggttttcaatcgagatgcatctagttcttttcactatacgccaagagtagaggctacatcttcttggtgctgcctctgcctccccgaacttccaccagaatagggtgcttgatctggggtactctccccaccttctccagcagggcctttcgtagacgccgctcttcttgcaccatgatgaacatctccttatgcacagctgccgccaggttcaggtctagcttctctgggcaggcagccatcttgcagataagctcctcatgggagaagacgcagtatctccggagccggcggtagtgctcaatgcactggcgcccagcaggcaaccagtaagcagtccaaaagttgaaagcctcggcaaagttgtagccttggttgaagccgctgtggtaagcacgggggaaggtgatgacaaactctcctgcacactggtttgtgcggacaacctgaagaacacaaaaggccatggctgttgagatagagattttcctgtatacagacctgacttaagtgcaaggtaattaaggagacaaagaaaagcctcagggaacacagtctgacaacagaatcccagactctccaactctgaaaggaaggaccactggtctctgctctcaaggttttgatgtgtgttgagatgataggaagatttgagattaaaaaatatatctgtcaaaatattccaacttccttagtaattttggcaaaaattataaatatcacttttaatcaagctggacaagcttttttagttatttactttcatcagttatatatgcagtttgtagagtcaaatggctctataaagatctgttataaaatcagccagccttgccattctcccttccccacagccaatcacttccacctcttctgagtattttggcgtggattataactaccttaaataacatgcttctagactatgttaaaaacagcctcctgtttctcaatttgctcagttttttatgcatatatccctaattttctgaccaatatttaaatctcttttcctatcaattttcatctttctgtagcagtctcatgcaaccttctgatctgtcccaatctggaccagctgtcctccctggatcataactctcttgtgacagatctcctatttcctagatcccacgtcttcctctttcttggtttattcctttgctatgcttaagaacatcctccaacagtttcctgagaaatggtgtgaagaacctacttttctttttttaaagaaagtctctat

SEQ ID NO: 258887 - DNA, 938 bp, Homo Sapiens
  misc_feature (1)..(1): n is a, c, g, or t
  misc_feature (23)..(23): n is a, c, g, or t
  misc_feature (26)..(26): n is a, c, g, or t
  misc_feature (31)..(31): n is a, c, g, or t
  misc_feature (41)..(41): n is a, c, g, or t
  misc_feature (45)..(45): n is a, c, g, or t
  misc_feature (55)..(55): n is a, c, g, or t
  misc_feature (64)..(64): n is a, c, g, or t
  misc_feature (75)..(75): n is a, c, g, or t
  misc_feature (83)..(84): n is a, c, g, or t
  misc_feature (87)..(87): n is a, c, g, or t
  misc_feature (89)..(89): n is a, c, g, or t
  misc_feature (92)..(94): n is a, c, g, or t
  misc_feature (99)..(99): n is a, c, g, or t
  misc_feature (101)..(101): n is a, c, g, or t
  misc_feature (108)..(108): n is a, c, g, or t
  misc_feature (112)..(113): n is a, c, g, or t
  misc_feature (141)..(141): n is a, c, g, or t
  misc_feature (145)..(154): n is a, c, g, or t
  misc_feature (164)..(164): n is a, c, g, or t
  misc_feature (174)..(174): n is a, c, g, or t
  misc_feature (176)..(176): n is a, c, g, or t
  misc_feature (178)..(178): n is a, c, g, or t
  misc_feature (180)..(180): n is a, c, g, or t
  misc_feature (188)..(188): n is a, c, g, or t
  misc_feature (196)..(196): n is a, c, g, or t
  misc_feature (198)..(198): n is a, c, g, or t
  misc_feature (201)..(201): n is a, c, g, or t
  misc_feature (203)..(203): n is a, c, g, or t
  misc_feature (207)..(210): n is a, c, g, or t
  misc_feature (215)..(216): n is a, c, g, or t
  misc_feature (219)..(220): n is a, c, g, or t
  misc_feature (226)..(226): n is a, c, g, or t
  misc_feature (243)..(243): n is a, c, g, or t
  misc_feature (245)..(246): n is a, c, g, or t
  misc_feature (251)..(255): n is a, c, g, or t
  misc_feature (259)..(259): n is a, c, g, or t
  misc_feature (261)..(262): n is a, c, g, or t
  misc_feature (270)..(270): n is a, c, g, or t
  misc_feature (280)..(280): n is a, c, g, or t
  misc_feature (284)..(284): n is a, c, g, or t
  misc_feature (290)..(290): n is a, c, g, or t
  misc_feature (304)..(304): n is a, c, g, or t
  misc_feature (310)..(310): n is a, c, g, or t
  misc_feature (320)..(320): n is a, c, g, or t
  misc_feature (322)..(322): n is a, c, g, or t
  misc_feature (330)..(330): n is a, c, g, or t
  misc_feature (332)..(332): n is a, c, g, or t
  misc_feature (341)..(342): n is a, c, g, or t
  misc_feature (347)..(347): n is a, c, g, or t
  misc_feature (356)..(416): n is a, c, g, or t
  misc_feature (442)..(442): n is a, c, g, or t
  misc_feature (686)..(686): n is a, c, g, or t
  misc_feature (734)..(772): n is a, c, g, or t
nagaggaagaggaaggggaggantgntttgnggaaggaagngganagtaaagaanaataaaganaagggtaatanggtgtaannggngnagnnnggggnantgagggntggnnagggtaaaggaagggggggaagggaaanaagnnnnnnnnnngtgtaggaanagagaaaatnanangntaaggagngtaaatangnaananatcnnnnacgtnnggnngggacnacggaaaagaagggaangnnggagnnnnnggantnntttggatnggaatggtgntggngatggngatggagatggagntggatntgtatgaatntnggcgcttntntgcggcctnngcgcnagcagcgcnnnnnnnnnnnnnnnnnnnnnnnnnnnnnnnnnnnnnnnnnnnnnnnnnnnnnnnnnnnnngaaatgtatttgggatggagggaaancacctgcccaatctgcaaaggtctattcaccgccatcaacctcgggctgaagaaggaacccaatgtggctcgcgtgggctccgtggccatcaagctgtgcaatctgctgaagatagcaccacctgccgtgtgccaatccattgtccacctctttgaggatgacatggtggaggtgtgcagaagctcagtgctgagcccatctgaggcctgtggcctgctcctgggctccacctgtgggcactgngacattttctcatcttggaacatctctttgcctactgtgccgaagccnnnnnnnnnnnnnnnnnnnnnnnnnnnnnnnnnnnnnnntgtcagccgcatcctcttcctcactgaactgcactggggatcatgactaccctggagggccacggaccctgactgtggcagacccactgtgcttgccgcccggggtttctggccctggcggcccggcatccccgggccaaggtggccgggaatacttggggccgaa

SEQ ID NO: 258888 - DNA, 1069 bp, Homo Sapiens
  misc_feature (335)..(378): n is a, c, g, or t
tttgtagtccatacaaaagggaaaaaaattaaggttttctaacaccacctacttggggagatggggaagtgggactgtgccgctcaccatcagctagaacattagtggtcagcagggacttggatacataccaactgactgtcccaacaggaactcagtctcaacagtctacagagggacagtcagggtaccctggactgctggcacagcttggcacataggaaatggttaagctgaccctttcctggcctccttcccatctaaaaagaaaaaggcgccggcgacctcagctgcaggttgcttccccatccagacgaccttaaatatcgcgcacnnnnnnnnnnnnnnnnnnnnnnnnnnnnnnnnnnnnnnnnnnnnttcccattctggggagacgggaggcagggtagaggggaaaccgcagatctagagccagtagcaagatttgctgctgaggcgaaggaacaaagtaggttactaccgaacacttaacaggatcatctcctggggaaggcccacatggtagagggcatgaaaaaccacaaccaggaaaggtatgggccagagtagttataacctggatctgtaaccctacccacctcttttctccctccctccctgtggtgccccatcccaggatggccctacatgcggcgctggtagccagagtgcatctgagccgcccgcagtaaatcattataggagcccgaatagcgtgcgttatcggaatgggcatcgggcaggcgacggtaatccagcgaggactttgtcggcgagcggcggaacgaaagctgcgactctgataaacggcggtaatcagagagctcggctaaacgccggtcggaaccatacctagtcgagagaagaagacagttggtgaatgagacaattgaggggaggactccaggtgggcattggggagatgccaatggggacagggagggtgtgatcacagtggtctccaagagattggtctccttttgtcagaaggctcatcaccctatccaggccaaaaaaatcaagcctggcttcaactcagtgggaaatcaaaccctccactgaagtcctc

SEQ ID NO: 258889 - DNA, 857 bp, Homo Sapiens
  misc_feature (652)..(652): n is a, c, g, or t
  misc_feature (809)..(809): n is a, c, g, or t
gctcagaaacgccaaaatctacgtggagagagctgtcaagcagaagaagatctttacaatccaaggctgctacccggtgatccggtgtctcttgcgccggaggggctgggtggagaagaagatggtccatcgctcaggccccaccctgctgccaccccagaaggatctggatagctcagcgatgggtgacagtgacaccactgaggatgaggatgaagatgaggacgaggagttccagccatcacagctgttcgacttcgatgatttactgaaatttgatgacctagatggaacacatgctctgatgcgaaggggcagaactcaggcacctcgacactcaggtccagcgctgtgaggacatcctgcagcagcagcaggccgtagtaccccaaatagacatggaaggggatcgcaacatctggatcgtgaagccaggagccaagtcccgcggacgaagcatcatgtgcatggaccacctggaggagatcctgaagctggtgaacggcaaccccgtggtgatgaaggaccgcaagtgggtggtgcagaagtatattgagcggcccctcctcatctttggcaccaagtttgacctcagacagtggttcctggtaactgactggaacccacttaccgtgtggttctaccgcgacanctatatccgcttttccacgcagcccttctccctgaagaacctggacaactcagtgcacctgtgaacaaactccatccagaagcacctgggagaactcatgccatcggaaacactgcttccgccagacaacatgtggtctagccagaggttccagggnccacctgcagggagatgggtgccccaaattgcttggtccaccattcat

SEQ ID NO: 258890 - DNA, 1085 bp, Homo Sapiens
  misc_feature (12)..(12): n is a, c, g, or t
  misc_feature (17)..(22): n is a, c, g, or t
  misc_feature (27)..(27): n is a, c, g, or t
  misc_feature (35)..(35): n is a, c, g, or t
  misc_feature (42)..(42): n is a, c, g, or t
  misc_feature (47)..(47): n is a, c, g, or t
  misc_feature (54)..(54): n is a, c, g, or t
  misc_feature (66)..(67): n is a, c, g, or t
  misc_feature (79)..(80): n is a, c, g, or t
  misc_feature (96)..(96): n is a, c, g, or t
  misc_feature (103)..(103): n is a, c, g, or t
  misc_feature (115)..(115): n is a, c, g, or t
  misc_feature (122)..(123): n is a, c, g, or t
  misc_feature (127)..(127): n is a, c, g, or t
  misc_feature (149)..(149): n is a, c, g, or t
  misc_feature (151)..(151): n is a, c, g, or t
  misc_feature (175)..(175): n is a, c, g, or t
ccccccccttantctgnnnnnngggtntgccctantttagtnctttnagggatncactttcttctnncccccagttctnntaagatcccagggggngggttgntttgactcagtntgtaaanncccngaagctcctgcagctccacctngnaaaaatgctccctttgggaatctncgaaatatgtacacagagaaaatcacatgaaggagacctggggcccccacttgtgagtgcaactgcaagtaactctggctagagagacacatgtgtcttgtgtcaaggcaggaggataacctggatgaccttctgaggtctcttcagcccttttcgctagtggtcacccaccaccatggttacttgccagcaacatctctattgctggatggtccctgtctataaccttgggctagtatattttttccaatatgggaccttagtcttactactgatgagttctatgggtctcttgctagggggtaaggatttttattcttgggcttatagagccagttagatcataattcttatgaaatagagagtgtcctaaatatcactgaaataaaaagtaggaaaaagaagcttgaattttaagactgaggctgctctgcagattctagtttggctttcagagttcaagagtggtggcatcttcacctgaattcttcaatgccagggtaataaaccaaaatagtcctaatcagtatatgctagttgagcatcggcataattttctttcctctggctgatcccagccctaaaggaagggtagacccgtgtctttccagccctaaaggaagggtagacccgtgtctttccagccctaaaggaagggcagacccgtgtctttccatgcccgagggccacgacgtcactatgcagggcacacgtggcttggtttaaaaaggtcatcttagatttatcttagtaaatgtaataaattattttttagatcttgaaatttataataaaaatactttacctaccctgatcaccaaaacctgatgttttaaatgtgctttctttttgaaatttatgttttcaaataaaatctccctaaagcaatatttaaaaattggtcaaaaaa

SEQ ID NO: 258891 - DNA, 1008 bp, Homo Sapiens
  misc_feature (4)..(5): n is a, c, g, or t
  misc_feature (10)..(10): n is a, c, g, or t
  misc_feature (15)..(15): n is a, c, g, or t
  misc_feature (19)..(19): n is a, c, g, or t
  misc_feature (28)..(28): n is a, c, g, or t
  misc_feature (63)..(63): n is a, c, g, or t
  misc_feature (67)..(67): n is a, c, g, or t
  misc_feature (73)..(73): n is a, c, g, or t
  misc_feature (75)..(76): n is a, c, g, or t
  misc_feature (79)..(79): n is a, c, g, or t
  misc_feature (83)..(83): n is a, c, g, or t
  misc_feature (107)..(107): n is a, c, g, or t
  misc_feature (128)..(128): n is a, c, g, or t
  misc_feature (879)..(879): n is a, c, g, or t
  misc_feature (974)..(974): n is a, c, g, or t
gggnnggctntgggngggnacgttggcnccccagcctcttgggccccagcccccagagccagntganaaatgngnngtnttcngccccaccccctgctcgtggaganggagaatactcccagacgagntgagagccctgtctttccccagccactgagaacccaaagatcacctagatttccatcagaagtggctttgcccaaacccaaaataccaccccaacccagaatccattttggaaagcccctacctccagtcctcatctgaggcgctctggctctaagcctgtcctccctcccattccaggtatgtgaagacaactgggaatgccacagtggaccacctctccaagtacttggccctgcgcattgccctcgagcggaggcaacagcaggaagcaggggagccaggagggcctggagggggcgcctctgacaccggaggacctgatgggtgtggcggggagggtgggggtgccggaggaggtgacggtcctgaggagcctgctttgcccagcctggagggcgtcagtgaaaagcagtacaccatctacatcgcacctggaggcggggcgttcacgacgttgaaatggctcgctgacccctggagctggtgaatgaagaaattctggaaggtgtcccggcccactggagctgtgctatgctccccacccaaggatccaaagtgacccccacccaggggacagccagaggaaggggacaatggggtatccctgtgtcctggtctatcaccccagcttctttgtcccccagtacccccagcccagccagccaataagaggacacaaatgaggacacgtggcttttatacaaagtatctatatgagattcttctatattgtacagagtggggcaaaanacgcccccatctgctgccttttctattgccctgcaacgtcccatctatacgaggtgttggagaaggtgaagaaccctcccattcacgcccgcctnccaacaacaaacgtgcttttttcctctttgaaat

SEQ ID NO: 258892 - DNA, 921 bp, Homo Sapiens
  misc_feature (305)..(305): n is a, c, g, or t
  misc_feature (307)..(307): n is a, c, g, or t
  misc_feature (314)..(314): n is a, c, g, or t
  misc_feature (322)..(322): n is a, c, g, or t
  misc_feature (360)..(360): n is a, c, g, or t
  misc_feature (384)..(384): n is a, c, g, or t
  misc_feature (547)..(547): n is a, c, g, or t
  misc_feature (691)..(692): n is a, c, g, or t
  misc_feature (700)..(700): n is a, c, g, or t
  misc_feature (704)..(704): n is a, c, g, or t
  misc_feature (709)..(709): n is a, c, g, or t
  misc_feature (721)..(722): n is a, c, g, or t
  misc_feature (726)..(726): n is a, c, g, or t
  misc_feature (740)..(740): n is a, c, g, or t
  misc_feature (746)..(746): n is a, c, g, or t
  misc_feature (748)..(748): n is a, c, g, or t
  misc_feature (781)..(781): n is a, c, g, or t
  misc_feature (792)..(792): n is a, c, g, or t
  misc_feature (799)..(799): n is a, c, g, or t
  misc_feature (802)..(802): n is a, c, g, or t
  misc_feature (806)..(814): n is a, c, g, or t
  misc_feature (825)..(825): n is a, c, g, or t
  misc_feature (827)..(828): n is a, c, g, or t
  misc_feature (831)..(831): n is a, c, g, or t
  misc_feature (841)..(841): n is a, c, g, or t
  misc_feature (848)..(848): n is a, c, g, or t
  misc_feature (863)..(865): n is a, c, g, or t
  misc_feature (871)..(871): n is a, c, g, or t
  misc_feature (880)..(881): n is a, c, g, or t
  misc_feature (885)..(885): n is a, c, g, or t
  misc_feature (903)..(904): n is a, c, g, or t
  misc_feature (917)..(917): n is a, c, g, or t
  misc_feature (919)..(919): n is a, c, g, or t
agaaggagctggcaaacagccctgactgtccccagatgtgtgcctataagctggtgaccatcaaattcaagtggtggggactgcaaagcaaagtagaaaacttcattcaaaagcaagaaaaacggatatttacaaacttccatcgccagcttttttgttggattgacaagtggatcgatctcacgatggaagacattaggagaatggaagacgagactcagaaagaactagaaacaatgcgtaagaggggttccgttcgaggcacgtcggctgctgatgtctagatgagtcccctgtagggtcananagcaatntcaaactntttacgtaatcaaggtcaagtgaggggaacaagcgcancagttatgagtgaagaagaatctnaccagtatcttgcagttttgacgtttcccagatgtgtgcttgtgatgatacacacacatgcacaggttctcaaccacgtgtgtatatatgtatgtgtgcatatgtctgtagctgtatataaagcgcatgtagagctacagatccagatacacacacttgttanatatgtacatacagacatacagaagggattagtacaatttctccaaagtactgtacctatcttcagcaagaatgcaaaagaaaatattttcaatatatatacctggaacagattttaataattatcagagtaataccattaatnnacaaattnactnctatntaatactagctnntatntttcataaatgtcnagctgntnaccaacatatatagccttttattatttttctcntcttttaagtnagtctgnganaaannnnnnnnnagtcccataancnntanactcccacanaaaattnctcaaaaattatttnnntgtccnatgaatctnngatntaactctgaatgtattannactatttattctngntg

SEQ ID NO: 258893 - DNA, 909 bp, Homo Sapiens
ggcgtggccggcgtggctgctcgggaccacccgaacccgcggccatggccccggccgccgccagccccccggaggtgatccgcgcggcgcagaaggacgagtactaccgcggtgggctgcggagcgcggcgggcggcgccctgcacagcctggcgggtgcgaggaagtggctggagtggaggaaggaggttgagctgctctcagatgtggcctactttggcctcaccacacttgcaggctaccagaccctgggggaggagtacgtcagcatcatccaggtggacccatcgcggatacatgtgccctcctcgctgcgccgtggcgtgctggtgacactgcatgccgtcctgccctacctgctggacaaggccctgctccccctggagcaggagctgcaggctgaccccgacagtgggcgacccttgcaggggagcctggggccaggtgggcgtggctgctcaggggcgcggcgctggatgcgtcaccacacggccaccctgactgagcagcagaggagggcgctgctgcgggcggtcttcgtcctcagacagggcctcgcctgcctccagcggctacatgttgcctggttttacatccacggtgtcttctaccacctggccaagaggctcacggggatcacgtacctccgtgtccgcagcctgcccggaaaagacctgagggcccgtgtttacttcaaggctgctggtgggtttctcccttcctgaacctgggtgctggtcctgggaccttcaacccgacccggtttccagggattcgcgttcctacccccccaaccattcttaagattccctttacagcccccgcccctatgttacgccccactcttgtccaggcgatatgacgttcccccctaaaccctacccctgcttccccatttcctctttcgct

SEQ ID NO: 258894 - DNA, 1675 bp, Homo Sapiens
  misc_feature (64)..(64): n is a, c, g, or t
  misc_feature (143)..(143): n is a, c, g, or t
  misc_feature (237)..(237): n is a, c, g, or t
  misc_feature (432)..(432): n is a, c, g, or t
gccaccaccacctccaccgccgcctcggaacccaggcctgggtgggcggtggggccgcgtatgnagcccccgccccccggagctgccaacattgccatacgccaccgccacgctacacacagcctcaactttcaggagacccntccgtggccttatttattccacccttcctgtacatcgtagcgaatcaatccgtggcgccgcactcctccgcatccctctttaacagtacccctnggatggcgtgagccctcccccagcgatggacccatctgtgacgctgtggtcagtttctgctgcagctgctgagagagcaaggcaatggccacatcatctcctggacttcacgggatggtggtgaattcaagctggtggatgcagaggaggtggcccggctgttggggctacgcaagaacaagaccaacatgaatnacgacaagctcagccgggccttgcggtactactatgacaagaacatcatccgcaaggtgagcggccagaagttcgtctacaagtttgtgtcctaccctgaggtcgcagggtgctccactgaggactgcccgccccagccagaagtgtctgttacctccaccatgccaaatgtggcccctgctgctatacatgccgccccaggggacactgtctctggaaagccaggcacacccaagggtgcaggaatggcaggcccaggcggtttggcacgcagcagccggaacgagtacatgcgctcgggcctctattccaccttcaccatccagtctctgcagccgcagccaccccctcatcctcggcctgctgtggtgctccccagtgcagctcctgcaggggcagcagcgcccccctcggggagcaggagcaccagtccaagccccttggaggcctgtctggaggctgaagaggccggcttgcctctgcaggtcatcctgaccccgcccgaggccccaaacctgaaatcggaagagcttaatgtggagccgggtttgggccgggctttgcccccagaagtgaaagtagaagggcccaaggaagagttggaagttgcgggggagagagggtttgtgccagaaaccaccaaggccgagccagaagtccctccacaggagggcgtgccagcccggctgcccgcggttgttatggacaccgcagggcaggcgggcggccatgcggcttccagccctgagatctcccagccgcagaagggccggaagccccgggacctagagcttccactcagcccgagcctgctaggtgggccgggacccgaacggaccccaggattcggaaagtggctccggcctccaggctccgggggccgggcgctgaccccatccctgcttcctacgcatacattgacccccggtgctgctgacacccagctcgctgccctcctagcattcacttctggagcaccctgagtcccattgcacccccgtagcccggccaagctctccctccagtttccatccagtcgcagcgcccaggtgcacatcccttctatcagcgtggatggcctctcgacccccgtggtgctctccctagggccccagaagccatgactactaccaccaccaccaccgacccttctggggtcactccatccatgctctctccggccagccatctgcactgacttggggtgtgtaaaataataaattgagatgattttccttactaa

SEQ ID NO: 258895 - DNA, 1621 bp, Homo Sapiens
  misc_feature (77)..(77): n is a, c, g, or t
  misc_feature (84)..(84): n is a, c, g, or t
  misc_feature (870)..(870): n is a, c, g, or t
  misc_feature (927)..(927): n is a, c, g, or t
  misc_feature (938)..(938): n is a, c, g, or t
  misc_feature (948)..(948): n is a, c, g, or t
  misc_feature (956)..(956): n is a, c, g, or t
ttaaacacacaacccacagtgttatcttagcaaatactgagacatgtttagtgactttccaaatctattatctcttntgtatgngatgtttccccagagctaagaaaatctttgtgtggagcagatgcgtggatgtgttgcatggatctcacatagtttatctttgattggatgctgtggtttgaggctgagggctgcttccatgctttcctctattgtgcggcaccctaaggctactcatacggagagtccagggacttgttcttgtctgggctgagagcctcatttctgcatgtgatataatggactcagctcttgatgtgctacttttatctgggtgacaaaataaaaacaatttcatttcaggctttcattcttatgcatctgcttctaccctctgagtactccctagatggatttcacatgtcaggtttttccctaggttcagggtcggagggagaagatggctttcaggtagagttggagctagtggagttgactgtggggactctggatctttgtgagtctgaagtattgcccaagcggaggaggagaaaaaggaataagaaggagaaaagccgagaccaggaggctggggcacatcggactcttctccagcaaactcaagaagaggagccttccacacagtcatcccaggcagttgctgcccccttgggccctttgctggatgaggccaaagcccctggtcagccagagctctggaatgcactgcttgctgcttgccgagctggagatgttggagtgctaaagctgcagctagctcccagccctgcagaccctagagttctgtctctgctcagtgcccccttgggctccggtggctttactctcctgcatgcagcagctgcngctggaagaggctcagtggttcgtctgctgctggaagcaggtgctgaccccactgtncagtattttcnggcccgaccnccttatantgttgcggctgacaaatcaacacgtaatgagttccgaaggttcatggagaagaatccagatgcctacgattacaacaaggctcaggtgccaggaccattgacaccagaaatggaggcacggcaggctacacggaaaagggagcagaaggcagcccggcggcaacgggaggaacagcagcagaggcagcaggagcaggaggagcgtgaacgagaagagcagcggcgatttgccgccctcagtgaccgagagaagagagctctggctgcagagcgccgactcgctgcccagttgggagcccctacctctccaatccctgactctgcaatcgtcaatactcgacgctgctggagttgtggggcatccctccaaggcctgactccctttcactacctcgacttctctttctgctccacacgttgcctccaggatcaatcgccgtcaggcagggaggccctcttcctgatctcttacagctctacctggggcccaactcagggacctgagagggcacattcacagcagccctaggttttttcttccccgtgaaaccagagatgatttggaagatgggggtgaaggacactcgggaactagggcaaagacagggctagaggtatgtggagctggtactgtctctggaattttaatcacaataaagtttggc

SEQ ID NO: 258896 - DNA, 1219 bp, Homo Sapiens
  misc_feature (476)..(476): n is a, c, g, or t
  misc_feature (541)..(541): n is a, c, g, or t
  misc_feature (748)..(749): n is a, c, g, or t
  misc_feature (751)..(751): n is a, c, g, or t
  misc_feature (754)..(754): n is a, c, g, or t
  misc_feature (757)..(758): n is a, c, g, or t
  misc_feature (762)..(762): n is a, c, g, or t
  misc_feature (764)..(764): n is a, c, g, or t
  misc_feature (772)..(772): n is a, c, g, or t
  misc_feature (784)..(784): n is a, c, g, or t
  misc_feature (795)..(795): n is a, c, g, or t
  misc_feature (797)..(797): n is a, c, g, or t
  misc_feature (806)..(806): n is a, c, g, or t
  misc_feature (808)..(808): n is a, c, g, or t
  misc_feature (814)..(815): n is a, c, g, or t
  misc_feature (817)..(818): n is a, c, g, or t
  misc_feature (824)..(824): n is a, c, g, or t
  misc_feature (828)..(828): n is a, c, g, or t
  misc_feature (857)..(858): n is a, c, g, or t
  misc_feature (865)..(865): n is a, c, g, or t
  misc_feature (883)..(883): n is a, c, g, or t
  misc_feature (885)..(885): n is a, c, g, or t
  misc_feature (897)..(897): n is a, c, g, or t
  misc_feature (900)..(1016): n is a, c, g, or t
  misc_feature (1068)..(1146): n is a, c, g, or t
tggttccgaggtgtagaccctggagccctcgatgcccgctagaatgtttgtggtacgtttcggcgattttttccgccttttgctgtggtatacgtagactgtgaaccgtttgtctggcaaagggtgaaatcgaagcaggactccatgcggcacttcttgccttgtagatgctggagttggcatctcgcttctgccggggggaaatgtgcacgctggaatcctcgttttccaattgatcccaaggaacgaaggggcgcagagcgtccgggaagcggggccagaaatgatccggactgggatggtgcaagccattcctaccgctgtgttcttctctgccggctgtggctcctcgatgccctaaactgcaagcctccgaaatcaacaaaagggcgagacaagagccagctgagagcaggatgaaatagcgttttttggccatgcatgtgtcctgcctgggtcaagaggattgtaaatanaacacaagaatcacccaagtttcccaatcaacactttcagctgccaggtccgccatcgttcccgncctgtaaagacgttcaaactctccgctcccaccttctctggatgcctttccccaagccgtggactgatccagcgcatgtgggcgatttctttaactttctccccttcggtctttcatctttgggttgcacaatgcacgggagagagcggggctgaatatctcgcacccagggcgggcgagcagcggactgtaattttcttgcatgcnncnagncgnngganangaaatagngaggggagaaanaaaaagctccngntacccaatnantgtcannannaagtgnttgncttgcctctcggattccctctcggcagcnnggaaaangagcccccgggaaggcancnttatctcagctnttnnnnnnnnnnnnnnnnnnnnnnnnnnnnnnnnnnnnnnnnnnnnnnnnnnnnnnnnnnnnnnnnnnnnnnnnnnnnnnnnnnnnnnnnnnnnnnnnnnnnnnnnnnnnnnnnnnnnnattcccttcttcagcggctccaagactccggcggtgtttactcctgcgctcnnnnnnnnnnnnnnnnnnnnnnnnnnnnnnnnnnnnnnnnnnnnnnnnnnnnnnnnnnnnnnnnnnnnnnnnnnnnnnntcctccccgcgggcagtgccggccccgagcagcgttcgcaggcccccgcgcgaacgctgccgaccgccgcgtt

SEQ ID NO: 258897 - DNA, 844 bp, Homo Sapiens
aggatgtggggcggggcctgccccaagagagtttcctaaagcgaggaaaccaagccgggcgcctcttgcaatggagacggtcatttcttcagatagctccccagctgtggaaaatgagcatcctcaagagaccccagaatccaacaatagcgtgtatacttccttcatgaagtctcatcgctgctatgacctgattcccacaagctccaaattggttgtatttgatacgtccctgcaggtgaagaaagctttttttgctttggtgactaacggtgtacgagctgcccctttatgggatagtaagaagcaaagttttgtgggcatgctgaccatcactgatttcatcaatatcctgcaccgctactataaatcagccttggtacagatctatgagctagaagaacacaagatagaaacttggagagaggtgtatctccaggactcctttaaaccgcttgtctgcatttctcctaatgccagcttgtttgatgctgtctcttcattaattcggaacaagatccacaggctgccagttattgacccagaatcaggcaatactttgtacatcctcacccacaagcgcattctgaagttcctcaaattgtttatcactgagttccccaagccagagttcatgtccaagtctctggaagagctacagattggcacctatgccaatattgctatggttcgcactaccacccccgtctatgtggctctggggatttttgtacagcatcgagtctcagccctgccaggggtggattgaaaaggggcgtgtggtgggacatctactccaagtttggatggtatcaatccgggaggcagaaaagacttacaacag

SEQ ID NO: 258898 - DNA, 1580 bp, Homo Sapiens
  misc_feature (50)..(50): n is a, c, g, or t
tcacatcggagatcatctcttcctaggaagcttttaaaaaatccccaggntggattagggcactccctctgggtccctggcaatttcctccaggttagggatcccaaggggtcgctgccttcctgggtctctggcctggcccttggggcacacagtcatcaagaagtgctggggggaagtgagctctttatttagacatagctctgctgagtggaaagtgggcaccagccccattaatgcttgctggctggtggcttccaagcacgccccactgccaaggctcagctctgcagttctgccactgcaggtccctagcacagcccccagggtccttaaaagtcatcatcatcacagatgtcaaggtacacgtcgaaagcctctctgttgcagtttccatcaggagtgaagacatatttgtggaaggtcccatctacgcagatggcaatgacagagttgacgttcttggaagtattgcgaccgaagcgcagatgcaagctgactcagcaggcacagtgaagctcgccaggctccactgagagtccacgtactgcccaatcataggccccaccttgcccacgcgagccagcgcggaggcggttgaggcgggtatccttgagagcaaagatatggacaagtaccccttatcactggaaagcgcaagaggaaggaggaatcgtggctgaaagttaaatgcagtagagggtggcagggtcaagtgcctcggcgcagctcccaccagtttctccttggattgtgtgtcaaagaggcgaataagggtacccttctgggaggctgaggccactacagtgcctggctggtttagagacacacaggctatgtcactctgatgtgcattgatcgtgaatggagcagacgaggtgccaggctttgtgctcgccaggtccacaagttgcagactcccacacttgtgtcccgggaacactagcagttgcttctccaggctggggcagaggtcacagagccccttgggttgtcccgggtatcaaactcaaacagctttcggggattgtcggggaaggagtacacatagatgcggttcttcagcacgatcacgatcttgtcatggcgcatgcgcacagaaagcactggcttggtgaaggtgaactccagcaccagcttctccttggagtccttgccctcccgggcatcgtcccagatcagcactgagatctctgagaacttgggactactaccaccgcccaccaaggccagaaggttggagcggtgcagcatctccaccaagcccatgctgcccacctgctcgtggtccagatgccccttctccatcaagggctccacgttgtagatgcgcacacctgtctccatggcgcagcaaaagcagctttggtcttggttgaaacgcaggctggtcactcctcgaagtggctgttgagtcatggtgcaggattgttcctcctgggatcgtgctccagcttcctgccgccttcaccggcctgacctccgcgtgtccctgacccgggccccagctgtcggtgccgcccgcggcccggttttctgacctcccgggccttggagcccggctcgggtgtttacatcag

SEQ ID NO: 258899 - DNA, 467 bp, Homo Sapiens
  misc_feature (41)..(41): n is a, c, g, or t
  misc_feature (193)..(193): n is a, c, g, or t
  misc_feature (284)..(284): n is a, c, g, or t
  misc_feature (367)..(367): n is a, c, g, or t
  misc_feature (393)..(393): n is a, c, g, or t
  misc_feature (435)..(435): n is a, c, g, or t
  misc_feature (442)..(442): n is a, c, g, or t
agacatagctctgctgagtggaaagtgggcaccagcccatntaatgcttgctggctggtggcttccaagcacgccccactgccaaggctcagctctgcagttctgccactgcaggtccctagcacagcccccagggtccttaaaagtcatcatcatcacagatgtcaaggtacacgtcgaaagcctctctctntccagtttccatcaggagtgaagacatatttgtggaaggtcccatctacgcagatgggcaatgacagagttgacgttcttgggaagtattngcgaccgaagcccagaatgcaagctgacttcagcagggcacagtgaagctcgccaggctccactggagagtccacgtaatggncccaatcatagggccccaaccttggnccaaggcgagccagcgcggagggccggttttgaaggcgggtnttctttnaggagcaaagttttggggcagtacc

SEQ ID NO: 258900 - DNA, 1773 bp, Homo Sapiens
  misc_feature (431)..(433): n is a, c, g, or t
attcccgggatgggctgcggcggttagtcctctcccggccgccgtcgcctccgacatattgcccgcaggagctgcggcggcgaagggagagcaccggggggaggagatgggaggacgaagaggtcccaacaggacatcttactgtcgaaatccgctctgtgagccgggatcctcggggggctctagtggaagccacacttccagtgcatcggtgaccagtgttcgttcccgcaccaggagcagttctggaacaggcctctccagccctcctctggccacccaaactgttgtgcctctacagcactgcaagatccccgagctgccagtccaggccagcattctgtttgagttgcagctcttcttctgccagctcatagcactcttcgtccactacatcaacatctacaagacagtgtggtggtatccacctnnncacccaccctcccacacctccctgaacttccatctgatcgacttcaacttgctgatggtgaccaccatcgttctgggccgccgcttcattgggtccatcgtgaaggaggcctctcagagggggaaggtctccctctttcgctccatcctgctgttcctcactcgcttcaccgttctcacggcaacaggctggagtctgtgccgatccctcatccacctcttcaggacctactccttcctgaacctcctgttcctctgctatccgtttgggatgtacattccgttcctgcagctgaattgcgacctccgcaagacaagcctcttcaaccacatggcctccatggggccccgggaggcggtcagtggcctggcaaagagccgggactacctcctgacactgcgggagacgtggaagcagcacacaagacagctgtatggcccggacgccatgcccacccatgcctgctgcctgtcacccagcctcatccgcagtgaggtggagttcctcaagatggacttcaactggcgcatgaaggaagtgctcgtcagctccatgctgagcgcctactatgtggcctttgtgcctgtctggttcgtgaagaacacacattactatgacaagcgctggtcctgtgaactcttcctgctggtgtccatcagcacctccgtgatcctcatgcagcacctgctgcctgccagctactgtgacctgctgcacaaggccgccgcccatctgggctgttggcagaaggtggacccagcgctgtgctccaacgtgctgcagcacccgtggactgaagaatgcatgtggccgcagggcgtgctggtgaagcacagcaagaacgtctacaaagccgtaggccactacaacgtggctatcccctctgacgtctcccacttccgcttccatttctttttcagcaaacccctgcggatcctcaacatcctcctgctgctggagggcgctgtcattgtctatcagctgtactccctaatgtcctctgaaaagtggcaccagaccatctcgctggccctcatcctcttcagcaactactatgccttcttcaagctgctccgggaccgcttggtattgggcaaggcctactcatactctgctagcccccagagagacctggaccaccgtttctcctgagccctggggtcacctcagggacagcgtccaggcttcagccaagggctccctggcaaggggctgttgggtagaagtggtggtgggggggacaaaagacaaaaaaatccaccagagctttgtatttttgttacgtactgtttctttgataattgatgtgataaggaaaaaagtcctatttttatactccc

SEQ ID NO: 258901 - DNA, 739 bp, Homo Sapiens
  misc_feature (430)..(430): n is a, c, g, or t
tgatacccgggactgggctgcggcggttagtcctctcccggccgccgtcgcctccgacatattgcccgcaggagctgcggcggcgaagcggagagcaccggggggaggagatgggaggacgaagaggtcccaacaggacatcttactgtcgaaatccgctctgtgagccgggatcctcggggggctctagtggaagccacacttccagtgcatcggtgaccagtgttcgttcccgcaccaggagcagttctggaacaggcctctccagccctcctctggccacccaaactgttgtgcctctacagcactgcaagatccccgagctgccagtccaggccagcattctgtttgagttgcagctcttcttctgccagctcatagcactcttcgtccactacatcaacatctacaagacagtgtggtggtatcncaccttcccacccaccctcccacacctccctggtttgggatgtacattccgttcctgcagctgaattgcgacctccgcaagacaagcctcttcaaccacatggcctccatggggccccgggaggcggtcagtggcctggcaaagagccgggactacctcctgacactgcgggagacgtggaagcagcacacaagacagctgtatggcccggacgccatgcccacccatgcctgctgcctgtcacccagcctctcgcatgaggagtccaagatcatgctgagagccatctgagcaatgtgcggatagcaa

SEQ ID NO: 258902 - DNA, 1543 bp, Homo Sapiens
  misc_feature (1358)..(1358): n is a, c, g, or t
aaagtgtgaccaacgtttcataggccaaaagtccaggtcagatgttcaacctggttgctcccacagccttttgggcaacaggcccctggttttgggccagagcctgggggaccaggttttgtgttgtccacatattctccccacatacaagcttctccaccaatcaccagagctttctgctcagggggtaccttcaaatgccaggggttccactacgtagaaatcctcccagtcagggccataggatatacggttcaggtaccagggggcagagagaagggcccggaagccggccttggtgaccagttccagctccttcatatagttcactggaatatcctctcgccacacctgtatgattgtgtctggctgaatctttactttattatcaaacacctcctgccacaccaacatagcccttgccataagaagagacgatgtccagcagcgtctggatgtagaaggactccagctgcttgaagtcctcaccgaagccttgtcttcctcataaagtcctggatctctgggttggacttccagcaggtgaaatcaacctcatctcctccaagatgaagataaaaatctgggaagacagagctgacttctaagaagaatgtgctcatgaactcataggtattattgagactgggattcactggtccaaaggtgccagagggctcagacccagagtagcaaggagtcagtaatccagggatacctggtccccaggacaaagtgtggccaggagtgtcaaactctgcaagcacacggataccccggagccgtgcgtattcaatgacctccttcacatcctgtgctgtgtagatgtgggtgacagggttgtaggacccctttctcatgagctctggaaaagtgaagctctcatatgggaaggaaggatcatctaccagatgccagtggaacacgttcaatttattgtacgccatgacatccagagtgtccaggatgctagagagtggcaggtaatggcgagatgtatccaacagcaagccccggtgaggaaagcggggaaagtcctcaatctcagtcttgttgataaagaatgtgccctcagcagatttccaaacaagctggctaaaagtctccagacctcggagagctccccagacagtctcagagaggagtaaacactggtcatcatttatggtcagggtataattctccactgactccaaagtaggaagctggttacatccaggtgtgactacagagacaaccaacacattcttctccagtgtatgccgtttccctgtgaggtaaggacggggccaagacccggaaccgaaaagcaggtcacgatagcgctggaaggcctcgtcgaggactgagcagccggntgcgcggccgagctgacatcgtactggaattgaaagttgttcgggtaaaggacgtagcgctggtcggaggtttggaagttctgaggccagggccagagggccgtcgcccgtcctgcgaacctgccgccagcagcagcgaaaaccaaagcctggagcttgtcatggcccgctggtctcccctctcg

SEQ ID NO: 258903 - DNA, 1002 bp, Homo Sapiens
gattcgccgataagtcacgggggcgccgctcacctgaccagggtctcacgtggccagccccctccgagaggggagaccagcgggccatgacaagctccaggctttggttttcgctgctgctggcggcagcgttcgcaggacgggcgacggccctctggccctggcctcagaacttccaaacctccgaccagcgctacgtcctttacccgaacaactttcaattccagtacgatgtcagctcggccgcgcagcccggctgctcagtcctcgacgaggccttccagcgctatcgtgacctgcttttcggttccgggtcttggccccgtccttacctcacagggaaacggcatacactggagaagaatgtgttggttgtctctgtagtcacacctggatgtaaccagcttcctactttggagtcagtggagaattataccctgaccataaatgatgaccagtgtttactcctctctgagactgtctggggagctctccgaggtctggagacttttagccagcttgtttggaaatctgctgagggcacattctttatcaacaagactgagattgaggactttccccgctttcctcaccggggcttgctgttggatacatctcgccattacctgccactctctagcatcctggacactctggatgtcatggcgtacaataaattgaacgtgttccactggcatctggtagatgatccttccttcccatatgagagcttcacttttccagagctcatgagaaaggggtcctacaaccctgtcacccacatctacacagcacaggaatgtgaaaggaggtcattgaatacgcacggctccgggggtatccgtgatgcttgcagagtttgacactcctggccacacttttgtcctgggggaaccaggtatcccctgggattactgactccctggctactctggggtctgaagccctctgggcacctttgggaccagtggaatcccaagtctcaataattaccctatggag

SEQ ID NO: 258904 - DNA, 1240 bp, Homo Sapiens
  misc_feature (595)..(618): n is a, c, g, or t
  misc_feature (860)..(860): n is a, c, g, or t
ccagcgagaattaatacctggggttggtatggcagggtatgtacagggggaaccccccgcccctgtcccaccccctctgtcaccaaccgaggcaggggggaggttgaggttccccagctggggagcaatggcttgtgagttctgaggatgggggagccaagtcctggcgtttagctggtgatgaagatgtggtgagctgggcagaggggtgtcttgatgaacacgaggcccccaggacccatcctgagacccaggaccaggggcctcactcagttcctggcctcggcctctgacgtcagcccaggctgtgggagcaggcagtccactgagggcccaggcctctgtccaaggagtcgctgcctcctccctccccgtcccccagggaaggtccccagtactgcccgggagggcaggtgggggcagggctggtgcggggtcacatggtcggtagaaaggcagagaaaagccggggcggagggcgagggctgtgtccatgtggcgtgggcggtcacgcgggagtgggtggccgggctgcttctgttggagctggggctgaggctggggctacagctgcctggcgggggggccaggccannnnnnnnnnnnnnnnnnnnnnnnggctgtccgctcagagtgtccaggccctctgagttctccaacatttcctggatgagaggcggcatggagcccgggatctccatcttcagcgtgatcacccgctcagcccccttggcgctgatgcttcgcaggtcagtaatcttcattagcatcttggggaacatgtgggggcggctgggcctccgcttccgcacgtagacctttagcgcctccagcagcggctcctgcagcatgtccacccnggtccggctgctccaggtccttggcggtctcccgagatgaggcagatggcgctgagaggccccgtctccgcatcatccatccccagggggcacagctggtttgggaaagcaaagacaagtccgttgagggggccaaagcaacctttttccacctgggtccggttcaggtccaccccgtccgaaaaggtcatgttgtcctgctcgggcgtttaccgcgtgcagatccgcagtcagggaatgtccaggcaggcagccttgaggaggggtgatctgggtgggcgatggttgagggtggtgaaagcggggcagctgcttggcgaacttcacagtcttaatgatgcacttggttgagagttcactgaacttgtcccagaggtcaa

SEQ ID NO: 258905 - DNA, 1055 bp, Homo Sapiens
  misc_feature (40)..(40): n is a, c, g, or t
  misc_feature (62)..(62): n is a, c, g, or t
  misc_feature (154)..(154): n is a, c, g, or t
  misc_feature (861)..(861): n is a, c, g, or t
  misc_feature (890)..(890): n is a, c, g, or t
  misc_feature (892)..(892): n is a, c, g, or t
cccgggatccgagcgagtcgccagctgcccctggcctggngggggcggaaccgcgcgggatncccacccccacccggaatcctcgccacggagaatccctggagaagccccggatccccggctgggaggaggaagtgctcgttgacccccagcnccgcgctgatcccgcccccggcctgcggacttggggagccgctgtactctgcctcggacgccacgagactctagacgggagtcccctcgaggtgaagccgctgagttcccgggccccgccaggcttccctgggagagccgacggaccccccctcccagcacacacaacttccctgcttttcaccgggactggcggagcggccggcggacttagacgcggggacttcagggcagggggcgccccctgcccgggtcaccagtcggggcgaggggacgtctcctctcccccagctgctctgctcggatggcgccgccggctgagtgacgggggcggcgcgcaggacttcccagctcggacctcttgccttcgaggggaaagatgtacgagagtgtagaagtggggggtcccacccctaatcccttcctagtggtggatttttataaccagaaccgggcctgtttgctcccagagaaggggctccccgccccgggtccgtactccaccccgctccggactccgctttggaatggctcaaaccactccattgagacccagagcagcagttctgaagagatagtgccagccctccctcgccaccccctctaccccgcatctacaagccttgctttgtctgtcaggacaagtcctcaggctaccactatgggggtcagcgcctgtgagggctgcaagggcttcttccgccgcancatccagaagaacatggtgtacacgtgtnanccgggacaagaactgcatcatcaacaaggtgaaccggaaccgctgccaatactgccgactgcagaagtgctttgaagtgggcatgtccaaggagtctgtgagaaacgaccgaaacaagaagaagaaggaggtgcccaagcccgagtgctctgagagctacacg

SEQ ID NO: 258906 - DNA, 1006 bp, Homo Sapiens
  misc_feature (937)..(937): n is a, c, g, or t
  misc_feature (949)..(949): n is a, c, g, or t
  misc_feature (960)..(960): n is a, c, g, or t
  misc_feature (968)..(968): n is a, c, g, or t
  misc_feature (981)..(981): n is a, c, g, or t
  misc_feature (983)..(983): n is a, c, g, or t
  misc_feature (992)..(992): n is a, c, g, or t
  misc_feature (995)..(995): n is a, c, g, or t
cttaaatagaagattcttggccgtgtagataaggaaaataagataaggcaatatttttgaactattctataatagaaatgaggatatatacacaaaatgacccagtgctgttttcttagggtgcatcctttgtttttctggttttggtcttttcatcacaggatggcattagctctgtgtctgcaggtgctgtgcagcctgtgtggctggctctcgctctatatttctttctgccacctgaataagcaccgaagctatgagtggagctgccgcctggtcaccttcacccatggagtcctctctataggcctctccgcttatattggcttcattgatggcccatggccttttacccacccaggctcacccaatacacctctccaagttcatgtcctgtgtctcaccttgggctacttcatcttcgacttgcggctggtgcgtctactttcagtctgagggtgccttgatgctggctcatcacacattgagtatcttgggcattatcatggcccttgtgcttggggagtctggcacagaggtcaatgcagtcctctttggaagtgagcttaccaaccccttgctacagatgcgctggtttctccgggaaacagggcactatcacagtttcactggagatgtagtggacttcctctttgtggctctgttcacaggagtgaggattggtgtgggagctagccaccttttctgtgaaatggtctcccccacgcctaagtggtttgtgaaggctgggggagtagcgatgtatgctgtgtcttggtgtttcatgtttagcatctggcgctttgcatggaggaagagcatcaagaagtaccatgctttggagaagcaggcggagtgaggaacggcagctgaaacacaacggacatctcaaaatacactagccaaggcttgctccagattatggattgggttaagnagcatgggaacnagttggaatantactgtanataatacacttananaacttaggnttnataaagggtaa

SEQ ID NO: 258907 - DNA, 1648 bp, Homo Sapiens
  misc_feature (112)..(112): n is a, c, g, or t
  misc_feature (291)..(291): n is a, c, g, or t
gtgttccaggcagagggcacggcccatgcaaaagcatggaggcatgacacagcacgcaatgtgcagggaatcatggttaattttgtaggaaatctccagagtggtgccaganatattcctggaaaggttgcctggaactagatcatggaaggtctcatgtagatactgggaatgtcgatgaattttagggggtgtgtgtgtgggtttatcgtggttaaaattactttttagaacagtcactctgaggaagaggacaactgaggggtaaagagggaaagactagggcttttngagggaggcttgttaggaaagactggaggctttttgagggaagtgtgttaggaaatactagggcctttttgagggaggcttgttaggtcactgcagtggtcttggcttggctagggctgtgaggaaggagagagggtttggattttagtaaaagagatactgacataagtgtatttgattttcagactctgagatttgcccacctgatgaccttgccagcttgccatcatgcaaagaaaatcctgaagatgttctgagcccaacttcagtagctacttacctgagttccaagagtcagccttctgctaaagtcagtgtgatggggactgatcagtcagagagcattaatacctcaaatgagacagaatacttaaaacagaaaatccatgacttggaaactgagctggaaggctaccagaatttcatatttcagcttcaaaagcactcccagtgcagtgaggccataattacagttttgtgtgggacagaaggggcccaggatggcttgagcaagcccaagaatggttctgatggggaagaaatgaccttttcaagtttgcaccaagtgcgatacgtgaaacacgtgaaaatcctcggtccgctggccccagagatgattgacagcagggtgctggagaacctcacacagcagctggaggaacaggaatactagctgcagaaggagcagaatttgaacatgcaacttttcagtgagatccataatctgcagaataagttcagagatctctcacctcccagatacgattcattagttcagtcccaagccagggagctctcccttcaacggcagcagattaaggatggccatggcatctgtgtcatctcccgtcaacacatgaacaccatgattaaggcatttgaggagttgctgcacgccagtgatgtggattactgtgtggccgagggtttccaggaacagctgaatcaatgtgctgagctgctggagaaattggaaaagctatttctcaacggaaatcagttggagtggaaatgaaaccccagaatgaactgatggagacgattgaggaagacaactttaacctaccaacctctttctgactggaatctctgaaccctccagcctctcatgcgctccctgattaatgaaacatctgaaaagtcctttcttctcccgagacccccaagccaggataattgacgactgagaaataacttccggttatggggggaacaagttttctcctcacagactttaacttaatggggaaccccactacaggggaaaatttccgaaatctttcgaaggaaggccgcgtttttaggagaaatttctaattttataaccaacaatggggaaaacgccttccccggaaaa

SEQ ID NO: 258908 - DNA, 1526 bp, Homo Sapiens
ggctggtaccggtccggaattcccgggatcagcagccgtctacccggtgtcgcgttctgtgttgtggcggccctggatccggcgtcagggcgaccgggcggacgaggtggagccagagtctgtcaggcgggttggtgaagggcgcggggccgggcacggcgttgggagtgcgcggcagggaccggccaggcgggctgcaggcacctcagagcccgggacaccccctcaacgtccgcaggcgcgatgaaggcactgatcttagtggggggctatgggacgcggctacggccgctgacgctgagcaccccgaagccactggtggacttctgcaataagcccatcttgctgcaccaagtggaggcgctagccgcggcaggcgtggaccacgtgatcctggccgtgagctacatgtcgcaggtgctggagaaggaaatgaaggcacaggagcagaggctgggaatccgaatctccatgtcccatgaagaggagcctttggggacagctgggcccctggcgctggcccgtgacctactctctgagactgcagaccctttcttcgtcctcaacagtgacgtgatctgcgatttccccttccaagccatggtgcagttccaccggcaccatggccaggagggctccatcctggtgaccaaggtggaggaaccctccaagtacggtgtggtggtgtgtgaggctgacacaggccgcattcaccggttcgtggagaagccacaggtgtttgtgtccaataagatcaacgcaggcatgtacatcctgagccctgcagtgctgcggcgcatccagctgcagcctacgtccattgagaaggaggtcttccccattatggccaaggaggggcagctatatgccatggagttacagggcttctggatggacattgggcagcccaaggacttcctcactggcatgtgcctcttcctgcagtcactgaggcagaagcagcctgagcggctgtgctcaggccctggcattgtgggcaacgtgctggtggacccaagtgcccgcatcggccagaactgcagcattggccccaatgtgagcctgggaacctggcgtggtgggccgaagatggtgtgtgtatccggcggtgcacggtgctgcgggatgcccggatccgttcccattcctggcttgagtcctgcattgtgggctggcctgccgcgtgggtcagtgggtacgcatggagaacgtgacagtgctgggtgaggacgtcatagttaatgatgagctctacctcaacggagccagcgtgctgccccacaagtctattggcgagtcagtgccagagcctcgtatcatcatgtgaggggatgcagtggggctggccgagccccggttttcccatcagcaaggggagtgctggcctgacacatcagaagaccctggacttgtcattatttgtctggggggcactgggtgaagctgaagctgttggacacctgccttctcatgtggacatcatctggcaggatccctgctgggcacaccccacaaaccccactccc

SEQ ID NO: 258909 - DNA, 1082 bp, Homo Sapiens
  misc_feature (7)..(7): n is a, c, g, or t
  misc_feature (23)..(23): n is a, c, g, or t
  misc_feature (25)..(25): n is a, c, g, or t
  misc_feature (33)..(33): n is a, c, g, or t
  misc_feature (36)..(37): n is a, c, g, or t
  misc_feature (39)..(39): n is a, c, g, or t
  misc_feature (43)..(43): n is a, c, g, or t
  misc_feature (47)..(47): n is a, c, g, or t
  misc_feature (50)..(50): n is a, c, g, or t
  misc_feature (56)..(56): n is a, c, g, or t
  misc_feature (65)..(65): n is a, c, g, or t
  misc_feature (90)..(91): n is a, c, g, or t
  misc_feature (128)..(128): n is a, c, g, or t
  misc_feature (135)..(136): n is a, c, g, or t
ccctcanttatacccggggtcgnantcagttgngtnnanccanaganagncaggtnctgtgggcngaggccaaatcacaaagtcgccctnngcccaagcgatagtgcaccaaccccggcggggggtgnaggtgtnnaatcaccgcccctgccgccccctatgcgcagcagttggaagcagggcagccatggccgtgccccctctgcaccacctcttccacttcaggcatccatttcctttcccactcctgggccacgcaccgctggcttaagttcgcttcccagtctgatgcaaacttgagttgtgctgtatgcggtttcaactttgagcacactacctgaatagcccaaattcagagtgcaagcagcctaggactcaatgcaaaattggttaagccgacttgcaaatgaaaaattccaggaaggtctccgtgcaatgcaaactcaggaacacgtcctatggcacctcacttgagctggatcctcagatcgcaaaatatttggggagcctccaatctgcaaggcaaggatactttaggcagctcctgtgtgtgtcggggtggcggggcgcggggaaggaggtcctgttatacacacgtctacgtgcaatacgaacacatcacctctgtgtaattcggagaagagtagcttcttcctgtcaaacttgcttatcctaatagagcactcctgcttgcctgcgccccgatcttctggccaatccctcactcataactggttgaacctccgagggcaatgaatccactgtcatcccccaaaagaaagtgcaaacgagtccttaagtactccaacaaattggacctaaacccctacttcccggcttctctaggtgggataaaaacaggaaggagctccccgcgatcatgcaaggcatacccggccttttcccactccgccccagccccgtttcggatctacccgcgcggcgcagtctccgagtagcctcctcttcaagcagtgccagcctgtgcggcggatcccgggaccccttgggctcctcggcaggagccgacgttgctgcatctgtttgacagccaagaagccggggccaggaggggcgcggcc

SEQ ID NO: 258910 - DNA, 1609 bp, Homo Sapiens
  misc_feature (1399)..(1399): n is a, c, g, or t
  misc_feature (1445)..(1485): n is a, c, g, or t
cctggagctgctgcaagtgccgcctgtgctggggaagggaccatgtggctgccttgggctctgttgcttctctgggtcccaggatgttttgctctgagcaaatgcaggaccgtggcgggccccgtggggggatccctgagtgtgcagtgtccctatgagaaggaacacaggaccctcaacaaatactggtgcagaccaccacagattttcctatgtgacaagattgtggagaccaaagggtcagcaggaaaaaggaacggccgagtgtccatcagggacagtcctgcaaacctcagcttcacagtgaccctggagaatctcacagaggaggatgcaggcacctactggtgtggggtggatacaccgtggctccgagactttcatgatcccgttgtcgaggttgaggtgtccgtgttcccggcatcaacgtcaatgacacctgcaagtatcactgcggccaagacctcaacaatcacaactgcatttccacctgtatcatccactaccctgtttgcagtgggtgccacccacagtgccagcatccaggaggaaactgaggaggtggtgaactcacagctcccgctgctcctctccctgctggcattgttgctgcttctgttggtgggggcctccctgctagcctggaggatgtttcagaaatggatcaaagctggtgaccattcagagctgtcccagaaccccaagcaggctgccacgcagagtgagctgcactacgcaaatctggagctgctgatgtggcctctgcaggaaaagccagcaccaccaaggggaggtggaggtggaatacagcactgtggcctcccccagggaagaacttcactatgcctcggtggtgtttgattctaacaccaacaggatagctgctcagaggcctcgggaggaggaaccagattcagattacagtgtgataaggaagacataggcttttgtcctgcctcgccatcggagctctcatgggccccagggaagtccagggacagctccctgatacctgggcccacgtccttcttcagcctgccctcgacaacagtgaccaacagacagggcagctgggtttcccaggccatccctctgttgccatcagcttgattggcttccccgagggccagcagggctgggggctccggggagcagcaggaagcactcccagccaccagtgcctgtcgcctctttcccctttgcccctgcttcatcccagctctgtgtgtggaggacaaagcttcttcctgcgtggctccaggaaaagatgtggctcacgtaggtggcacctgccaatagctttgtcaatcacagccccataggaacgtctggaattgcttgggagttggggagaactgtcaagaagagtgaagagagtgccaaagcggagatctgttcncctgggggccatggaggggggacccactaaagatcaagatcaaagnnnnnnnnnnnnnnnnnnnnnnnnnnnnnnnnnnnnnnnnnaggagagaattgctcatggctccagaactggtggcaagtttctctggactcttaggtttatttttaatatgaaatataaaaacagtttcaaatatcttattgagggagaagtaaaaacttattt

SEQ ID NO: 258911 - DNA, 687 bp, Homo Sapiens
  misc_feature (596)..(612): n is a, c, g, or t
ggtcacacacgaggaatgtgttcattcttttattgtccgttgttttaacctgactgaatacaagatcaacaagagcactgtactcctggcaattattacatatgttagaacatggattttgcactgtagacaacatttaacaccagtctatggggtactgcattgctttttataaagttcaaaataaagatttattttcaaacaagtgactttggtttatttcatacattacactttttcttgcagaaaaaaataaaattgtacaactgcataaatataaaattcttccaccatgaaaatggttaaaacattcataaagacacagcaccagcatgtgatgcctccagaaaggaaaaaaggaaagtaaaagaaaatgtataaagcaaattaattagccctgtcactagccaaagtgatgggcagatccagatctcagacacagctttagaacataccggaggacaaggcaagagatgtcaagacagcattcaatacaagcataacacaacccatcacctttttgtgtttttctgtagtgtcacttaaaatttaaagggcagttcccccatgacaaacccccaccccagcccccaggnnnnnnnnnnnnnnnnngacctaacaccacaggaaaagactatggagtatgttaaaaatgctcatcgatgggccattacctttgaaagagcc

SEQ ID NO: 258912 - DNA, 1662 bp, Homo Sapiens
  misc_feature (1251)..(1265): n is a, c, g, or t
  misc_feature (1321)..(1321): n is a, c, g, or t
  misc_feature (1368)..(1368): n is a, c, g, or t
  misc_feature (1374)..(1374): n is a, c, g, or t
  misc_feature (1453)..(1456): n is a, c, g, or t
  misc_feature (1501)..(1501): n is a, c, g, or t
tcccgggattgccagcagggctagacccggggtgagatccagggcaacagggtctgcctgggaagctcagctccggcactgcctggggcgtctctgcctacacaggaccattcctctcgcctggactcctcttggagtttgccaaggctggcctctgcagaaataggagactcctggaggaagacagtggacttcagcaagctgcaccaaggagaatccacagcggcagctgccctgccaggcgcgggatctcggtcaaggtggatcaacacagcctcaggtgtgtgctctgccccactgagatggcaagtgcattcttttctattcctacgaggaaagagcatccgaaagagcctgccttcacataggatgaataacagtggaccttggctttgcctcagtgttatgtgctaataaaccatgtattctatgccctaaggaagcccagagagagctggacaagctggatatcccaaagagcatggcactggcccaccacattgattacattgcgctggccgggtgctaaccaagaagcagctaacacactgggagtcttggtaagatgcctgagtgcctgcagctggcagacaaatcctacaaagattctgggaactgccactaataacactcttggtggggaggtcccatatcccataaccaggagcatattgggcctcccgtccacagcaaagagccaattactgcatcttgcatctcccatgaccaagagagacagacaatgccagtacgccttctggaggcagcacgttccacacacatgaagactactccagcctatgtaccattgataggagaagctgtcggccttccctgagcctgcagcaggtcgaggctgcagtgctggcagccctgtgactcaggccctgcagctggtcggaccctgtgttatgagaggtatcagacgttgggaaagcaatgctgtgtgtttatggcaagccactatgccagaatcacagtgcaggcccctgggattcagaaacaaagccgtgccatctgcggcagaggattctgcaaaaaattctgaaaagtccctgctgatgtgctcctggggcctggggtgatggaatacctgattgtgcatgtggaactgctcagatgagctggattctgtctcacccctgggtcatgaggttggggactcagaaataacccatcacaggtgggagtgtgcgtgtggcagcagcagaagcaggagcaggagaccaagcagcggcagctgcccagtannnnnnnnnnnnnnnacagcagtccccacagccccagtggaggaaccttctggtgaactgaggagggaggnacaagcccggcctcagttcatggaggtgtctgctctgccttgtgggnccagcncaaatcgcctggctgccataccccagtctcagcaagctgccctttaaagagggtgatatggtttggctctgtgtccccnnnnaaatctcatcttgaactgtaatccccaggtgatgagggtgagacntgatgggaagtgattggatcatgggggttgttttccccatgctgttctcgtgatggtgaaggagttctcatgagatctgatggttttataagtgtctggcaattcccctgcttgcacttgtctttctcgcccaccaccacgtaagacgtgcccgcttcccc

SEQ ID NO: 258913 - DNA, 1237 bp, Homo Sapiens
  misc_feature (905)..(905): n is a, c, g, or t
  misc_feature (952)..(952): n is a, c, g, or t
  misc_feature (1000)..(1000): n is a, c, g, or t
  misc_feature (1025)..(1025): n is a, c, g, or t
  misc_feature (1045)..(1045): n is a, c, g, or t
  misc_feature (1066)..(1067): n is a, c, g, or t
  misc_feature (1104)..(1104): n is a, c, g, or t
  misc_feature (1110)..(1110): n is a, c, g, or t
  misc_feature (1136)..(1137): n is a, c, g, or t
  misc_feature (1139)..(1139): n is a, c, g, or t
  misc_feature (1142)..(1142): n is a, c, g, or t
  misc_feature (1171)..(1171): n is a, c, g, or t
  misc_feature (1174)..(1174): n is a, c, g, or t
  misc_feature (1181)..(1182): n is a, c, g, or t
  misc_feature (1185)..(1185): n is a, c, g, or t
  misc_feature (1187)..(1187): n is a, c, g, or t
  misc_feature (1230)..(1230): n is a, c, g, or t
gccccacgcccaccctatctgctccaggttctgaagaaggccttccaggccacgctcaggtggctcctgagctcacccaagacccccggctgctctgatctcggccccctcatcccgcagttcctcagagagctgttccctgtgctgcagaaacgcctgtgccacccctgctgggaggtgagggactccgccctcgagttcctgacccagctgagcaggcactggggaggacaggctgacttcagatgcgcactcttggcttcagaggtgcctcagctggccctgcagctcctccaggaccctgagagttatgtccgagcgagtgcagtgaccgccatggggcagctgtccagccagggcctgcacgcccccaccagccctgagcatgcagaggcccggcagagcctgttcctggagctcctgcacatcttctccgtagactcggagggcttcccacggcgggcggtcatgcaagtcttcactgagtggctgcgggacggccacgccgacgcggcccaggacacggagcagttcgtggccactgtgctgcaggcggcgagccgggacctggactgggaggtccgcgcccagggcctggagctggccctcgtgttcctggaccagactttggggccgccgcgtacccactgcccctatgccgtggccctacccgaggtggccccagcccagccactcaccgaggcactgagggctctctgccacgtggggctctttgacttcgccttttgtgccttgtttgactgcgaccgccctgtggcgcagaagtcttgtgacctccttctcttcctgagggacaagattgcttcctacagcagcctgcgggaggccaggggcagccccaacactgcctccgcagaggccaccctgccgaggtggcgggcggntgagcaggcccagcccccaggggaccaggagcctgaggctgtgctgnccatgctcaggtccctagacctggagggcctgcggagcacgctggccnagagcagcgaccacgtggagaagantccccagtccctcctgcagnacatgctggccacgggaggcnncctgcagggggacgaggccgactgctactgagcaganccagantctgccactggggctcaggaccaagnnanccnccaccatgtccttctgtgggacactgccngcnccagggnnccngnccagcccggtggatcctctagggaagccaggtcctggagagangcaaggt

SEQ ID NO: 258914 - DNA, 1412 bp, Homo Sapiens
caaatacaagcgcagacgatttcagaaaaccaagaacctgctgacaggagagacagaagcggacccagaaatgatcaagagggctgaggactatgggcctgtggaggtgatctcccattggcaccccaacatcaccatcaacatcgtggacgaccacacgccgtgggtgaagggcagtgtgccccctcccctggatcaatatgtgaagttcgacgccgtgagcggtgactactatcccatcatctacttcaatgactactggaacctgcagaaggactactaccccatcaacgagagcctggccagcctgccgctccgcgtctccttctgcccactctcgctttggcgctggcagctctatgctgcccagagcaccaagtcgccctggaacttcctgggtgatgagttgtacgagcagtcagatgaggagcaggactcggtgaaggtggccctgctggagaccaacccctacctgctggcgctcaccatcatcgtgtctatcgttcacagtgtcttcgagttcctggccttcaagaatgatatccagttctggaacagccggcagtccctggagggcctgtccgtgcgctccgtcttcttcggcgttttccagtcattcgtggtcctcctctacatcctggacaacgagaccaacttcgtggtccaggtcagcgtcttcattggggtcctcatcgacctctggaagatcaccaaggtcatggacgtccggctggaccgagagcacagggtggcaggaatcttcccccgcctatccttcaaggacaagtccacgtatatcgagtcctcgaccaaagtgtatgatgatatggcattccggtacctgtcctggatcctcttcccgctcctgggctgctatgccgtctacagtcttctgtacctggagcacaagggctggtactcctgggtgctcagcatgctctacggcttcctgctgaccttcggcttcatcaccatgacgccccagctcttcatcaactacaagctcaagtctgtggcccaccttccctggcgcatgctcacctacaaggccctcaacacattcatcgacgacctgttcgcctttgtcatcaagatgcccgttatgtaccggatcggctgcctgcgggacgatgtggttttcttcatctacctctaccaacggtggatctaccgcgtcgaccccacccgagtcaacgagtttggcatgagtggagaagaccccacagctgccgcccccgtggccgaggttcccacagcagcaggggccctcacgtccacacctgcacccaccacgaccaccgctcaccaggggagtaggcctccacgttccctacccaccaagccccacccctgggggcccgtctctgccagcgaaccccccaggaagccccctccaaggtcagcagaaggaa

SEQ ID NO: 258915 - DNA, 1040 bp, Homo Sapiens
  misc_feature (59)..(59): n is a, c, g, or t
  misc_feature (69)..(69): n is a, c, g, or t
  misc_feature (71)..(71): n is a, c, g, or t
  misc_feature (83)..(83): n is a, c, g, or t
  misc_feature (882)..(882): n is a, c, g, or t
  misc_feature (888)..(888): n is a, c, g, or t
  misc_feature (890)..(890): n is a, c, g, or t
  misc_feature (893)..(893): n is a, c, g, or t
  misc_feature (895)..(895): n is a, c, g, or t
  misc_feature (922)..(922): n is a, c, g, or t
  misc_feature (930)..(930): n is a, c, g, or t
  misc_feature (932)..(932): n is a, c, g, or t
  misc_feature (936)..(936): n is a, c, g, or t
  misc_feature (943)..(943): n is a, c, g, or t
  misc_feature (950)..(950): n is a, c, g, or t
  misc_feature (961)..(961): n is a, c, g, or t
  misc_feature (979)..(979): n is a, c, g, or t
  misc_feature (993)..(995): n is a, c, g, or t
  misc_feature (999)..(1000): n is a, c, g, or t
  misc_feature (1005)..(1006): n is a, c, g, or t
  misc_feature (1009)..(1009): n is a, c, g, or t
  misc_feature (1017)..(1017): n is a, c, g, or t
  misc_feature (1030)..(1030): n is a, c, g, or t
  misc_feature (1038)..(1038): n is a, c, g, or t
ggtctccgagggggagtgtggtagggggacgagggacaagatgataacggccgtgggcnccccgtaggncncccggccccacncccgcccaacccaccccctcggcaacgctgcatcagcttcaccatgattcccagtggtgctgggctggcagggcgagatggctggaaacacagagggacagagggacagacagcgcctccacaaacaaaccctggcctgccccggcccctacgtcacacgctgggccctgacctgaggcgggcctcccaccgccccggcctgatctgtccagggaaagggcgacagggaggggaggcgagggggccgggacgcaggggtagtggtcgccaggagccggagcaggtgaggaccagtctcgactaatcctttttcttgtcctctgctggctttggaggggcttcctggggctcgctggcagagctggccccctgggtgggcttggtgggcagggacgtggaggcctcctccctggtggcggtggtcgtggtgggtgcaggtgtgggcgtgagggcccctgctgctgtgggaacctcggccacgggggcggcagctgtggggtcttctccactcatgccaaactcgttgactcgggtggggtcgacgcggtagatccaccgttggtagaggtagatgaagaaaaccacatcgtcccgcaggcagccgatccggtacataacgggcatcttgatgacaaaggcgaacaggtcgtcgatgaatgtgttgagggccttgtaggtgagcatgcgccagggaaggtgggccacagacttgagcttgtagttgatgaagacctggggcgtcatggtgatgaagccgaaggtcagcaggaagccgtagagcatgctgaacacccaggantaccancnttntnctccaggtacagaagactgtagacggnatagcagncnaganccggganaggatcnagacaagtacnggatgcgatatatcatanattttggtcgagannnatanngtggnnttntcttgaangatagcggggganattctgcnac

SEQ ID NO: 258916 - DNA, 857 bp, Homo Sapiens
tctacatcctggacaacgagaccaacttcgtggtccaggtcagcgtcttcattggggtcctcatcgacctctggaagatcaccaaggtcatggacgtccggctggaccgagagcacagggtggcaggaatcttcccccgcctatccttcaaggacaagtccacgtatatcgagtcctcgaccaaagtgtatgatgatatggcattccggtacctgtcctggatcctcttcccgctcctgggctgctatgccgtctacagtcttctgtacctggagcacaagggctggtactcctgggtgctcagcatgctctacggcttcctgctgaccttcggcttcatcaccatgacgccccagctcttcatcaactacaagctcaagtctgtggcccaccttccctggcgcatgctcacctacaaggccctcaacacattcatcgacgacctgttcgcctttgtcatcaagatgcccgttatgtaccggatcggctgcctgcgggacgatgtggttttcttcatctacctctaccaacggtggaatctaccgcgtcgaccccaccccgagtcaacgagtttgggatgagtggagaagaccccacagctgccgcccccgtggccgaggttcccacagcagcaggggccctcacgcccacacctgcacccaccacgaccaccgccaccagggaggaggcctccacgtccctgcccaccaagcccacccagggggccagctctgccagcgagccccaggaagcccctccaaagccagcagaggacaagaaaaaggattagtcgagactgggtcctcacctggctccgggctcctgggcgaccacttaccccttgcgtccccggcccc

SEQ ID NO: 258917 - DNA, 413 bp, Homo Sapiens
  misc_feature (250)..(280): n is a, c, g, or t
cgaccactacccctgcgtcccggccccctcgcctcccccccctgtcgccctttccctggacagatcaggccggggcggtgggaggcccgcctcaggtcagggcccagcgtgtgacgtaggggccggggcaggccagggtttgtttgtggaggcgctgtctgtccctctgtccctctgtgtttccagccatctcgccctgccagcccagcaccactgggaatcatggtgaagctgatgcagcgttgccgannnnnnnnnnnnnnnnnnnnnnnnnnnnnnnccccctacgggatgcccacggccgttcatcatcttgtccctcgtccccctaccacactccccctcctagaccgccgccctttaacacagtctggatttaataaattcatatggctgtttaacttaaactcaaa

SEQ ID NO: 258918 - DNA, 1735 bp, Homo Sapiens
ctcaaccaaacttgggaaccatccttgatccacgaccaggtgtcattactaaaggctttacccagttgcccggggatgctatttatcacatctcagatttagaagaggatgaagaggagggtattacttttcaggttcagcaacctcttgaagtggaagagaaactttcaacatccaagccagtaacagggatcttcctgccacccattacttcagcaggtggaccagttacagttgcaaccgccaacccaggaaagtgcctgtcgtgcacaaactcaacattcactttcaccacctgtagaatattacatccctctgacatcactcaggttacccccagctctgggttcccttcattatcctgtggaagtagcggtagagtctcatccaacacggctgtgaattctcctgccttgtcctatagactcagcattggtgagtccatcaccaaccgacgagattccactacaaccttcagtagcaccatgagcttggccaaacttctacaagagcgaggcatctctgccaaagtgtaccacagcccaatttcagagaaccccctccagcctctccctaaatccctggctatcccttccacaccaccaaattcaccatctcactcaccttgcccttctcctttaccctttgagcctcgagtgcatctctctgaaaattttttggcctctcgaccagctgagacattcctccaggagatgtatggcttgagaccctcccggaaccctcctgatgttggccagttgaagatgaacttagtggacaggctgaagagactggggatagccagagtggtcaagaaccctggtgcccaagagaatggaagatgccaggaggcagaaaatggtcctcaaaaaccagattctgctgtttatttaaattcaggtagcagtttattaggtggactaaggaggaatcagagtcttccagtcataatgggtagctttgctgccccagtttgcacatcctcacccaaaatgggtgtcctgaaggaggactgaggttcagcagttaactgacctcttatacaagttagcacatgaaggatagatatgcactgaaacatgtggtctggtctgacttgagagaaaaggaatgttgcacaagggttgtgaatgtgaaagggggaatggaggaatggaaataaaattgggatgagccctaatggaggaagtcgggcaaattgaaagtataaatgaatggcccatgagtgttcagagggagaaaagaaaggtttaatatactccttcagttgagttttcttgtcttgaacataaaaagtgaatacaaataaattcagtaatactaaaacatacagagatactgaacttgctggcacatttacttctggtaagcataaagcagagagaacccaggttagaaggatgggaagagaaaaggagcagttttattgcttatagaaagccgttctgaggggttggtggggtaagctcagtctattactgagacaatagtgagatggcttatatgtttcccctgttaatatctggttaaattatgtatccatcaaatggtatgctcgcagcattagcaaaattaggagtttcatctttttcattgaatcacaggtggagactcctattttcctttctgttttcaggcctttgagcccctgggagcccaaataccactcaattattttgtatttatgattaataaaagttcattttttaaatttgtatttttatacaacctccaa

SEQ ID NO: 258919 - DNA, 1403 bp, Homo Sapiens
  misc_feature (1159)..(1159): n is a, c, g, or t
  misc_feature (1177)..(1177): n is a, c, g, or t
  misc_feature (1193)..(1193): n is a, c, g, or t
  misc_feature (1197)..(1198): n is a, c, g, or t
  misc_feature (1204)..(1204): n is a, c, g, or t
  misc_feature (1215)..(1215): n is a, c, g, or t
  misc_feature (1220)..(1221): n is a, c, g, or t
  misc_feature (1231)..(1232): n is a, c, g, or t
  misc_feature (1258)..(1258): n is a, c, g, or t
  misc_feature (1264)..(1264): n is a, c, g, or t
  misc_feature (1269)..(1269): n is a, c, g, or t
  misc_feature (1271)..(1271): n is a, c, g, or t
  misc_feature (1274)..(1274): n is a, c, g, or t
  misc_feature (1278)..(1278): n is a, c, g, or t
  misc_feature (1281)..(1281): n is a, c, g, or t
  misc_feature (1283)..(1283): n is a, c, g, or t
  misc_feature (1303)..(1303): n is a, c, g, or t
  misc_feature (1347)..(1347): n is a, c, g, or t
  misc_feature (1350)..(1351): n is a, c, g, or t
  misc_feature (1357)..(1359): n is a, c, g, or t
  misc_feature (1368)..(1369): n is a, c, g, or t
  misc_feature (1377)..(1377): n is a, c, g, or t
  misc_feature (1388)..(1388): n is a, c, g, or t
gctcctgagatagtcaactatgaacctcttggtcttgaggcagatatgtggagtatcggggtaataacctatatcctcctaagtggggcctccccatttcttggagacactaagcaagaaacgttagcaaatgtatccgctgtcaactacgaatttgaggatgaatacttcagtaataccagtgccctagccaaagatttcataagaagacttctggtcaaggatccaaagaagagaatgacaattcaagatagtttgcagcatccctggatcaagcctaaagatacacaacaggcacttagtagaaaagcatcagcagtaaacatggagaaattcaagaagtttgcagcccggaaaaaatggaaacaatccgttcgcttgatatcactgtgccaaagattatccaggtcattcctgtccagaagtaacatgagtgttgccagaagcgatgatactctggatgaggaagactcctttgtgatgaaagccatcatccatgccatcaacgatgacaatgtcccaggcctgcagcaccttctgggctcattatccaactatgatgttaaccaacccaacaagcacgggacacctccattactcattgctgctggctgtgggaatattcaaatactacagttgctcattaaaagaggctcgagaatcgatgtccaggataagggcgggtccaatgccgtctactgggctgctcggcatggccacgtcgataccttgaaatttctcagtgagaacaaatgccctttggatgtgaaagacaagtctggagagatggccctccacgtggcagctcgctatggccatgctgacgtggctcagttactgtgcagcttcggctcaaatcccaatatccaggacaaggaagaagaaaccccccctgcactgtgctgcttggcacggctattactctgtggccaaagccctttgtgaagccggctgtaacgtgaacatcaaggaaccgagaaagagagaccccccttcctgacagcctctgccaggggctaccacgacatcgtggagtggctggccgaacagggagccgatcttaatgcttgccaaaaggtgccttatggggggaagactcatatgcactgggaagtggatctaggggtctagagggaccacaagactcctcagtttgttnccctaagataacaaactngaatgcagcaaactgnaacnncccccncccccctctgncccanngattctgtgnncttttctatattgtatttaatagttnatattnatttntngcntatnacnanattcatgagttgatcaattnactttggtctctaaataatttttggcttttttggctttggggcnggnncccccnnnttcactggnnccgagacnattctcattgnggactgacattggcg

SEQ ID NO: 258920 - DNA, 1913 bp, Homo Sapiens
  misc_feature (693)..(693): n is a, c, g, or t
  misc_feature (749)..(749): n is a, c, g, or t
  misc_feature (806)..(806): n is a, c, g, or t
  misc_feature (971)..(972): n is a, c, g, or t
  misc_feature (978)..(978): n is a, c, g, or t
  misc_feature (985)..(985): n is a, c, g, or t
  misc_feature (987)..(987): n is a, c, g, or t
  misc_feature (993)..(993): n is a, c, g, or t
  misc_feature (1032)..(1032): n is a, c, g, or t
  misc_feature (1078)..(1078): n is a, c, g, or t
  misc_feature (1316)..(1316): n is a, c, g, or t
  misc_feature (1567)..(1567): n is a, c, g, or t
gcaaccccttcccttccacagagtttagtttcctcatttgtaaaatgaggacaaacctagatatttttggaagtttcttccagttctaattgcctatgatcagatcacatctgttgcagagcttcctaaaaagcctggaaaagtgcaactctgccccctggtggtttgcagctctctattcaagatgctataaatccctcattggcttcaagacctccctaccattttggttgctgtacactgaagcctcactggattgcatggtggcttccccaaattccgtatgccttaggatatgatgcttggcacacagttttcctttagtgctccttttaataattttattagtatggccacaagtttgatgtctacagtacatgttaacatagctgagtacaaatatttgaaataagtgtggcaagttttaaaatgtcaactctgagttatcatgcatgtcccatgcatttacatctgcatctgcaaactgtacaattcaatctgtgcttatcctcactgggtctccctgtgtgcctcagctagggcagggcaggggctcttgtgcgttttttcagccccagattttcaagagcaacagtgttgaactctggcatgccatggtgcatggtggcaacaccgggtttagctttggttcaggtaaaaatgcagtgaccaactattgcatttgtgtgagtnacctgattccccagggcctgggctagcacaaagggtattttgatatccctgtatgnggcccctggcagtttctgaacccgtttcgtcccaccgtgaaagtctagaagtgaggntcgcagtcttctaccatgctgtcagtgatatagctggcaccaagatgggattcgtagtaactcttttcatcataggtattatcagtccaaccaaacaacctggattcctttagctgaaccacttcttcaagtaggccggggatacaaaatccttttgcatgaggnnagctgnaattccncncgggtnccccaagatattatgcatgctccaatcgagcaaaatgtncatcataacaaatataaaatgttcacagaaagtatcatagcgtggnttcccatctactgtatggcttaggctccaaggtctgtgagttaatgctgttattaaatcacgatctgtttgtctcatattgtagataacttctggcaagaaagaacagaccacactattattatacagttgaggaaattccatatacattttctttagagcctcagtagccttgtgtgcatggcctttgacatcaaagaagattgtgaggttatggtttaggcactctgcaacagctncccttagggtagggatcttttcatcagggaaatcattcctgagtctgtggtttgctgcaggattcagcttcctaatttgttcaaatgtcaaatcacacaatcgcccagtcccatcagtcgtcctatctactgtgttatcgtgcattaagacaggaatcccgtcagaagtaaactcaatgtccaactccacgcctgttgctccattcttagctgcctgccgaatggccgccagcgtgttctcgggcgcgttngctgccgccacggtgggcgatggcagaaatgcggtcccggggcttgagcacctgcagggccctgcaagagggcaccggctcaaagctgaagacgcgcagtagaacgaagaggctgccggtgaggaggcaggcattgaccgggtccgcgtcaccagcagcagcactagcagcaggaaggagaaagggcccaggaggccgccctggtcctcccacagccacatgccggcgcccgcaccggcacggacgggagtcccggacccgccgggctcctggggcagtagaacgagaagcgagggggagggtccaaggcaccggcagcagcaggaaccctctgaggggaccagcg

SEQ ID NO: 258921 - DNA, 966 bp, Homo Sapiens
  misc_feature (783)..(783): n is a, c, g, or t
aaagaagcgaggcctgggtggcgaattcggcacgagggctgccggtgccttggaccctccccctcgcttctcgttctactgccccaggagcccggcgggtccgggactcccgtccgtgccggtgcgggcgccggcatgtggctgtgggaggaccagggcggcctcctgggccctttctccttcctgctgctagtgctgctgctggtgacgcggagcccggtcaatgcctgcctcctcaccggcagcctcttcgttctactgcgcgtcttcagctttgagccggtgccctcttgcagggccctgcaggtgctcaagccccgggaccgcatttctgccatcgcccaccgtggcggcagccacgacgcgcccgagaacacgctggcggccattcggcaggcagctaagaatggagcaacaggcgtggagttggacattgagtttacttctgacgggattcctgtcttaatgcacgataacacagtagataggacgactgatgggactgggcgattgtgtgatttgacatttgaacaaattaggaagctgaatcctgcagcaaaccacagactcaggaatgatttccctgatgaaaagatccctaccctaagggaagctgttgcagagtgcctaaaccataacctcacaatcttctttgatgtcaaaggccatgcacacaaggctactgaggctctaaagaaaatgtatatggaatttcctcaactgtatataaatagtgggggctgttctttcctgccagaaagtatctaaaagatgagacaaacngatcggggatgtaataacagcattaactcacagaaccttggagcctaagccatacagggagatgggaaaaccacgctatgataactttcctggaaacatttttatatttcgttatgaagggacatttttgcctcgattggggcactgcttaataatcttgggggcaccctggggggaaaattc

SEQ ID NO: 258922 - DNA, 445 bp, Homo Sapiens
taatggcaaagagaccacccttggtgacatgactggcaaatgcaaatcatggataactccatgtcccagaagaaaaggcccaatatgtattgatttctcctgaagccagctcaaggtttgggagctcccctcatcacccgtgaggtcccaaggcaaagaacccaagtcgtcattgctgctggaaggagttctttgggagcccgactctccggggcacttcacgtctatagccttggctcagattgaagatttcactgcatttccccactctgcccacctctctcatgctgaatcacatccatggtgagcattttgatggacaaagtggcacatccagtggagcggtggtagatcctgatagacatggggctcctgggagtagagagacacactaacagccacaccctctggaaatctgatacagtaaatatatgactgcaccagg

SEQ ID NO: 258923 - DNA, 1413 bp, Homo Sapiens
  misc_feature (1212)..(1339): n is a, c, g, or t
  misc_feature (1354)..(1354): n is a, c, g, or t
  misc_feature (1385)..(1385): n is a, c, g, or t
  misc_feature (1393)..(1393): n is a, c, g, or t
gcaggctggtaccggtccggaattcccgggatccgcccggagccagcggttctccaagcacccagcatcctgctagacgcgccgcgcaccgacggaggggacatgggcagagcaatggtggccaggctcgggctggggctgctgctgctggcactgctcctacccacgcagatttattccagtgaaacaacaactggaacttcaagtaactcctcccagagtacttccaactctgggttggccccaaatccaactaatgccaccaccaaggtggctggtggtgccctgcagtcaacagccagtctcttcgtggtctcactctctcttctgcatctctactcttaagagactcaggccaagaaacgtcttctaaatttccccatcttctaaacccaatccaaatggcgtctggaagtccaatgtggcaaggaaaaacaggtcttcatcgaatctactaattccacaccttttattgacacagaaaatgttgagaatcccaaatttgattgatttgaagaacatgtgagaggtttgactagatgatggatgccaatattaaatctgctggagtttcatgtacaagatgaaggagaggcaacatccaaaatagttaagacatgatttccttgaatgtggcttgagaaatatggacacttaatactaccttgaaaataagaatagaaataaaggatgggattgtggaatggagattcagttttcatttggttcattaattctataaggccataaaacaggtaatataaaaagcttccatgattctatttatatgtacatgagaaggaacttccaggtgttactgtaattcctcaacgtattgtttcgacagcactaatttaatgccgatatactctagatgaagttttacattgttgagctattgctgttctcttgggaactgaactcactttcctcctgaggctttggatttgacattgcatttgaccttttatgtagtaattgacatgtgccagggcaatgatgaatgagaatctacccccagatccaagcatcctgagcaactcttgattatccatattgagtcaaatggtaggcatttcctatcacctgtttccattcaacaagagcactacattcatttagctaaacggattccaaagagtagaattgcattgaccgcgactaatttcaaaatgctttttattattattattttttagacagtctcacttnnnnnnnnnnnnnnnnnnnnnnnnnnnnnnnnnnnnnnnnnnnnnnnnnnnnnnnnnnnnnnnnnnnnnnnnnnnnnnnnnnnnnnnnnnnnnnnnnnnnnnnnnnnnnnnnnnnnnnnnnnnnnnnngcttaatttttgtanttttagtaggagacagggtttcaccatgttngcccaggntggttttcgaactcctggac

SEQ ID NO: 258924 - DNA, 1597 bp, Homo Sapiens
  misc_feature (554)..(562): n is a, c, g, or t
  misc_feature (1590)..(1590): n is a, c, g, or t
agaggcggcgtggagatcgctgggagcggttgcggcgtgcggggagctgagttatagctgtgacttctgccctgccaggccgcacacaagctggctgacccggtttgtaaaaatggaatttcaagcagtagtgatggcagtaggtggaggatctcggatgacagacctaacttccagcattcccaaacctctgcttccagttgggaacaaacctttaatttggtacccattgaacctgcttgagcgtgttggatttgaagaagtcattgtggttacaaccagggatgttcaaaaggctctatgtgcagaattcaagatgaaaatgaagccagatattgtgtgtattcctgatgacgctgacatgggaactgcagattctttgcgctacatatatccaaaacttaagacagatgtgctggtgctgagctgtgatctgataacagacgttgccttacatgaggttgtggacctgtttagagcttatgatgcatcacttgctatgttgatgagaaaaggccaagatagcatagaacctgttcccggtcaaaaggggnnnnnnnnngcagtggagcagcgtgacttcattggagtggacagcacaggaaagaggctgctcttcatggctaatgaagcagacttggatgaagagctggtcattaagggatccatcctacagaagcatcctagaatacgtttccacacgggtcttgtggatgcccacctctactgtttgaaaaaatacatcgtggatttcctaatggaaaatgggtcaataacttctatccggagtgaactgattccatatttagtgagaaaacagttttcctcagcttcctcacaacagggacaagaagaaaaagaggaggatctaaagaaaaaggagctgaagtccttagatatctacagttttataaaagaagccaatacactgaacctggctccctatgatgcctgctggaatgcctgtcgaggagacaggtgggaagacttgtccagatcacaggtgcgctgctatgtccacatcatgaaagaggggctctgctctcgagtgagcacactgggactctacatggaagcaaacagacaggtgcccaaattgctgtctgctctctgtccagaagaaccaccagtccattcgtcagcccagattgtcagcaaacacctggttggagttgacagcctcattgggccagagacacagattggagagaagtcatccattaagcgctcagtcattggctcatcctgtctcataaaagatagagtgactattaccaattgccttctcatgaactcagtcactgtggaggaaggaagcaatatccaaggcagtgtcatctgcaacaatgctgtgatcgagaagggtgcagacatcaaggactgcttgattggaagtggccagaggattgaagccaaagctaaacgagtgaatgaggtgatcgtggggaatgaccagctcatggagatctgagttctgagcaagtcagactccttccttttggcctccaaagccacagatgttggccggcccacctgtttaactctgtatttatttcccaataaagaagggcttccaaaggcatgctgganacttgtg

SEQ ID NO: 258925 - DNA, 1232 bp, Homo Sapiens
  misc_feature (18)..(18): n is a, c, g, or t
  misc_feature (33)..(33): n is a, c, g, or t
  misc_feature (44)..(45): n is a, c, g, or t
  misc_feature (47)..(47): n is a, c, g, or t
  misc_feature (106)..(106): n is a, c, g, or t
  misc_feature (116)..(116): n is a, c, g, or t
  misc_feature (120)..(120): n is a, c, g, or t
  misc_feature (148)..(148): n is a, c, g, or t
  misc_feature (155)..(155): n is a, c, g, or t
  misc_feature (157)..(157): n is a, c, g, or t
  misc_feature (160)..(160): n is a, c, g, or t
  misc_feature (182)..(182): n is a, c, g, or t
  misc_feature (234)..(234): n is a, c, g, or t
  misc_feature (239)..(239): n is a, c, g, or t
  misc_feature (298)..(298): n is a, c, g, or t
  misc_feature (317)..(317): n is a, c, g, or t
  misc_feature (338)..(338): n is a, c, g, or t
  misc_feature (341)..(342): n is a, c, g, or t
  misc_feature (386)..(386): n is a, c, g, or t
  misc_feature (411)..(411): n is a, c, g, or t
  misc_feature (415)..(415): n is a, c, g, or t
  misc_feature (422)..(422): n is a, c, g, or t
  misc_feature (429)..(429): n is a, c, g, or t
  misc_feature (441)..(441): n is a, c, g, or t
  misc_feature (480)..(480): n is a, c, g, or t
  misc_feature (501)..(545): n is a, c, g, or t
  misc_feature (548)..(549): n is a, c, g, or t
  misc_feature (552)..(553): n is a, c, g, or t
  misc_feature (559)..(559): n is a, c, g, or t
  misc_feature (561)..(561): n is a, c, g, or t
  misc_feature (564)..(564): n is a, c, g, or t
  misc_feature (568)..(568): n is a, c, g, or t
  misc_feature (1155)..(1155): n is a, c, g, or t
  misc_feature (1161)..(1161): n is a, c, g, or t
gtgggctatgtgtcacantcctcggggacagcngctgtgatgannanggatgtctcatgaccctggtccggtgaagctctcctctgcacacagtctctggaagggnagcagggaanacangacgccctgagccaggaactccacaatnacctccncngancccacctccagctctgcaggangctgcagcgccaccaccaccatcttctcgtcctcgatgatcaggttgcgganttgcnctgccgcgggttgtagttctctacccggtcgtggatctccatgtgcctccgcaggtggncctgtcgggtaaacttgtngccacactcggtgcactcaanctnnctcacccccttgtgccgtctgaagtgcacacgcagttgctccanggctttgaaggtcttgccgcatatntggnagaagtngggccgnttctcctgatgnttgtttgttacgttccttttgttgtgtcccttctcagtnaagcgctgttcacagaactcnnnnnnnnnnnnnnnnnnnnnnnnnnnnnnnnnnnnnnnnnnnnncannctnnctttgntntcngaangtctttccacataatgtggcactggaagggcttctcacccgtgtgtgtgcgcaggtgcatgttgagattggccttttgggtgaaggcgtggctgcagaactcacatacgtgtggcctctcattcctgtgcttggccttgatgtgcatctgcaggccattccggctcgaggcccggtgcccacactcctcacacacaaacagcttctcaccacggtgcttgaaagcttcatgcagctgcagctctgtccgagacaggaagcacttggcacaggtggggcatgcatggggcttgggggctccatgaagtttgatcatgtggctctgcaagtccttcttctgcatgaactgctgggagcaggaggaacacttgtagggcatctcccctgtgtgagacaccatgtgcacccgcagctccatcttcggcggaatgtctcctggcacacagagcacgtgaagacctggcagtgtgaggggcaagcagggccggcatcagcgggggcctctgcctatgacagcagcctctgcccgggcttccgcttgctgctgggaagagtctgcctggggagggtggggacgctagggtggtngagggnaacacataacctgcctggcctgaccatcactgagtgctgcaagcccaccgcacaccaggccctatcccggg

SEQ ID NO: 258926 - DNA, 1741 bp, Homo Sapiens
  misc_feature (21)..(21): n is a, c, g, or t
  misc_feature (36)..(36): n is a, c, g, or t
  misc_feature (53)..(53): n is a, c, g, or t
  misc_feature (75)..(75): n is a, c, g, or t
  misc_feature (87)..(87): n is a, c, g, or t
  misc_feature (96)..(96): n is a, c, g, or t
  misc_feature (102)..(102): n is a, c, g, or t
  misc_feature (117)..(117): n is a, c, g, or t
  misc_feature (176)..(299): n is a, c, g, or t
  misc_feature (303)..(363): n is a, c, g, or t
  misc_feature (394)..(394): n is a, c, g, or t
  misc_feature (426)..(426): n is a, c, g, or t
  misc_feature (479)..(479): n is a, c, g, or t
  misc_feature (481)..(481): n is a, c, g, or t
  misc_feature (507)..(590): n is a, c, g, or t
  misc_feature (598)..(598): n is a, c, g, or t
  misc_feature (650)..(650): n is a, c, g, or t
  misc_feature (724)..(836): n is a, c, g, or t
gtctccagtaatcgagtgctnaaaactcatcgctanagcacgcccagaatctnctcgagcccattccctagccanagccctgcctgnggagagaanccaagntgcgtcgaactgtcntgccacaaaatcccatatattctctgcagttaatggggtagatgacgtgcatgggaggnnnnnnnnnnnnnnnnnnnnnnnnnnnnnnnnnnnnnnnnnnnnnnnnnnnnnnnnnnnnnnnnnnnnnnnnnnnnnnnnnnnnnnnnnnnnnnnnnnnnnnnnnnnnnnnnnnnnnnnnnnnnaatnnnnnnnnnnnnnnnnnnnnnnnnnnnnnnnnnnnnnnnnnnnnnnnnnnnnnnnnnnnnnggcaggagagtgccaaggttgtcctggaggncagacagcccagctgagcctccttacctcccntcagccaagcccacctgcacgtgatctgctggcgtcaggctgctgctctgcgngnatggctggagacagtagaggcatgannnnnnnnnnnnnnnnnnnnnnnnnnnnnnnnnnnnnnnnnnnnnnnnnnnnnnnnnnnnnnnnnnnnnnnnnnnnnnnnnnnnagagatangcaaacacaccgatgcacacgcacatagagatatgcacacacagatgcacanacagatatacacatggatgcacgcacatgccaatgcacgcacacatcagtgcacacggatgcacagagatatgnnnnnnnnnnnnnnnnnnnnnnnnnnnnnnnnnnnnnnnnnnnnnnnnnnnnnnnnnnnnnnnnnnnnnnnnnnnnnnnnnnnnnnnnnnnnnnnnnnnnnnnnnnnnnnnnncgatgctgactccatgtgtgctgtcctctgaaggcggttgtttagctctcacttttctggttcttatccattatcatcttcacttcagacaattcagaagcatcaccatgcatggtggcgaatgcccccaaactctcccccaaatgtatttctcccttcgctgggtgccgggctgcacagactattccccacctgcttcccagcttcacaataaacggctgcgtctcctccgcacacctgtggtgcctgccacccactgggttgcccatgattcatttttggagcccccggtgctcatcctctgagatgctcttttctttcacaattttcaacatcactgaaatgaaccctcacatggaagctattttttaaaaacaaaagctgtttgatagatgttgaggctgtagctcccaggatcctgtggaattggatgttctctccctcccaaagcccttgtcaattatatttcacagaaacccctgggaacacctgctcaagagtcagggacacacgcatcactaaatgcaagttcccaggccctggctgcagtgggaggacctggcaagctgcactcttgctgagtccccagggtggtggaagaagaatgagaaacacatgaacagagaaatggggaggtgacaaacagtgcccccactcagactccggcaagcacggctcagagagtggactcgatgccatccctgcagggccgtcctgggcaccactggcactcacagcagcaaggtgggcaccattggcactcacagcagcaaggcaggcaccagcaacccacctcgggggcactcaggcatcatctacttcagagcagacagggtctatgaactacagccgtgggctgcttccaaggcaccctgctcttgtaaataaagttttatgggaacaca

SEQ ID NO: 258927 - DNA, 933 bp, Homo Sapiens
cctcatcctggcgctgcctggggcacaggtacaggtcaaaggcagcgctcgaagcgttcctggatgaagcgtccgtaggcaggcacggcccgcaggctcgggaacttgcgtggcaaaaagctcagcttcctctcgcctggctcctgctgttcccacgccaagcgctcctcctcggtgagcaggtattcagggggtgggttgtacgactcggcgtggcctggcagggccagcttgggagcaggtacgtgcatcttgtggcgcccgagcacggcgttggggtcctcctgggcccacaggtcatagaagctgggggtggggtctcggggccggcgaggctggatccagcccatcttgatggcgtgcaccatgcgagagaccttctccttctccaccagggaggggatgaagctgcgcttgtcggccgggcggttggtcaccgggtggatcatgacgtccccgctgaagaagtcgacagccggctcataggggttgaagcccacatccccaaactggccactctgcagccgccgcaccagggccacctgctcatccgtcagtctcaggtcccgccctgtcatcgggtcctgcacggtgcgccagtagtcaggatcgtccatcttgtccaggaactggtccagctcatcccgggtccgcaggggcttgtagatgcgcctgccatccaggtcgtagcccacgtgggggaagtcatcgtaccactccaagggcacgttgcccaccgtgttccggatgtcctcctcatcagagctgtcctccgcatactcatccccaatccgggcgctcgccatctctgtcctcgggcaaggagtgctggcctgcacctgctcctcagtggtctttttaatcccactgtggccctcgtcatcaagggctccgtcccctcgtgccgaattcgccacccaggcctcgctacct

SEQ ID NO: 258928 - DNA, 928 bp, Homo Sapiens
  misc_feature (719)..(719): n is a, c, g, or t
  misc_feature (787)..(787): n is a, c, g, or t
gaacgaggcctgggtggcgaattcggcacgaggggacggagcccttgatgacgagggccacagtgggattaaaaagaccactgaggagcaggtgcaggccagcactccttgcccgaggacagagatggcgagcgcccggattggggatgagtatgcggaggacagctctgatgaggaggacatccggaacacggtgggcaacgtgcccttggagtggtacgatgacttcccccacgtgggctacgacctggatggcaggcgcatctacaagcccctgcggacccgggatgagctggaccagttcctggacaagatggacgatcctgactactggcgcaccgtgcaggacccgatgacagggcgggacctgagactgacggatgagcaggtggccctggtgcggcggctgcagagtggccagtttggggatgtgggcttcaacccctatgagccggctgtcgacttcttcagcggggacgtcatgatccaccccggtgaccaaccgcccggccgacaagcgcagcttcatcccctccctgggggagaaggagaaggtctctcccatggtgcacgccatcaagatgggctggatccagcctcgccggccccgagaccccacccccagcttctatgacctgggggggcccaggaggaccccaacgccgtgctcgggcgccacaagatgcacgtacctggctcccaagctggccctgccaggnccacgccgagtcgtacaacccaccccctgaataccttgctcaacgagggaggaacggcttggcgtggngaacagcaggagccaggcggagaggaaactgagcttttttgccacgcaagttcccccaaccctgcggggccggggcctgccctaccggacgcttcatccaggaaacgccttcaagcgcctgcctttggacctggtacctgt

SEQ ID NO: 258929 - DNA, 1856 bp, Homo Sapiens
  misc_feature (1602)..(1782): n is a, c, g, or t
  misc_feature (1786)..(1787): n is a, c, g, or t
  misc_feature (1789)..(1805): n is a, c, g, or t
gggagagcggcagccttttcccgcgcgtgctgccttcgccgctcgggccgcccgggggaaaacatggcgtctgccctggagcagttcgtgaacagtgtccgacagctctcagctcaagggcaaatgacacagctttgtgaactgatcaacaagagtggggaactccttgcgaagaacttatcccatctggacactgtgctcggggctctggatgtacaagaacactccttgggcgtccttgctgttttgtttgtgaagttttctatgcccagtgttcctgacttcgaaacgctattctcacaggttcagctcttcatcagcacttgtaatggggagcacattcgatatgcaacagacacttttgctgggctttgccatcagctaacaaatgcacttgtggaaagaaaacagcccctgcgaggaattggcatccttaagcaagccatagacaagatgcagatgaatacaaaccagctgacctcaatacatgctgatctctgccagctttgtttgctagcaaaatgctttaagcctgcccttccatatcttgacgtggatatgatggatatctgtaaagagaatggagcctatgatgcaaaacactttttatgttactattattatggagggatgatctatactgggctgaagaactttgaaagagctctctacttttatgaacaggctataactactcctgccatggcggtcagtcatatcatgttggaatcatataaaaagtatattttagtgtctttgatattacttggcaaagtacaacagctaccaaaatatacatctcaaattgtgggtagattcattaagcctcttagcaatgcataccacgagttagcacaagtgtattcaaccaacaacccctcagaactccgaaacctggtgaataagcacagtgaaaccttcactcgcgataacaacatggggctggtgaagcaatgcttgtcatctctttataagaagaatattcagaggctaacaaagacctttttaactctatcattacaagatatggcaagtcgtgtgcagttgtctggacctcaggaggcagagaaatacgttctgcacatgatagaagatggtgagatttttgcaagtattaaccagaaggacggtatggtcagtttccatgataaccctgaaaaatataataacccagccatgcttcataacattgatcaggagatgctgaagtgcattgagctggatgagcggctgaaagccatggaccaggagatcacagtgaaccctcagtttgtacaaaagagtatgggctcacaagaagatgattcaggaaacaaaccatccagttattcttgaaactaacatccatcctgagctaaacaagagaaactaccatcttggccagtgacaagtgttcggagggcagcagagaggaccaagcctgtgtcacctggagactaagaaattaagttttgttttgacatcttcagtcctgtgtgctttcagaaaaccattttctctgcaaagaaaggaaacagatttgcaaactttaaagtctgtcgtggatttatttatcctcagattattgttactgcattaaatctacctttttgttttaaaaannnnnnnnnnnnnnnnnnnnnnnnnnnnnnnnnnnnnnnnnnnnnnnnnnnnnnnnnnnnnnnnnnnnnnnnnnnnnnnnnnnnnnnnnnnnnnnnnnnnnnnnnnnnnnnnnnnnnnnnnnnnnnnnnnnnnnnnnnnnnnnnnnnnnnnnnnnnnnnnnnnnnnnnnnnnnnnnnnnnntggnngnnnnnnnnnnnnnnnnnaaaaaaatttctaacaaactcttccttggggcgcgcgcgccgccccccaag

SEQ ID NO: 258930 - DNA, 1223 bp, Homo Sapiens
gtaccggtcccgaattccttgggatatcgtcgacccacgccgtccgggcgacggtcgcagcaaatccagctgctgctgcggcggctgtggcggcggcagcggcggtgactgaggatagagagccacagcacgaggagctgccaggcctggacagccagtggcgccagatagaaaacggcgagagtgggcgagaacgtccactgcgggccggcgaaagctggttccttgtggagaagcactggtataagcagtgggaggcatacgtgcagggaggggaccaggactccagcaccttccctggctgcatcaacaatgccacactctttcaagatgagataaactggcgcctcaaggagggactggtggaaggcgaggattatgtgctgctcccagcagctgcttggcattacctggtcagctggtatggtctagagcatggccagccacccattgaacgcaaggtcatagagctgcccaacatccagaaggtcgaagtgtacccagtagaactgctgcttgtccggcacaatgatttgggcaaatctcacactgttcagttcagccataccgattctattggcctagtattgcgcacagctcgggagcggtttctggtggagccccaggaagacactcggctttgggccaagaactcagaaggctctttggataggttgtatgacacacacatcacggttctcgatgcggcccttgagactgggcagttgatcatcatggagacccgcaagaaagatggcacttggcccagcgcacagctgcatgtcatgaacaacaacatgtcggaagaggatgaggacttcaagggtcagccaggcatctgtggcctcaccaatctgggcaacacgtgcttcatgaactcggccctgcagtgcctcagcaatgtgccacagctcaccgagtacttcctcaacaaccgctacctggaggagctcaacttccgcaacccactgggcatgaagggtgagatcgcagaggcctatgcagacctggtgaagccagcgtggtctggccaccaccgctccattgtgccacatgtgttcaagaacaaggttggccattttgcatcccaatttctggggctaccagcagcatgactctcaggagctgctgtcattcctcctggaccggctgcatgaaggaccttaatcgggtgaagaagaaggagtatgtggagctgtgcgatgctgctgggcgaccggatc

SEQ ID NO: 258931 - DNA, 939 bp, Homo Sapiens
  misc_feature (623)..(623): n is a, c, g, or t
aacaagtccaggcgcctgcgaacccgggcccgggggggacggcgcccgccaggagcgcccccaactcccaggccagcccaccccggcggaccgggcccccgcgcgcccaggcgaggaactgggctccctctgctccccgtgggccgctccccgcgtggggccactgcccccggcccccgccatggtgcggatttcaaagcccaagacgtttcaggcctacttggatgattgtcaccggaggtatagctgtgccaactgccgcgctcacctggccaaccacgacgacctcatctccaagtccttccagggcagtcaggggcgtgcctacctcttcaactcagtggtgaacgtgggctgcgggccagccgaggagcgggtgctgctgaccggcctccatgctgtcgccgacatccactgcgagaactgcaagaccactttgggctggaaatatgaacaggcctttgagagcagccagaagtacaaagaggggaagaacatcattgaactcaaccacatgatcaaagacaacggctgggactgacccccgctcccccgacgcatgtggctccagcccggcctggccgccagggagcgccactggcttcccgccacccgaagagagnctctggaccctcagagcccctgcagaggacggatctagctcctgtatatatattttattgcatgcactgtgaccttggggggagaacagaagggggacgacgcccccgcacctcctgcgatctggctggcttggatctcgtttttaacccgttcctgccccacctgccctatagttatggcctgtgttctgctctcctggtcccagtgcaccgtctgctctgtgaactcctcccaccaggcccttcttaccccacgcgtgtctgtccccctcgttctgtagcgtttgtacataataaaacaatggagtggagacaa

SEQ ID NO: 258932 - DNA, 1781 bp, Homo Sapiens
  misc_feature (1470)..(1470): n is a, c, g, or t
  misc_feature (1492)..(1492): n is a, c, g, or t
  misc_feature (1526)..(1526): n is a, c, g, or t
  misc_feature (1562)..(1562): n is a, c, g, or t
  misc_feature (1653)..(1653): n is a, c, g, or t
  misc_feature (1709)..(1709): n is a, c, g, or t
ggatggcgcgtgctcagtgtgctgggtaccaggcgactccgggacagggggtctcggccgtcggcgtcatggtttcgcgcgtgcagctcccgcctgagatccagctggctcagcgcctggcggggaatgagcaggtgacccgggaccgggcggtgaggaagctccggaaatacatcgtcgccaggactcagcgggccgcaggtggttttacgcacgacgagctgctgaaggtgtggaaaggactgttttattgcatgtggatgcaggacaagccactcctccaggaagaattaggaaggactatttcccagctcgttcatgcttttcagaccacggaggcgcagcacctgttccttcaggccttctggcagaccatgaatcgcgagtggacgggcattgacaggctgcgcctggataaattctacatgctcatgcggatggtcctgaacgagtccttgaaggttctgaagatgcaaggctgggaagaaagacagatcgaggagctgctagagctgctgatgactgagatcctgcaccccagcagccaggcccccaacggtgtgaagagccacttcatcgagatcttcctggaggagctgaccaaagtgggcgccgaggagcttacggcagaccagaacctgaagttcatcgaccccttctgcagaatcgctgcccggaccaaggattccttggttttgaacaacatcactcgaggcatctttgagacgattgtggagcaggccccgcttgccattgaagacctcctgaatgaactggacacacaggatgaggaggtggcgtcggacagtgatgagtcctctgagggcggtgagcgtggagacgcgctgtcccagaagaggtctgagaagccgcccgcaggctccatctgcagggctgaacctgaggctggtgaggagcaggcaggtgacgacagggacagtggcggccccgtcctccagtttgactacgaggcagttgctaacagactgtttgaaatggccagccgccagagcaccccttctcagaacagaaagcgtctctacagagtgatccggaagctgcaggacctggcaggaggcattttccctgaagatgagatcccagagaaggcctgcaggcgcctgcttgaagggaggcggcagaagaagacgaagaagcagaagcgtctgctcaggttgcagcaggagagagggaaaggtgagaaggagcccccgagcccgggcatggagaggaagaggagcaggaggaggggtgtaggggccgaccccgaggcgcgggcagaggctggtgagcagccaggcacagctgagcgggccctgctccgagatcagcccaggggccgtggccagagaggggctcgccagagaaggaggacacctcggcccctgaccagtgcccgagcaaaggcggccaatgtccaggagccggagaagaagaagaaacgcagggagtgatgtggccgggccaagnacaggcagggagggaggccagncctagcttgcaccgcgggacgaggctgaccgggntgttctgtagactcaggaccgtggctccagaactcntgtaccaggcgggagggaagggcggcactggagagatgggcccatcattaggggccagcatcccaggaactggacctttccccagagcctnccgcctgtggctgtgatgaccttgggccagaaggtcaaactccgaagactgaaacntctgccggcagcaggactggccgcccctgctgtggggggttcagaaaataaaatgccgcgcagcccttgccg

SEQ ID NO: 258933 - DNA, 2109 bp, Homo Sapiens
  misc_feature (1130)..(1130): n is a, c, g, or t
  misc_feature (1133)..(1133): n is a, c, g, or t
  misc_feature (1159)..(1159): n is a, c, g, or t
  misc_feature (1172)..(1172): n is a, c, g, or t
  misc_feature (1177)..(1177): n is a, c, g, or t
  misc_feature (1202)..(1203): n is a, c, g, or t
  misc_feature (1216)..(1216): n is a, c, g, or t
  misc_feature (1502)..(1516): n is a, c, g, or t
  misc_feature (1926)..(1937): n is a, c, g, or t
  misc_feature (2031)..(2031): n is a, c, g, or t
ctttttccggattgggcatcccggcatctgcacgtggttatgctgccggagtttgggccgccactgtaggaaaagtaacttcagctgcagccccaaagcgagtgagccgagccggagccatggagggccagagcgtggaggagctgctcgcaaaggcagagcaggacgaggcagagaagttgcaacgcatcacggtgcacaaggagctggagctgcagtttgacctgggcaacctgctggcgtcggaccggaaccccccgaccgggctgcggtgcgccggacccacgccggaggccgagctacaggccctggcgcgggacaacacgcaactgctcatcaaccagctgtggcagctgcccacggagcgcgtggaagaggcgatagtggcgcggctgccggagcccaccacacgcctgccgcgagagaagcctctgccccgaccgcggccacttacacgctggcagcagttcgcgcgcctcaagggcatccgtcccaagaagaagaccaacctggtgtgggacgaggtgagtggccagtggcggcggcgctggggctaccagcgcgcccgggacgacaccaaagaatggctgattgaggtgcccggcaatgccgaccccttggaggaccagttcgccaagcggattcaggccaagaaggaaagggtggccaagaacgagctgaaccggctgcgtaacctggcccgcgcgcacaagatgcagctgcccagcgcggccggcttgcaccctaccggacaccagagtaaggaggagctgggccgcgccatgcaagtggccaaggtctccaccgcctctgtggggcgctttcaggagcgcctcccccaaggaggaaggtgccccggggctccggcaagaaaaggaagtttcaaccccttttcggggactttgcagccgagaaaaagaaccagttggagctgcttcgtgtcatgaacagcaagaagcctcagctggatgtgactagggccaccaataagcagatgagggaggaggaccaggaggagcccgccaagaggaggaaaatgagccagaagggcaagagaaagggaggccggcaggggcctgggggcaagaggaaagggggcccgcccagccagggagggaagaggaaagggngcntgggaggcaagatgaattctgggccncctagcttgggtngcaanaaaaaaggaggacagcgcccaggannaaagaggaggaantaaaagtatctaactgtcggacccgtctgtaaaccaagaactatgaaaactaaatgttaagttctaagcaattatacgggaacccagaaggacctggccgctgccctcattaagtttaaagggacaggattccccctccgtcaagaaagtatgtaagtgttggactgcacaaattaatgtttttcccacaaccgagactttggagattaagaacttatttgaggatttaagaattagggaaataatttggtggaaaccgggaatgagttctattcttaaacagccnnnnnnnnnnnnnnnaatgttggatatacggcgaggtagagttggccatatttcagagacttagattgacgtatatgtttctgcattatttttacaacaagtttgtgtatcagagcgggagtgcgggggagggaaagaaaacaaacagtttcagaattgaatacgcaagcgactgttttaaagattaagtaataaagatgtcttatctagtaaaacacaccaacaacaccattccgctaccccctccaaacccacctaccccctcgggactagccccgctcaatgtcatcccgtcccccgcccgcatattagttgcacaccaacctcactccctgtgggggggccgcgcttcgcggccaccccccaggaaaaccttttttccaacaccaccctttttccctttggtggggccgccgcggcggtgnnnnnnnnnnnntaggggataagacggggacaacccgctgggggccaccactgacagtctggtgccttccccccaacaagcagggaatacaaccctcggggggggntcgccgttggggacaccctttaaggaggggcctctctcggggagaaatatctctctctcccccgcgccgcttgttatt

SEQ ID NO: 258934 - DNA, 2623 bp, Homo Sapiens
  misc_feature (83)..(83): n is a, c, g, or t
  misc_feature (101)..(101): n is a, c, g, or t
  misc_feature (125)..(127): n is a, c, g, or t
  misc_feature (132)..(132): n is a, c, g, or t
  misc_feature (193)..(252): n is a, c, g, or t
  misc_feature (285)..(285): n is a, c, g, or t
  misc_feature (287)..(287): n is a, c, g, or t
  misc_feature (293)..(293): n is a, c, g, or t
cgcgcgcgggcccaggccgcccggctccagcccagcagtagcggcagcagcggcggcggcggcagtgcgcgcgaggccctgcncccccagcagctacaaancctggcgccgtgcatggagacgcnnnccgcnacccgccgctgagcccccgccgcccggccgggacccgccaggctggggtggcctcgggctnnnnnnnnnnnnnnnnnnnnnnnnnnnnnnnnnnnnnnnnnnnnnnnnnnnnnnnnnnnnatcgtcgcggcccggccgtcccgtcccaggaantngccgtnctgagcgccatggctcactccccggtgcagtcgggcctgcccggcatgcagaacctaaaggcagacccagaagagctttttacaaaactagagaaaattgggaagggctcctttggagaggtgttcaaaggcattgacaatcggactcagaaagtggttgccataaagatcattgatctggaagaaggctgaaggatgagatagaggacattcaacaagaaatcacagtgctgaggtcagtgtgacagtccatatggtaaccaaatattatgggatcctatctgaaggatacaaaattatggataataatgggaatatcttggtggaggctccgcactagatctattagaacctggcccattagatgaaacccagatcgctactatattaagagaaatactgaaaggactcgattatctccattcggagaagaaaatccacagagacattaaagcggccaacgtcctgctgtctgagcatggcgaggtgaagctggcggactttggcgtggctggccagctgacagacacccagatcaaaaggaacaccttcgtgggcaccccattctggatggcacccgaggtcatcaaacagtcggcctatgactcgaaggcagacatctggtccctgggcataacagctattgaacttgcaagaggggaaccacctcattccgagctgcaccccatgaaagttttattcctcattccaaagaacaacccaccgacgttggaaggaaactacagtaaacccctcaaggagtttgtggaggcctgtttgaataaggagccgagctttagacccactgctaaggagttattgaagcacaagtttatactacgcaatgcaaagaaaacttcctacttgaccgagctcatcgacaggtacaagagatggaaggccgagcagagccatgacgactcgagctccgaggattccgacgcggaaacagatggccaagcctcggggggcagtgattctggggactggatcttcacaatccgagaaaaagatcccaagaatctcgagaatggagctcttcagccatcggacttggacagaaataagatgaaagacatcccaaagaggcctttctctcagtgtttatctacaattatttctcctctgtttgcagagttgaaggagaagagccaggcgtgcggagggaacttggggtccattgaagagctgcgaggggccatctacctagcggaggaggcgtgccctggaatctccgacaccatggtggcccagctcgtgcagcggctccagagatactctctaagtggtggaggaacttcatcccactgaaattcctttggcatttggggttatgttatccttttttccttcttcatcctcctccttttgtaaaagtcaacgagagccttcgctgactccaccgaagaggtgcgcccactgggagccacccccagcgccaggcgcccgtccagggacacacacagtcttcactgtgctgcagccagatgaagtctctcagatggcgtggggagggtcagccccttccagcgatcattctatccttatttgattactgtcgtactcaaattttaaaccatagtgcacatattccaggaaagtgtctttaaaaacaaaaacaaaccctgaaatgtatatttgggattatgataaggcaactaaagacatgaaacctcaggtatcctgctttaagttgataactccctctgggagctggagaatcgctctggtggatgggtgtacagatttgtatataatgtcatttttacggaaaccctttcggcgtgcataaggaatcactgtgtacaaactggccaagtgcatctgtagataacgtcagtggaataaatattcgacaggccataacttgagtctattgccttgcctttattacatgtacattttgaattctgtgaccagtgatttgggttttattttgtatttgcagggtttgtcattaataattaatgcccctctcttacagaacactcctatttgtacctcaacaaatgcaaattttccccgtttgccctacgccccttttggtacacctagaggttgatttcctttttcatcgatggtactatttcttagtgttttaaattggaacatatcttgcctcatgaagctttaaattataattttcagtttctccccatgaagcgctctcgtctgacatttgtttggaatcgtgccactgctggtctgcgccagatgtaccgtcctttccaatacgattttctgttgcaccttgtagtggattctgcatatcatctttcccacctaaaaatgtctgaatgcttacacaaataaattttataacacgcaaa

SEQ ID NO: 258935 - DNA, 765 bp, Homo Sapiens
  misc_feature (298)..(334): n is a, c, g, or t
  misc_feature (495)..(538): n is a, c, g, or t
acccggtgcgaaatatttaactcccactggacgttatcttacagaaagcacttggcccagtttgtccacagtgattccttatgcacgccgaaagggtttccgtaaaaatgacattatatacaaatctgtacacccatccaccagagcgattctccagctcccagaggggagttatcaacttaaagccaggatacctgaggtttcatgtctttagttgccttatcataatcccaaatatacatttcagggtttgtttttgtttttaaagacactttcctggaatatgtgcactatggtnnnnnnnnnnnnnnnnnnnnnnnnnnnnnnnnnnnnngatcgctggaaggagctgaccctccccacccatctgagagacttcatctggctgcagcacagtgaagactgtgtgtgtcactggacgggcgcctggcgctggggtggctcccagtggcgcacctcttcggtggagtcagcgaaggctctcgttgacttttnnnnnnnnnnnnnnnnnnnnnnnnnnnnnnnnnnnnnnnnnnnncccaaatgccaaaggaatttcagtgggatgaagttcctccaccacttagagagtatctctggagccgctgcacgagctgggccaccatggtgtcggagatgccagggcacgcctcctccgctaggtagatggcccctcgcagctcttcaatggaccccaagttccctccgcacgcctggctcttctccttcaactctgcaaacagaggagaaataattgtagatacc

SEQ ID NO: 258936 - DNA, 1343 bp, Homo Sapiens
  misc_feature (5)..(5): n is a, c, g, or t
  misc_feature (8)..(9): n is a, c, g, or t
  misc_feature (11)..(11): n is a, c, g, or t
  misc_feature (16)..(16): n is a, c, g, or t
  misc_feature (22)..(22): n is a, c, g, or t
  misc_feature (26)..(26): n is a, c, g, or t
  misc_feature (45)..(45): n is a, c, g, or t
  misc_feature (47)..(47): n is a, c, g, or t
  misc_feature (50)..(50): n is a, c, g, or t
  misc_feature (55)..(56): n is a, c, g, or t
  misc_feature (59)..(60): n is a, c, g, or t
  misc_feature (69)..(69): n is a, c, g, or t
  misc_feature (74)..(74): n is a, c, g, or t
  misc_feature (79)..(79): n is a, c, g, or t
  misc_feature (85)..(85): n is a, c, g, or t
  misc_feature (95)..(95): n is a, c, g, or t
  misc_feature (106)..(107): n is a, c, g, or t
  misc_feature (110)..(110): n is a, c, g, or t
  misc_feature (116)..(117): n is a, c, g, or t
  misc_feature (122)..(122): n is a, c, g, or t
  misc_feature (129)..(129): n is a, c, g, or t
  misc_feature (132)..(132): n is a, c, g, or t
  misc_feature (141)..(142): n is a, c, g, or t
  misc_feature (150)..(151): n is a, c, g, or t
  misc_feature (154)..(154): n is a, c, g, or t
  misc_feature (165)..(165): n is a, c, g, or t
  misc_feature (170)..(172): n is a, c, g, or t
  misc_feature (189)..(189): n is a, c, g, or t
  misc_feature (215)..(215): n is a, c, g, or t
  misc_feature (237)..(237): n is a, c, g, or t
  misc_feature (249)..(249): n is a, c, g, or t
  misc_feature (299)..(299): n is a, c, g, or t
  misc_feature (307)..(308): n is a, c, g, or t
  misc_feature (313)..(313): n is a, c, g, or t
  misc_feature (343)..(343): n is a, c, g, or t
  misc_feature (459)..(459): n is a, c, g, or t
  misc_feature (846)..(942): n is a, c, g, or t
  misc_feature (1075)..(1083): n is a, c, g, or t
  misc_feature (1185)..(1193): n is a, c, g, or t
ccttnggnnancccanctatgnacancctttttatcctctaaaancnaantaacnntgnnaacattccnttccnataanatggancaatcccttnacaacaccaannganacttgnnacttncctccantanaaacactgnntttttctnnaanacttccacttnacaannnttgtttctgatacttantatctagagctgggttgagaaaagtntgttacagttgctagaggtttncataaaaacttntcagatgagaggcttttttaggataagaggtgagaactgggcaaaatttntaaagcannaattntgttatatggacagtgttctgccttttaancctatttagcttgtttcagaaattctcacttttgttgacctgccaacatacaaagtaagggaaaactcaagataattaaagaaggctgtaccagtccttaaaatctgcagagcccnggttcaaaaatcagtcactccccttccagaagcagacatggcatcctgttcccttgccttgccttgttggttgtgtacctttcacgagacctgaattttagaattgccccagtgctgcccagagtgagtgagtgtaattctcctttcaggtaaagataggctatctcaacactgctgagtgattcataaacatatcaaccagtagcattaacccattttatttcctgtccttagtgtctgaagatgctcaccagttttctgtgtacagtaaggcagcatgctaaaatgcttttgttcagttctgtatatttgaaaatagcagtgtgttctctgatggttacctgcagtggcaccctgtacaaaaaataaaagacttattgctgtagnnnnnnnnnnnnnnnnnnnnnnnnnnnnnnnnnnnnnnnnnnnnnnnnnnnnnnnnnnnnnnnnnnnnnnnnnnnnnnnnnnnnnnnnnnnnnnnnntttgtgggccgcctcgccccccgaaaaattttttaaacaattctttgggggcggggccccccaaggaaagagaaaagggtcatacttgtttcttaaaaaaacctggccataataagggttggtattctccccnnnnnnnnncccccgggggaaaccaacggttttaaaaaaatccaaagggagttctgaggactttatgggagttttcaccaggggtccaccgaagttctatataaatttatnnnnnnnnntgccgcctattcaagaaggggggaaattattaaagaatgctgccgccggggagcccctcccaaccggcttgttgaacctgattctcccggggggttaacaccttggtgccctgggggaaaaaaatttgcccccgcgggaaaacggggggg

SEQ ID NO: 258937 - DNA, 1214 bp, Homo Sapiens
  misc_feature (681)..(681): n is a, c, g, or t
  misc_feature (1002)..(1002): n is a, c, g, or t
  misc_feature (1024)..(1024): n is a, c, g, or t
ccgggataggggatctgaccgactcggagcccggctggatgttacaggcgtgcaaaatggaagggtttcccctcgtcccccctcagccatcagaagacctggtgccctatgacacggatctataccaacgccaaacgcacgagtattacccctatctcagcagtgatggggagagccatagcgaccattactgggacttccacccccaccacgtgcacagcgagttcgagagcttcgccgagaacaacttcacggagctccagagcgtgcagcccccgcagctgcagcagctctaccgccacatggagctggagcagatgcacgtcctcgatacccccatggtgccaccccatcccagtcttggccaccaggtctcctacctgccccggatgtgcctccagtacccatccctgtccccagcccagcccagctcagatgaggaggagggcgagcggcagagccccccactggaggtgtctgacggcgaggcggatggcctggagcccgggcctgggctcctgcctggggagacaggcagcaagaagaagatccgcctgtaccagttcctgttggacctgctccgcagcggcgacatgaaggacagcatctggtgggtggacaaggacaagggcaccttccagttctcgtccaagcacaaggaggcgctggcgcaccgctggnggcatccagaagggcaaccgcaagaagatgacctaccagaagatggcgcgcgcgctgcgaaactacggcaagacgggcgaggtcaagaaggtgaagaagaagctcacctaccagttcagcggcgaagtgctgggccgcgggggcctggccgagcggcgccacccgccccactgagcccgcagcccccgccgggccccgccaggcctccccgctggccatagcattaagccctcgcccggcccggacacagggaggacgctcccggggcccagaggcaggactgtggcgggccgggcctcgcctcacccgccccctcccccnactccaggccccctccacatcnccgttcgcctccctccaggactccaccccggctcccggagccagctgggcgtcagaacccaccggggcaaccttgcagaggacgacccggggtactgccttgggagtctcaagtccgtatgtaaatcagatctcccctctcacccctcccacccattaatctcctcccaaaaaacaagtaaagttattct

SEQ ID NO: 258938 - DNA, 1201 bp, Homo Sapiens
ctcttgaggggagcatttctgctggctccaggactttggccatctataaagcttggcaatgagaaataagaaaattctcaaggaggacgagctcttgagtgagacccaacaagctgcttttcaccaaattgcaatggagcctttcgaaatcaatgttccaaagcccaagaggagaaatggggtgaacttctccctagctgtggtggtcatctacctgatcctgctcaccgctggcgctgggctgctggtggtccaagttctgaatctgcaggcgcggctccgggtcctggagatgtatttcctcaatgacactctggcggctgaggacagcccgtccttctccttgctgcagtcagcacaccctggagaacacctggctcagggtgcatcgaggctgcaagtcctgcaggcccaactcacctgggtccgcgtcaccatgagcacttgctgcagcgggtagacaacttcactcagaacccagggatgttcagaatcaaaggtgaacaaggcgccccaggtcttcaaggtcacaagggggccatgggcatgcctggtgcccctggcccgccgggaccacctgctgagaagggagccaagggggctatgggacgagatggagcaacaggcccctcgggaccccaaggcccaccgggagtcaagggagaggcgggcctccaaggaccccagggtgctccagggaagcaaggagccactggcaccccaggaccccaaggagagaagggcagcaaaggcgatgggggtctcattggcccaaaaggggaaactggaactaagggagagaaaggagacctgggtctcccaggaagcaaaggggacaggggcatgaaaggagatgcaggggtcatggggcctcctggagcccaggggagtaaaggtgacttcgggaggccaggcccaccaggtttggctggttttcctggagctaaaggagatcaaggacaacctggactgcagggtgttccgggccctcctggtgcagtgggacacccaggtgccaagggtgagcctggcagtgctggctcccctgggcgagcaggacttccagggagccccgggagtccaggagccacaggcctgaaaggaagcaaaggggacacaggacttcaaggacagcaaggaagaaaaggagaatcaggagttccaggccctgcaggtattgaagctcatgtgctagctctct

SEQ ID NO: 258939 - DNA, 814 bp, Homo Sapiens
  misc_feature (654)..(654): n is a, c, g, or t
  misc_feature (663)..(663): n is a, c, g, or t
  misc_feature (683)..(683): n is a, c, g, or t
  misc_feature (724)..(724): n is a, c, g, or t
  misc_feature (740)..(740): n is a, c, g, or t
  misc_feature (775)..(775): n is a, c, g, or t
gggaaacggcgggaccagcagcgacggtagcagcagcatggccgcgatctatgggggtgtagagggctgatcgggacagacaagtgtgtggagaggatcaatgagatggtgaacagggccaaacggaaagcaggggtggatcctctggtaccgctgcgaagcttgggcctatctctgagcggtggggaccaggaggacgcggggaggatcctgatcgaggagctgagggaccgatttccctacctgagtgaaagctacttaatcaccaccgatgccgccggctccatcgccacagctacaccggatggtggagttgtgctcatatctggaacaggctccaactgcaggctcatcaaccctgatggctccgagagtggctgcggcggctggggccatatgatgggtgatgagggttcagcctactggatcgcacaccaagcagtgaaaatagtgtttgactccattgacaacctagaggcggctcctcatgatatcggctacgtcaaacaggccatgttccactatttccaggtgccagatcggctagggatactcactcacctgtatagggactttgataaatgcaggtttgctgggttttgcccggaaattgcagaaggtgctcagcagggagaccccctttcccgctatatnctcaggaanggctgggagatgctgggcanacacatcgtagcagtgttgcccgagattgacccggtcttgntccaggggcagatggnactcccatcctgtgcgtgggctctgtgtggaaaanctgggagctgctgaaaggaagttttcctcctgccgccta

SEQ ID NO: 258940 - DNA, 1500 bp, Homo Sapiens
ggggcgtttacaggcaggcaggtcagtgatgtgtcctaagggtccgaccgacctagatacccctctttgattcctcctcttgggattagtgtccatctctggaagcaggatccaggaggacgggaggggccgctgcggaccgcagtcgctccacctggaggagacaccagaaggaagacagcctgagggacgcagccatccccggctcctaccggcgccccgccccgcgcatgcgcacgcgcacagggagtcagctggctgcgcgggaggtcacgggaagtggggcggtgcccagacagctggagggaaggaggtgtcaggcggggagagacgcaaacggcgggaccagcagcgacggtagcagcagcatggccgcgatctatgggggtgtagaggggggaggcacacgatccgaggtccttttagtctcagaggatgggaagatcctggcagaagcagatggactgagcacaaaccactggctgatcgggacagacaagtgtgtggagaggatcaatgagatggtgaacagggccaaacggaaagcaggggtggatcctctggtaccgctgcgaagcttgggcctatctctgagcggtggggaccaggaggacgcggggaggatcctgatcgaggagctgagggaccgatttccctacctgagtgaaagctacttaatcaccaccgatgccgccggctccatcgccacagctacaccggatggtggagttgtgctcatatctggaacaggctccaactgcaggctcatcaaccctgatggctccgagagtggctgcggcggctggggccatatgatgggtgatgagggttcagcctactggatcgcacaccaagcagtgaaaatagtgtttgactccattgacaacctagaggcggctcctcatgatatcggctacgtcaaacaggccatgttccactatttccaggtgccagatcggctagggatactcactcacctgtatagggactttgataaatgcaggtttgctgggttttgccggaaaattgcagaaggtgctcagcagggagaccccctttcccgctatatcttcaggaaggctggggagatgctgggcagacacatcgtagcagtgttgcccgagattgacccggtcttgttccagggcaagattggactccccatcctgtgcgtgggctctgtgtggaagagctgggagctgctgaaggaaggttttcttttggcgctgacccagggcagagagatcccaggctcagaacttcttctccagcttcaccctgatgaagctgaggcactcctccgctctgggtggggcgagcctaggggccaggcacatcgggcacctcctccccatggactatagcgccaatgccattgccttctattcctacaccttttcctagggggctggtcccggctccaccccctccaagctcagtggacactgggtctgaaaggaaggagtcttttgcttcctttctcccttttacaaaaacaaa

SEQ ID NO: 258941 - DNA, 407 bp, Homo Sapiens
aaaaaaattattctagcttttccaacagtagagacattaggaaggccaactttggtggccagattggggattttcctttgcttctgatgactctcttgtgccctttctcctctcaggtgccagatcggctagggatactcactcacctgtatagggactttgataaatgcaggtttgctgggttttgccggaaaattgcagaaggtgctcagcagggagaccccctttcccgctatatcttcaggaaggctggggagatgctgggcagacacatcgtagcagtgttgcccgagattgacccggtcttgttccagggcaagattggactccccatcctgtgcgtgggctctgtgtggaagagctgggagctgctgaaggaaggttttcttttggcgctggcccagggc

SEQ ID NO: 258942 - DNA, 1340 bp, Homo Sapiens
gtggctgggaggcagcggcccaattagtgtcgtgcggcccgtggcgaggcgaggtccggggagcgagcgagcaagcaaggcgggaggggtggccggagctgcggcggctggcacaggaggaggagcccgggcgggcgaggggcggccggagagcgccagggcctgagctgccggagcggcgcctgtgagtgagtgcagaaagcaggcgcccgcgcgctagccgtggcaggagcagcccgcacgccgcgctctctccctgggcgacctgcagtttgcaatatgactttggaggaattctcggctggagagcagaagaccgaaaggatggataaggtgggggatgccctggaggaagtgctcagcaaagccctgagtcagcgcacgatcactgtcggggtgtacgaagcggccaagctgctcaacgtcgaccccgataacgtggtgttgtgcctgctggcggcggacgaggacgacgacagagatgtggctctgcagatccacttcaccctgatccaggcgttttgctgcgagaacgacatcaacatcctgcgcgtcagcaacccgggccggctggcggagctcctgctcttggagaccgacgctggccccgcggcgagcgagggcgccgagcagcccccggacctgcactgcgtgctggtgacgaatccacattcatctcaatggaaggatcctgccttaagtcaacttatttgtttttgccgggaaagtcgctacatggatcaatgggttccagtgattaatctccctgaacggtgatggcatctgaatgaaaataactgaaccaaattgcactgaagtttttgaaatacctttgtagttactcaagcagttactccctacactgatgcaaggattacagaaactgatgccaaggggctgagtgagttcaactacatgttctgggggcccggagatagatgactttgcagatggaaagaggtgaaaatgaagaaggaagctgtgttgaaacagaaaaataagtcaaaaggaacaaaaattacaaagaaccatgcaggaaggaaaactatgtattaatttagaatggttgagttacattaaaataaaccaaatatgttaaagtttaagtgtgcagccatagtttgggtatttttggtttatatgccctcaagtaaaagaaaagccgaaagggttaatcatatttgaaaaccatattttattgtattttgatgagatattaaattctcaaagttttattataaattctactaagttattttatgacatgaaaagttatttatgctataaattttttgaaacacaatacctacaataaactggtatgaataattgcatcattt

SEQ ID NO: 258943 - DNA, 640 bp, Homo Sapiens
  misc_feature (416)..(416): n is a, c, g, or t
ggatgaaaactccagcctttcctgaactcacctccatcttcggttcttcagttttctgagaagagttgggatatgtgggaaggggcatgggagctcggcagcctccgcctgccaggaaggcagtttcgcctctgcaggaaagagcagagcccgtgggaagccctgggtgagggtggcgcagccggcccagcacgcatggtattgccagccacggggggcctgcgtgtagtctctgctccctgcatttcaccttctttgttgactttccttctctgttttcccccatctgtttgccatgaggggtgggaccggcaacagaacagccgtggctgctttatctctcctcaccacggtgtactcaggcctgagtggtaactcacgggagcctggccacctcgcagctgttcgcccccccnacctttgaactggaactgctggctcacacagggttttcgacaactgcagctgaatctcatggaaaacgctggattcctctgccttacgcagaaacacccgggctccatctgccaggtcgcttgccactggtcctggcagaaatggcggctgctgaaagtgaccttccaaatccttggtggcacttcagcgccacaggctctccaataaaaaccctttacacaca

SEQ ID NO: 258944 - DNA, 1329 bp, Homo Sapiens
  misc_feature (262)..(262): n is a, c, g, or t
  misc_feature (1195)..(1195): n is a, c, g, or t
  misc_feature (1290)..(1290): n is a, c, g, or t
ccattcgccagccaaaatgtacaaaaaaaattcatttcaaataactcaggagggatgataatggctgactttggtaaattcactcaaaagactgtgggagagccaaactcaactcactgtatagtctgtgcatatgtgggcttgtagcatgtaggtttttccaaaagaaggaaatataaaatgttagattaagaactataaaactacagggtgcttataaaaggtggcttactccttattgttattatactatccaattttnaaaatgcagtttaaaaaataagcactgagtcttgttattacaaggcaggcaaatgtttctccctcattttgaaaagactgaactggcaatgcttttcctgaacatttagaaaagaggcagtaagagtactctggtttgggttcaagtgagaggcttttcatgaatgttcagaaagcctgactaaaagaagccaaaccaaaaccatttaatgtgaacacaaacctcttttcttttagtaagttttacttttaatacagagtgaaagaaaataaaaatttaataggctaaaacaagtcaaacacccattctacacagataaaaaccttcacaaaggtcaactgaagtaatccagagctgaaactgaattgtgcagattttcaatgaagtcacagaagtcatgtaacacaaacaaaagtcgattatatttacacactcagcaagccctctaagaaatgtgccccaagaagcattaacctttgttttgtgccatcctgaagacttgcacattttatttttcagatagcttaacatttttaatcgagtgtgttctctaccatgcggtaatgctttggtactattcatacagggtcttgcctatcctaaagacttgccatttccccaagaggagctttgattctgctttagaagttttacataaattaaaatctttatcaaatattaatatgaagggaggcacaggatgcaacatatatagtcaagttacctctctgtatatttagaaattactttctcctccaaggtatttgcaacagaaagctcagtctgtcctgcttaataatcagtagtacaggtgtgaatcatcagaagcttggcaagaccttaatatttcaaaattattaacaactacctctaggggcaagttcatgttactgagttatgacaaatttattatcatgagggaaaacaagagtngccagccatcttaaaaatgccccaaccactgcttctcaaaacagaaagactaaaaactacatacagtttatcatacaacaaatcccatctctgtnccctgaaattcccctagtttcattcattagaaggggatt

SEQ ID NO: 258945 - DNA, 996 bp, Homo Sapiens
  misc_feature (960)..(960): n is a, c, g, or t
  misc_feature (968)..(968): n is a, c, g, or t
  misc_feature (980)..(980): n is a, c, g, or t
  misc_feature (991)..(991): n is a, c, g, or t
tccgtcgccatggaaacgaaagcggccaagtagagctccgtcctgacgcgccgcctcccgtgggctccggccggctaagccgcggcggacaactatgctgaaagccaagatcctcttcgtggggccttgcgagagtggaaaaactgttttggccaactttctgacagaatcttctgacatcactgaatacagcccaacccaaggagtgaggatcctagaatttgagaacccgcatgttaccagcaacaacaaaggcacgggctgtgaattcgagctatgggactgtggtggcgatgctaagtttgagtcctgctggccggccctgatgaaggatgctcatggagtggtgatcgtcttcaatgctgacatcccaagccaccggaaggaaatggaggtgtggtattcctgctttgtccaacagccgtccttacaggacacacagtgtatgctaattgcacaccacaaaccaggctctggagatgataaaggaagcctgtctttgtcgccacccttgaacaagctgaagctggtgcactcaaacctggaagatgaccctgaggagatccggatggaattcatgaagtatttaaaaagcataatcaactccatgtctgagagcagagacagggaggagatgtcaattatgacctagccagccttcacctgggactgccacatccccagtgaaatcagcatgtttctcggtgcagatctgaaatcacatccagctcctgatgttttcttctccctctgactgcagaggaagtgttcctacctgcaggaaggcacctgtcacacagggcgttcactcagaccatctgtgctctgccctgagttcagttgagaaaatcctattatcaaatttggatttcctggccccagaacttcccaaagacctgtaaaaatggagggatttaccacctcacatatgtccagttaaacagtgttgtggacttgtancgtcgcanccaatgatacanagtagtttaanacgtg

SEQ ID NO: 258946 - DNA, 1228 bp, Homo Sapiens
  misc_feature (252)..(252): n is a, c, g, or t
  misc_feature (355)..(355): n is a, c, g, or t
  misc_feature (1191)..(1191): n is a, c, g, or t
gctgtgcgcatgagcagatgaggcctagccgaggcggcgggacccccaagtttggaaagctcttttaacgatagtaactgtccctactgaaggccccaggagtgctccagccagagctgaggcttcgaagacctcagaggacttctctcagcactcacagaaacctcctacaccctcggatggcacaaagggactgttttcttactcttagtctgagtgactgccaaggaaggcaaaggtagagcaactggntctctggctctccacatagcttctgatctcagaccttactaaaatgctttctgggcccaaggacaaagctcacatgaacaaatgattttgagtcatgaatganaaatcttgctctttccatagtaaagaagaattaagagatggacagggtgaaagattgtctgctggatattctccatcatatgacaaggacaagagtgttctggctttcagaggaatccctatctcagagttgaagaaccatggcattctccaggctctgaccacagaagcttatgaatgggagccacgtgttgtgagtacagaggtggtcagagcccaagaagaatgggaagctgtggacaccatccagccagagacagggagccaagctagctcagagcagcctgggcagctaatctccttcagtgaggccctgcagcacttccagactgtggacctttcccccttcaagaaaagaatccagccaactattcgaaggactgggctcgccgccctccgacactacctcttcgggcctccaaagctccaccagcgccttcgggaagaaagggacttggtcctgaccattgctcagtgtggcctggatagccaagacccagtgcatggccgagtcctcccagaccatctataagaagctgaccggctcccaagtttgactgtgcccttcatggaaaccactgggaggacctgggctttcagggagcgaatccagccacagacctgagaggcgcaggcttccttgccctcctgcatctgctctacctggtgatggactcaaagaccttgccgatggcgcaggagattttccgcctgtctcgtcaccacatccagcaattccctttctgtttgatgtccgtgaacatcacccacattgccatcccaggccttgagagaggagtgtctctccagagagtgtaatcggcagcagaaggtcantccccgtggtgaacagcttctatgccgccacattcct

SEQ ID NO: 258947 - DNA, 974 bp, Homo Sapiens
  misc_feature (9)..(9): n is a, c, g, or t
  misc_feature (38)..(38): n is a, c, g, or t
  misc_feature (47)..(48): n is a, c, g, or t
  misc_feature (77)..(77): n is a, c, g, or t
  misc_feature (86)..(86): n is a, c, g, or t
  misc_feature (119)..(119): n is a, c, g, or t
  misc_feature (229)..(229): n is a, c, g, or t
  misc_feature (267)..(267): n is a, c, g, or t
  misc_feature (334)..(334): n is a, c, g, or t
  misc_feature (377)..(377): n is a, c, g, or t
  misc_feature (381)..(390): n is a, c, g, or t
  misc_feature (559)..(559): n is a, c, g, or t
  misc_feature (566)..(566): n is a, c, g, or t
  misc_feature (570)..(570): n is a, c, g, or t
  misc_feature (578)..(578): n is a, c, g, or t
agattggantattgccaagagacccacgcgctgctcanaccctgagnntactggccaggtgtcaaaggacagcctcnttttggggnacagaagtgctatgggccagaagcccctccaancaaggatctcaccttcacaggtgagagtgacctgcagtctcactcatccgaaggcgtatggctgatctgacctccgagatgaatggaggcttaaaggctgagctgcaggngctttcagggggtcagtggagccatctcaggaccctgnccaggccgcaccccttgctgtctcagcagatgggatataggaagctcctgggcttagctgtgggaanccaagtaccctcaccggcatgggacatgaggggcagctagacntcannnnnnnnnngcagacctgcctccagagcaaggagaattctgccttaatctgttgggctccagtctccgggttgaattccagtgtatcccactgggagtgaatggatcatgaggtgggatggccccatctggatgttctgcagatccccacatgggaggagattcccaagtagaggcanccagaantctnaccccctngcagcagcagggctctcaggcaccagtgtctgtgttgttagaactcagaggaagaggcaggggcagcagccgacagggggcagcatgacccaagcaaggggcctgaggcctcagtgggggtagggcaaggaggtacctcacaggtgggtgtgaggccccctccggagtttctggccattcacttacccactctcttctcccccagacccccgctccattgtttatgatggaaaaacggacatttggctaggtccctctcacggccgccccaccctagcccccacaagctggggcccccccctgtagatgctgtgcatgccccatgatgagtctctggcctaattgagggaaggaggaaattcataccagcagttttcaaataaaagaattgttcta

SEQ ID NO: 258948 - DNA, 1004 bp, Homo Sapiens
aaggagcgaggcctgggtggcgaattcggcacgaggctcaaagaccttgccgatggcgcaggagattttccgcctgtctcgtcaccacatccagcaattccctttctgtttgatgtccgtgaacatcacccacattgccatccaggccttgagagaggagtgtctctccagagagtgtaatcggcagcagaaggtcatccccgtggtgaacagcttctatgccgccacattcctccacctcgcacatgtctggaggacacagcggaagaccatctcagactcgggctttgtcctcaaagagttggaagtattggccaagaagagcccacggcggctgctcaagaccctggagctgtacttggccagggtgtcaaagggacaggcctccttgttgggagcacagaagtgctatgggccagaagcccctcccttcaaggatctcaccttcacaggtgagagtgacctgcagtctcactcatccgaaggcgtatggctgatctgacctccgagatgaatggaggcttaaaggctgagctgcaggggctttcagggggtcagtggagccatgtcaggagcctggccaggccgcaccccttgctgtctcagcagatgggatataggaagctcctgggcttagctgtgggaagccaagtacccttcaccggcatggggacaggaggggcagctagacttcaccccccttcccgcagaactgccctccagaagcaggagaatttccgcccttaatcctggttgggctcccgacttcccgggttggaattccaggggcattccgactgggcagggaacgggacccctggaggggggatgcgccagacacgggaatggtcctggagaaagcccccccgcggcgaggagcgattccccagttagaggcagccggagcaagatccgaatcccctggggcaccacggaggggcttggagggcggccccgggtccggggcgtgtaatacgtgcgtgtggagaccggggcggcgccag

SEQ ID NO: 258949 - DNA, 1497 bp, Homo Sapiens
  misc_feature (16)..(16): n is a, c, g, or t
  misc_feature (20)..(20): n is a, c, g, or t
  misc_feature (25)..(26): n is a, c, g, or t
  misc_feature (62)..(62): n is a, c, g, or t
  misc_feature (266)..(266): n is a, c, g, or t
  misc_feature (1370)..(1432): n is a, c, g, or t
  misc_feature (1468)..(1468): n is a, c, g, or t
ggagtgtctgtgagtnctgnggggnnagtgaaggcaggaagcaggttccccgcctggaaggngctggggcttccctggagctgcgctcaggcaccaagtctgtgggtctcatggctctagatctgctgctctgtgcagagccccaggatgaccgggaagaacccagggcactggacacatccctggaaagcagcaacctgctgccacaggtaaagcaaacccatgagaggaaacggtcagagccagcaggcatgggacagggaggnctgctggcccctcccactgtggcccacaccggcgggttcaggccagtcttggaatgtgaagatggtggagggccagctgctggctggcagggtggcccgccaggtatcctgcttccccttcctcaaggagagcctccatcccgcagccaggccacaggatgcagagctccagagcttcacccggctgctgtagttgccggtacccaggagggctggctctggagggctgggcttggcaggctggggagagcaaggaggtggggaacccccagtctgccggcccggcccctggtcagcacccgcagccccagccttctccgatgtccttgctgttcagctggatgtggtcggggctcttctcgctgaacaaggggcccccgtgccgcatgatgagctccgtgcccaccctcaggaaggcctcctccacgttgctcgagtccttggcagacgtctcaatggcacacaggatgtcatagtgctcagccaggctctgtgcctcagccaaggagacctcccgaagctcgctgaggtctgacttgttcccgatcagcagctgcacaatgttggagcccgcatacttcctcacatcctcaatccagtgaggcaccgacaggaaggagctcctcttggtgatgtcgtaggcaaggatggccccattggcactgcggtagtagctctgggtgatggtgcggaaccgctcctggccggccgtgtcccagatctgcagcttgacccgcttgccctggatctccagcgtcttcatggtgaagtcgacgccgatggtgcttccctggcgctccgagaaggcgccggtcttgaagcgctgcaccacgcacgtcttgcccacgcttgcgtcgcccaccagcaccagcttgaacaggaaatcgtactgctcgtccgggtcccccgggcctgggcccggccctgccatggcctagaagaagccgaagggccggcgctctggacgctgggaccggcctgactcacgcaagccgcgggccgagctccgcccgctccagcccacgggccgcctggctacgtggagccgccgcaacacctgaacccccagcactgccgaccgcctgcctcggcctcggccccgcnnnnnnnnnnnnnnnnnnnnnnnnnnnnnnnnnnnnnnnnnnnnnnnnnnnnnnnnnnnnnnnttcggctcccccccggacccgccaagccgggccctncgcaaagctccggccggtcctcagctccg

SEQ ID NO: 258950 - DNA, 1567 bp, Homo Sapiens
  misc_feature (226)..(226): n is a, c, g, or t
  misc_feature (349)..(349): n is a, c, g, or t
  misc_feature (639)..(639): n is a, c, g, or t
  misc_feature (643)..(643): n is a, c, g, or t
  misc_feature (1043)..(1043): n is a, c, g, or t
  misc_feature (1046)..(1046): n is a, c, g, or t
  misc_feature (1051)..(1051): n is a, c, g, or t
  misc_feature (1184)..(1184): n is a, c, g, or t
  misc_feature (1224)..(1224): n is a, c, g, or t
  misc_feature (1328)..(1328): n is a, c, g, or t
  misc_feature (1391)..(1391): n is a, c, g, or t
  misc_feature (1407)..(1428): n is a, c, g, or t
  misc_feature (1445)..(1445): n is a, c, g, or t
  misc_feature (1461)..(1461): n is a, c, g, or t
  misc_feature (1486)..(1486): n is a, c, g, or t
  misc_feature (1496)..(1497): n is a, c, g, or t
  misc_feature (1499)..(1499): n is a, c, g, or t
  misc_feature (1503)..(1503): n is a, c, g, or t
  misc_feature (1505)..(1505): n is a, c, g, or t
  misc_feature (1507)..(1507): n is a, c, g, or t
  misc_feature (1517)..(1517): n is a, c, g, or t
  misc_feature (1519)..(1519): n is a, c, g, or t
  misc_feature (1521)..(1521): n is a, c, g, or t
  misc_feature (1538)..(1538): n is a, c, g, or t
  misc_feature (1541)..(1541): n is a, c, g, or t
accggtccggaattcccgggatactccgtggaaggcttcatcgacaagaacagagatttcctcttccaggacttcaagcggctgctgtacaacagcacggaccccactctacgggccatgtggccggacgggcagcaggacatcacagaggtgaccaagcgccccctgacggctggcacactcttcaagaactccatggtggccctggtggagaaccttgcctccnaggagcccttctacgtccgctgcatcaagcccaatgaggacaaggtagctgggaagctggatgagaaccactgtcgccaccaggtcgcatacctggggctgctggagaatgtgagggtccgcnggctggcttcgcttcccgccagccctactctcgattcctgctcaggtacaagatgacctgtgaatacacatggcccaaccacctgctgggctccgacaaggcagccgtgagcgctctcctggagcagcatgggctgcagggggacgtggcctttggccagcaagctgttcatccgctcaccccggacactggtcacactggagcagagccgagcccgcctcatccccatcattgtgctgctattgcagaaggcatggcggggcaccttggcgaggtggcgctgccggagntgangggctatctacaccatcatgcgctggttccgaaaacacaaggtgcgggctcacctggctgagctgcagcggcgattcccaggctgcaaagcagcccccactctacgggcgtgaccttgtgtggccgctgccccctgctgtgctgcagcccttccaggacacctgccacgcactcttctgcaggtggcgggcccggcagctggtgaagaacatccccccttcagacatgccccagatcaaggccaaggtggccgccatgggggccctgcaagggcttcgtcaaaactggagctgccaacgggcctgggcccaagactacctgtcctctgccactaacaatcccacaacatcaaacctgtttgctcagcgactaaagacacttcggaacaaagatggcttcnganctttnctcttttcaaaccatttccgcaagttaaaccccttccacaagatccggaaccgggccctcctgctcacagaccagcacctctacaagctggaccctgaccggcagtaccggttgatgcgggccgtgccccttnaagcggttacggggctgagcttgaccagcggaggagaccngctggtggtgctgcacgcccgcggccagaacgacctcgtggtgtgcctgcaccgctcccggccgccattgaacaaccgcgttggggagctggtgggcgtgctgnccgcacactgccagggggagggccgcaccctggaggttcgctctccaactgcatcccactaanccatcgcgggctccgnnnnnnnnnnnnnnnnnnnnnnaggccaagaccaaccanaacccaattaataacncgcactcacaacatacacatatcancacacatagnntnatgncncncaaacacgcntnanacagcacacagcacccnccncaccccgagccgccaatttccgcccc

SEQ ID NO: 258951 - DNA, 1726 bp, Homo Sapiens
  misc_feature (541)..(541): n is a, c, g, or t
ccgggatcgccgccgtttttcccgcgcgcggacactgtccccgcacggtggtccctcgttggtgcgtggcctgacatccggctggaggcctcgggtgactccgaaagcggtaccttcgggggcccccccgcacccattgtttttccatggtttggactggatatcggtggaactctggtcaagctggtatattttgaacccaaagacatcactgctgaagaagaagaggaagaagtggaaagtcttaaaagcattcggaagtacctgacctccaatgtggcttatgggtctacaggcattcgggacgtgcacctcgagctgaaggacctgactctgtgtggacgcaaaggcaatctgcactttatacgctttcccactcatgacatgcctgcttttattcaaatgggcaaagataaaaacttctcgagtctccacactgtcttttgtgccactggaggtggagcgtacaaatttgagcaggattttctcacaatagagtgatcttcagctttgcaaactggatgaactagattgcttgatnaaaggaattttatacattgactcagtcggattcaatggacggtcacagtgctattactttgaaaaccctgctgattctgaaaagtgtcagaagtcaccatttgatttgaaaaatccgtatcctctgcttctggtgaacattggctcaggggttagcatcttagcagtatattccaaagataattacaaacgggtcacaggtactagtcttggaggaggaacttttttttggtctctgctgtcttcttactggctgtaccacttttgaagaagctcttgaaatggcatctcgtggagatagcaccaaagtggataaactagtacgagatatttatggaggggactatgagaggtttggactgccaggctgggctgtggcttcaagctttggaaacatgatgagcaaggagaagcgagaggctgtcagtaaagaggacctggccagagcgactttgatcaccatcaccaacaacattggctcaatagcaagaatgtgtgcccttaatgaaaacattaaccaggtggtatttgttggaaatttcttgagaattaatacgatcgccatgcggcttttggcatatgctttggattattggtccaaggggcagttgaaagcacttttttcggaacacgagggttattttggagctgttggagcactccttgagctgttgaagatcccgtgatcattacctggggaggggttcctgaaaccttccacaatgggatctgtggactttcatttttttaagagacttactcaatttcatgactgtactacctgaaacaaagtgagaaaggacaggtgtatttttctaagtcatcaagataaatccttaagaattcagtctaaattagcaaccaggaaggaaaaatatattaaaaacaacaaaaaagtggcacatgtccaggcagtgtgaggatttgctgtatataagttgcctgctttgtatttttgaaatctctgcatcactcattggaagtgcttctgaagagagctgctctgtgttcagttgactggttttgtgtcctgtttgaacttgctgaatgtaaggcaggctactatgcgttataatctaatcacaatttgtcaatatggtcttggcaatcatctgtgcattactctggtttgcattaagcctgtgtgtgaacttactgtaaaacatgttttatttcaaggttctgc

SEQ ID NO: 258952 - DNA, 946 bp, Homo Sapiens
acccggccgcctaggtccgcccttcacacaaacaatatctgcgggtgctgagggttttgcccacttgtggggggctattctcccaggaggatggccttatccaaggagcttcttccaaaaaggggtaccagcccgtaaagagggccagcagaggccaaaaagaagttcctcctcccaaggagtagtacctgtggacccgttggtaattatcttgggaatatacggctaagatgctaaccccgaagccaatgttcaccagaagcagaggatacggatttttcaaatcaaatggtaacttctgacacttttcagaatcagcagggttttcaaagtaatagcactgtgaccgtccattgaatccgactgagtcaatgtataaaattcctttgatcaagcaatctagttcatccagtttgcaaagctgaagatcacctatctttgcgtccacacagagtcaggtccttcagctcgaggtgcacgtcccgaatgcctgtagacccataagccacattggaggtcaggtacttccgaatgcttttaagactttccacttcttcctcttcttcttcagcagtgatgtctttgggttcaaaatataccagcttgaccagagttccaccgatatccagtccaaaccatggaaaaagcggccgctttttcctcaggctttcgacgcgctggcgggagaccgaggtggggccgctgtaagagcccagtcgatcccgcctcgtgccctcagccgaggccccgaccgcgggcaccgacgcgctgctcgcccggcgccgcagtggctcctgccgccgcccttcggggtccccggccgcctgctccccagccgacgagacggaggtggcggaagccctgccgtggcgctccatgggcgcgccgagccggcccgctcccatccgcagcagcagtcgctgccgcccgagccgccacccaggcc

SEQ ID NO: 258953 - DNA, 2128 bp, Homo Sapiens
  misc_feature (439)..(439): n is a, c, g, or t
  misc_feature (494)..(494): n is a, c, g, or t
tagtaatatgaaccccgcttgggtttataaaacacgcacgggctggtacggctccggaattccgggatatcgtcgacccacgcgtcgcatgcttgaacaaaataatgggacttagtggcagctatcaatggtgtaataccacaggaaaatggcattctacaaagtgaatatggaggtgagaccataccaggacctgcatttaatccagcaagtcatccagcttcagctcctacttcctcttcttcttcagcgtttcgacctgtaatgccatccaggcagattgtagaaaggcaacctcggatgctggacttcagggttgaatacagagacagaaatgttgatgtggtacttgaagacacctgtactgttggagagattaaacagattctagaaaatgaacttcagatacctgtgtccaaaattgctgttaaaaggctgngaagacgggagatgtggaagacagtacggtcctaaaatctctacacttgccaaanaaacaacagtctttatgtccttacaccagatttgccaccaccttcatcatctagtcatgctggtgccctgcaggagtcattaaatcaaaacttcatgctgatcatcacccaccgagaagtccagcgggagtacaacctgaacttctcaggaagcagtactattcaagaggtaaagagaaatgtgtatgaccttacaagtatccccgttcgccaccaattatgggagggctggccaacttctgctacagacgactcaatgtgtcttgctgaatcagggctctcttatccctgccatcgacttacagtgggaagaagatcttcacctgcacagacccgggaacagtcggaagaacaaatcaccgatgttcatatggttagtgatagcgatggagatgactttgaagatgctacagaatttggggtggatgatggagaagtatttggcatggcgtcatctgccttgagaaaatctccaatgatgccagaaaacgcagaaaatgaaggagatgccttattacaatttacagcagagttttcttcaagatatggtgattgccatcctgtattttttattggctcattagaagctgcttttcaagaggccttctatgtgaaagcccgagatagaaagcttcttgctatctacctccaccatgatgaaagtgtgttaaccaacgtgttctgctcacaaatgctttgtgctgaatccattgtttcttatctgagtcaaaattttataacctgggcttgggatctgacaaaggactccaacagagcaagatttctcactatgtgcaatagacactttggcagtgttgtggcacaaaccattcggactcaaaaaacggatcagtttccgcttttcctgattattatgggaaagcgatcatctaatgaagtgttgaatgtgatacaagggaacacaacagtagatgagttaatgatgagactcatggctgcaatggagatcttcacagcccaacaacaggaagatataaaggacgaggatgaacgtgaagccagagaaaatgtgaagagagagcaagatgaggcctatcgcctttcacttgaggctgacagagcaaagagggaagctcacgagagagagatggcagaacagtttcgtttggagcagattcgcaaagaacaagaagaggaacgtgaggccatccggctgtccttagagcaagccctgcctcctgagccaaaggaagaaaatgctgagcctgtgagcaaactgcggatccggacccccagtggcgagttcttggagcggcgtttcctggccagcaacaagctccagattgtctttgattttgtagcttccaaaggatttccatgggatgagtacaagttactgagcacctttcctaggagagacgtaactcaactggacccaaataaatcattattggaggtaaagttgttccctcaagaaacccttttccttgaagcaaaagagtaaacacggcccagcggtggaaccagccattccttgacaagccagcagcctgcgtcaggagaagggctcctcgccaacccacccacacgctcgtctcactcaattcaatgtcacacttctgcctcttgcaaaattgctggaaaaagtaataataaatatagctacttaagaa

SEQ ID NO: 258954 - DNA, 1390 bp, Homo Sapiens
  misc_feature (960)..(960): n is a, c, g, or t
  misc_feature (962)..(962): n is a, c, g, or t
  misc_feature (1013)..(1013): n is a, c, g, or t
  misc_feature (1022)..(1022): n is a, c, g, or t
  misc_feature (1057)..(1057): n is a, c, g, or t
  misc_feature (1059)..(1071): n is a, c, g, or t
  misc_feature (1073)..(1074): n is a, c, g, or t
  misc_feature (1111)..(1111): n is a, c, g, or t
  misc_feature (1138)..(1139): n is a, c, g, or t
  misc_feature (1143)..(1143): n is a, c, g, or t
  misc_feature (1145)..(1145): n is a, c, g, or t
  misc_feature (1152)..(1152): n is a, c, g, or t
  misc_feature (1179)..(1179): n is a, c, g, or t
  misc_feature (1245)..(1245): n is a, c, g, or t
  misc_feature (1336)..(1336): n is a, c, g, or t
  misc_feature (1338)..(1338): n is a, c, g, or t
  misc_feature (1343)..(1343): n is a, c, g, or t
  misc_feature (1345)..(1345): n is a, c, g, or t
  misc_feature (1360)..(1360): n is a, c, g, or t
ctgggagcagagactgcgaaaagctgagtccgccgatcgtgcccgggacaaggctgccttccactcgccgcatctacctggtaggcggcatgcgcacgggcttagaggcttgagagcctctggaagagaaagggtcccaggaaggaaacctgcccccggcctaagtgtcggcgcccagatcaccacgaaccccgcacctaggcgccgcccaccaagttccaaagaagtccgaggcgacctgggagtcggtcggatcccagccgagaaaagaaacaagcaggatagcaattcttaggggagccaccctgggagttttaggcagcgtttgcctttccctggttttcttcaccaagccccatcctcccccccgcataccacccccagtcaaaagagtgggagaaaatgcacagttcgaagtcggtgagagcaaaaatgggtctagtaaatcaacccgtggtggtagctaaaagcgtttggggctgcaaagaaacaaactgtaagttttgagcaacaaactttttcttcaatctgtaatatgtcgaaatgggaagggggtgttgcaaaagccaactaccactgtcaaacttagcccgtttacaacatggggaaaggcgtatttcttactaatatctcaacaacgataacaatgctgtatccttccttaccttgatgttgaactgcgaatcctcctccggatcaatgtccaggaacttagaagaatgggtgatattaggagttcagtacttctggaaaaaaaggcaaatggtttagccaggatcttccctgtctgattcgtcactattattatatctgatgatgcgaatggttggagcgaatcaatcctaagtcattaatgagctattttataaacaccactgtctgaagatcttcatttacattttgctaaggatcacttcgctaacctcacaggcgtgtgtcaacagcatgattggcaggacntnagttacactcttataaacaacacggctgtattgttaatcggttaatatttnataaagagnaaatattatattatgttaagaagggaactattgantnnnnnnnnnnnnncnnaagagaaggacaatttaaatgaaatatacaattaagnacaattaaatgtacattgtggttagtnngatntnagaggcngcaccctttaaaatacatggcttttcncttaactggagttacctcttgtccatttctgatactgaaaaaaatctatcatgttaggaaaaagcntaaattatttaaagttgcattaaacttagaggaaaatgtcaaatacgattaattatgaccagaaatgtattttggatgtttgtagagttgnanaacanancacattttacaaatntcttccgatttaaaggagagttctaggaag

SEQ ID NO: 258955 - DNA, 1728 bp, Homo Sapiens
  misc_feature (42)..(42): n is a, c, g, or t
  misc_feature (99)..(99): n is a, c, g, or t
  misc_feature (167)..(167): n is a, c, g, or t
  misc_feature (249)..(249): n is a, c, g, or t
  misc_feature (267)..(267): n is a, c, g, or t
  misc_feature (286)..(286): n is a, c, g, or t
  misc_feature (292)..(292): n is a, c, g, or t
  misc_feature (295)..(295): n is a, c, g, or t
  misc_feature (308)..(308): n is a, c, g, or t
  misc_feature (313)..(316): n is a, c, g, or t
  misc_feature (341)..(341): n is a, c, g, or t
  misc_feature (465)..(465): n is a, c, g, or t
  misc_feature (491)..(491): n is a, c, g, or t
  misc_feature (749)..(749): n is a, c, g, or t
  misc_feature (1002)..(1002): n is a, c, g, or t
  misc_feature (1155)..(1155): n is a, c, g, or t
  misc_feature (1158)..(1158): n is a, c, g, or t
  misc_feature (1164)..(1181): n is a, c, g, or t
  misc_feature (1206)..(1206): n is a, c, g, or t
  misc_feature (1213)..(1213): n is a, c, g, or t
  misc_feature (1215)..(1215): n is a, c, g, or t
  misc_feature (1223)..(1225): n is a, c, g, or t
  misc_feature (1227)..(1227): n is a, c, g, or t
  misc_feature (1229)..(1232): n is a, c, g, or t
  misc_feature (1260)..(1260): n is a, c, g, or t
  misc_feature (1275)..(1275): n is a, c, g, or t
  misc_feature (1284)..(1284): n is a, c, g, or t
  misc_feature (1297)..(1297): n is a, c, g, or t
  misc_feature (1314)..(1314): n is a, c, g, or t
  misc_feature (1339)..(1339): n is a, c, g, or t
  misc_feature (1354)..(1354): n is a, c, g, or t
  misc_feature (1361)..(1361): n is a, c, g, or t
  misc_feature (1371)..(1371): n is a, c, g, or t
  misc_feature (1388)..(1388): n is a, c, g, or t
  misc_feature (1403)..(1403): n is a, c, g, or t
  misc_feature (1408)..(1408): n is a, c, g, or t
  misc_feature (1415)..(1415): n is a, c, g, or t
  misc_feature (1423)..(1423): n is a, c, g, or t
  misc_feature (1425)..(1425): n is a, c, g, or t
  misc_feature (1430)..(1431): n is a, c, g, or t
  misc_feature (1435)..(1435): n is a, c, g, or t
  misc_feature (1440)..(1440): n is a, c, g, or t
  misc_feature (1442)..(1442): n is a, c, g, or t
  misc_feature (1446)..(1446): n is a, c, g, or t
  misc_feature (1454)..(1454): n is a, c, g, or t
  misc_feature (1456)..(1456): n is a, c, g, or t
  misc_feature (1458)..(1458): n is a, c, g, or t
  misc_feature (1460)..(1460): n is a, c, g, or t
  misc_feature (1469)..(1469): n is a, c, g, or t
  misc_feature (1473)..(1473): n is a, c, g, or t
  misc_feature (1479)..(1479): n is a, c, g, or t
  misc_feature (1489)..(1489): n is a, c, g, or t
  misc_feature (1492)..(1492): n is a, c, g, or t
  misc_feature (1515)..(1515): n is a, c, g, or t
  misc_feature (1519)..(1519): n is a, c, g, or t
  misc_feature (1544)..(1545): n is a, c, g, or t
  misc_feature (1547)..(1547): n is a, c, g, or t
  misc_feature (1567)..(1567): n is a, c, g, or t
  misc_feature (1571)..(1571): n is a, c, g, or t
  misc_feature (1576)..(1576): n is a, c, g, or t
  misc_feature (1613)..(1613): n is a, c, g, or t
  misc_feature (1616)..(1616): n is a, c, g, or t
  misc_feature (1669)..(1669): n is a, c, g, or t
  misc_feature (1703)..(1703): n is a, c, g, or t
  misc_feature (1709)..(1709): n is a, c, g, or t
  misc_feature (1711)..(1711): n is a, c, g, or t
  misc_feature (1722)..(1722): n is a, c, g, or t
tggagaacagaattgcagaatttggtggttatatagtacaanatccaggcccagacacgtactgtgtaattgcagggtctgagaacatcagagtgaaanacataattttgtcaaataaacatgatgttgtcaagcctgcatggcttttagaatgttttaagaccaanagctttgtaccatggcagcctcgctttatgattcatatgtgcccatcaaccaaagaacattttgcccgtgaatatgattgcnatggtgatagttatttcnttgatacagacttgaaccnactganggnagtattctcaggnattannnnttctaacgagcagactcctgaaganatggcttctctgattgctgatttagaatatcggtattcctgggattgctctcctctcagtatgtttcgacgccacaccgtttatttggactcgtatgctgttattaatgacctgagtaccaaanatgaggggacaaggttagctattaangccttggagcttcggtttcatggagcaaaagtagtttcttgtttagctgagggagtgtctcatgtaataattggggaagatcatagtcgtgttgcagattttaaagcttttagaagaacttttaagagaaagtttaaaatcctaaaagaaagttgggtaactgattcaatagacaagtgtgaattacaagaagaaaaccagtatttgatttaaagctaggtttcctagggaggaaagcctctgatctggcagactcanttgcagcaggtggtaatgataaaatacaaaactacattttatttttgtatcttaaaaatctatgcctaaaaagtatcattacatataggaaaacaataattttaactttaaaggtggaaaagacaatagcccaaagccaagaaagaaaaattatcttgaatgtagtattcaatgattttttatgatcaaggtgaaataaacagtctaaagaagaggtgtttttataatatccatatagaaatctagaattttnacttagatactaataaaatacatttagaaacttttaaagtcatgaaaaagcattaaccttctaaacagtatattctaaaaagtcaaaacgttaacaatagtttttatctaataaaagcactgcaagaaaatagggtagaattgtccccgccgnccncgccannnnnnnnnnnnnnnnnngggggggcgagggccccaggcgaanaggaaangnaaacaaannngncnnnnaagggtaaggccaaaggtaacaataaanccctgccgagggttntagctaaantagaggaagttgnatgagaatgacctaaanactcaaaaccgaaccggcccgaccnaaaataacgcccgcnacccccnaagccgcccncacccaaccgccggcgngaaacagcacacgcnccaanggaagcncccccacncncaccnncccnccagnanaaanagcacccncnangngggggggcngggngggtgnctatggaatnggnggcaatatggcatgcatatggtnactnccattagaaataagtggctttgacnntnaaaaatgacatagttagatnattnaaagncaatgtatatagtatatattatgtatggatttatatnccnaattttggaatacagcctatctcatgaccatattgaaatgtacggaatttganccatgcgatactatgtgtgcattatttgaaagcnatgggncntgttaggcaanccgtgg

SEQ ID NO: 258956 - DNA, 1728 bp, Homo Sapiens
  misc_feature (761)..(761): n is a, c, g, or t
  misc_feature (1084)..(1084): n is a, c, g, or t
  misc_feature (1095)..(1095): n is a, c, g, or t
  misc_feature (1117)..(1117): n is a, c, g, or t
  misc_feature (1613)..(1613): n is a, c, g, or t
  misc_feature (1676)..(1677): n is a, c, g, or t
  misc_feature (1682)..(1682): n is a, c, g, or t
  misc_feature (1700)..(1700): n is a, c, g, or t
gaacacgagtgggaagctaagagagacacggggagggggaggggaccgggaaccatttgaatgagaggaggggatcacgggtagagtgggctccaggaggtagggcgagcagggtgtgacgggggccagactcttgagccagtacatatccagccatactcatggaccccagtgatttccccagtccatttgacccattgaccctgccagagaagcccctggctggagacctaccagtagacatggaatttggagaggatctactggaatcccagactgccccaactcgaggatgggccccccctggcccttctccatcctcgggagccctggacctgcttgatacccctgctggcctggaaaaagaccctggagtcctggatggagccactgagttgctggggctgggggggctgctctataaagccccctctcccccggaggtggaccacggtcctgagggaaccctggcatgggatgcaggagatcagaccctagagcctggaccagggggccagacccctgaggtggtaccacctgatccaggggctggggcaaattcctgttcacctgaggggctactagagcctttggctccagattctccaataacactgcagtccccacatattgaagaggaggagaccacctccatagctactgcaagaaggggctcccctgggcaggaggaggagcttccccaagggcagccacagagcccaaatgccccgcctagcccttcagtgggagagactctgggnggatggaatcaacagttctcagaccaaacccggggggctctagcccccctgcacatccttccttgccaggagatgccctgactgcgaaggcgagtgagaagccgcctgaacggaagagaagcgagcgcgttaggagagcagaacctccaaaacctgaggttgtagattccactgagagcattccagtgtcagatgaggattctgatgccatggtagatgaccccaatgatgaggactttgtgccattccggccccggcgctctcctcgcatgtccctacgctcaagtgtgtcacaaagggccgggcgctctgcagtgggcacnaagatgactgntgcacattgccggacaccactncagaaggggcagactgcctatcagcgcaaggggctgcctcagctcttctgctcgtcatcctgcctcaccactttctccaagaagccctcgggcaaaaagacctgtaccttctgcaagaaggagatctggaacaccaaggactcggttgtggcgcagactggttctggaggctccttccatgagttctgcacatccgtctgtctctccctgtatgaggcccagcagcagcgcccgatcccccagtctggggatcccgccgacgctactcgctgcagcatatgccagaagactggagaggtcctgcacgaggtcagcaatggcagcgtggtacaccggctctgcagcgattcttgcttctccaaattccgggccaacaagggactgaaaaccaactgttgtgaccagtgtggggcttacatctacaccaagaccgggagccctggccctgagctcctcttccacgagggccaacaaaagcggttctgcaacacaaccngcttgggggcgtacaagaaggtggggccgagggagtagtgcattagagggctgtggaaggggnngtggntcttgggttataaataanaggggctgatgggtcaagggctgggaga

SEQ ID NO: 258957 - DNA, 883 bp, Homo Sapiens
  misc_feature (868)..(868): n is a, c, g, or t
agatgtggcccctggtagcggcgctgttgctgggctcggcgtgctgcggatcagctcagctactatttaataaaacaaaatctgtagaattcacgttttgtaatgacactgtcgtcattccatgctttgttactaatatggaggcacaaaacactactgaagtatacgtaaagtggaaatttaaaggaagagatatttacacctttgatggagctctaaacaagtccactgtccccactgactttagtagtgcaaaaattgaagtctcacaattactaaaaggagatgcctctttgaagatggataagagtgatgctgtctcacacacaggaaactacacttgtgaagtaacagaattaaccagagaaggtgaaacgatcatcgagctaaaatatcgtgttgtttcatggttttctccaaatgaaaatattcttattgttattttcccaatttttgctatactcctgttctggggacagtttggtattaaaacacttaaatatagatccggtggtatggatgagaaaacaattgctttacttgttgctggactagtgatcactgtcattgtcattgttggagccattcttttcgtcccaggtgaatattcattaaagaatgctactggccttggtttaattgtgacttctacagggatattaatattacttcactactatgtgtttagtacagcgattggattaaccctccttcgtcattgccatattggttattcaggtgatagcctatatccctcgctggggttggactgagtctctgtattgcgggcgtgtataccaatgcatggccctcttctgatttcaggtttgagtatcttagctctagcacaattacttggactagattnatatgaatttggtgg

SEQ ID NO: 258958 - DNA, 1135 bp, Homo Sapiens
  misc_feature (478)..(482): n is a, c, g, or t
  misc_feature (484)..(484): n is a, c, g, or t
  misc_feature (487)..(489): n is a, c, g, or t
  misc_feature (491)..(494): n is a, c, g, or t
  misc_feature (497)..(498): n is a, c, g, or t
  misc_feature (501)..(503): n is a, c, g, or t
  misc_feature (671)..(682): n is a, c, g, or t
  misc_feature (829)..(843): n is a, c, g, or t
  misc_feature (950)..(950): n is a, c, g, or t
  misc_feature (1043)..(1043): n is a, c, g, or t
gggaggaggtcctgagggcgtgcacccgccctgggcagtggggaggagagtggcctgagttacttcacccccgcgtgctgctggttaatgtcccgcgtctctgcaccttcgggtgggagcggggactgatctactttcacattctcaagtttttctcatctgcattagaggtgcccagtaggttcccaggttccagcgtgcccctccctcagacacacggacacaatcagccgagaagttcctggtctgaatcacgagaatgtggaggggtggggggtgtcagtggaaaggcataaggctgagctgagaccagttgctggtgaaactgggccaatctggggaggggaacatccttgccagggagtttctgagggtctgctttgtttacctttcgtgcggtggattctttttaactccgtctacctggcgttttgttagaaatgtcagataggaaaataaaaaccatttgagtaaaacnnnnnanaannncnnnnaannaannnccttgtccggccgccctcgggccctcgagaaagcttttctaaacccattccttttgggccgcgccgggccccacataagggaaagagggaacctgggccccataacctgggtttcccaaggaaaaacccggggccctggacacaaagggcttgggaattccccccccnnnnnnnnnnnncccccgggggggaaaccacgagaaggttttttgaaaaaaaatccccccaaagggaagttcctctcagggggcatttttacggggaatctttaccacacacggggatttcccctaacccgcgacccccccacaattcaaaaatatttnnnnnnnnnnnnnnnggtgaccattttatttcatgagaaaaaggggggggtcggaatcttctccaaatgcactttcctccttcgcccccccctatgggagcacccaaccctctcccctaaanacaccgccgcctctttgataaaacacatgtgaaagcttcccgccaagggcgaggtattaaatcaccaacctctctttgtttcctactcccctntcgccggtacaaatacaataataattcctttccgcccccctggtgggccaacaaaccacaacccgtgtccttaacaaaataccaatctctcg

SEQ ID NO: 258959 - DNA, 837 bp, Homo Sapiens
  misc_feature (831)..(831): n is a, c, g, or t
gggaatctatcagggaacggcggtggccggccgcggcgtgttcggtggcggctctggccgctcaggcgcctgcggctgggtgagcgcacgcgaggcggcgaggcggcagcgtgtttctaggtcgtggcgtcgggcttccggagctttggcggcagctaggggaggatggcggagtcttcggataagctctatcgagtcgagtacgccaagagcgggcgcgcctcttgcaagaaatgcagcgagagcatccccaaggactcgctccggatggccatcatggtgcagtcgcccatgtttgatggaaaagtcccacactggtaccacttctcctgcttctggaaggtgggccactccatccggcaccctgacgttgaggtggatgggttctctgagcttcggtgggatgaccagcagaaagtcaagaagacagcggaagctggaggagtgacaggcaaaggccaggatggaattggtagcaaggcagagaagactctgggtgactttgcagcagagtatgccaagtccaacagaagtacgtgcaaggggtgtatggagaagatagaaaagggccaggtgcgcctgtccaagaagatggtggacccggagaagccacagctaggcatgattgaccgctggtaccatccaggctgctttgtcaagaacagggaggagctgggtttccggcccgagtacagtgcgagtcagctcaagggcttcagcctccttgctacagaggataaagaagcccttgaagagcagctcccaggagtcaagaatgaaagaaagaaaaaaggcgatgaagtggatggagtggatgaagtggcgaagaanaaatct

SEQ ID NO: 258960 - DNA, 1065 bp, Homo Sapiens
  misc_feature (595)..(694): n is a, c, g, or t
ggggcccctgagaccctgcagcaccatctgtcatggcggctgggctgtttggtttgagcgctcgccgtcttttggcggcagcggcgacgcgagggctcccggccgcccgcgtccgctgggaatctagcttctccaggactgtggtcgccccgtccgctgtggcgggaaagcggcccccagaaccgaccacaccgtggcaagaggacccagaacccgaggacgaaaacttgtatgagaagaacccagactcccatggttatgacaaggaccccgttttggacgtctggaacatgcgacttgtcttcttctttggcgtctccatcatcctggtccttggcagcacctttgtggcctatctgcctgactacaggatgaaagagtggtcccgccgcgaagctgagaggcttgtgaaataccgagaggccaatggccttcccatcatggaatccaactgcttcgaccccagcaagatccagctgccagaggatgagtgaccagttgctaagtggggctcaagaagcaccgccttccccaccccctgcctgccattctgacctcttctcagagcacctaattaaaggggctgaaagtctgnnnnnnnnnnnnnnnnnnnnnnnnnnnnnnnnnnnnnnnnnnnnnnnnnnnnnnnnnnnnnnnnnnnnnnnnnnnnnnnnnnnnnnnnnnnnnnnnnnnnaacaactccccagggggaccaaccacacgcaaccacagctgtcacacagcggccccaccaagacggcgcccacataaccagcggcaggcgagacacaaaaggcggcgagcgaacacagcgagccgacgactctcgagagaaacccacggcgggggacaatgcgagaccccaccacgaataacccgcgggacaaaaaacaccgcgtgagggcacacgcaccatgtgctcaaaactcgcgcgtatctaaacgggcgaagaatatcgccgagctacatcaggagagtggcagagagaacatggcagcaagaacagccacgagcgtgcactgacgccacatagcaggggagataacgagacgcaccaccagacga

SEQ ID NO: 258961 - DNA, 620 bp, Homo Sapiens; identical to SEQ ID NO: 175584

SEQ ID NO: 258962 - DNA, 1438 bp, Homo Sapiens
  misc_feature (467)..(501): n is a, c, g, or t
  misc_feature (692)..(692): n is a, c, g, or t
  misc_feature (729)..(729): n is a, c, g, or t
  misc_feature (755)..(755): n is a, c, g, or t
  misc_feature (845)..(845): n is a, c, g, or t
  misc_feature (860)..(860): n is a, c, g, or t
  misc_feature (923)..(923): n is a, c, g, or t
  misc_feature (934)..(934): n is a, c, g, or t
  misc_feature (949)..(949): n is a, c, g, or t
  misc_feature (989)..(989): n is a, c, g, or t
  misc_feature (1003)..(1003): n is a, c, g, or t
  misc_feature (1016)..(1017): n is a, c, g, or t
  misc_feature (1030)..(1030): n is a, c, g, or t
  misc_feature (1072)..(1072): n is a, c, g, or t
  misc_feature (1093)..(1093): n is a, c, g, or t
  misc_feature (1095)..(1095): n is a, c, g, or t
  misc_feature (1188)..(1188): n is a, c, g, or t
ttgggcggggctcatcgtggtggtggagaaccgacaccccaaggcctacctgcacgtgcagtgtgactgcaccgacagcttcaacgtggtgtccacacgcggcagcctgcgtacccaggatagcgtgccacccctgcacaggcaggtcctggtgatcttgtcccagctagagggcaacgccggcttctctatcacccaccgcctggcacatcgcaaggcagcccaggccttcctcagtgactggacagcctccaaggggacccacagccccccactcacgccagaggtcgccggtctgcatgggccccgaccgctgtgaccaccatgcctggggcaggggctgtgcacagacggaccccccacccccacacgcactttatgagggagaccccgacagaggacgcttgagccagaatctcaggaccccgcccagggagctgccagcccagggctcagcttcccatggnnnnnnnnnnnnnnnnnnnnnnnnnnnnnnnnnnnacagtccgcctggccaggcctcctggccgccacgcagaatacctcgaaccaggcgggctgtgaaccagccccgctcacctgccagccccaacacccgacgggggccgaggccaggctgcccccccctgggggctcagggtctcctgcgggctaagcagccaggagctctgtccgcaaaaccaaatctgggnggcagaggccaagaccctggggggggatcagggaccnaccctcacggggcataagggcaggtntcccccagagcccgggtccctgtcccccacagggcaggcggggtccctggagccctggtgtggagcggcgagacccggggcggcgccggncacagaagaaggcgnccaagaccagccccccagcgacacaacgcaaaaccaggagagcccgccaggaacgaagccacnacagggagcangcgggcaccaggccngccgagggagggcaccagcccacagcaccgcacacagcanccgggcacacaggnaccagcaggcacnncagccaacccagncccacggcccggcccagccagagagggaccccagcacaccgngggcacgggcagggcccagcngnacccacctccccacagaagcccaggagtgagtggacgtctgagcccagctctcggcgtgccttcctggcccctcactccaggcagcgggccgnccgcgcccccactccccctccttacaccggcaggggcgtccggggccttttcacctggagaaacattcccactcccctttggcctccctgtactctgagctgtgaatatttttaaccctgtaaatacggccagctcttgtgacacagagactattttatcaattgtcagtcccgttcctttaccataggattctccacagtggcttccgactcaggctccaatggaccaaataaaagcgttttgttttgt

SEQ ID NO: 258963 - DNA, 1663 bp, Homo Sapiens
  misc_feature (52)..(52): n is a, c, g, or t
  misc_feature (216)..(216): n is a, c, g, or t
  misc_feature (218)..(218): n is a, c, g, or t
  misc_feature (1632)..(1632): n is a, c, g, or t
  misc_feature (1634)..(1634): n is a, c, g, or t
  misc_feature (1644)..(1644): n is a, c, g, or t
ttaatatgaaaagagaaaacaatttgaaggccccacaattagttgtgtaaanataatttcaagtaaagtgaatgtgattaaaacatcttgatttcacaaagccattcagaggaggcttcgacaaacgcaaagcgacccaaaccctggagggtcacatcccggctgctacaaacctcggcggggcggccccgctcttgcggccgggacagcgcaggncnagcaggggccgcaggggacccgcagattggcacgccgctccccatccccgcagcgcgtctgcaccggagactctgcggggatggtagccggagggcggcccgggctccgaggcgctgctcaggcattggggtttgtcctcatgagctccacgtcggcgtgcaccatctccctcaaccagctcatcgaaagcgaccccgggcttccagttcaggcttctgtttcgctttggtgcagtcgccctgcagaaagtccacttcagttggccggtagtacttgagatccacagtcacgtgaactttgccggtctctttacatctgcccacttcattttcattctttccttcccacacaatggtttttccaatgtgcaagaatgatttctcgacaaattcccggacactatggacctccccagtagctataacgaagtcctccggctcatcattctgcaacatcaaccacatagcctccacatagtccttggcatggccccaatctcgtttggcatccagatttcccaaactgaaacattccagttgtccaaggtaaatcttagctactgaccggctaatttttcgagtaacgaaattagctcctcttctgggactctcatgattgaagagaatgccgttcactgcaaagagattatacgcctcacggaagttcaccacaatccaataggcatagagttttgctgccccatagggtgaccggggatagaaaggggtggtctccttctggggtatttcctgcactttcccataaagttcacttgttgaggcttggtagaacttcacagagttgataaggccacaagtcttaactgcatctagaagtcgtagagtgccaactccgtcaacgtccgcagtgtactcagcgaggtcaaaggaaattttgacgtggctctgggctccaaggttgtagatctctgtgggctttacttcattaatgatcttcacaaggcaggtactgtcagtgagatcgccatagtgcaacttcatgtttccttcaatgtgagcctggggattcttatacagatgctcaattcgacccgtattaaatgaactggaccgccgtacaattccatggacctcatagcctttctccagcaggaactcagccaggtaggaaccatcctggcctgtgataccggtgatgagcgccacgttcctgggcttgcccatctcgccgtccccggagccccgggcgctggggcagcgtgccggtgcgtgtgccatgtcccgcggcgggcgtgcggtcggcggcagggcggagcgcggcagagggcaggcgcggtgccggcaggaacgcgggggtgtgcagcacgaagcgcctctccaggctgcgggcagggagggagagcgcaccgcgcgaccctcgtgccgaattcgccacccaggcctcgaggctganangggtgtgcgnggttgggggtaggacaaga

SEQ ID NO: 258964 - DNA, 1523 bp, Homo Sapiens
  misc_feature (1054)..(1054): n is a, c, g, or t
  misc_feature (1071)..(1071): n is a, c, g, or t
  misc_feature (1191)..(1191): n is a, c, g, or t
  misc_feature (1239)..(1239): n is a, c, g, or t
  misc_feature (1276)..(1276): n is a, c, g, or t
  misc_feature (1340)..(1340): n is a, c, g, or t
  misc_feature (1343)..(1343): n is a, c, g, or t
  misc_feature (1456)..(1456): n is a, c, g, or t
  misc_feature (1458)..(1478): n is a, c, g, or t
cgccgtggaggctgctgcagtgttgtgagttggaagctggggagctcggcatggcggtccccgctgcagccatggggccctcggcgttgggccagagcggccccggctcgatggccccgtggtgctcagtgagcagcggcccgtcgcgctacgtgcttgggatgcaggagctgttccggggccacagcaagacgcgcgagttcctggcgcacagcgccaaggtgcactcggtggcctggagttgcgacgggcgtcgcctagcctcggggtccttcgacaagacggccagcgtcttcttgctggagaaggaccggttggtcaaagaaaacaattatcggggacatggggatagtgtggaccagctttgttggcatccaagtaatcctgacctatttgttacggcgtccggagataaaaccattcgcatctgggatgtgaggactacaaaatgcattgccactgtgaacactaaaggggagaacattaatatctgctggagtcctgatgggcagaccattgctgtaggcaacaaggatgatgtggtgacctttattgatgccaagacacaccgttccaaagcagaagagcagttcaagttcgaggtcaacgaaatctcctggaacaatgacaataatatgttcttcctgacaaatggcaatggttgtatcaacatcctcagctacccagaactgaagcctgtgcagtccatcaacgcccatccttccaactgcatctgtatcaagtttgaccccatggggaagtactttgccacaggaagtgcagatgctttggtcagcctctgggatgtgggatgagttagtgtgtgttcggtgcttttccaggctggattggcctgtaagaaccctcagtttcagccatgatgggaaaatgctggcgtcagcatcggaagatcattttattgacattgctgaagtggagacgggggacaaactatgggaggtacagtgtgagtctccgaccttcacagtggcgtggcaccccaaaaggcctctgctggcatttgcctgtgatgacaaagacggcaaatatgacngcagccgggaagccggnactgtgaagctgtttgggcttcctaatgattcttgagaggaggttgtagggaggggaggccccggcagaggtcttccttcatgtggttagtttggtctgttctctcggagttggtgggcnccctaaatatttgtaagttggtataaattgtaaacgtctctggtcagntgcgcatttcgttcttttgctttgtctgtgtattggntctttccattctttgctccctgcatgagtttactcgcgtggactctgcagtgcgagtagtgacnccngcataccttgtcctctggtcctcctgtcttctctgcttctgggtgcatggtagactttgtggcatttgatactacttggacaatacctagtttggagggaggggaatggacgngnnnnnnnnnnnnnnnnnnnnntaattaaaaatatatacatataattttgagaattgaggatttaat

SEQ ID NO: 258965 - DNA, 431 bp, Homo Sapiens
ggagggagaggaggccccggcagaggtcttccttcatgtggttagtttggtctgttctctcggagttggtgggcaccctaaatatttgtaagttggtataaattgtaaacgtctctggtcaggctgcgcatttcgttcttttgctttgtctgtgtattagctctttccattctttgcccccagcatgagttaactcgcgtggactctgcagtgcgagtagtgaccccagcataccttgtcctctggacctcctgtcttctctgcttctgggtgcatggtagactttgtggcatttgatacaacttggacaatacctagtttggagggaggggaatggaagggcatggaagtttttttaaataattaaaaaaatatatatataattttgagaattgagcatttaataaactgacttttgttattatggaaaa

SEQ ID NO: 258966 - DNA, 1538 bp, Homo Sapiens
  misc_feature (1411)..(1411): n is a, c, g, or t
ttcagaggcggcaaattgcaaggagacgccgccgccttcatgctgccggcgggctgctcgcgccgggaaccaactgggacccgggctttgaagccacctccagggccagaaactaatggagaggacccccttccagcatgcacacccagtccacaagacctcaaagagttggagtttctgacccaggcactggagaaggctgtacgagttcgaagaggcatcactaaggccggagagagagacaaggcccccagcctgaaatctaggtccattgtcacctcttctggcacgacagcctccgccccaccgcattccccaggccaagctggtggccatgcttcagacacgagacccaccaagggcctccgccagaccacggtgcctgccaagggccaccctgagcgccggctgctgtcagtgggggatgggacccgtgttgggatgggagcccgaacccccaggcctggggcgggcctcagggaccagcaaatggccccatccgctgctcctcaggccccagaagccttcacactcaaggagaaggggcacctgctgcggctgcctgcggcattcaggaaagcagcttcccagaactcgagcctgtgggcccagctcagttccacacagaccagtgattccacggatgccgccgctgccaaaacccagttcctccagaacatgcagacagcttcaggcgggccccagcccaggctcagtgctgtggaggtggaggcggaggcggggcgcctgcggaaggcctgctcgctgctgagactgcgcatgagggaggagctctcggcagcccccatggactggatgcaggagtaccgctgcctggctcacgctggaggggctgcaggccatggtgggccagtgtctgcacaggctgcaggagctgcgtgcagcggtggcggaacagccaccaagaccatgtcctgtggggaggccccccggagcctcgccgtcctgtgggggtagagcggagcctgcatggagcccccagctgcttgtctactccagcacccaggagctgcagaccctggcggccctcaagctgcgagtggctgtgctggaccagcagatccacttggaaaaggtcctgatggctgaactcctccccctggtaagcgctgcacagccgcaggggccgccctggctggccctgtggccgggctgtgcacagcctgctctgcgagggaggagcacgtgtccttaccatcctgcgggatgaacctgcagtctgagcctttcccatgctgccctcggcctgttcagatggggattgggggtgtcttccctggcactgtgctcggggacccagagatgcctgtgcttccctgggaaacctggtgaactggaccaggtggcctcactggctcttctcaggacaactaagcctgctggtcagggnctgctttcagccttcctaaggctcctggactccagaggccagcggggagcctttcctggctccctctgttttctctcactgtagaccaaagagccgcttgtgtgatattaaagccactttagaaagc

SEQ ID NO: 258967 - DNA, 1638 bp, Homo Sapiens
  misc_feature (1124)..(1135): n is a, c, g, or t
  misc_feature (1371)..(1371): n is a, c, g, or t
  misc_feature (1547)..(1547): n is a, c, g, or t
  misc_feature (1573)..(1573): n is a, c, g, or t
  misc_feature (1598)..(1598): n is a, c, g, or t
  misc_feature (1627)..(1627): n is a, c, g, or t
  misc_feature (1634)..(1635): n is a, c, g, or t
ggcactgccgagtggctgtcctttgatgtcactgacactgtgcgtgagtggctgttgagaagagagtccaacttaggtctagaaatcagcattcactgtccatgtcacacctttcagcccaatggagatatcctggaaaacattcacgaggtgatggaaatcaaattcaaaggcgtggacaatgaggatgaccatggccgtggagatctggggcgcctcaagaagcagaaggatcaccacaaccctcatctaatcctcatgatgattcccccacaccggctcgacaacccgggccaggggggtcagaggaagaagcgggctttggacaccaattactgcttccgcaacttggaggagaactgctgtgtgcgccccctctacattgacttccgacaggatctgggctggaagtgggtccatgaacctaagggctactatgccaacttctgctcaggcccttgcccatacctccgcagtgcagacacaacccacagcacggtgctgggactgtacaacactctgaaccctgaagcatctgcctcgccttgctgcgtgccccaggacctggagcccctgaccatcctgtactatgttgggaggacccccaaagtggagcagctctccaacatggtggtgaagtcttgtaaatgtagctgagaccccacgtgcgacagagagaggggagagagaaccaccactgcctgactgcccgctcctcgggaaacacacaagcaacaaacctcactgagaagcctggagcccacaaccttcggctccgggcaaatggctgagatggaggtttccttttggaacatttctttcttgctggctctgagaatcacggtggtaaagaaagtgtgggtttggttagaggaaggctgaactcttcagaacacacagactttctgtgacgcagacagaggggatggggatagaggaaagggatggtaagttgagatgttgtgtggcaatgggatttgggctaccctaaagggagaaggaagggcagagaatggctgggtcagggccagactggaagacacttcagatctgagggtggatttgctcattgctgtaccacatctgctctagggaatctggattatgttatacaaagcaagcannnnnnnnnnnnaaagacaggttacgaagacaaagtcccagaattgtatctcatactgtctgggattaagggcaaatctattacttttgcaaactgtcctctacatcaattaacatcgtgggtcactacagggagaaaatccaggtcatgcagttcctggcccatcaactgtattgggccttttggatatgctgaacgcagaagaaagggtggaaatcaaccctctcctgtctgccctctgggtcccncctctcacctctccctcgatcatatttccccttggacacttggttagacgccttccaggtcaggatgcacatttctggattgtggttccatgcagccttggggcattatgggttcttcccccacttcccctccaagaccctgtgttcatttggtgttcctggaagcaggtgctacnacatgtgaggcattcggggaagctgnacatgtgccacacagtgacttggcnccagacgcatagaatgaggtataaagacnggtatgnntat

SEQ ID NO: 258968 - DNA, 466 bp, Homo Sapiens
tacagagagctttggacaaagcaaattaaaaagctggttgaaactatggtaggaatttaaaagggcagaatgtgactgagtagaactgagtcagggtgccaagataagaaccttcaccagaggaattttactcaccccagaccatcatttgctcactcaacattcaatccttcactcattctttttaacaagtggtctggtcggtcagccccagtgcctcagatgggcatgagcctcgctccataccgtgctgtggggttgtgtctgcactgcggagggtatggggcaaggggcctgaggcaggaagttgggcatagtaagcccttagggttcatgggacccacttcccagcccagatcctgtcggaagtcaatgtagagggggcgcacacagcagttctcctccaagttgctacaacaaaaaacatttatagaaaatcaacttaaaaccaccaataaaagaaact

SEQ ID NO: 258969 - DNA, 971 bp, Homo Sapiens
  misc_feature (18)..(18): n is a, c, g, or t
  misc_feature (177)..(177): n is a, c, g, or t
ggcaacatggccgagagnggggcctccgggcggcgccgtgtccgcgaccgcgtaccctgacacccccgcggaattccctccgcacctccaggcgggtgcgatgcggcgccgcttttggggcgtattcaactgtctgtgcgccggcgcgttcggggccctggccgccgcctccgccanagctggccttcggcagcgaggtggtgagcatgggtttatgcgtcttaggcattattgtgatggcgagcaccaattctctgatgtggaccttctttagccggggcctcagtttctccatgtcttcagccattgcatctgtcacagtgactttttcaaatatcctcagctcggccttcctgggctatgtgctgtatggagagtgccaggaggtcttgtggtggggaggagtgttccttattctctgcggactcaccctaatccacaggaagctcccacccacctggaagccccttccacacaagcagcagtagcaccacttggctagacggaccagctggaaagatcatgatggtggcccagccttgggatgtcatgtgggactgtatcctagggcgatccagttgtgcagccttctgaccatcagccaagggaagcaggcctctgatggagcaggctctggctctgtaaggagaggtgcagctgcagcagtgttctaccggaagtgttttgatcatctgtacagtgctttggattcttcctcccaggcctaccccagtgagccttcgcagatgctggagatcctggggttggtctgctttgtgtatggtacttgaaaccacgctgtaattattgtcctgttgccaaacaaaagccagtcatgtaactctagaagcagtgactggtggggctttctgacagttccatgctgatgtatcaggccatctgtgtcatgcttatgtattatggcaagaagaggaaactggattaataatacgttttttgtaagttaaaaa

SEQ ID NO: 258970 - DNA, 1447 bp, Homo Sapiens
  misc_feature (119)..(119): n is a, c, g, or t
  misc_feature (1167)..(1167): n is a, c, g, or t
  misc_feature (1179)..(1179): n is a, c, g, or t
  misc_feature (1186)..(1186): n is a, c, g, or t
  misc_feature (1201)..(1201): n is a, c, g, or t
  misc_feature (1215)..(1215): n is a, c, g, or t
  misc_feature (1217)..(1217): n is a, c, g, or t
  misc_feature (1296)..(1296): n is a, c, g, or t
  misc_feature (1303)..(1303): n is a, c, g, or t
  misc_feature (1422)..(1422): n is a, c, g, or t
ggaattcccgggatatgaagcgcaggaaatacggcttcatctacaagacgcatctgttcgggcggcccaccgtacgggtgatgggcgcggacaatgtgcggcgcatcttgctcggaganaccggctggtgtcggtccactggccagcgtcggtgcgcaccattctgggatctggctgcctctctaacctgcacgactcctcgcacaagcagcgcaagaagccgcgaggcactcgaatgctacgtgccggtgatcaccgaggaagtgggcagcagcctggagcagtggctgagctgcggcgagcgcggcctcctggtctaccccgaggtgaagcgcctcatgttccgaatcgccatgcgcatcctactgggctgcgaaccccaactggcgggcgacggggactccgagcagcagcttgtggaggccttcgaggaaatgacccgcaatctcttctcgctgcccatcgacgtgcccttcagcgggctgtaccggggcatgaaggcgcggaacctcaattaacgcgcgcatcgagcagaacatacgcgccaagatctgcgggctgcgggcatccgaggcgggccagggctgcaaaagacgcgctgcagctgttgatcgagcactcgtgggagaggggagagcggctggacatgcaggcactaaagcaatcttcaaccgaactcctcttttggaggacacgaaaccacggccagtgcagccacatctctgatcacttacctggggctctacccacatgttctccagaaagtgcgagaagagctgaagagtaagggtttactttgcaagagcaatcaagacaacaagttggacatggaaattttggaacaacttaaatacatcgggtgtgttattaaggagacccttcgactgaatcccccagttccaggagggtttcgggttgctctgaagacttttgaattaaatggataccagattcccaagggctggaatgttatctacagtatctgtgatactcatgatgtggcagagatcttcaccaacaaggaagaatttaatcctgaccgattcatgctgcctcacccagaggatgcatccaggttcagcctcattccatttggaggaggccttaggagctgtgtaggcaaagaatttgcaaaaattcttctcaaaatatttacagtggagctgnccaggcattgtnactggcngcttctaaatggacntcctacaatgaaancnagtcccaccgtgtatcctgtggacaatctccctgcaagattcacccatttccatggggaaatctgatgagcttgaatgntcaaacntgagacttattggaagtgtacatatgagtttttaaggagtgttgtgttgactttatatttaatttctaaatgtatattataatatttatgtgttttgactatactaccacaatctttanatattaaaataatgaatttgtatca

SEQ ID NO: 258971 - DNA, 1529 bp, Homo Sapiens
tgattctcggctcacgcgggaggggagtaaagggtggcggtccgggcctggagttcagtgggtgcagcctgcttgcgagctgaggccagacaggggggcgcctacggacggaaaagaaaagttgattacaaacgggaccatattttgcttcgaaatggaaccagcagttagcgagccaatgagagaccaagtcgcacggactcatttgacagaggacactcccaaagtgaatgctgacatagaaaaggttaaccagaatcaggccaagagatgcacagtgatcgggggctctggattcctggggcagcacatggtggagcagttgctggcaagaggatatgctgtcaatgtatttgatatccagcaagggtttgataatccccaggtgcggttctttctgggtgacctctgcagccgacaggatctgtacccagctctgaaaggtgtaaacacagttttccactgtgcgtcacccccaccatccagtaacaacaaggagctcttttatagagtgaattacattggcaccaagaatgtcattgaaacttgcaaagaggctggggttcagaaactcattttaaccagcagtgccagtgtcatctttgagggcgtcgatatcaagaatggaactgaagaccttccctatgccatgaaacccattgactactacacagagactaagatcttacaggagagggcagttctgggcgccaacgatcctgagaagaatttcttaaccacagccatccgccctcatggcattttcggcccaagggacccgcagttggtacccatcctcatcgaggcagccaggaacggcaagatgaagttcgtgattggaaatgggaagaacttggtggacttcacctttgtggagaacgtggtccatggacacatcctggcggcagagcagctctcccgagactcgacactgggtgggaaggcatttcacatcaccaatgatgagcccatccctttctggacattcctgtctcgcatcctgacaggcctcaattatgaggcccccaagtaccacatcccctactgggtggcctactacctggccctcctgctatccctgctggtgatggtgatcagtcctgtcatccagctgcagcccaccttcacacccatgcgggtcgcactggctggcacattccactactacagctgcgagagagccaaaaaggccatgggctaccagccactagtgaccatggatgatgctatggagaggaccgtgcagagctttcgccacctgcggagggtcaagtgagggacactggaggctgggctctctcgacacgttgctcagccagtcactccttcccctgtggattgatgaaataacatcctttgaatgagtttgctctgagcctgtgactccttctgctaggcagagagcgcaccctactctttccgtgacgatgagggcggcaaaaacagacatttcttccttaatggaaatggatttggatttcttgaagcaggcagcttcatattataccgatttgttctctgtcaaaaaa

SEQ ID NO: 258972 - DNA, 1161 bp, Homo Sapiens
  misc_feature (842)..(856): n is a, c, g, or t
  misc_feature (882)..(956): n is a, c, g, or t
  misc_feature (1048)..(1048): n is a, c, g, or t
  misc_feature (1053)..(1053): n is a, c, g, or t
  misc_feature (1064)..(1065): n is a, c, g, or t
  misc_feature (1069)..(1069): n is a, c, g, or t
  misc_feature (1087)..(1087): n is a, c, g, or t
  misc_feature (1094)..(1094): n is a, c, g, or t
  misc_feature (1097)..(1097): n is a, c, g, or t
  misc_feature (1101)..(1101): n is a, c, g, or t
  misc_feature (1115)..(1115): n is a, c, g, or t
  misc_feature (1118)..(1118): n is a, c, g, or t
  misc_feature (1137)..(1137): n is a, c, g, or t
  misc_feature (1141)..(1143): n is a, c, g, or t
  misc_feature (1145)..(1145): n is a, c, g, or t
  misc_feature (1147)..(1147): n is a, c, g, or t
  misc_feature (1150)..(1150): n is a, c, g, or t
  misc_feature (1153)..(1153): n is a, c, g, or t
gcctcacagctcatctttcctaaagagtttgaaacagctgagacacttctaaattcagaagttcatatgcttctggaacatcgaaagcagcagaatgagagtgcagaggacgaacaggagctctcagaagtcttcatgaaaacattaaactacacagcccgtttcagtcgtttcaaaaacagagagaccattgccagtgttcgtagcttgctactccagaaaaagcttcataagtttgagttggcctgtttggccaaccgtttgcccagagactgctgaggaatccaaggctctaatcccaagcttggagggacggtttgaagatgaggagctgcagcagattcttgatgatatccagacaaagcgcagctttcagtattaatctccaaacatcactgctgctcggagaaaccacatccccaggcataacaccaccttcccactgtctggggctgacttgcacagaaattctgttgaagacagttgagaattcctttggagaaaacagcccagcttggcgtggggttaggttgctgtttcaaataactcacaggcccaggtgacatggaatcttggagcagccttgtgcagtggcagccagtggcttcctgaacgtgcctctgcgaagtgtgagatgaggggtcacataaccacactgttgactacctcattcctggtttttggcctccacatcatcttttttcttaatatttcatgttttaatttcagggtgtttatactttttgaaactagaccagaagatagtagactttatagagaaagaccagttttacctagatactaaaggaagaattaaaccgctgttagtttgaaatgctttnnnnnnnnnnnnnnnaaaatggagatagggtcttaactctnnnnnnnnnnnnnnnnnnnnnnnnnnnnnnnnnnnnnnnnnnnnnnnnnnnnnnnnnnnnnnnnnnnnnnnnnnntaacttggggcacaggtgtgcaccacaactctcagctaatttttaaaatttttatagaggtggggttttactatgctgtccagactggtctnaaacncctgggcccanngatncccctgccttggcctccnaactggnganatanaggcatgaccacanaantggccgaaatcttaaaggngggnnntngnganagnccttggca

SEQ ID NO: 258973 - DNA, 1328 bp, Homo Sapiens
  misc_feature (1203)..(1203): n is a, c, g, or t
  misc_feature (1256)..(1266): n is a, c, g, or t
atattcaagagtggggggaggaagcagaggtcttcagggctctttttttggggggggtggtctcttcctgtctggcttctagagatgtgcctgtgggagggggaggaagttggctgagccattgagtgctgggggaggccatccaagatggcatgaatcgggctaaggtccctgggggtgcagatggtactgctgaggtcccgggcttagtgtgagcatcttgccagcctcaggcttgagggagggctgggctagaaagaccactggcagaaacaggaggctccggccccacaggtttccccaatgcctctcaccccacttcccatctccagggaagcgtcgccccagtggcactgaagtggccctccctcagcggaggggtttgggagtcaggcctgtgcaggaccctgctgactcgtggcgcgggagctgggagccaggctctccgggcctttctctggcttccttggcttgcctggtgggggaaggggaggaggggaagaaggaaagggaagagtcttccaaggccagaaggagggggacaaccccccaagaccatccctgaagacgagcatccccctcctctccctgttagaaatgttagtgccccgcactgtgccccaagttctaggccccccagaaagctgccagagccggccgccttctcccctctcccagggatgctctttgtaaatatcggatgggtgtgggagtgaggggttacctccctcgccccaaggttccagaggccctaggcgggatgggctcgctgaacctcgaggaactccaggacgaggaggacatgggacttgcgtggacagtcagggttcacttgggctctctctagctccccaattctgcctgcctcctccctcccagctgcactttaaccctagaaggtggggacctggggggagggacagggcaggcgggcccatgaagaaagcccctcgttgcccagcactgtctgcgtctgctcttctgtgcccagggtggctgccagcccactgcctcctgcctggggtggcctggccctcctggctgttgcgacgcgggcttctggagcttgtcaccattggaacagtctccctgatggaccctcagtcttctcatgaataaatcccctccacgcccaaaaacacacccggctttcatatcaccccatatgtggaaagcttttccacaagcgcgtagccactattntccttgtggggcggcctcggcccttgaaaagcttttccaaaactttttgtttnnnnnnnnnnnccccggaggtttatggaacctggggcatacccgtgttcccaaaggagacccggggacttgaa

SEQ ID NO: 258974 - DNA, 999 bp, Homo Sapiens
  misc_feature (166)..(166): n is a, c, g, or t
  misc_feature (281)..(281): n is a, c, g, or t
tgcttcgaacgctcggttaagattaatcccatgcagctcggggtgtggttttctctcggttgtgcctatttggccttggaagactatcaaggttcagcaaaggcatttcagcgctgtgtgactctagaacccgataatgctgaagcttggaacaatttgtcaaccntcccatatccgattaaaacaaaaaattaaaaacttttagaactttacaagaagctctcaagtgtaactatgaacactggcagatttgggaaaaactacatcctcaccagcactgnacgttggggaattttcagaagccattaaagcttatcaccggctcttggacttacgtgacaaatacaaagatgttcaggtcctaaaaattctagtcagggcagtgattgatgggatgactgatcgaagtggagatgttgcaactggcctcaaaggaaagctgcaggagttatttggcagagtgacttcaagagtgacaaatgatggagaaatctggaggctgtatgcccacgtatatggaaatgggcagagtgaaaagcctgatgaaaatgaaaaggcattccagtgcctctcaaaggcatacaagtgtgacacccagtccaattgttgggagaaagatattacatcatttaaggaagttgttcaaagagccttaggacttgcacatgtggccataaaatgcagtaaaaacaaatccagttcccaagaagctgtacaaatgctttcttctgttcgactcaatttacggggcttgttatctaaagcaaagcaactttttacagatgtggcaactggagaaatgtccagggaattagctgatgacataacagctatggacaccttagtgacagagctccaagacctaagcaaccagtttcgaaatcagtattgattctgctggaagcagattctggaaaaggtgctttcacctgctggtaaaagatacatctgtatatctgaaatgcaagatattgatttttaaaataaatttgttttatg

SEQ ID NO: 258975 - DNA, 1032 bp, Homo Sapiens
  misc_feature (19)..(19): n is a, c, g, or t
  misc_feature (22)..(23): n is a, c, g, or t
  misc_feature (25)..(25): n is a, c, g, or t
  misc_feature (56)..(56): n is a, c, g, or t
ctgtcaatcaattgtaatngcnntnccttagcaatatccactgatctttgctttcngactcataataatataaaacacatatgcacattccagatgaattgaatagccaaatatcgacctgaatcatctacaaacagattctgtagtttcatcacttgatcaatacagttttcggcaagagtaaaaagcagaggtgagcgttcctcaagcaaatgctgatgaatattcacacatctcaaagtccaccatggcaagctctgaatagctgtcagtttatgtcttaccatccactaggattaatgcgtgctaataacagtagtataggcttcgaggtcaggctgtagattgattcaccatctagagtgagcaggctcagaacaaatgcatccagtcctttaacctcactgaattgctggaacaaaacagatgacaaaaagtcctgagggtgtaagtcaacagggggccccgtccagttgctctgaacaaaaagttgcaaactgctcacaccaagtagaaatatcaactgttgtctttccgttgtgtccaaatctgttgagtaatccaggaatgttactacctgcttctccaggtagctatcaatcttttcttcagcggttgttgttgaattaaaaatattttgagtcattgaatttaagaatatggcttcatagttcccttccagcagcaattgtaggaaagatccactctctgaaccgacgaccccctcctgtttccattgctgccgctcagcctcagtggggaatcccctcagaattgccagctccggggtccacatcaccccagacaccgctgcagccaaaacaggctcccacgagggccacacgggagtcaacaaaagaaagtgaaaacaggagagtccaaaggcgctgaaatctagtggcgacagttaccgtaaatacacctgcggccctagaattccatgtgcggatactacctcaaggaggcggccataacagcagcgcggggcaccctgggaaaaacacgcctcgtgccgaattcgccacccaggcc

SEQ ID NO: 258976 - DNA, 1162 bp, Homo Sapiens
  misc_feature (153)..(165): n is a, c, g, or t
  misc_feature (239)..(239): n is a, c, g, or t
  misc_feature (279)..(279): n is a, c, g, or t
  misc_feature (1058)..(1071): n is a, c, g, or t
cgccccccagtactccgcccctaggaaaacagaaccccagtctgccagctcctcagaccctggcagggggtaaccctgaaactgcacagccacatgctggaaccttaccgagaccgagaccagtaccaaagccaaggaaccggcccagcgtgnnnnnnnnnnnnnaacctcctggtgtccactcagctggggacagcagcctcaccaacacagcaccaacagcttccaagatagtaacnagatgcccttcctagtgccctcacaggtggggaaggtttnccaggactaagactccaattcccagggtttcagaaccgcatcgcagcatctttcctgaaatgcactcagactcagccagcaaagacgtgcctggccgcatcctgctggatatagacaatgataccgagagcactgccctgtgaagaaagccctttcccagccctccaccacttccaccctggcgagtggagcaggggcaggcgaacctctttctttgcagaccgaacagtgaaaagctttcagtggaggacaaaggagggcctcactgtgcgggacctggccttctgcacggcccaaggagaacctggaggccaccactaaagctgaatgacctgtgtcttgaagaagttggctttctttacatgggaaggaaatcatgccaaaaaaatccaaaacaaagaagtacctggagtggagagagtattcctgctgaaacgcacataggaagcttttgtccctgctgttaatgcgggcagcacctacagcaacttggaatgagtaagaagcagtgcgttaactatctatttaataaaatgcgctcattatgcaagtcgcctactctctgctacctggacgttcattcttatgtattaggagggagctgcgctccttcagacttgctgcagaatcattttgtatcatgtatggtctgtgtctccccagtcccctcagaaccatgcccatggatggtgactgctggctctgtcacctcatcaaactggatgtgacccatgccgcctcgttggattgtcggaatgtagacagaaatgtactgttcnnnnnnnnnnnnnnaaacaatgtaattgctacttgataaggacccaacattattctaggtttcatgtttaatttgaattaaatatattctgtggggttaaaaaaa

SEQ ID NO: 258977 - DNA, 936 bp, Homo Sapiens
  misc_feature (739)..(751): n is a, c, g, or t
ctggaagacggggccgagcccaggcgacggcagtcctcccaaaccgaaggaccctgtatctgcagctgtgccagcaccagggagaaacaacagtcagatagcatctggccaaaatcagccccaggcagctgctggctcccaccagctctccatgggccaacctcacaatgctgcagggcccagcccgcatacactgcgccgagctgttaaaaaacccgctccagcacccccgaaaccgggcaacccacctcctggccaccccgggggccagagttcttcaggaacatctcagcatccacccagtctgtcaccaaagccacccacccgaagcccctctcctcccacccagcacacgggccagcctccaggccagccctccgccccctcccagctctcagcaccccggaggtactccagcagcttgtctccaatccaagctcccaatcacccaccgccgcagccccctacgcaggccacgccactgatgcacaccaaacccaatagccagggccctcccaaccccatggcattgcccagtgagcatggacttgagcagccatctcacacccctccccagactccaacgccccccagtactccgcccctaagaaaaacagaaccccagtctgccagctcctcaaaccctggcagggggtaaacctgaaactgcacagccacatgctggaaccttacccagaaccgagaccagtaccaaagccaaggaaccggcccagcgtgnnnnnnnnnnnnnaacctcctggtgtccactcagctggggacagcagcctcaccaacacagcaccaacagcttccaagatagtaacagactccaattccagggtttcagaaccgcatcgcagcatctttcctgaaatgcactcagactcagccagcaaagacgtgcctggccgcatcctgctggatatagacaatgat

SEQ ID NO: 258978 - DNA, 903 bp, Homo Sapiens
  misc_feature (12)..(12): n is a, c, g, or t
  misc_feature (46)..(58): n is a, c, g, or t
  misc_feature (243)..(243): n is a, c, g, or t
ccgagaccgtgnccagtaccaaagccaaggaaccggcccagcgtgnnnnnnnnnnnnnaacctcctggtgtccactcagctggggacagcagcctcaccaacacagcaccaacagcttccaagatagtaacagatgtatgacctgccatattcagtaagaactgagattggaatatttaatgactccaattccagggtttcagaaccgcatcgcagcatctttcctgaaatgcactcagactncagccagcaaagacgtgcctgggccgcatcctgctggatatagacaatgataccgaggagcactgccctgtggaagaaagcccttttcccagccctccaccacttccaccctggcgagtggagcaggggcaggcgaacctctttctttgcagaccgaacagtgaaaagctttcagtggaggacaaaggaggggcttactgtgcgggaactggccttttgcacggcccaaggagaaccctgaggcccacaataaagctgaattgactgtgtcttgaagaagttggctttctttacatgggaaggaaatcatgcccaaaaaatccaaaaccaagaagtacctggagttgagagagtaatcctgttgaacgcgcttaagagcgtttgttctggctgttattcggcagaaccttaagcaactggaatgggtagaaccatgggtgactaactattaataaatgcgccattttgaagttgctactcctgtactgcagttcatctaggattaggggagctgcccttcaaattggagaacattgacacgtcgctggttcaagccctcaaaatcccggggggccggtttgcctcaacggggccatcccttatttggataaaatagcttttttttacagaagcccttacgggaagtttctttattttgtg

SEQ ID NO: 258979 - DNA, 725 bp, Homo Sapiens
cccgcggccgtggaaaagcgggggccatacatggtaacgcgcgcaccctccattcaagccaagctgcagaagcaccgggacctggccaaggccgttctgcggagaaaaggcatgctgggggcctcgccgaaccgcccagactcttcagggaaaaggtcagtgaagtttaacaagggctatactgctcttagccagagtccagatgaaaacctggtgtccctcgactctgacagtgatggggagctgggatccagatactcctccgggtattcatctgcagagcaggtgaaccaggatgtgagccggcagctgcttcaggatgggtatcacctggatgagattccagatgacgaggacttggacctcatcccccctaagcccatggcctcttcaacatgctcctgctgctggtgctgtcttggggactcttcttcctgtaccctccagtagacattaccctccaaggttgcacctgtctaactatgacagggatcatagcaggttgcttaatgatacaacaggatcctggcttccagaatccctggacctggggcatccccaactggaccaaccgtccgggtgacagtttcctgaggagagaggtgtatccaagcttaccccccagcaggagtggtaccatatggtgtttatgtactactctatagaactcttggcttgcacttctacagctctgtacatttataagaataaatgcaatcacacta

SEQ ID NO: 258980 - DNA, 426 bp, Homo Sapiens
  misc_feature (352)..(352): n is a, c, g, or t
attcggcacagcttagccagagtccagatgaaaacctggtgtccctcgactctgacagtgatggggagctgggatccagatactcctccgggtattcatctgcagagagttgaaccaggatgtgagccggcagctgcttcaggatgggtatcacctggatgagattccagatgacgaggacttggacctcatcccccctaagcccatggcctcttcaacatgctcctgctgctggtgctgtcttggggactcttcttcctgtaccctccagtagacattaccctccaaggtgggccctgctcaccatgaggcctacagagccctgttggccactcataagctcacacagtgncagtgagcactgaagtcactgacccttagaaagtgaacttgcaggttagccctttacctgttggtttcttcagg

SEQ ID NO: 258981 - DNA, 1219 bp, Homo Sapiens
  misc_feature (434)..(434): n is a, c, g, or t
  misc_feature (513)..(513): n is a, c, g, or t
  misc_feature (588)..(588): n is a, c, g, or t
  misc_feature (643)..(643): n is a, c, g, or t
  misc_feature (657)..(657): n is a, c, g, or t
  misc_feature (712)..(712): n is a, c, g, or t
  misc_feature (723)..(723): n is a, c, g, or t
  misc_feature (803)..(803): n is a, c, g, or t
  misc_feature (851)..(851): n is a, c, g, or t
  misc_feature (854)..(854): n is a, c, g, or t
  misc_feature (870)..(870): n is a, c, g, or t
  misc_feature (874)..(874): n is a, c, g, or t
  misc_feature (889)..(889): n is a, c, g, or t
  misc_feature (1045)..(1045): n is a, c, g, or t
  misc_feature (1049)..(1080): n is a, c, g, or t
  misc_feature (1117)..(1117): n is a, c, g, or t
  misc_feature (1163)..(1163): n is a, c, g, or t
  misc_feature (1200)..(1200): n is a, c, g, or t
  misc_feature (1216)..(1216): n is a, c, g, or t
ttttttgggacacagaatgtacttgcaactctgcttaagagttaaggcttacattacattcatcacactcatcacacataccagtgagagatgcatgtgaaacagctgaagctaaaatacactcctattctgtacacagccctggcatttattagtgcgtaagtctaatcaacaggctaaatcattgtcataaaatgatagaaaattttattttcaggcagtcatctttcaagtctatttgttgctaatttgctaaactgggattcactatgaaatctacagctgatgtctctgtctattgaagcaagcattatctttctattttcaaaagtaagctgtggcttgggcttgctgtcttcttcccagtaaggtcaggaggctgggcttgcttccacctgcgagtgtatcacaaaccaggcgcgcgcacccgagcnctccctccaccagggcggaaaccagagaacacaacccaaacaccgaaagtttctggtcgcaaactctactcatcttgcngtgtccagagacccggcactgggaacggcactggcttttgttccagggtcccccagctggcgaggtaaacgccanagcagtccttgatccccaaaggttgtgagagattctgtggcacgggaattttggngcctcccgaaaggngcccatttctccgcaatccatgcgcgtggggtgtacaaatacacgaaaagagganggggggtgggnaggcatgaaaccttcagtgcctcttaaattctcagtctcaggttcacaaagtgaatctcctcctccgtggaagggcgctnggggggcgggggctgggagagaaataggttggagaaagggaccggagntanagtcgagatgcgggancggncccgcctccggctanaatcagaaaaactacagtgtgtcagtggttttcggtttcctgtttgtaaagcgagaacctcccccgactcgaactgtcgttcttcctcaaaaccaaccgagacggccccttcttcgcgctcggggcaggctcagccgcagggggagcggagagganggannnnnnnnnnnnnnnnnnnnnnnnnnnnnnnnacagccgcgatgaagcgggcagggccacggggcgcanacccctctcagcccagcggccccgggggctgagctgggccgcgagnggacaaagcgctcccgctccttccacacggccacatncaaaagggaggacaangcg

SEQ ID NO: 258982 - DNA, 810 bp, Homo Sapiens
  misc_feature (4)..(4): n is a, c, g, or t
  misc_feature (8)..(8): n is a, c, g, or t
  misc_feature (11)..(12): n is a, c, g, or t
  misc_feature (15)..(16): n is a, c, g, or t
  misc_feature (29)..(29): n is a, c, g, or t
  misc_feature (33)..(33): n is a, c, g, or t
  misc_feature (36)..(36): n is a, c, g, or t
  misc_feature (43)..(43): n is a, c, g, or t
  misc_feature (46)..(46): n is a, c, g, or t
  misc_feature (49)..(49): n is a, c, g, or t
  misc_feature (53)..(98): n is a, c, g, or t
  misc_feature (112)..(112): n is a, c, g, or t
  misc_feature (124)..(124): n is a, c, g, or t
  misc_feature (128)..(128): n is a, c, g, or t
  misc_feature (148)..(149): n is a, c, g, or t
  misc_feature (152)..(152): n is a, c, g, or t
  misc_feature (328)..(328): n is a, c, g, or t
  misc_feature (361)..(361): n is a, c, g, or t
  misc_feature (391)..(392): n is a, c, g, or t
  misc_feature (394)..(394): n is a, c, g, or t
  misc_feature (396)..(399): n is a, c, g, or t
  misc_feature (401)..(402): n is a, c, g, or t
ggcngganaanngcnngaacccaggaagnggangtntcagttngcnganggtnnnnnnnnnnnnnnnnnnnnnnnnnnnnnnnnnnnnnnnnnnnnnnagaagaaacaaagnaaacaaagaganaaanagagagggagggagggaggnnggntaaggaaggatggaaagaaaggaagaaaggcaggcaaaagccccagacaggccaaaaccttcatccttcatgcacccaacctgtaccaaacaccagcatggcctggctgtgagtgcacagcagatggaggtttgctgggcagagacactgggctggcctagacactgcctttggtnataccctaaaccaaaggggccagtcccacagtnagaaggagaccactactactcctgctgccnncntnnnncnnccttgcctagtttacaagacaggaggaaagagagaaagcaaaaagttagaaaacaaaacaaaacagaagtaagataaatagccagaagaccttggcgaaaccacccggccctggtagttaaaaaaaagtaacaataataataatatcaacccctgaccgtaaactacttgtgttatctgtaaattccagacattgtatgaaaaagcattgcaaaactttctgctctgttagctgatgcgtgtagcccccagtcacgttccccgcttgcttgagatatcatgaccctttcacgtggaccccttagagttgtaagcctttaaaaaggccaagaatttctttttcagggatctcagctattaagatgcaagtctgccaatgctcctggccaaataaacctcttccttcttt

SEQ ID NO: 258983 - DNA, 1062 bp, Homo Sapiens
  misc_feature (12)..(12): n is a, c, g, or t
  misc_feature (15)..(15): n is a, c, g, or t
  misc_feature (22)..(22): n is a, c, g, or t
  misc_feature (32)..(32): n is a, c, g, or t
  misc_feature (50)..(51): n is a, c, g, or t
  misc_feature (62)..(62): n is a, c, g, or t
  misc_feature (105)..(105): n is a, c, g, or t
  misc_feature (109)..(109): n is a, c, g, or t
  misc_feature (129)..(129): n is a, c, g, or t
  misc_feature (645)..(645): n is a, c, g, or t
  misc_feature (651)..(651): n is a, c, g, or t
  misc_feature (784)..(784): n is a, c, g, or t
  misc_feature (799)..(799): n is a, c, g, or t
  misc_feature (801)..(801): n is a, c, g, or t
  misc_feature (803)..(803): n is a, c, g, or t
  misc_feature (806)..(806): n is a, c, g, or t
  misc_feature (809)..(809): n is a, c, g, or t
  misc_feature (818)..(818): n is a, c, g, or t
  misc_feature (820)..(820): n is a, c, g, or t
  misc_feature (835)..(835): n is a, c, g, or t
  misc_feature (837)..(837): n is a, c, g, or t
  misc_feature (842)..(842): n is a, c, g, or t
  misc_feature (855)..(856): n is a, c, g, or t
  misc_feature (858)..(858): n is a, c, g, or t
aggagatttcangcnccttcangagcgtggcntgcttatataaatgctgnncatctatagangaaactacactctgagagttgattgtaccaccgctgatgtacngctngtacacaacctaacaaaagngctgaaagccctgatgaaggctttgaaggcaaatctctttatgaaagtggactaaaaaaagtccttccccagagttcagtggcatgcccaggataagcaaattgggatctggaaatgattttgaggtgttcttccaacgacttggaattgcttcaggcagagcacggtatactaaaaattgggaaacaaacaaattcagcggctatccactgtatcacagtgtctatgaaacatatgagttggtggaaaagttttatgatccaatgtttaaatatcacctcactgtggcccaggttcgaggagggatggtgtttgagctagccaattccatagtgctcccttttgattgtcgagattatgctgtagttttaagaaagtatgctgacaaaatctacagtatttctatgaaacatccacaggaaatgaagacatacagtgtatcatttgattcacttttttctgcagtaaagaattttacagaaattgcttccaagttcagtgagagaccccagcacnttcacnaaagcaacccaatagtattaagaatgatgaatgatcaactcatgtttctggaaagagcatttattgatccattagggttaccagacaggcctttttataggcatgtcatctatgctccaagcagccacaacangtatgcgggggagtnantnccnggnatttgtgangntctgtttgatattgnangctangtggttccttccnngncctggggagaagtgaagagacagatttatgttgcagccttcacagtgcaggcagctgcagagactttgagtgaagtagcctaagaggattctttagagaatccgtattgaatttgtgtggtatgtcactcagaaagaatcgtaatgggtatattgataaattttaaaattggtatatttgaaataaagttgaatattatatatt

SEQ ID NO: 258984 - DNA, 916 bp, Homo Sapiens
  misc_feature (882)..(882): n is a, c, g, or t
aatttggtcttcttggttctactgagtgggcagaggagaattcaagactccttcaagagcgtggcgtggcttatattaatgctgactcatctatagaaggaaactacactctgagagttgattgtacaccgctgatgtacagcttggtacacaacctaacaaaagagctgaaaagccctgatgaaggctttgaaggcaaatctctttatgaaagttggactaaaaaaagtccttccccagagttcagtggcatgcccaggataagcaaattgggatctggaaatgattttgaggtgttcttccaacgacttggaattgcttcaggcagagcacggtatactaaaaattgggaaacaaacaaattcagcggctatccactgtatcacagtgtctatgaaacatatgagttggtggaaaagttttatgatccaatgtttaaatatcacctcactgtggcccaggttcgaggagggatggtgtttgagctagccaattccatagtgctcccttttgattgtcgagattatgctgtagttttaagaaagtatgctgacaaaatctacagtatttctatgaaacatccacaggaaatgaagacatacagtgtatcatttgattcacttttttctgcagtaaagaattttacagaaattgcttccaagttcagtgagagactccaggactttgacaaaagcaacccaatagtattaagaatgatgaatgatcaactcatgtttctggaaagagcatttattgatccattaaggttaccagacaggcctttttataggcatgtcatctatgctccaagcagccacaacaagtaatgcagggggagtcattcccaggaatttatgatgctctggtttgatattgaaagcnagtgggacccttccaaggcctggggagaagtgaa

SEQ ID NO: 258985 - DNA, 663 bp, Homo Sapiens
ggctcctcacccaacactcaagcccgtgctttccggttttacgaccaaggggccccggggaagaaggaccccacaagtgaagcgctcgtggttggcatcggtggccaaggtgccaggtttcgcggtggctcagtgcataacgagcccaggctccccgtccctgtcttcacagtccccaccctccgccagcgggagccccagcggcagcgggagcaccagccactgcgactctggaggcaccagctcgtcctccaccccctccacagcccagagtccagcaggtattggccacgtgactcagtgatatggggacatttggagaaccccgtgatccctcaccattaccaaaacccctgacctccaggtcctccttgtcacagcacttgaaggatgctgccgctcaggtgatctgcacatgaagcctctagagattcctctaacttgatgttccctcccaggctgggtcagctcccagatggggaagaattgctcctttttcaggccggtccccaccgaagctgtcactgactgcagagctgatgggcagcaggcgggctgcacctaaacccaccctatcatcacctccacagtcttaggtgtcacaaggaggggtcccccaaggggattgtttgcagtctaggaaaagaatcgcgttcctgctga

SEQ ID NO: 258986 - DNA, 855 bp, Homo Sapiens
  misc_feature (92)..(92): n is a, c, g, or t
  misc_feature (118)..(118): n is a, c, g, or t
  misc_feature (170)..(170): n is a, c, g, or t
  misc_feature (173)..(173): n is a, c, g, or t
  misc_feature (192)..(192): n is a, c, g, or t
  misc_feature (210)..(210): n is a, c, g, or t
  misc_feature (225)..(225): n is a, c, g, or t
  misc_feature (258)..(258): n is a, c, g, or t
  misc_feature (264)..(264): n is a, c, g, or t
  misc_feature (266)..(266): n is a, c, g, or t
  misc_feature (268)..(268): n is a, c, g, or t
  misc_feature (288)..(288): n is a, c, g, or t
  misc_feature (310)..(310): n is a, c, g, or t
  misc_feature (313)..(314): n is a, c, g, or t
  misc_feature (318)..(318): n is a, c, g, or t
  misc_feature (338)..(338): n is a, c, g, or t
  misc_feature (464)..(464): n is a, c, g, or t
  misc_feature (469)..(469): n is a, c, g, or t
  misc_feature (792)..(792): n is a, c, g, or t
  misc_feature (807)..(807): n is a, c, g, or t
  misc_feature (850)..(850): n is a, c, g, or t
taaaaacagtctctgcctcccccagataatttagggaaaagcactttattaaccacaaagcactataaagatgggcagtattactagcaggnaattcacaagtaatggggaagacagngataaaaacaaccaagtgtaccacctggcagaatgaaatatactaaaaaggngtncctactattcactgcaggnataaagaggaaacagggntggattctgcctggnggcatcagcgtaaatttcacagagggggcagcntctganangngccttgaaggatgagaaggnctttgacagctagggcttcggnggnngggnactccaggccgagggcgcanatgggcaaaagcctcgaggtggaacactgcagggggtccgggaagagaagcacaatccggggctgcatgtggcctagtctcatggaggggtggaggaggaagtcaggctggcctagcacaggaganggggnggagccagtggccgtggctggagttaaggcggacctctgccttaactggccggcacttggaacggtgagagaagggccgggctgcccatgcatcccagttatccgtttctggtttctcattcgtgctggtgtggccacgtggagctgaagtcggcccagttattaggggtcgtggagggctctgaagaggttactgccaaaggggcgggggtctcacgcaaggccagtttgggggcaggggcagatgttgaatcagtcactggtttcactggagcgggaacctcattttctgggattttctctgcatagtttgcagggaacancctgtctttcttttnattctctccaagccagccgggttctccagtttggctttcatcnacatg

SEQ ID NO: 258987 - DNA, 1041 bp, Homo Sapiens
  misc_feature (8)..(8): n is a, c, g, or t
  misc_feature (16)..(16): n is a, c, g, or t
  misc_feature (18)..(18): n is a, c, g, or t
  misc_feature (23)..(23): n is a, c, g, or t
  misc_feature (35)..(35): n is a, c, g, or t
  misc_feature (44)..(45): n is a, c, g, or t
  misc_feature (51)..(51): n is a, c, g, or t
  misc_feature (59)..(59): n is a, c, g, or t
  misc_feature (66)..(66): n is a, c, g, or t
  misc_feature (71)..(71): n is a, c, g, or t
  misc_feature (75)..(75): n is a, c, g, or t
  misc_feature (80)..(80): n is a, c, g, or t
  misc_feature (86)..(86): n is a, c, g, or t
  misc_feature (97)..(98): n is a, c, g, or t
  misc_feature (118)..(118): n is a, c, g, or t
  misc_feature (121)..(121): n is a, c, g, or t
  misc_feature (126)..(126): n is a, c, g, or t
  misc_feature (143)..(144): n is a, c, g, or t
  misc_feature (146)..(147): n is a, c, g, or t
  misc_feature (154)..(154): n is a, c, g, or t
  misc_feature (161)..(161): n is a, c, g, or t
  misc_feature (191)..(193): n is a, c, g, or t
  misc_feature (436)..(436): n is a, c, g, or t
  misc_feature (702)..(702): n is a, c, g, or t
  misc_feature (720)..(720): n is a, c, g, or t
  misc_feature (727)..(728): n is a, c, g, or t
  misc_feature (763)..(763): n is a, c, g, or t
  misc_feature (852)..(852): n is a, c, g, or t
  misc_feature (927)..(927): n is a, c, g, or t
  misc_feature (960)..(960): n is a, c, g, or t
  misc_feature (1004)..(1004): n is a, c, g, or t
  misc_feature (1008)..(1008): n is a, c, g, or t
  misc_feature (1014)..(1014): n is a, c, g, or t
  misc_feature (1032)..(1032): n is a, c, g, or t
tttatatnccgggggnangtatntcccctcctctntaattgtgnnggcgtncaaatctncccctangcttnacanatctngtaatntcctaagtttnnaataccaggcctccctgtgnggngatgnttcctatattcaaagtnncnncaaacancttactncaaaattcagtgacatacattataacattnnnccaagtgaatgcctgactgtgatgtcaaaatgtattggaaagtaatttgcatatatctttaattatttctgtggagtttgtgattattttatcagaaataattttaatgtgtgtatacttaaaaacttgacacgggttgtacagaaactggtatttttggtgctgatacaagagaaatgtatttttaaatatcccacatcctggatctgtgtggggtatttagtatattgacatatatttttnataaggtgaggtaactcagatacttaatttaaaagtctctaaatattcttgatatcaatacagctgtcttctctaccttaccatagccagttgcatttcattttaaaccagagcaagtaacaaattagtgacttgaatcttcataagttaaagtaaaaaacagcaaaaaacctagatctttgtcttttagaacacagaccattttcaggaaagcagttagctaagtgtttaattcatgaatattgtatactgcatcccctaccacnacatacacaacccagcanataaacnnacctcaccctggtcaacctacatgatccttaagcnaatggcgaatcacgatgaccttgtagacatgcacacaactatacctttgtccaacagatcataatatatctgctatccaactggttttncctgcctaaccctactgatttgggcactgcttgtatagtctctcaagttcacaggaaatgttgattttctaaggncctcatttttacagagtatacaggcaaagtgancgggggaaaaggaattagtctaagagtaaggggatgattattantacntcgagnctaaaaacacaaagtggntcaggcttt

SEQ ID NO: 258988 - DNA, 1259 bp, Homo Sapiens
tcggctgtggttgtaggaaccaccctacagcctagaagactttattaagatcttattgcttatgcagttaaagagacactgattgagctacaggtttcctgtacctggtctcaggtcactctgtgcagagcttccccaggctgttgggagctgggagactgctaggcaggggcaggccccagagtgggaagcatggtacctcctaggagcctcagagtgggtagcgggcttcaagacagccctcagggtgaacagagaggtcaggagtgtcggcttaagccagggcccaggggctacattccctgagatgagtcaagcccagccctctctggggtttccagaacaaaggctaggtgtggggagcagcactgtaggagagggcagggagcatgtctctaggcattgctggaactggaggagactgtcagagtggtttgggtaatggttgtataatctgtggcaactgggccttcttgcatgaaagtggaagggtgaggatcccttatggaagagtcatgcaccatggctgggctggactagccagctccagtggctctgctgggtgactaaagtaggcaaggaaagccacttgttgcccacaccccactttcatcaactctgttcatgcaggacaaagcagggagctgcccaacaaggatggggttatttctcaggcctaggtattgatgttaccttaattctttagtctggaagaacttggttgggggtgggggatggtaagcatttccttaaccaaacccacacttcacatctcctaggggtaccccttcatccaccaacctccagagaataacctggctgccctcacttctccagcttttctcacaaggcacttgttacagggctgctgatgggagagggaggaaggcctgggagggggatctggtggtggcgcccaatctacagggtccggaatcagggtggaagttgtcagggactagcggctgccatagtacaggcgcatggccaggccaatgagcaatgtggccaggaagaaggcggctgtgagctgcagccgtagcaggactgctgagagcacggcgttgaccaccagcgagcaggacaccacaaagaggcgtgtgatgctgctgccatgcttcatgacagcagacatgagcagtccatttagtgcctggctcagcaccacgagtgctgcccatcctgagaaaccttccaggaggcctgggccagagccgccgccagcatgcagacctagattcagaagcacaccaaaagtg

SEQ ID NO: 258989 - DNA, 971 bp, Homo Sapiens
aggtagcgaggcctgggtggcgaattcggcacgagggaagagtgtggcctggaaccccagccccgctgtctgcctggtggctgcagccgtggaggactcggtgctgctgctgaacccagctctgggggaccggctggtggcgggcagcacagatcagctgttgagcgccttcgtcccgcctgaggagccccccttgcagccggcccgctggctggaggcctcagaggaggagcgccaagtgggcctgcggctgcgcatctgccacgggaagccagtgacgcaggtgacctggcacgggcgtggggactacctggccgtggtgctggccacccaaggccacacccaggtgctgattcaccagctgagccgtcgccgcagccagagtccgttccgccgcagccacggacaggtgcagcgagtggccttccaccctgcccggcccttcctgttggtggcgtcccagcgcagcgtccgcctctaccacctgctgcgccaggagctcaccaagaagctgatgcccaactgcaagtgggtgtccaacctggcggtgcaccctgcaggtgacaacgtcatctgtgggagctacgatagcaagctggtgtggtttgacctggatctttccaccaagccatacaggatgctgagacaccacaagaaggctctgcgggctgtggccttccacccgcggtacccactctttgcgtcaggctcggacgacggcagtgtcatcgcctgccatggcatggtggtacaatgaccttctgcaaaaccccttgctggtgcccgtcaaggtgctgaagggacacgtgctgacccgagatctgggagtgctggacgtcatcttccaccccacccagccgtgggtcttctcctcgggggcagacgggactgtccgcctcttcacctagctgttctgcctgcctggggctggggtggtcgtgctgaagtcaacagagcctttaccctgtgcc

SEQ ID NO: 258990 - DNA, 1345 bp, Homo Sapiens
  misc_feature (298)..(582): n is a, c, g, or t
  misc_feature (896)..(896): n is a, c, g, or t
  misc_feature (923)..(923): n is a, c, g, or t
  misc_feature (958)..(958): n is a, c, g, or t
  misc_feature (966)..(966): n is a, c, g, or t
  misc_feature (985)..(1014): n is a, c, g, or t
  misc_feature (1048)..(1048): n is a, c, g, or t
  misc_feature (1076)..(1076): n is a, c, g, or t
  misc_feature (1079)..(1081): n is a, c, g, or t
  misc_feature (1090)..(1092): n is a, c, g, or t
  misc_feature (1095)..(1095): n is a, c, g, or t
  misc_feature (1118)..(1118): n is a, c, g, or t
  misc_feature (1143)..(1155): n is a, c, g, or t
tctacacagtcgccatcttggtgactttgaatttatctggctcctgggcaggtcttctcctcctgtccatccctattccctcctctgaaatgcacccctttgtaattgaggacaaggtggttctgtggccttttccctctttgctggcacgttctgcttctcaccctctggtgactctgtgagctgggaaatgagggactggaagtgaggcctgtgttgacccttcctgaaaatcctctagcagcccccgacttcagcagtttctttctttgtttttttgagatggagtttcgctctnnnnnnnnnnnnnnnnnnnnnnnnnnnnnnnnnnnnnnnnnnnnnnnnnnnnnnnnnnnnnnnnnnnnnnnnnnnnnnnnnnnnnnnnnnnnnnnnnnnnnnnnnnnnnnnnnnnnnnnnnnnnnnnnnnnnnnnnnnnnnnnnnnnnnnnnnnnnnnnnnnnnnnnnnnnnnnnnnnnnnnnnnnnnnnnnnnnnnnnnnnnnnnnnnnnnnnnnnnnnnnnnnnnnnnnnnnnnnnnnnnnnnnnnnnnnnnnnnnnnnnnnnnnnnnnnnnnnnnnnnnnnncttcagtttcttcctaggccgttctgtcacccaaatagctgctacccagaggggcggggttgacctaggctgaatatccactttgtttttatggatggctcccttcccccattcgccttcccagaatatccttcaagttccacttcccagggagctctgggggaggggcggccattctggctccgtccccagtggccaccttggaaacatcggctggctttggggactattccacctccttcccctgagcccagatctgcccccaccatcctttctctggcttcttttagcaagttatcaactaatcactaacnccttccttttcctctgcatgccagccngaaaattccaaatctagcctctgaatgtcttggcnccatctcntcagacccctttgcctttnnnnnnnnnnnnnnnnnnnnnnnnnnnnnncccataatgcccacagaatgtcaaatgaggggcntcctgcctcctgctctgaatattctgtngcnnncgaggcatnnnaancctttgtcctccagcatcccttnacttcctcatcctctctaacctccnnnnnnnnnnnnnaatgctgcagcctccacactccacccacaggtggacccttccctttttctctagctggatctgtgtttccttcttcgggccacccatgttttcctgcacccgccctaccatggtctctctctgcagttatttaatgcctgtgtcagatctactgtaaataagaggattaagtaaaataaaatgagagggg

SEQ ID NO: 258991 - DNA, 522 bp, Homo Sapiens
  misc_feature (342)..(342): n is a, c, g, or t
agctcatgtacactatgagagggttcaggggtgggtcatttaaataatgaattggctaatgtggattttaaatttcatatcatgatataagcactgcaatggaaatgtttttactaaaacattatatttttgtggtactagaatttcctgaggtgaaaaaccgatattgaagattcatttttcttttttccattcttcaggaccttcggcaaggtgagtcaaggctctctacctacctagatgtttttcagaggcctacaaatacaagtatctttcttatatgcacattctaataaatgatgaaattcagtccaacatgcttattataaacatagcaattcnttgctctatcaaatttagcttatattgccaaatattaaatatggtttatttaggtaagcataaaaacataggggctatcatttttaaagacttgattttctctattgtggtaaaatatataaatacatatttgccattttaaacatttaccattttaaccatttttaagtgtacagttct

SEQ ID NO: 258992 - DNA, 387 bp, Homo Sapiens
  misc_feature (45)..(45): n is a, c, g, or t
  misc_feature (49)..(49): n is a, c, g, or t
  misc_feature (52)..(53): n is a, c, g, or t
  misc_feature (60)..(60): n is a, c, g, or t
  misc_feature (68)..(139): n is a, c, g, or t
cacgcacatctacagcaacaagggcttctattccatctacaactnggancannggaaaanggagatgnnnnnnnnnnnnnnnnnnnnnnnnnnnnnnnnnnnnnnnnnnnnnnnnnnnnnnnnnnnnnnnnnnnnnnnntcccaccacagggagatctatgtgccaagcataatggaagaatgtgctccccaaacagatggttttgcacaggctaatgttctgctggttttccttagagacctattttgaaaaagtttaaaaagacaggagatttcaaaataattcaatcctggcagaaattcaaactccaaaactaggagcaaaatcatccttcactgaattaattccttttctctttctcttttcttaaaccttttattcctttt

SEQ ID NO: 258993 - DNA, 1894 bp, Homo Sapiens
  misc_feature (74)..(74): n is a, c, g, or t
  misc_feature (95)..(124): n is a, c, g, or t
  misc_feature (137)..(147): n is a, c, g, or t
  misc_feature (172)..(172): n is a, c, g, or t
  misc_feature (177)..(177): n is a, c, g, or t
  misc_feature (193)..(193): n is a, c, g, or t
  misc_feature (198)..(257): n is a, c, g, or t
  misc_feature (259)..(259): n is a, c, g, or t
  misc_feature (264)..(264): n is a, c, g, or t
  misc_feature (273)..(273): n is a, c, g, or t
  misc_feature (275)..(275): n is a, c, g, or t
  misc_feature (283)..(284): n is a, c, g, or t
  misc_feature (287)..(287): n is a, c, g, or t
  misc_feature (290)..(290): n is a, c, g, or t
  misc_feature (292)..(292): n is a, c, g, or t
  misc_feature (294)..(297): n is a, c, g, or t
  misc_feature (299)..(310): n is a, c, g, or t
  misc_feature (312)..(312): n is a, c, g, or t
  misc_feature (314)..(316): n is a, c, g, or t
  misc_feature (320)..(349): n is a, c, g, or t
  misc_feature (1128)..(1140): n is a, c, g, or t
  misc_feature (1693)..(1726): n is a, c, g, or t
caaatgggacgggagtgtgtcgcggggcgggtgatcaagagaagacgcaaattcaaaccggccgccaggagganccgggcggcaaggagggaaannnnnnnnnnnnnnnnnnnnnnnnnnnnnnacccggtggagcnnnnnnnnnnngaccagcccccggccccaaaacacncacancaggacacccacccancatcnnnnnnnnnnnnnnnnnnnnnnnnnnnnnnnnnnnnnnnnnnnnnnnnnnnnnnnnnnnncnaaaanaaagccaananacaaaaanncanaananannnnannnnnnnnnnnncncnnncatnnnnnnnnnnnnnnnnnnnnnnnnnnnnnncccctccccccaaacaacaaaattcagagtatgtcaaaggaaaaaggtttgttattgtattgatcaaaacccagtggaatcaacaccatctatcttagcttagcaggtatgctgttttgatcttgagtctatattaatggaatctattgttgcattctgaaataaagaattttggatataccattatgttttaaagtcctagaaacaatttcgaaaagcattattttgttttgttttctgggatgggagaggagagaatctacagatttgcgtttagttaaaaatcaaaactccagcataggaaataggcagttcacatagccggtcaacatgtgaggtatcatcagtgtgagacaaggtcccggtctgttcctattggcctagctgacgctaacaaaatgggaggcttatggctctgcacagcaaattccagcaggacaagatgactttaagcccgtattcagagccctagaagcagggcactactgagtatgtaatatttagaggtgaaaatagtgcaagagcccctgatggtgcccctctacctgctttgtccatgcagcctgatcataactgccttccacaaaggagcagaaaaacagcttttctagatcagtacactaaacccagccaagaatctgcaaaaatgctactacaccgcttcacaagcaacacagtcccttcactactcattgggttgcacgatgtctctcttctaccctgttatggcctgtggacacatactcactaggcatcattgttggttttaaaccagggannnnnnnnnnnnnaatctcaaaaaacctagtaataacaaggcaatcagtggttaaactgaactttacatatagggggcagtttggaaaacacataccacaagcatttctcaagtcgaaaatatgtgaatttgctgctgctcctttgacggttcctgaaaattcagagtacaagtcctaaaataaaaattttaagctaccagcattctctgatactagacagaaaatcagagtaacgctacagcccacaattctacagggtgtaaaaagtacgctcactgcctggacatctttattgatggcctggagtcctcccttttagaagacaagtttctgggataaccacttagcttcattggttagggaagagaagaattcgactctcaggtaagttgagaagagactcctcttaaaatgccatttctccactaatttatcaaaataaaaacaaaacaaaaggctcttggctactttgcctagtattagatagggttttgaagaaactaacatgaacaccctttcatcagtaaagactaaaaaccacctggaatatatatatcactgctgnnnnnnnnnnnnnnnnnnnnnnnnnnnnnnnnnnatctaaaagtgcccaggtgggcttaaggctgccagactgcacgcacatctacagcaacaagggcttctattccatctacaacttggatcgggggaaaagggagatgtaggagaggaaggaaaaaagaggggaaaaatataccaccaaccctcccccacaaaaaaaggg

SEQ ID NO: 258994 - DNA, 1393 bp, Homo Sapiens
  misc_feature (750)..(797): n is a, c, g, or t
  misc_feature (846)..(863): n is a, c, g, or t
  misc_feature (1120)..(1129): n is a, c, g, or t
atgagcaccacaactggcctgaaattcttaaaggatgggagtgtcgatgacagcaccttggcatcgttgtgcctaacctgggagacggaagaagcacgccatgggaagtgtttacacttggggacaagtgctaagtattgtggagcccatagccccttgagatagatggctactttgcctttcttcttgaactgtcttgcagaatgtggatttggggtaagtggtcttgaaggattcatttagtcaccctcaaattaagatttttacttcatctttcttgggcctgcacctccaagataacaaagaagaagcaatggtcgtgccaaagaggtccacaaccaggtgtgcactgttcactgcagcccatttgctgtatgaactgtggttgttgtgtgcccaatgacaaggctactaagaaattcatcatttgaaacgtagaggccgcagcagtcagcgatgtttctgaaatgagcatccttgacgcctgtgtacttcccaggctggatgtgaagctacattaccatgtgagttgtgccattcacagcacagtggtgaggaattgagctcatgaagcaggcaaggaccgaacacctccaccccaacgtagacctgcaggtgctgccccatgacctccaccaaagcccatataaggagcggagttgttaaggactgaagaaacaacttctccggagaaaaacaaaattgcaattctactcaaaaacgacaccccccttctaggcgaactcaacnnnnnnnnnnnnnnnnnnnnnnnnnnnnnnnnnnnnnnnnnnnnnnnnaccgcctacccgtatagtggaacaaaaccaaccaatcgcgcttgtgctnnnnnnnnnnnnnnnnnnaaaaattcttttcttaaccccttttgtctggggggccggccggccccccgggcgcggtaatttacacccttgcggtaccaaccccttgtgtttccctaacgacaaaacccttctgcccccgcgagaacaagggggcccctggtgtccccctctcccccttgtaaaataaacaactcgcccgcgcgttgtggttaccccccgcagtttcttctttttacaccccatctttctacacacgcctattcctctttaggggnnnnnnnnnngcggggccccccttcccgcacgggggcgggcccgcagaaccgggaggccccgcggacccgtcaaaaattacaaccgcccccggccgctggtgtcccacaccagcgaagatttatgctttgtgcgccccgtctcttcataacattttctcgctcgcacacatatctgtggaaccattctctccccacccaccggggggtttggcgcagaatcaccccccacgatttccgccccgcggtcgatcaccaccccacacttctctcgcc

SEQ ID NO: 258995 - DNA, 1031 bp, Homo Sapiens
  misc_feature (11)..(11): n is a, c, g, or t
  misc_feature (20)..(20): n is a, c, g, or t
  misc_feature (22)..(22): n is a, c, g, or t
  misc_feature (45)..(45): n is a, c, g, or t
  misc_feature (54)..(54): n is a, c, g, or t
  misc_feature (60)..(60): n is a, c, g, or t
  misc_feature (66)..(66): n is a, c, g, or t
  misc_feature (70)..(70): n is a, c, g, or t
  misc_feature (80)..(80): n is a, c, g, or t
  misc_feature (85)..(85): n is a, c, g, or t
  misc_feature (87)..(87): n is a, c, g, or t
  misc_feature (89)..(89): n is a, c, g, or t
  misc_feature (99)..(99): n is a, c, g, or t
  misc_feature (104)..(104): n is a, c, g, or t
  misc_feature (109)..(109): n is a, c, g, or t
  misc_feature (191)..(191): n is a, c, g, or t
  misc_feature (204)..(204): n is a, c, g, or t
  misc_feature (308)..(308): n is a, c, g, or t
  misc_feature (369)..(369): n is a, c, g, or t
  misc_feature (374)..(374): n is a, c, g, or t
  misc_feature (384)..(384): n is a, c, g, or t
  misc_feature (387)..(387): n is a, c, g, or t
  misc_feature (393)..(393): n is a, c, g, or t
  misc_feature (396)..(396): n is a, c, g, or t
  misc_feature (399)..(399): n is a, c, g, or t
  misc_feature (418)..(418): n is a, c, g, or t
  misc_feature (423)..(424): n is a, c, g, or t
  misc_feature (429)..(429): n is a, c, g, or t
  misc_feature (431)..(432): n is a, c, g, or t
  misc_feature (437)..(437): n is a, c, g, or t
  misc_feature (440)..(440): n is a, c, g, or t
  misc_feature (447)..(447): n is a, c, g, or t
  misc_feature (453)..(453): n is a, c, g, or t
  misc_feature (456)..(457): n is a, c, g, or t
  misc_feature (471)..(471): n is a, c, g, or t
  misc_feature (536)..(536): n is a, c, g, or t
  misc_feature (558)..(558): n is a, c, g, or t
  misc_feature (568)..(568): n is a, c, g, or t
  misc_feature (577)..(577): n is a, c, g, or t
  misc_feature (580)..(580): n is a, c, g, or t
  misc_feature (582)..(582): n is a, c, g, or t
  misc_feature (586)..(586): n is a, c, g, or t
  misc_feature (594)..(594): n is a, c, g, or t
  misc_feature (599)..(599): n is a, c, g, or t
  misc_feature (609)..(609): n is a, c, g, or t
  misc_feature (615)..(615): n is a, c, g, or t
  misc_feature (624)..(625): n is a, c, g, or t
  misc_feature (635)..(636): n is a, c, g, or t
  misc_feature (639)..(639): n is a, c, g, or t
  misc_feature (643)..(644): n is a, c, g, or t
  misc_feature (658)..(658): n is a, c, g, or t
  misc_feature (660)..(661): n is a, c, g, or t
  misc_feature (663)..(664): n is a, c, g, or t
  misc_feature (667)..(667): n is a, c, g, or t
  misc_feature (675)..(675): n is a, c, g, or t
  misc_feature (686)..(686): n is a, c, g, or t
  misc_feature (694)..(694): n is a, c, g, or t
  misc_feature (699)..(699): n is a, c, g, or t
  misc_feature (701)..(701): n is a, c, g, or t
  misc_feature (718)..(718): n is a, c, g, or t
  misc_feature (721)..(721): n is a, c, g, or t
  misc_feature (723)..(723): n is a, c, g, or t
  misc_feature (725)..(725): n is a, c, g, or t
  misc_feature (727)..(727): n is a, c, g, or t
  misc_feature (729)..(729): n is a, c, g, or t
  misc_feature (744)..(744): n is a, c, g, or t
  misc_feature (747)..(747): n is a, c, g, or t
  misc_feature (750)..(750): n is a, c, g, or t
  misc_feature (762)..(762): n is a, c, g, or t
  misc_feature (783)..(783): n is a, c, g, or t
  misc_feature (786)..(786): n is a, c, g, or t
  misc_feature (789)..(807): n is a, c, g, or t
gttatctacantcgtgcacncncaacagatagactatctcgtaantcatagaanaaagantgttgnccantaaatctttnggccncntntaccccatgngcccnatgtntcccaggcccccatggacctcctgggcctccagggcctggaactccaattggaccatacaaccctgcaccttataatcctgnaccaccatgcccngctcctcatggtcctccagccccttttgctccccagttcttttgttttgcttctctctcatttttgcagcagcatgctcctccttttccttctatttttttgtntcttatcctatatttcatcatcttgtgtttcttatttctctctcttttttctttcagcaancacanccaccaccancancccctncangtncaccaactacaactcaaantaatnnacaangnnatccncanaatcccnccccanctnnacaggtttattatnccaaggcttgggaagagtactacaagaaaatgggtcaggcagttcctgctccgactggggctccnccaggtggtcagccattttttntttcaccctnggctgagtnttntntacnacaattcntcctntttttcccanacaatnccccatgtnnttccacagcnnccncctnncccccccgggcccntnntnngangtggcccntacagtatttncttcattnttttngngaaataaatatcctttnttnantntntngatgcagacgacttnatnaanatcttaattttntttttggtttataaattattnttnccnnnnnnnnnnnnnnnnnnngaaaatgtacaaaatatctatcactactgataggaggttaatatttctgtgtagaaatgaaaattggtttgtttttagtatttagtgtagatgtacacattccagcaaatgtatttgcaattatgtggttgatgctttgtgatataaatgtactttttcaatgtatactttcacttttaaaatgcctgttttgtgctttacaataaatgatatgaaacctcctg

SEQ ID NO: 258996 - DNA, 877 bp, Homo Sapiens
gcggcgagccagcggcagcggcggcggcgatgagacagaagcactaccttgaggctgcagcgcggggactgcacaacagctgcccgggccaagcccgctacctcctctgggcctacacttcgtcgcacgatgataagagcacttttgaagaaacgtgtccatactgtttccagctgttggttctggataactctcgagtgcgtctcaaacccaaagccaggttgacacccaaaatacagaaacttcttaatcgagaagcgagaaactatacactcagttttaaagaagcaaaaatggtgaaaaagttcaaagactccaaaagtgtattgttgatcacttgtaaaacatgcaacagaacagtgaaacatcatggtaaaagtagaagctttgtgtcaacattgaagagcaatcctgccactcctacaagtaaactcagcctgaagacaccagagagaaggactgcaaacccaaatcatgacatgtctggctcgaaaggcaagagcccagcatcggttttcagaacacctacatctggacagtcagtatctacttgctcctcaaagaacaccagcaaaacaaagaaacacttctctcaactaaaaatgttacttagtcagaatgaatcccaaaagattccaaaggtggacttcagaaatttcttatcttctctgaagggtggacttttaaaataagaaatgcctgatgtcaattctgaaactaaagttggtaaaacaactttttaaactcttattcattttttgaatacatggaaactagatctgaatgcaaacttttcttggcatccttcagtgtttatggggaaaatacctcattagtgtgaatacctgaaacctgcctacctcataggacagctgtg

SEQ ID NO: 258997 - DNA, 1376 bp, Homo Sapiens
  misc_feature (61)..(61): n is a, c, g, or t
  misc_feature (187)..(187): n is a, c, g, or t
  misc_feature (191)..(191): n is a, c, g, or t
tgaagaaagatctagctcagcattggagcattgctgaaattgttggaattccacagcaatnatccaaaccacagcgttagaaacagactttgcaggatgaatattcgagtatggatacacagtatcctggcagcctgcctccagaactccgggtgaactcagatgagcctccagggtcccctgagtnagtnggacgtgttgctcaattccatctagagcctgaaactcaaaatccagagacccttgaagatatccagtcctcttcactccaggaagaagccccagagcagcttccacacctccttcttcaacccagcaggaggccccagctctgcctccagagtcctctatggagagtctagctcaaactctaccaaatcatgaggtgacagtacaacctccaggtgaggatcaagctcattataacttgcccaacattacagttaaacctgcagatgtggaggttaccataacttcggagcctaccaatgagaaagaatcttcccaagcccagcaggaggctccagtacagtttccagaggaggtggaaccttctgcaacccaacagtaggccccaaccgagcctccatgtcatcctacagagcgtgaactttccattagtgagcaggagcagccagctcagccttctgagtcttctggggaggttgaatcttctcagactcggcaggagaccccagctcagcctccagaagagatggaacctcctgcaaaccaagaggaggccccaactgagcctccaggtcctcctgtagagcctgaactttcccccagtgagcaggagcagccagctcagccttctggggaggttgaatcttctccagcccagcaggagaccccagctcagcctccagaacatcatgaagtcaccgtttcgcctccaggtcaccatcaaactcagcattcagatttgcccaatgtctctgttaagcctccagacatgcagctcaccatagcaacagagcctagtgcagaggtgggaacttctccagtccaccaggaggctacagctcagctctcaggaccaggtaatgatgtagaacctcccactatccagcacgggggcccacctcttcctccagagtcaccggaagatgctggactttagatagccgacatgtttgaagcagccctggctcacaccgaggcctgaggcctccgtggagactgcgcatctgcccattggatgtaggagagcctcccagcacatgcagtgggcatgccctgcagagcgcatttttctcattccacagagcatcgatcttaagacagatcatcctgaactgcccttaaagctgagggcaatctgtccatccactcacacatcacttaagagacagaaagaaacttcattctct

SEQ ID NO: 258998 - DNA, 1224 bp, Homo Sapiens
  misc_feature (1017)..(1017): n is a, c, g, or t
  misc_feature (1035)..(1035): n is a, c, g, or t
  misc_feature (1063)..(1063): n is a, c, g, or t
  misc_feature (1075)..(1075): n is a, c, g, or t
  misc_feature (1091)..(1091): n is a, c, g, or t
  misc_feature (1115)..(1115): n is a, c, g, or t
  misc_feature (1117)..(1117): n is a, c, g, or t
  misc_feature (1125)..(1125): n is a, c, g, or t
  misc_feature (1142)..(1142): n is a, c, g, or t
  misc_feature (1145)..(1145): n is a, c, g, or t
  misc_feature (1152)..(1153): n is a, c, g, or t
  misc_feature (1179)..(1179): n is a, c, g, or t
  misc_feature (1201)..(1201): n is a, c, g, or t
  misc_feature (1205)..(1205): n is a, c, g, or t
gattgcgacaggccggcctggctcccagcgctccctgtccccgccccgcggccagctcgctccactcccacttcctgagctccgccgtgggagccctggaggcccggcctggccgctcccggccctggggtgcacatcggccctgagtcccgtcccaggctctgggctcgggcagccgccgccaccgctgcccaggacgtcgggcctcctgccttcctcccaggcccccacgttgctggccgcctggccgagtggccgccatgctcctgccttgggccacctctgcccccggcctggcctgggggcctctggtgctgggcctcttcgggctcctggcagcatcgcagccccaggcggtgcctccatatgcgtcggagaaccagacctgcagggaccaggaaaaggaatactatgagccccagcaccgcatctgctgctcccgctgcccgccaggcacctatgtctcagctaaatgtagccgcatccgggacacagtttgtgccacatgtgccgagaattcctacaacgagcactggaactacctgaccatctgccagctgtgccgcccctgtgacccagtgatgggcctcgaggagattgccccctgcacaagcaaacggaagacccagtgccgctgccaaccgggaaagttctgtgctgcctgggccctcgagtgtacacactgcgagctactttctgactgcccgcctggcactgaagcccgagctcaaagatgaagttgggaaagggtaacaaccactgcggtcccctgcaaggcagggcacttccagaatacctcctcccccagcgcccgctgccagccccacaccaggtgtgagaaccaaggtctggtggaggcagctccaggcactgcccagtccgacacaacctgcaaaaatccatttagagccactgcccccagagatgtcagggaccatgctgatgctggccgttctgctgccactggccttctttctgctccttgccaccgtcttctcctgcatctgggagagccanccttctctctgcaggaantgggatcgctgctcaagaggcgtcggcnggagagggaccnatcctgtagctggaantggggagctccgaagcccatccanantcctgaanttgtaaagcaatgctancanttctggnnagttcccagtatcactgggtcccgcncccagttttgaggagggggcgnaaanaaatctctggactgacagg

SEQ ID NO: 258999 - DNA, 2009 bp, Homo Sapiens
ggcctgggtggcgaattcggcacgaggcccaggcccccacgttgctggccgcctggccgagtggccgccatgctcctgccttgggccacctctgcccccggcctggcctgggggcctctggtgctgggcctcttcgggctcctggcagcatcgcagccccaggcggtgcctccatatgcgtcggagaaccagacctgcagggaccaggaaaaggaatactatgagccccagcaccgcatctgctgctcccgctgcccgccaggcacctatgtctcagctaaatgtagccgcatccgggacacagtttgtgccacatgtgccgagaattcctacaacgagcactggaactacctgaccatctgccagctgtgccgcccctgtgacccagtgatgggcctcgaggagattgccccctgcacaagcaaacggaagacccagtgccgctgccagccgggaatgttctgtgctgcctgggccctcgagtgtacacactgcgagctactttctgactgcccgcctggcactgaagccgagctcaaagatgaagttgggaagggtaacaaccactgcgtcccctgcaaggccgggcacttccagaatacctcctcccccagcgcccgctgccagccccacaccaggtgtgagaaccaaggtctggtggaggcagctccaggcactgcccagtccgacacaacctgcaaaaatccattagagccactgcccccagagatgtcaggaaccatgctgatgctggccgttctgctgccactggccttctttctgctccttgccaccgtcttctcctgcatctggaagagccacccttctctctgcaggaaactgggatcgctgctcaagaggcgtccgcagggagagggacccaatcctgtagctggaagctgggagcctccgaaggcccatccatacttccctgacttggtacagccactgctacccatttctggagatgtttccccagtatccactgggctccccgcagccccagttttggaggcaggggtgccgcaacagcagagtcctctggacctgaccagggagccgcagttggaacccggggagcagagccaggtggcccacggtaccaatggcattcatgtcaccggcgggtctatgactatcactggcaacatctacatctacaatggaccagtactggggggaccaccgggtcctggagacctcccagctacccccgaacctccataccccattcccgaagagggggaccctggccctcccgggctctctacaccccaccaggaagatggcaaggcttggcacctagcggagacagagcactgtggtgccacaccctctaacaggggcccaaggaaccaatttatcacccatgactgacggagtctgagaaaaggcagaagaaggggggcacaagggcaccttctcccttgaggctgccctgcccacgtgggattcacaggggcctgagtagggcccggggaagcagagccctaagggattaaggctcagacacctctgagagcaggtgggcactggctgggtacggtgccctccacaggactctccctactgcctgagcaaacctgaggcctcccggcagacccacccaccccctggggctgctcagcctcaggcacggacagggcacatgataccaactgctgcccactacggcacgccgcaccggagcacggcaccgagggagccgccacacggtcacctgcaaggacgtcacgggcccctctaaaggattcgtggtgctcatccccaagcttcagagaccctttggggttccacacttcacgtggactgaggtagaccctgcatgaagatgaaattatagggaggacgctccttccctcccctcctagaggagaggaaagggagtcattaacaactagggggttgggtaggattcctaggtatggggaagagttttggaaggggaggaaaatggcaagtgtatttatattgtaaccacatgcaaataaaaagaatgggacctaaaa

SEQ ID NO: 259000 - DNA, 583 bp, Homo Sapiens
gcagagttgggaaaggtgagagctacgcaatggggtggatgggcatcctgaggcttaaaggaaactcacaggccggcaaagggcccctcccttttgcccattcaccctggctggcctgcctttctcttgccagatgaagttgggaagggtaacaacccactgcgtcccctgcaaggcagggcactttccagaatacctcctcccccagcgcccgctgccagccccacaccaggtgagtgcagccccacccaagctccttccaccctctgagaagcctcagctgctaacaacccccagcgcctatccttgacaccacggactcgactcaccactttcagcctccccgcctgcccagtggagtcgggacactggtgggccagggcgtgaaaaggtcatcatctttttttcctctgcaggtgtgagaaccaaggtctggtggaggcagctccaagcactgcccagtccgacacaacctgcaaaaatccattagagccactgcccccagagatgtcaggtgagggaccagggctgagggacacaggggggggcgcctctgaaaatgccttaatgctccacatcttaa

SEQ ID NO: 259001 - DNA, 1611 bp, Homo Sapiens
  misc_feature (642)..(642): n is a, c, g, or t
  misc_feature (1317)..(1317): n is a, c, g, or t
  misc_feature (1348)..(1348): n is a, c, g, or t
  misc_feature (1352)..(1352): n is a, c, g, or t
  misc_feature (1357)..(1357): n is a, c, g, or t
  misc_feature (1375)..(1375): n is a, c, g, or t
  misc_feature (1380)..(1380): n is a, c, g, or t
  misc_feature (1392)..(1392): n is a, c, g, or t
tcccgggatggccagtacaccaacctgcacttccaggcccacagcatggggcttggctccaagttcaaggaggtcaagaaggcctatgtggaggccaaccagatgctgggcgatctcatcaaggtgacgccctcctccaagatcggtgggggacctggcccagtttatggtgcagaatggattgagccgggcagaggccgaagctcaggcggaagagctgtcctttccccgctccgtggtggagttcctgcagggctacatcggtgtcccccatggggggttccccgaaccctttcgctctaaggtactgaaggacctgccaagggtggaggggcggcctggagcctccctccctcccctggatctgcaggcactggagaaggagctggtagaccggcatggggaggaggtgacggccggaagatgtgctctcagcagctatgtaccccgatgtgtttgcccacttcaaggacttcactgccacctttggccccctggatagcctgaatactcgcctcttcctgcagggacccaagatcgcagaggagtttgaggtggagctggagcgaggcaagacgctgcacatcaaagccctggccgtgagcgacctgaaccgggccggccagaggcaggtctgcttgnagctcaatgggcagctgcggtccatcttggtcaaggacacccaggccatgaaggagatgcacttccaccccaaggccctaaaggacgtgaagggccagatcggggcgcccatgcctgggaaggtgatagacatcaaagtggtggcaggggccaaggtggccaagggccagcccctgtgtgtgctcagtgccatgaagatggagactgtggtgacctcacccatggagggtactgtccgcaaggttcactgtgaccaaggacatgacactggaaggtgacgacctcatcctggagatcgagtgatcttgccccagaccggcagcctggccaaccccaagcctacaacagaagctgagccgccacggcaggcccaggccagccagagcaccgaggccaggaaggccgggccgtggaggtcctgtccacagctggacaggagagacaccgcctgcggtggttcattcctttcagccatcgtcctttcctccggcggacagctgcttacatgttcatctcttgccaaataagggtcccctcctcactggagactacaagtggtgggtcaggtggtcctaggacccaggggaggtttaggggtcctatctcctgggggaaggggagatctaagatgtcccaggtcctgggaagttaactcaataaagctggctttccccngccccccatgctggatcctgtgcagcccccngccngcacnactcagcagtggggggcngcctnccaagctccccntgggtgggcaggtcagttgtgtcgttctcctcagagggtagtgagaatgaccatcgtggccctgttttaagtcactattgggtgcctactgtgtatactccccaaacaggactagtagtactgcacttgcttgaggggtggggcctgttctaagtatttaacacctattaacacagggaattaaccttcatccacttaagacacagaaatcaagtcaca

SEQ ID NO: 259002 - DNA, 1495 bp, Homo Sapiens
  misc_feature (285)..(285): n is a, c, g, or t
  misc_feature (449)..(496): n is a, c, g, or t
  misc_feature (583)..(584): n is a, c, g, or t
  misc_feature (827)..(827): n is a, c, g, or t
  misc_feature (855)..(855): n is a, c, g, or t
  misc_feature (941)..(941): n is a, c, g, or t
  misc_feature (948)..(948): n is a, c, g, or t
  misc_feature (1000)..(1000): n is a, c, g, or t
  misc_feature (1005)..(1005): n is a, c, g, or t
  misc_feature (1070)..(1070): n is a, c, g, or t
  misc_feature (1095)..(1097): n is a, c, g, or t
  misc_feature (1241)..(1253): n is a, c, g, or t
  misc_feature (1335)..(1361): n is a, c, g, or t
acatgacagatcataaaatggcttcagaggtagggggccgggggaaaacaaaaataaacttggggtgggggcaagaaaagcaaccaggaggaggtaagagctggctggttccttctcagcctgagtaacgggagggagtagctgtctctgaacagtaaggatggctcccttccttcaacccttgataaggggagggaagaaaaaagaaaaagcaaaaggctgctgctttggtcctcctgagtctcaaggaaaaggtgaaaagctggtgttttgatgtcatgaatnatgggaaagggggagcagggtactgggtagggtacaggtcatttggaaaaactggcagaaaccagatggcagccctgggtgtcctctgagttgagttggaatcactccaggatggtggtggtggggtccccactgttgacaggggctgaggtctcaggggctgnnnnnnnnnnnnnnnnnnnnnnnnnnnnnnnnnnnnnnnnnnnnnnnngtctccgctggaagtaggggcggtttcgtgggcgctggggctcaggccgggaaccatcagcgggaccttggctgggcttggtctcannatccccaccttctgtggtaggctgctggcgtggcctggggcggaaaggccttcggtacctgggccggaatctgggcggggggactcgctcatctccctgctgttggtgcccctccaatggggctgtctctttgggttctaccctgtcagtgccctctataggctgctgctggttgggagccggggcctcgcacaaaccgccgtcggtagaagaagggtggggggcaccatcgtcggggccgtngcccagagtcttcagcccgctccccttnactgccaggtcctgtccccgccgaggggatctctgccaccatgggtggtggggcaactgagggaggccgggggatgaatcggcggnacttacntcggttgggggcataacggctgcccttcacgggtactcccccaggcccagtnacatnagtggcttctgcgcccttctctccttccacgacatcaaattccacagtctccccatctccaaacntgcgcagaaacttcctggggttgtnnnttttaatagctgtctggtgaacaaagacatcttccttggtgtcattcctgttgatgaatccgtaaccattccggacgttgaaccatttgacagtgcccaggacttggattgccagcaccggcttgtccgcctgactccgggccnnnnnnnnnnnnnttcccgagaccgccgtcgccggattgccaggggtgcgggagcccggcgccgagggggtcccagcagcggggcccgaggcgtnnnnnnnnnnnnnnnnnnnnnnnnnnnttctgcggctcctgcgggcaccggtaccaccaccgctaccacccctgccgccgtcgcgggcaccgtcgccgcggggaccgctgtagccaccgctgccgcctccacctcgctcatcccgccgggtccagtaccgg

SEQ ID NO: 259003 - DNA, 452 bp, Homo Sapiens
  misc_feature (31)..(31): n is a, c, g, or t
  misc_feature (36)..(36): n is a, c, g, or t
  misc_feature (52)..(52): n is a, c, g, or t
  misc_feature (66)..(66): n is a, c, g, or t
  misc_feature (80)..(80): n is a, c, g, or t
  misc_feature (98)..(98): n is a, c, g, or t
  misc_feature (100)..(101): n is a, c, g, or t
  misc_feature (103)..(103): n is a, c, g, or t
  misc_feature (108)..(108): n is a, c, g, or t
  misc_feature (126)..(126): n is a, c, g, or t
  misc_feature (191)..(191): n is a, c, g, or t
  misc_feature (201)..(201): n is a, c, g, or t
  misc_feature (208)..(208): n is a, c, g, or t
  misc_feature (210)..(210): n is a, c, g, or t
  misc_feature (224)..(224): n is a, c, g, or t
  misc_feature (229)..(229): n is a, c, g, or t
gaaaaaaaagggttcaaccaggggtccccangtgtnccctctccagaggctnccatccccaaatcntgccttcccttctnggggctcccagggcctantnntnagctntgggcaggaggccaactntgccactcatgacctccaggcatcgccctggggtcaaggcctcggagatcaggctaatgggcttnagacaaattncagatcntnccttaggcaggtcncttgngggccgaactttgggactggggtgccgagggcaggggctggcttggtgttgacactggaggcctctgggatggaaaatcctgtatctggcagaggtcaagcagggtgcggacgcccacgagacaccagagctcgcccagtagggagacaaggatgcccagcaggtccagccagcgacccacagtcagcagcagcacgaagaggccgcccatgcgcaccagcac

SEQ ID NO: 259004 - DNA, 1784 bp, Homo Sapiens
  misc_feature (1589)..(1597): n is a, c, g, or t
ctcctccccctctcttttttccccctctccctaacacacctaaacaaccacgaggcctgggtggcgaattcggcacgaggacacgaccaagatggcggcggtgtctggcttggtgcggagaccccttcgggaggtctccgggctgctgaagaggcgctttcactggaccgcgccggctgcgctgcaggtgacagttcgtgatgctataaatcagggtatggatgaggagctggaaagagatgagaaggtatttctgcttggagaagaagttgcccagtatgatggggcatacaaggttagtcgagggctgtggaagaaatatggagacaagaggattattgacactcccatatcagagatgggctttgctggaattgctgtaggtgcagctatggctgggttgcggcccatttgtgaatttatgaccttcaatttctccatgcaagccattgaccaggttataaactcagctgccaagacctactacatgtctggtggccttcagcctgtgcctatagtcttcagggggcccaatggtgcctcagcaggtgtagctgcccagcactcacagtgctttgctgcctggtatgggcactgcccaggcttaaaggtggtcagtccctggaattcagaggatgctaaaggacttattaaatcagccattcgggataacaatccagtggtggtgctagagaatgaattgatgtatggggttccttttgaatttcctccggaagctcagtcaaaagattttctgattcctattggaaaagccaaaatagaaaggcaaggaacacatataactgtggtttcccattcaagacctgtgggccactgcttagaagctgcagcagtgctatctaaagaaggagttgaatgtgaggtgataaatatgcgtaccattagaccaatggacatggaaaccatagaagccagtgtcatgaagacaaatcatcttgtaactgtggaaggaggctggccacagtttggagtaggagctgaaatctgtgccaggatcatggaaggtcctgcgttcaatttcctggatgctcctgctgttcgtgtcactggtgctgatgtccctatgccttatgcaaagattctagaggacaactctatacctcaggtcaaagacatcatatttgcaataaagaaaacattaaatatttagtttggacttgaatatcaagtcgttgaaatttatttgaaatacttgctggcactgcacctggatttgtactgcaagacctgactattcataacggaaaatgatttctaaagcaacagcaggtatttttgtacagggaagtttaaatgtgtttgtgtatggaaaactctccactctcctcccctagatgccatgcttccttttgtctgttacggttgccatgttctttgaataacaaattatataacattttatcctctctcaccacaaggacaaagtatggatgtggcagagtcctgatgaaagatgtatccaaacaagataacttatatgtataaaattaaagcatataatatacatttactgttagtttgttttgataacgaataaaggaatttctaacctcatcaaacccccactnnnnnnnnngcacagccttgtccggcccgcctcggcctttccaagaacctttctagaaccattccgtttgggccgcgcgcgcccccaactagggtaaaggtgaaacatgggcccattaaccttggcttccctaagggaaaattcccctggcctccttggacctaaggggcctttggggatttcctcccccccaatt

SEQ ID NO: 259005 - DNA, 1042 bp, Homo Sapiens
  misc_feature (80)..(209): n is a, c, g, or t
  misc_feature (264)..(328): n is a, c, g, or t
  misc_feature (336)..(336): n is a, c, g, or t
  misc_feature (342)..(342): n is a, c, g, or t
  misc_feature (354)..(354): n is a, c, g, or t
  misc_feature (602)..(602): n is a, c, g, or t
  misc_feature (915)..(915): n is a, c, g, or t
  misc_feature (942)..(942): n is a, c, g, or t
  misc_feature (948)..(948): n is a, c, g, or t
  misc_feature (959)..(959): n is a, c, g, or t
  misc_feature (962)..(962): n is a, c, g, or t
  misc_feature (969)..(969): n is a, c, g, or t
  misc_feature (994)..(994): n is a, c, g, or t
  misc_feature (999)..(999): n is a, c, g, or t
  misc_feature (1027)..(1028): n is a, c, g, or t
  misc_feature (1032)..(1032): n is a, c, g, or t
taaagtttgaaaacaggagaaatgactgtacaccattagaagccagaatggacattagcctttggagccaggtagtaagnnnnnnnnnnnnnnnnnnnnnnnnnnnnnnnnnnnnnnnnnnnnnnnnnnnnnnnnnnnnnnnnnnnnnnnnnnnnnnnnnnnnnnnnnnnnnnnnnnnnnnnnnnnnnnnnnnnnnnnnnnnnnnnnnngcatatatgtcatccttcaacaaacacttaaaaaatgtttgaaaaccccatcaannnnnnnnnnnnnnnnnnnnnnnnnnnnnnnnnnnnnnnnnnnnnnnnnnnnnnnnnnnnnnnnnggtaatangcagcnaggatttaaagncactggtttaatatcttgggaaaagcagatccactcaagacctcacagggtcctgacaaaggccacttccagctcagtggagtgagacactggggtgggaagatgtccattttttggatgtgggtcagtctcttgcacaggcagaggtattgcagcatgctgttgtaatgtgtatcttccttggcagtgtctgttgaaagctggttgcatcagtttgtaatggggtgtaatggcaacaaggtgggccnccccccccaggaagtggatcactgagcacagcttctacagggccatttgtagagaggtggcagctgggcttcccaggggctgccacccagggcagagccagtgctgaggctctgacaacctcggcagggtggggagaaggccaaactcagggtgtttatgtttgtgggtaatgacagtcagctctgggctccagatgatgcttactccctggcctctgtgttcagattaggaacttgcaacatcttgctgaggaccatgtcaggctcagctctaagtgctgtggctgaagaatttcctcctctctgtgtggtnagtggcagctccctagcaatggctganctctancatactctgtnaantacaggngctgggacagaaagacatgggctcncaganagtatcccacctgggcctgtcacccccnnaatncatggcatga

SEQ ID NO: 259006 - DNA, 1617 bp, Homo Sapiens
  misc_feature (826)..(834): n is a, c, g, or t
gggaatcccggcggccggcggcccgggaggcagtcgcgcgctcgcatccccaagatggcggccgttaaggacagttgtggcaaaggagaaatggccacagggaatgggcggcggctccacctggggattcctgaggccgtgtttgtggaagatgtagattccttcatgaaacagcctgggaatgagactgcagatacagtattaaagaagctggatgaacagtaccagaagtataagtttatggaactcaaccttgctcaaaagaaaagaaggctaaaaggtcagattcctgaaattaaacagactttggaaattctaaaatacatgcagaagaaaaaagagtccaccaactcaatggagaccagattcttgctggcagataacctgtattgcaaagcttcagttcctcctaccgataaagtgtgtctgtggttgggggctaatgtaatgcttgaatatgatattgatgaagctcaggcattgttggaaaagaatttatcgactgccacaaagaatcttgattccctggaggaagaccttgactttcttcgagatcaatttactaccacagaagtcaatatggccagggtttataattgggatgtaaaaagaagaaacaaggatgactctaccaagaacaaagcataatgctggcaattaaaaatgtgggtttagttttccaaacatgttatcttaaatacccctttatccttacaggttgacataactttgaatgttttaacagcaagaattttaagaaaagataaacaccattttatttatttataaaaacaaaattagtttcaaatatttttgacattgtgannnnnnnnnccacatttctcagcaaagctaatggtattttaatcattatttttgcctgtcataagaaaactcttagctgaaatggccgaaaactgtgagacatgctatggaagctgaatgccggacgctagcacagtttactttttccctttctaatcggctgatgttactctcacttgatgtggttaaaccattttagaggtagagaagacagacagtttgaatatttgtaaacttgtttttctttggtatatttaggacttagtggtcctctgttgctattgtcttctataagtggagtttcatgacttactgcttaacgaataactaactactatgatattctggacattttaggaaatggtaatttgccttgctacacattaagagggctattaagactacattttttctaacctcagataagtgcagtgtctttgcaatgccaacataagggagatcttggccaacgtgaaataaaattactcattcaaaactctgcctaaggtgattttgtagttcttaacagttctccagagcatcttgaacaggaatattaagataaatgtgaatctgcaatggctgaaaagagttgtgagcttttttattcatgataaaaccttataggaatagtataaaaaatccctgtggaaagctactagtacattgaccagcgctgggtgatacagattctgataaaaacataaatgtattagttcatctccatgtagtaaaaagtatacttatacaatgttttgtacttgtatttcatgaaattaaaacagtgatgct

SEQ ID NO: 259007 - DNA, 1439 bp, Homo Sapiens
  misc_feature (71)..(154): n is a, c, g, or t
  misc_feature (564)..(564): n is a, c, g, or t
  misc_feature (578)..(578): n is a, c, g, or t
  misc_feature (613)..(613): n is a, c, g, or t
  misc_feature (711)..(711): n is a, c, g, or t
  misc_feature (716)..(716): n is a, c, g, or t
  misc_feature (936)..(936): n is a, c, g, or t
  misc_feature (951)..(951): n is a, c, g, or t
  misc_feature (956)..(956): n is a, c, g, or t
tgagagagaaagtgggcccgggaagctcaaggagggagagcggcagaggggaagactctgcaattctgctnnnnnnnnnnnnnnnnnnnnnnnnnnnnnnnnnnnnnnnnnnnnnnnnnnnnnnnnnnnnnnnnnnnnnnnnnnnnnnnnnnnngcgggattgctggagagaacgcggcgatggagccgggcaggacccagataaagcttgaccccaggtacacagcagatctttctggaggtgctgaagaccaattacggcatcccctccgcctgcttctctcagcctcccacagcagcccaactcctgagagccctgggccctgtggaacttgccctcactagcatcctgaccttgctggcgctgggctccattgccatcttcctggaggatgccgtctacatgtacaagaacaccctttgcccaatcaagaggcggactctgctctggaagagctcggcacccacggtggtgtctgtgctgtgctgctttggtctctggatccctcgttccctggtgctggtggaaatgaccatcacctcgttttatgccgtgtgcttttncctgctgatgctgntcatggtggaaggctttgggggaaggaggcagtgntgaggacgctgagggacaccccgttgatggtccacacaggcccctgctgctgctgctgcccctgctgtccacggctgctgctcaccaggaagaagctncagcngctgatgttgggccctttccaatacgccttcttgaagataacgctgaccctggtgggcctgtttctcatccccgacggcatctatgacccagacagacatttctgtaggggagcacagctctatggatcaacactttcctcggcgtgtccacactgctggctctctggaccctgggcatcatttcccgtcaagccaggctacacctgggtgagcagaacntgggagccaaatttnctctnttccaggttctcctcatcctgactgccctacagccctccatcttctcagtcttggccaacggtgggcagattgcttgttcgcctccctattcctctaaaaccaggtctcaagtgatgaattgcccacctcctcatactggagacttttcctaatgactgtgctgacacgaatgtacctaccgaaggaaagacccacaaggttgggtatgaaactttctcttctccagaccctggacttgaacctcaaagcctaaggtggatggcttggacaatgaaaggatgctgtactcattagaatacaagattcctttactgtccctcaaccttgaccaaatgggaagcattcccccttgtcaacacaagctggcagatacatttgactctacagatgaaggtgaacaatgttaggataaaattgctttggatcttgcctggaaggtgttttaagttttgtaataaacaagatgatgtctgaaaatgtgt

SEQ ID NO: 259008 - DNA, 1033 bp, Homo Sapiens
  misc_feature (330)..(338): n is a, c, g, or t
  misc_feature (896)..(910): n is a, c, g, or t
aaatttcctaggtttatgtgaatttagggggtgtatgcattttgaaacaatctactaacagatggtgctgaaatctattacctacatgttttctagttgttcagcattatgttaatgaagcctccatataaggagtgtcttctctggcacagttggtaagttgactgctaacttcatttaaatgtgttactggatatgcagtatactgaaattattaatcagtttgtgtataggaaaagagaactgggttaaaagcaaattaacttgttctgaaaagaaagtatagattaattttgttttctgtttaaattttatctccttggtaaagannnnnnnnncctgggcagaaaacttggcatttttaggcgtagataccttaccttacaatgccaaaatgaatttaattccagtactcaggtttttccctttaacagactctatgtgtatcagggctttctaatgggtttttcctcttcgtttttaaaatgtgagtagcatttgaccaatttccagtgctcttagcattttacttaaagaacaaccactacaaaagaaaatctttgtaatttgattgtcttttgctttgcttcattaatgcctaagaacttaagaatactcctacctcattagctactcaagatgctgtgacgatcaaatctattctacataatgcgtttagaaacaaagacttgggtgaaaaatgaaataagtatatcctgacttggctattgaggggaaaattcagtattaagtgttcctcacaggagatatgttagcagaatactataaaagtttgaaatttttaaaaagtaaaagtacttaaatttaggtatctctcctgaaattctttgcagttcattttttatggcagttaatccagtgaaacactcaaaagnnnnnnnnnnnnnnnaaaagtgtttttccagataaactgtagggtgaacattcacataatcacaaatatgtaattctgtaattggtggaatgcttgtatggctttgtttttcgtacatccttcccatgggagattgtt

SEQ ID NO: 259009 - DNA, 2352 bp, Homo Sapiens
  misc_feature (1815)..(1953): n is a, c, g, or t
  misc_feature (1962)..(2179): n is a, c, g, or t
  misc_feature (2196)..(2205): n is a, c, g, or t
cggcgccgcttgccggcttcgtttcccagcgggcccactcgcttttgcccgtggacgatgcaatcaatgggctaagcgaggagcagaggcagcttcgtcagaccatggctaagttccttcaggagcacctggcccccaaggccaaggagatcgatcgcagcaatgagttcaagaacctgcgagaattttggaagcagctggggaacctgggcgtattgggcatcacagcccctgttcagtatggcggctccggcctgggctacctggagcatgtgctggtgatggaggagatatcccgagcttccggagcagtggggctcagttacggtgcccactccaacctctgcatcaaccagcttgtacgcaatgggaatgaggcccagaaagagaagtatctcccgaagctgatcagtggtgagtacatcggagccctggccatgagtgagcccaatgcaggctctgatgttgtctctatgaagctcaaagcggaaaagaaaggaaatcactacatcctgaatggcaacaagttctggatcactaatggccctgatgctgacgtcctgattgtctatgccaagacagatctggctgctgtgccagcttctcggggcatcacagccttcattgtggagaagggtatgcctggctttagcacctctaagaagctggacaagctggggatgaggggctctaacacctgtgagctaatctttgaagactgcaagattcctgctgccaacatcctgggccatgagaataagggtgtctacgtgctgatgagtgggctggacctggagcggctggtgctggccggggggcctcttgggctcatgcaagcggtcctggaccacaccattccctacctgcacgtgagggaagcctttggccagaagatcggccacttccagttgatgcaggggaagatggctgacatgtacacccgcctcatggcgtgtcggcagtatgtctacaatgtcgccaaggcctgcgatgagggccattgcactgctaaggactgtgcaggtgtgattctttactcagctgagtgtgccacacaggtagccctggacggcattcagtgttttggtggcaatggctacatcaatgactttcccatgggccgctttcttcgagatgccaagctgtatgagataggggctgggaccagcgaggtgaggcggctggtcatcggcagagccttcaatgcagactttcactagtcctgagacccttcgcccccttttcctgcacctagtggcctttcttgggaagtagagatgtggcggctttcccaccctgcccacagcaggccctcctgcccagctgctcttgtcagccctctggcctctggatgaggttgagttctccacaacagctcccaagcatcatgggcctcgcagccgggcctgtgccacggctagtgttgtgtgatttaaaatggactcagcaggaagcatattgtctggggattgttgggacaggttttggtgactctgtgcccttgctctctaacttctgagcccacctcccagggtaggcacctgggggcatgcaggtgcccacctcccagggtaggcacctgggggcatgcaggtacccacctctttctcttgggtgaggctctggcaaggagatctctctgctcaagcacagcagaatcatggcccctctccatgaattggaacttggtacaggttaagtatccctaatcctgaaatctgaaacacttgtggttccaagcattttggataaggcaaattcaactttcagtctcttttctgggggaaaaaaataataaacctagcctagccaggnnnnnnnnnnnnnnnnnnnnnnnnnnnnnnnnnnnnnnnnnnnnnnnnnnnnnnnnnnnnnnnnnnnnnnnnnnnnnnnnnnnnnnnnnnnnnnnnnnnnnnnnnnnnnnnnnnnnnnnnnnnnnnnnnnnnnnnnnnnctttggggnnnnnnnnnnnnnnnnnnnnnnnnnnnnnnnnnnnnnnnnnnnnnnnnnnnnnnnnnnnnnnnnnnnnnnnnnnnnnnnnnnnnnnnnnnnnnnnnnnnnnnnnnnnnnnnnnnnnnnnnnnnnnnnnnnnnnnnnnnnnnnnnnnnnnnnnnnnnnnnnnnnnnnnnnnnnnnnnnnnnnnnnnnnnnnnnnnnnnnnnnnnnnnnnnnnnnnnnnncctctaattaaaattannnnnnnnnngggcccttttgggagagggggggaaatttttaaaaaatttgcgccaaagggaacccccccaaaacgggtttaagaaacttaaatccccgggggataaaacccttgggcccttgggaaaaaatttccccccggggagaaaacgggggg

SEQ ID NO: 259010 - DNA, 1016 bp, Homo Sapiens
  misc_feature (593)..(602): n is a, c, g, or t
ccagtaagctatacagcagcattgagaagtggattggtcccaaagaatagtaagtacacctctgtccagatacacccattgtttctcacagatatcagcaagcaataatgctcccctgtctgggtcctctgtgtctccactgccaacactctctctctgctctctcatcccgtcaggtgttgttgaagtgtacagggtaaccaagcgtgtggagctggggataaaagccactgcagtgtgcagtgagaaactccagcagttgctgaaggacatcgataaagtatggaataacctaatcggcttcatgtcactcgccacactcacaccagatgaaaactcgctggatttttcctcctgtatgttacggcctgggattaaaaatgctcaggagcttgcctgtggagtgtgcctcttgaatgtggactcgaggagccgggcattcaactcagaaacagacagtttcaagctggcctatggagggcaccagtatcacgccagctgtgccaacttctggatcaactgtgtcgaaccaaagcctcctggcctcgtcctgcctgacctgctctgaacaactcctctgtgaagcattgacnnnnnnnnnnctgtgacaccccacggggtgacagggaccaataaatagaatgcgagcactgcacagttcgcttccctgaatcgatatgaagaacaccgcaagggacggggcccccgtcatccccacggccagtctgcaggacttcaggtaaaattgtcccacccaaactgcacgtggcacccagaagcttgctcacttatctctacttaagattttctgaaatacggaccacggctttcttgatctaaggaagaacttgctgctgcagtattgaaactgtgaagaactgacatttgaagaaaaatagattaccgttgcgggactagaatgggcgactgcttggagccagtgcttgtttttatctaggacacttactgtcctgtgaagtagaatacatttatctgcatttagtttgttaatgtct

SEQ ID NO: 259011 - DNA, 1591 bp, Homo Sapiens
  misc_feature (1317)..(1338): n is a, c, g, or t
tgatgagtcggggacagcccagcggggggacggaggcggcgggcccaggagcttcagccagccacgtgggcatccactccttttcctgcaagagatgatggttccattgcttcttggcttcatggtgttcctggaaggcagatgagctggtcatttcgcctgggactcggcacctttccgagtgcagctggagggatctgagcgcaggaagacgcagaacaacagaaatagccgcccctccccgcccactgtgcctgttggcctatcatagatctctatgttcttgactttgtctctcctttccgagtcaatggtgggttacactgatcttgttccactgattactctctctgacgagtccatcacctgcaacttaaatgaacaagcttacatcccattttgagtgaagattttgaggtttttaatttaaaggctgtgtacagttatacttttttatacacctgttcatttctacttaaattatggcacagattgatgcgcaccagtcttgaggaaacgatctccctattcccttaccctgttactcagccacgccgtgtgtaggcttagcctcaggtggcagatgtttgagaaaaggaattatgccaggaaggtgggaccgggttatggtcgggtttctattgggaatgctctttgtgcttttgggcatctgaatggaagctttacatagaaccttaggtagaactcccccaaatcgccatatttaaaaattattttcactctattcttgcttaaaactgtactcttttgcaaattaacaattttatcactgattcagagttaaaaagaagactaacttttcaagcaaatgcatctgtaaagatgctttagattagactgtcatgtctcagtgtctatctgtatatattatttgatattcagagaatctaaagcactcgtctactgttttaatgagatttaacagcttttaacagtgagtttcgtttgtaaactgcttgaagtctgtggcattcaggcacacatctggctggccggctgggtctcctcccgggctcagtgggcctggggcctctctgacgtggtgcctgctggagggaggctcgtcgtcaccagctgactgctggtccggcttctgaccggcctttgtcctggctccgtagcagaacactgtaaaagtgcccgcgtctttgcagtagttgcagatttcagtcgtcgtgttacttgtgcacaaacagaagctgggtcttacccgcagcacgagtgtctcgggctgcccggagtcgcccgggagcaggtgctgcagccagagttacgcgggggccacgcgggccggcnnnnnnnnnnnnnnnnnnnnnnaacctgtgtttcacgtgactcagcagtgcccgccgccgtcaccagctatgcattcactccgtttccagtgagcagatgtcttgcttggaaagtggacctgtgtctgtgtctgtcctgagaacttaccagcagaaatcctcatttctgtgctacggatttaccaaaaattgtcaagtctttttcagtttaacagttcctttaaatgtgtagtatttgaggaaaaaaatcaataaacagttgatctcgtgcataa

SEQ ID NO: 259012 - DNA, 978 bp, Homo Sapiens
  misc_feature (765)..(787): n is a, c, g, or t
  misc_feature (846)..(854): n is a, c, g, or t
  misc_feature (917)..(917): n is a, c, g, or t
cgcggccagtaattcggcacgaggcttaatgcagataactcttctaatcagtgtccatggcaatatgaacgcttgaagaaaactcagtgacataccttgctcagtagtttcttattcctgaagaaccacaagcataaagtgaggcctcagtgctggtgctcttggagtatggggaatgtgcaaatatttaactgttttgtatgctgcacattgcaggtctgctcatgtgcattctccctttgtcttcctttgtcatatgtgtttttgcttttttgaaagtgcagtctttattgtaccctcctccagcttgtagcaaattagaatgcttagcatttatgttcattcattattgtatttgccatgtaaaatttttattaccttagacaagcttataagctgttactacataacttatcttactgtaactcttttatttcccccgacgttgtaatttgtttgtgatgtatattgtgaaattgtattctatgttaatttaatcagcacaattcactgacatgctggactgacatgctggctgctgtttcaaagtgtaaagtttgtgtagggctgttgggacaactgcaactctgttgtcaaggtactgtgctttggttcctatagcaacactgggtgtggcccttgaattgctaagggcatttaatacatcctggagcaaattttaactgcagattttctttgtagaaattctatgtataatgcaggtacctacttggcccatggctggtaactatttgggcaattagnnnnnnnnnnnnnnnnnnnnnnnctagtgtctattgctgctttgaatatgtttgaaagtctgaaaatgtaaatagtttatcnnnnnnnnntcttgtacagtccagtgtaaagtttttaaatgaccttaagggttgccatcacatctttctcanactctcctcttgataataataataataaaaagtttgctaagattaaagaaatggaaaaata

SEQ ID NO: 259013 - DNA, 689 bp, Homo Sapiens
gctatgtcatcgtagtcagtggtggcagaaaagcgctgcaggcccagctcgttaggcttgagaagggcaagtgttttcagttagatttgggggcagttcaccctctggcgagttagggtggaatgtttgcccttgagacggcgtaacggaaaggcacggaggttgggcggtccaggttaatttgaaggctgattttggctgaaagtctggcgacaacatcggatcccacgtagcaactttggcctggcgcgaaagaaggaagctctgacccctgggagttgtggacaaaggctttgggctgtagaatcgatgcattcggatgattcccgtttgaggatgttgggagaaatcctgtgccatgtggattcgtcttcatttacagttcttcctagggactgtggctctcattggtcattcctttggtttttattttaaacatctacattataaaaggtggatcatcgtaaagaataattatgggttggtgtagattattttctgcaggggaaactcacgtttagagtgtgaatatgctacatcatgaccttgggctttacgaagtagtcgcagagttaaaaaaaattctctccctcaccatatctggaaaatgactttttcttcgctagttaaaaatcaaatggatctgatgagatattacttatttaaattctgtctccctcccgtttccc

SEQ ID NO: 259014 - DNA, 371 bp, Homo Sapiens
  misc_feature (28)..(28): n is a, c, g, or t
  misc_feature (35)..(35): n is a, c, g, or t
  misc_feature (41)..(41): n is a, c, g, or t
  misc_feature (82)..(82): n is a, c, g, or t
aagggccaaaggcccccaaaggcccctnccaaatncggatntggagtgagcccccaagggcatgattccatccatggagacnaaaggatggtaccatttgccaatggtttgtccatgtcagacaaaacaaaaatatgtaaataccccatcaatagggaactgctgaaaaatttttttgtataatcataaaatgaaacatgcagatgtttaaacccaatgagctagatctcaacgtgctgatatggaaagtgcttcagaatgtattaaggacataaattaagtgtacaataatgtgtgtgtgtgtatatatgtatatgcttacgtgtgtatggaaagtatctcagcagatacaataaaaacttaattgtgat

SEQ ID NO: 259015 - DNA, 736 bp, Homo Sapiens
aaatttacttcttacaattctggaggccaggaagaccatgatcaggtgccagcatctgggaagggccttcttgctgtcctcccatggcagaagatggaagggcaagggagagctaacatgctcccgcaaaccctttttataatggcatcaatcaaatatgaggccagagtccttgtgacctaatcatctcccagaaggctccgcctcccaaccctgttgcattgggattaagtttccaacacatgaattgtggagacaacacattcaaaacatagcattccacaccttgggctccccagattcatgtcctcacatgcaaaataaattcattccatcccaatagcccctaaaaagtcttaacttgttccagcatcaactttaaagtcaaagtccaaagtctcatctaaatcagatatgagtgagactcaaggcatgattcatcatgagacaaaggatgtacatttgcaatgtttgtcatgtcagacaaaacaaaaatatgtaaatatccatcaatagggaactgctgaaaaatttttttgtataatcataaaatgaaacatgcagatgtttaaaccaatgagctagatctcaacgtgctgatatggaaagtgcttcagaatgtattaaggacataaattaagtgtacaataatgtgtgtgtgtgtatatatgtatatgcttacgtgtgtatggaaagtatctcagcagatacaataaaaacttaattgtgattaaaa

SEQ ID NO: 259016 - DNA, 1180 bp, Homo Sapiens
gggagaatgggaaacctaaaatggatcttttgaaaaaccatttagtaaaagaaggtcgggtggaagaggaggtggccttaaagatcatcaatgatggggctgccatcctgaagcaggagaagaccatatagaggtggaggctccgatcacagtgtgtggtgatgttcatggacaattctttgacctgatgaagttgtttgaagttgggggatcacctagtaatactcgctacctcttcctgggtgactatgtggacagaggctatttcagtatagagtgtgtgctgtatctatggagcttaaagattaaccatcccaaaacattgtttctgcttcgaggaaatcatgaatgcaggcatcttacagactacttcaccttcaaacaggaatgtcgaatcaaatattcagaaaaggtgtacgatgcctgcatgcacacattcgactgtcttcctcttgctgccctcttaaaccagcagtttctctgtgtacatggaggaatgtcacctgaaattacttctttagaggacattaggaaattagacaggtttacggaacctcccgcctttggaccagtgtgtgaactgctgtgggctgatccctcagaggattatggcaatgagaagaccttggagcactatacccacaacactgtccgagggtgctcttatttctacagttaccctgcagtttgtgaatttttgcagaacaataatttactatcaattatcagagcccatgaagcccaagatgctgggtatcgaatgtacaggaagagccaagccacaggttttccatcacttattacaattttctctgcccccaattacctagatgtctataacaataaagctgctgtgttgaaatatgaaaacaatgtcatgaatatcaggcagtttaactgttctccacacccctactggcttccaaactttatggatgttttcacatggtctttgccttttgttggggaaaaagtcacagagatgctgggtaaatgtgctcaacatatgctctgatgacgaactgatttctgatgatgaagcagaaggaagcactacagttcgtaaggagatcatcaggaataagatcagagccattgggaagatgggcacgggtcttttcaattcttcggcaagaaagtgagagtgtgctgactctcaaggggcctgactcccacaggg

SEQ ID NO: 259017 - DNA, 984 bp, Homo Sapiens
  misc_feature (374)..(374): n is a, c, g, or t
ctggctgtgctgtgctgtggaccagctgtgtggatctctagcccagctacagcagaatacattttaccagcaaacctaaggatgacaaacactatccacatctgaaaactaccacaccatatcagggatcataaattatgcatatctatgaattttccaacaaattcctacttcctgattggattggttttgccgctgatgttaaggcagccagcttcttagttcaaaaagaattctgagtttttcaaacactagtctagaggtggacattgtcaggggttctggaatgggaccaggggaccttttggtgcagtgggtgcctgtaactcattagacgtactgaggcagcacttctgcagggtgcataccctganttgttgtcatttgtaacaggtcacttccttttcactcagtttaaattggtgatggaccgttgcttgattgagcttattactctcctattttgagaaggtaagaaggtaaagagggcccatattcattctttgccatgaaatgaatgaattaggaagattgtatttacttaactgttttttaaatacatgtttaatgaaataaactgtaaaatatccaggtttgtgtattatatgtacatttgatttttaatagcctttccaaagaaatgagggcatgattattgtaccagtaagtacgtgactgatttaatttgatttacagagcggagtgtgttcttataaaaatatttaatgacattggttcttgtcttttgatcttttatttctgaaacactcaaacaccttacaaagtgctgagtaggtaatagtgacccaacttgtttgctaaatgattatttgtttaaatctgtacagttttaagtgttcacttatacaaagagtgtatatactttcaaataatttaaaatgctttatattatttggctagaaattgctgtttttaataaatgtgaattttttaaaaataaagatttttgcttcctaccttgaa

SEQ ID NO: 259018 - DNA, 963 bp, Homo Sapiens
  misc_feature (606)..(606): n is a, c, g, or t
  misc_feature (872)..(872): n is a, c, g, or t
  misc_feature (934)..(934): n is a, c, g, or t
ggggtgtggcatctgtgtttctgatgcttactacaatatgtgaaccactactttagaaaatctgctttaacttggcattcctctaattgtgttccctaggaaatgactgtcccaagagccagtgattattccaggtgttccctggaaaggtcaagtgagtctgggaaacactatgtctgtacacctcttgaaggtgtcgaatgtatgtttatacatcagtggaacccatttttctagcctagcaagtcccaaacacattacactgaagagattttggtgaggaaacttgctggagttttcagggaacactgttctaggcttaggtgaccgtaggatcactcaagtagacccttcactccctgcgagaaattaggatgaataactacctgtggcattgttggttctgaacttttacagttcaggcctgctgtgaatctttgatgaagctttaaggtgacactgttgtacaagatgtcagctttgctgaaacgcacattacctggaataagtgctttaattgtagaattagaatgggatttactgtactgttttaaatgagattggcttcagaatccattacagttaccttacatagcacttgatacngtgttaaatgaacatatgaatgtaatttatatattcctagaatttaagttactttgtgagatttgggcctgtccctcaatgccagtttaggatttctttttttctataccttgaaatgattataaaataggattttcatggggaattttaaaaactctatccaaaacatttttgggaggcattttaaagccccatacacaggaagtatacggaaaggcacacaaaacacttcccaaggttttcaggcagtttttaggcggccaccntttaaccccacttttggcttgtcttcatgggaaaaatctttggtttaaagttttggtacacnggggtaaccaaaaggtttacttttaaagg

SEQ ID NO: 259019 - DNA, 1506 bp, Homo Sapiens
agagggccccgtcgcgaccgcgtccccttgggtccttgatcctgagctgaccgggtagccatggccttgcggctcctgaagctggcagcgacgtccgcgtccgcccgggtcgtggcggcgggcgcccagcgcgtgagaggaattcatagcagtgtgcagtgcaaactgcgctatggaatgtggcatttcctacttggggataaagcaagcaaaagactgacagaacgcagcagagtgataactgtagatggcaatatatgtactggaaaaggcaaacttgcaaaagaaatagcagagaaactaggcttcaagcactttcctgaagcggggattcattatccagacagtaccacaggagatgggaagcccctcgccaccgactataatggcaactgtagtttggagaaattttacgatgatccgagaagcaatgatggcaacagttaccgcctgcagtcctggttgtacagcagtcgcctgctgcagtactcagatgccttggagcacttgctgaccacaggacaaggtgttgtgttggagcgctccatcttcagtgactttgtgttcctggaggcgatgtacaaccagggattcatccgaaagcagtgtgtggaccactacaacgaggtgaagagcgtcaccatctgcgattacctgcccccccacctggtgatttacatcgatgtgcccgttccagaggtccagaggcggattcagaagaaaggagatccacatgaaatgaagatcacctctgcctatctacaggacattgagaatgcctataagaaaacctttctccctgagatgagtgaaaaatgtgaggttttacagtattctgcaagggaagctcaagattcaaaaaaggtggtagaggacattgaatacctgaagttcgataaagggccgtggctcaagcaggacaatcgcactttataccacctgcgattactggttcaggataagtttgaggtgctgaattacacaagcattcctatctttctcccggaagtcaccattggagctcatcagactgaccgtgtcttacatcagttcagagagctgccgggccgcaagtacagccctgggtacaacaccgaggtgggagacaagtggatctggctgaagtgaacgggccgcccttctgctccagctgcatcacagtgatggccaagctgcatcagccgcactctcctggacgccatatagctttaagatcgggggagggtaaataatgcaaaaattgcacagtggaagaaggggtctcacaaaaagcaatccatcctgtagtataggtaatggagttgggggaagcagcttccattctggatgtttggaaccctttagctttgttttggaatggcccaccattctcactggaaaacagtggtctgctgtgaaaggccagctctcggcagcccctgtggtttcagcgctgccgctctgtgtcattcaggttgtgcacattgtttttcttctgacttccagaaataaaagtgtttccatggg

SEQ ID NO: 259020 - DNA, 415 bp, Homo Sapiens
  misc_feature (23)..(23): n is a, c, g, or t
accctaatccccgggcacttagnaatcttctccaacacacagacccattctgaaaaacagggagccccagtggagaactgagtaggctgaccccatctgtgctccctggtctgctgggacctctctgaactgatgtaagacacggtcagtctgatgagctcccaatggtgacttccgggagaaagataggaatgcttgtgtaattcagcacctcaaacttatcctgaaccagtaatcgcaggtggtataaagtgcgattgtcctgcttgagccacggccctttatcgaacttcaggtattcaatgtcctctaccaccttttttgaatcttgagcttcccttgcagaatactgtaaaacctcacatttttcactcatctcagggagaaaggttttcttataggcattctcaatgtc

SEQ ID NO: 259021 - DNA, 614 bp, Homo Sapiens
aacatctcaaaacaaaatagcctacaaatgttcccttgtgggagactttggcgagggtctgtgggtaaaagcaccagggggttaatcttggctcagtttcctaaaaaacattgattaatttaactggcttttaaatatccccttccgctgatatttgttgtcagctgcctacagtttaatatgcagcgttcacaaaacagctgccagtgctacaattaatgaagcaaaacttaatatgtaatcacaatctaaattagcatcaatactttgacattcattacattggtttgggggaagaaaagtagtttctggtatgtttcattgatccccagataccttccaatctggacatgatggggctgattccagatggtttttctgaaatttcattaaggtaggtcagcgtcatttgtctctgtttaggtaaaatataaaaaccctgcccagtagcagtggcatcgcttggttcctgatgcccatgttccagaggaattcggataccacaaacagctaagacaatctcagcttttcttagacaatcttctatctcaaacttcagacattccagaattgtcatgatgtttacactgtctgagttaaaaatcctgttcaag

SEQ ID NO: 259022 - DNA, 603 bp, Homo Sapiens
  misc_feature (23)..(23): n is a, c, g, or t
  misc_feature (40)..(40): n is a, c, g, or t
tgcttgccacccacctgaaagangtactagtcatttatcntattttatgttgtgaaggaacagctacagcagctctaaatactgtaacaatttaattttgccaacatccaacttacttacagtcgtaatagaggcttttaccagcacaatgacccctattcgtagtcattctgccaggtggttaggctatgtgggttacacagcttaaaaaaggtctgccttttgtaaaaagttctctgtacatagtttggtgtttcttcatatggaagaaatgagttacggggaaaattcaggtacacacggtaggctcgttcagttgctcaccacagccatctcaacagatgaaagtgctctttgttggaaacagcttcctcctcacaccagttctccacaggcagcctcatctacaaccctgcaattttgggccagaagtggtggcccctcagaggctctgaagtgcctccagccccgattcaggcacttgccacgtgtgctgcgtaagaagggacccccacccagtgagtcaacataggctcatgtcaagtttgaaaataactggggaaaagtgtatgacaacatcttccagaacaaagtaccttcacc

SEQ ID NO: 259023 - DNA, 1011 bp, Homo Sapiens
ggcccggaattgggaacgtcaaccacgcgtcgcattgaagtgtaggtcacagacaatcatcaatgatgccttaactttagaagagctgatagctgttgtctcgatgcctctcgagatgcatgcctggggatcatcaagtggcttatccagaaaccaagccagaagttcgagaagaatatattacagcattcagagtatggagtcactactagctctgaaatgcaacaatgcatacagatggaacagaaaagatggattcagttatttaaggttatcaccaatctagtgaaaatgttgaagtccagagacacgaggagaaattttagtcctccaaaccactggctgtcagaacaagaagatattaaagcagataaggtcactcagctctatgtgccagcatccagacatgtgtggaggttccggcggatggggaggataggcccgctgcagtccaccctggacgtgggtttggagtccccgccgctgtctgtgtctgaggaaagacagcttgctgttcctgacagagttgccttttgtggttccatttgaggaacgagtacaagatctttcagaggttgatttatgcaagataagcaagaacgttcaagggagatggtccatttctggactggaattaactgtcaccaataagaagaaattacatttatgaaagatgcttatgacaaaatttctccagaaaatgagcctgatttgacacacgcggatccggtgcacattgctcatggccatggccggatgaagcggcatgcatggggggggacatccagaaagttaaacggaacacgaagcacgagtaccaccaggtctacacgataaagaaggtagaaccaacgggggcagagccgggacaagcgcacaccaccccacgaagtcgaaggccaaaaaggggaggacgagaataaaagagacaagggaaacacgacgacagagaaacaaaaacacgcaacaacgacacaagaaaaacgcacgacacgacgagccagtgtggcc

SEQ ID NO: 259024 - DNA, 1710 bp, Homo Sapiens
  misc_feature (402)..(412): n is a, c, g, or t
tgttgttttgttgtttagaagggtttgcaattgcagagttattatcagtgctttcaatatagatgttttgtaatggattaggcaaacattggtaaacgaccaccaggtttttccaacacttaactgctagtcttttccagtaaatattgttttccccagacaaaataaccaaacctaacacaatttcaagagatggtgataccatcagcataataacccaaattacaaaaatggcaatacttaaaatcatgcatattatttcaccatttcataaaacttattttaaaatttctacaaactttcccagtgtaaaagactcctcaaaagctgcatgataacattaaactacaaaattcactttggaaaagtagggagttatttttctaattttggctttaagannnnnnnnnnnaaatgggttaaaagatacggtgaggagtgtgttgagagaggtggagaaaaggagcttccagtcaatgcattcaccatatctgaaaatacttcagttatacaaagggaacacttcgagagtaaggatatattataaataagtctctcagcaagatgaacggatgaacagttcaattgcacccacaggagagaggtcttcttggagaatgcttgtttatagaatcttctgtaaaatagagttggctacttctaatgattcatcttgtactaaaacaatatcataagagtccatgtacttttctaaaagctcatccactctatcatttagatatccaattttcagaatgtgctcaacattggccactccatctgccattcttaagtctccttgggagtctcccagaagaattatgttactattgtcttttagttgattgaaatattctgtattcctcaaggcaccatcatgtttgttaaatacatgaattagttctcctttaaatcctttgagcaccccagtttcatcaaaatccataaaattggacacaactttgacattgggatgataaacaccagcttgacgaataacttcctctagtacatcgccgattccagccgaaaatatgaacacggggatgctatgttgttggagcttatcaaagaaattctcatatccttctttgagcataacgtcagattctgccacaatttctttaagtttagcttttggtaaagcttgctgaacaagcaaaccatgtgatttagtataccattccaccatataagggtacttctcttctacagtaagaacaggatcaacttcaatagcgtaatatttttcctttagttgcaataacttttttctacattcatctgtaaccagcttacagttgtcaatgatattatgacatgttgggcatcttttccctttatatgaaaatctactgagtgtcatatcaaagtccgttattatctgaagtttggcagctcctcctttgataagaccacagataatttcttctactcttgtagggttcttgattcgaactgaacttttctggaattctggcatcatctcgatgatcttggtcttccgccccgtcttcctcttcaaggtgaatatgtactgagccagcaccacccccgccaccagggcgcacacgctggcgctcgctaccgcgcccaccctcgccacggccgcgcggtccatggacggggccctcatgcgcgtccaagcaggaaaaaaacaggcagctcgcgtagactgcgagtctcggaagcgcgggatcccagagcatc

SEQ ID NO: 259025 - DNA, 397 bp, Homo Sapiens
tctctctcccctcccgtcctcccccagaatcacttcctaggacacccgagctgcttgcccagggtcctgtttccctgctaactccagagaagcatcccagggctttgtgacagtctctaattcccttcccttctcgttaagaatcatattgtatagtagctttcagaccatacagtattcattgggttactcctattattatcaagtagctggaattgtgaaggtcggagtagttagatctttagcttttattccttatttttttgtattactctccatgtgtataaattattgatcatgttgctggcttttataaactctaagcgaaggaggagcactgcctcagcctttgcacatggtaatgaagcactgtttttaaataaaagagagaaacacc

SEQ ID NO: 259026 - DNA, 751 bp, Homo Sapiens
gccgcttacttctttacctatttacttgtttattcattctctcttgcttcactcattcattcatctggtcatttattatacaatgcaatagataccagtgaaacaacctctcaacaacaacagcaacaaaactcagaacattcacagtatctttggcattcctgcttcttctcactgagtcaccaaccaaggtacacacagcccacagtccagaaacacacacaaatggcggatgcagagcagagacacagtgaatgttaagtttactcccagatccttctggggctcgcgtcctaaacatactgggggcagatctgagatgagggcccacgttccccaggccccctgggcaaggcaagcgccgcctgttctgcccctctggaccgtggtgaatgaccatccccatgagaaacctgtttcaagaccccagaatacatagagacacacacatggtacatagtctcctggtgggaaacgacggacatggagttcatttttaaataggtggctttgtctgtggcaatataaaaatattttggcctttcaaggcaaatacaaaagaaactacccattaacatggctgagtgtctcagtcccaaacaataaagaacttgaagaggtttagccggaaactttgaagacagaaaatctgcccattatgttttccagacatttcgagggggcgagcggaggtcattggagcttgaagcccatttggaaggctggtccctcggcctgcgttttctccttg

SEQ ID NO: 259027 - DNA, 924 bp, Homo Sapiens
  misc_feature (44)..(45): n is a, c, g, or t
gcagaaagtactaaaccctgagctcatcaagggtccttggacannagaagaagatcagagagtgatagagcttgtacagaaatacggtccgaaacgttggtctgttattgccaagcacttaaaggggagaattggaaaacaatgtagggagaggtggcataaccacttgaatccagaagttaagaaaacctcctggacagaagaggaagacagaattatttaccaggcacacaagagactggggaacagatgggcagaaatcgcaaagctactgcctggacgaactgataatgctatcaagaaccactggaattctacaatgccgtcggaaggtcgaacaggaaggttatctgcaggagtcttcaaaagccagccagccagcagtggccacaagcttccagaagaacagtcattggatgggttttgctcaggctccgcctacagctcaactccctgccactggccagcccactgttaacaacgactattcctattaccacatttctgaagcacaaaatgtctccagtcatgttccataccctgtagcgttacatgtaaatatagtcaatgtccctcagccagtgccgcagccattcagagacactataatgatgaagaccctgagaaggaaaagcgaataaaggaattagaattgctcctaatgtcaaccgagaatgagctaaaaggacagcaggtgctaccagtaagactgtcatcatgtgcttgaatgaggggatagcagctttgcctcagtttacctaagcgctcttctcttctaaatattacacttagcaaggctccatatatccattcagaatgtctcaacacaagaagttgcttgtagtaaaatgtagttggtatcagattatatgctgattaaattggaagcagtctttttgtaattgcaataaaaatgcaatatcc

SEQ ID NO: 259028 - DNA, 681 bp, Homo Sapiens
gggcaaatgaagacagagaccactaggctgatacactgagtttgatatgaaatgttaattaccattaaaacttttttattgaggcatgatcaaatctgtagtttacaaagattactctggttgtaacattctgggagaaaataaaattattcagtctgagaaagactccatagaacaagtgatattttagctgggtctattcatctcacaggatgaatagaagcttttttgaggaagggctctgcagaatgatgaaataaaatgaaaaaagatatgaaaacataacagggcaccacagattctaggacaagtaagagggccagagtggttggaaaacaggttatttagagaaagaggtatcagatttgaaagacaggcttaggctttgttatgaggaacactacagtttcccatttaattacaaattttgtcattttataagatgggaaattcccctttttccctatagacagtcataacatcaagtgatgggtgattcaacaattattcatgatgacagtgccaacatccctgctcatatattaaatgagacactacctgaagtagataaagtatccacaatttcacttcagaatatttggctgctatgccaaagagacaccacttatagttgtctttcaaaaaaacctggtgggggcaagtccgtgggcctcatgttga

SEQ ID NO: 259029 - DNA, 658 bp, Homo Sapiens
  misc_feature (48)..(48): n is a, c, g, or t
  misc_feature (134)..(170): n is a, c, g, or t
atcattgaaactggtattttatcaacccaatatcatataatataaatngaatcaatcaagcattgctcaaagcaatgagccagtggctaagaattgaaaatcaatggaattgagactttcttctttaagggggnnnnnnnnnnnnnnnnnnnnnnnnnnnnnnnnnnnnntatggatatgtccaaactgtgccataaatgttagattaagttactttcaaatttttttaattctaatagccctttctctatttttttcttctaattaagtatatattttgtaagttttccatctgaaattttattaccagcaatgaagtacaaagcaaaagcagcagaggcatgtcagtccagataaaatattgtcacaagccataaaatcaattagaaaccaatgatgttgcatgctttcttgatggcaacactatctgagagttaagttgacactgaacactgagtcagcttggaaaatgtccatcagtgtcaaggctacaaaagaaaatattaaaacaggacaccaatttttccccttcccactgtttattttatagcttttgcatcaggtagtcaactgaaacacttcaacatcagaaagctggcagaatgttaaggaaaaggagtgattatctctccaacagatgtgacaaaatggtttcaaa

SEQ ID NO: 259030 - DNA, 929 bp, Homo Sapiens
  misc_feature (66)..(67): n is a, c, g, or t
  misc_feature (121)..(121): n is a, c, g, or t
  misc_feature (207)..(207): n is a, c, g, or t
  misc_feature (864)..(873): n is a, c, g, or t
gttgggagcatgcgaatggagggagagctccgtagaactgggatgagagcagcaattaatgctgcnngctaggaacaagaaataattgattgaaaattacgtgtgactttttagtttgcantatgcgtttgtagcagttggtcctggatatcactttctctcgtttgaggttttttaacctagttaacttttaagacaggtttcctnaacattcataagtgcccagaatacagctgtgtagtacagcatataaagatttcagctctgaggtttttcctattgacttggaaaattgttttgtgcctgtcgcttgccacatggccaatcaagtaagcttcagctttcagtaattgttatcttagagattatgccacgtgaatgtattttattgtacatatggttaagctgagtaattcatattctgtattgtcatatatcaaatatagacatgtccaccaaaaattaaactttttaagcttcgagtgctgctggtcataaaaattaatttgtcctggttataagagtaatttttaaggttatttctaatgcatatctttaaatattttcgtaactgagagtcatatggagaaacttagtgtttgttgtaaaaagttgtgtttttttggctgagatacttagaatcaccaccagagggggcagttaagggaaaataaatgatacttttcagatattgaatagtgaaataaaaactttgggtcataagtaatgaaccaagagttattttctgatgtttaaaaatagaaatttgcgtttttaggttgtagggttgaaatttttggtaaagattctttaataatcctttgataatcacggtctacatttgtttatttttccttagaaagnnnnnnnnnnaattaataatttaagataatttaatgttgagtaaatttatatcaagcattaatgac

SEQ ID NO: 259031 - DNA, 766 bp, Homo Sapiens
  misc_feature (710)..(710): n is a, c, g, or t
  misc_feature (739)..(739): n is a, c, g, or t
gcccaaacaagaaagagatgaaaaagcaacagctagaaaaagatggatagtgatgacttgacatacagccttttaaagacagaaaagcaggctaagtcccaccggcttcaaagtgccagctcccaggaggaaaccctggaaccccatcatatcctcacaacaattccacgtttcctgagcagatgtgcatgggtccacaagggccacagggatcacgactagaaaaaaaaggtattttatagatgaagagaagttcagtgtagttaagtaaatttgtaaaggttgcagagccagcaggtcagggagctgaaatcataactcctatctgaccctaacatttatagtctttctattacacaggaatgatgtaagctttcccagcaaagtacctcttatggcagagaaaaatatttatagagaagtctagaaggcaaggttgaaatatttctttaaagtctcttttttcccctaaacaatttatgttttatatttctattttgaaatggacctgcgtttttcataaaaacaaggtaccacctacctcaaccacttcaagtaaaattaacttcccataagatatgacacatttgtcacgcgtttcatggtttccttgacacaatgacagagactcaagagtttaagaagcctacaattctatacctctaattactttttaaaaaaacttccttctatctcctctccacacctangcctatgggaggaggatgagggtgagggnttctcctcctggaactggggtcatttt

SEQ ID NO: 259032 - DNA, 768 bp, Homo Sapiens
gaagttaaataccgtttgaagatatggtaaatgatgttagctgattgacagatataaattgtagaattttatcatatatatgggggttagggtctacagtatagggcagaaatcatgtagttaaaaaattacccttaataccactttatcacccatagcttggatttttcagtaggtccagcagaacctagttttctttcagcactggaataggtagtttttcctttgcttcagcacaagactaagtagtgttccagtggcttgcactcgacccatgatgtacaaaaagtcacatactgtatctttagacgccagagtgtcacttggtccagtgagatgcttatacaatgaagagatgcatggctttgctcaggctgactgagggaggagcagattcatttatctcattttatatgcattctgaagcataagtacattgaatagaatgatgagtataattctctattcctgcttttattgaagaggaaatttgttgaaagtatagttcaatttgtgtaagttaaatgctacctcattataatagattcctacctaggtcattgatagaattgtactttgataccagttccagagtaggagttaaaaaggcttcaagagtaattgagtatggaaaatagtgtttttcttaagtcttgttgggagattgatataagtatcctttcttttatttaatattgatcttgctggtgggtttactactggcatagatacggaagtctgttctctgtggatatggataaataaatg

SEQ ID NO: 259033 - DNA, 686 bp, Homo Sapiens
aaagtgaattccatactaaaactaggaatgaaagtgagagatttctaaacttttgcgaaagtgggtcattttttgtttgactataatagcaggaagaattatagcaatctgtcattttacctgaaacagacaagcctatgtattatgaatactttcaagcttccctttggaatatacaagacatgcgtttggagttacctttgtttttctatcgtaaatttagattctggaattggggtttggtggtgcaatgtgttgctcacaagtggccagaactcctattcctaaaaggattttgagatggaggaacacatatttaattcccctttatgccttggttcttgctcctctttccacgttggataacaattttttggttgttttgtttaagttggtgctctgaagcttaatctcagtaccctttactctgaattgtcaaattttgataaaacgtgccattttctttggtaagagaaagcaggtcttaatgtctgccagaacacaatttatatgccttattggcttcattaaacttttagaaaactttagcatttgttacttttttccattgcatttactttcaaatgcacctaatgaattcgtcacccagtcgcaacttttcccttctctgtcccattgctttctcctttccccgacgcacagaataaacatgaagctcagcagta

SEQ ID NO: 259034 - DNA, 853 bp, Homo Sapiens
  misc_feature (123)..(123): n is a, c, g, or t
  misc_feature (415)..(415): n is a, c, g, or t
  misc_feature (455)..(455): n is a, c, g, or t
accagtttatatagggacagaacacacacagaactaagccttctggattatgttaaccaccaatattatagctcaccttcatcaaagtacagacaccagatagggaaaaggggatgggagaanggaggggaagggcaggcagaggcagcagggttatgtcattgatctaaacaaagttttctaaaccagattgtgccatcaatcaaaatggtcaaaccgatttagactttcaacatctccagtaggaagtgagcccataattatatacattactctgcaaaatgctattggatttttcttttgctccatccaaactctatgtaatcaggtgcacctcaggctatagtttaaggattatgggaccaaaatcttcatatgttcaacgattctgagtacaaacagaagttggggacanacactgtggaaaacagctgcattccttttctgcagtatanacaccaggtatttcaagacaaccattcaaaggcagttagttaacaacttagggtcattagaagggttgtgtgtgttccatcccaaatctactacccacagaggcttctcacctctggaaaccatgaagggaactgaaagctctggtttcaaaaccattctttgttctccccgacccaacgaagtatactggcagggaaagaaaataaactgccacttaatatatgccacaaagatgacatttccatgttttagaagatggcttgagctcaacagattgtccatggaaatgcagaaattaatttcttatgtctttcagtcccttctttccactgaaaatcctatggatgaaacaaaattaggtaaaaggagaaaaggtttgctcttaccccattccacc

SEQ ID NO: 259035 - DNA, 2132 bp, Homo Sapiens
  misc_feature (168)..(168): n is a, c, g, or t
  misc_feature (941)..(973): n is a, c, g, or t
aattgtgagcctggcccgccactcacagaatgactgaagcatgctgcagtggagaactggaaatgtatctcttgttgccctccatctccacccaccctcaagactgggacttagaattcccacgtccagcactgttgtagatgggaggtacgttgtgctgaactgctngcgctggccacatcaagacaccacatgtgttcccaagtggtattgcagctgtcctgaggcccatctcttctccctctcatattgggatctcattgggagaaagtctaggcagattcctgctctgctgggccttctcttacgccagtgtggacttcacgggatagggcagacagagtattcgttgcatttatttgttctatcactacagaagaagcatttcaaaatgtgtacaaaaggatactctattcctccagtggtacatcccttgttcacagctaaacagcaataatttaacatcatcatagaggcagactggaaatatgactgcatttctcatttacaatcctgtgcatgtactcgccagaagggcagctgaagacctaaagctgtactggatacaacagattcgacctgaacaatcaccacacacaacattataaaaaactgtattagaaagtattggaaacaatattgcatattaatatgtggttacacatgttcacagtgagtgccatcgcaccaaaagcattatgtgcttcttttttctgatgcctgtacatcttaaataagtctaataattttggttcatcttaaagtaaaaatacattgaaatgaatgagagagatctagattttaaaaaagttgaccattcattattgctggaactgaagaaaggaaggatacactggcatcacgatttgtctacataagtccagttcatctcgcgtttgttttggcaagaagaggacactacaaaactcacagtgcagtcnnnnnnnnnnnnnnnnnnnnnnnnnnnnnnnnntggtcggtggggaaccatataacaaaactacatctcaggcagctctttctcaaggaagattctaagattttattatgtggctaattctaaattggaaatggaacatgctggtatgtgaagcaattggtgctaggactttaccctttgctgatatgcaatgataatgtgatgagttttagtgactcttgaattaggataatcacactctttaggtacaaattacagaagcgatatggggcaaggagctgagatccaggctttccacatcctgggaagctggggtgtcagggagggggcggaacaagacacagcgattactagctgtaatcaacaggccaacctgttaccctccggtctccaatatttacttcaaacacaacgagagtgcatggaatctaggcacacagtagtacacagcggtacccaagacacacactcacgccatcatacaacagaagaaactacgcaaaaaaagtgtgaagtcatgcaaactcctactttaccagctagaagagaaacttcagcaacttttggtacatgatatggccaccttttaaacataagttaattacttgctgacataatatgaaaccttactttaaatacaatagtttcaaagaaaaatggtgttacaatataaaaccacaacaaaaggtgtgcaaagagacatttatattggctataaaaggcagtgagaggaaagggcaaagcagtttagaaaaaaattcctgcaatcactatttacagttctggtttgagctttgtttgaattccacttgaaaaaataactcccttcaaccaactgactcagggggatggatggaaaagaacagagtaggtgaaatttgcaacaaactgactctaagaaggctctcaccttagagatattaacttggatcaggcgcatctttctctgtgattgcatattgaaggagtgctgtctaaagcccttgatcctctgtctctcttccttcactcagtgcattggtgcagcaattttgtttattcccgtttccaaatgccacacccttctgtgagcagagaaatccatgactcaagaatggtatctttgtaaactccatcttttcaacaaaactcaaatgtttatgaggaaatatatttttgaagaccgaaggggaataattgatttatagaattt

SEQ ID NO: 259036 - DNA, 414 bp, Homo Sapiens
  misc_feature (36)..(36): n is a, c, g, or t
agtcttgagggtgggtggagatggagggcaacaagngatacatttccagttctccactgcagcatgcttcagtcattctgtggagttgtgccgccagggccctcacaatttcactaccttgtcttttacatagtcataagaattatcctcaacatacccttttgacgctgtaaaccttgagtattcatttacccttttctgatccccctggaaacagctgcctgcctgcattgcacttctcttcccgaggagtggggtaaatttaaaagtcaagttatagtttggatgttagtatagaattttgaaattgggaattaaaaatcaggactggggactgggagaccaaaaatttctgatcccatttctgatggatgtgtcacaccttttctgtcaaaataaaatgtcttggaggtt

SEQ ID NO: 259037 - DNA, 1154 bp, Homo Sapiens
  misc_feature (122)..(122): n is a, c, g, or t
  misc_feature (126)..(126): n is a, c, g, or t
  misc_feature (1024)..(1024): n is a, c, g, or t
ggcacctctcctggacctcaggcccgctccttcactgggggactgggccagctggtggtgcccagcaaagccaaggcagagaaacccccactgtcggcctcctcacaccagcagcgcccaanttgnttgagaccggtgagagtgcgggcacatcccgggctgccacgcccctgccctctctgagggtggaagcggaggctgggggctcaggggccaggacccctccactgtcccggaggaaagctgtagacatgcggctgcggatggagttgggtgctccagaagagatggggcaggtgcccccacttgactctcgccccagctccccggccctctacttcacccacgatgccagcctggttcacaaatctccagaccccttcggagcagtagcagctcagaagttcagcctggcccactccatgttggccatcagtggtcacctagacagcgacgatgatagtggctccggaagcctggttggcattgacaacaaaatcgagcaagccatggacttggtgaagtcccacctcatgtttgcggtccgggaggaggtggaggtgctgaaggagcaaatccgggaattggcggagcggaacgctgcgctggagcaggagaatgggctgctgcgcgccctggccagcccggagcagctggctcagctgccctcctcgggggtcccacggcttgggccccctgcgcccaatgggccctccgtctgagcctcccttcccttacaatgtgcctttggggctgcccggccttgcgtcagccgcctgccccctcttcctatgcagctttaatggtccccgtgtccccggggtgggagttcaaggctcagtaaaggcctggtcccccggcccctgccccatctcctcatcatccccacccttgatggaggagggagggcttcaggacggggcgtcagagggaaccccctctgggagggaaccaacccccaccctccctcctgggaccccccagcagtagacggcttgggggagtcggaggctccccggcaganaccccacccccatcttgttcccttgaggtgcctcctctcctctgcccaggggagggagtgtggacagtatctggaagttctgggattcaggttgttattaaaataataataataattaaaaactctgaag

SEQ ID NO: 259038 - DNA, 1079 bp, Homo Sapiens
ggggatgtagagggggttggaggccgggagactattcgcattctgtatcagaggaaaacgaaagaaaaagagaccaaagctttgaagacttttaaatccaaccctattgtgggcacattccttgtatactgagggcaatggagctacagagcattaacaaatactcatcttcccagatttttttccccatattttatgagctatatttttcctgatatgtttatctttgaagactctttaaaattaggccctattccataatttctatacaacaaaattatgtcctcctgcctacttttaattgaatttaagtctgcgcctgttgtgatgcttctgtgataatccttttgctgaatggcgtaagatctctactaagatccatttggcttaaacctaataaacactagtgaacacatccttaaatgacttttgtttatttcctttaagtaacacttccaaaaaaacaaattcaaggcaattcaatattcagcattagctagacttatgagccattactgaaatttctactgactttatcaaattttttcatggaatctcccaaatgcctatactcacgcataactgttaacacggcatttggtactaaattctcacacataagctttattatattatttaaggtattcttattcccaagaaattactattcaaaagaaaaccaagttggtcactttaagcaactatttgaataaatgaaaaactgaagtaattctcaggtgctttgagagttctctgtttaatttaaaaacgttttgggggagaagtaaaatagtggcctttgaaaaaatatgctgacacaagacatattgaattttgtggttttaaaaaattaacaaataatgaacttggcattttattaaatgcatcgaaaagggtcaagttatttttaatagaaaatccataattctattaaatggttgagaaattagtcacatcaatagacttctttcatttctgagcccatcttctgtactgctacaagttcctttggcaatgaccactttgctgtaaacattcttagaaaagtaggaattaggcttggcgcggtggctcacgca

SEQ ID NO: 259039 - DNA, 723 bp, Homo Sapiens
gggattagggccttaagggctctgagaggagtctaccttgccttcttatgggaagggagaccctaaaaaactttctcctctttgtcctcctttttctcccccactctgaggtttccccaagagaaccagattggcagggagaagcattgtggggcaattgttcctccttgacaatgtagcaataaatagatgctgccaagggcagaaaatggggaggttagctcagagcagagtagtctctagagaaaggaagaatcctcaacggcaccctggggtgctatgctcctttttagaatgtcagcagagctgaggattaatatctgggcttttcctgaactattctggttattgagcccttcctgttagacctaccgcctcccacctcttctgtgtctgctgtgtatttggtgacacttcataaggactagtcccttctggggtatcagagccttagggtgcccccatccccttccccagtcaactgtggcacctgtaacctcccggaacatgaaggactatgctcttaggctatactctgtgcccatgagagcagagactggaagggcaagaccaggtgctaaggaggggagagggggcatcctgtctctctccagaccatcactgcactttaaccagggtcttaggtacaaaatcctacttttcagagccttccagctctggaacctcaaacatcctcatgctctctcccagctccttttgcat

SEQ ID NO: 259040 - DNA, 452 bp, Homo Sapiens
ctgaatttcctgtgtacagcaaaatgcccttgcagcctgtgaggtgggtatcttcacacctagtgctcactagccacagtggcagagccaggctgtgaacgtggctgctgcccccaaagccaggctggtgcactcacgtccagtttgtgccagggatggagaaagaacgttgatgctgggccccctcgcctggcctggggaagactgctgctctgtggggcagcatcatgtgagcattcattgacacaggagtgaaaggctcctgtgaaaaagctgctgtttcaccaaactgttgatacccctgctctaggactacagtcatgtttgccatttgctggttcccagtcccagggagtttctttttttcaaatttttaaatagctttattgagatgtaattcacaaaccataaaatttactttttatgattttaatatgtaaacttaaaaattt

SEQ ID NO: 259041 - DNA, 997 bp, Homo Sapiens
  misc_feature (60)..(60): n is a, c, g, or t
  misc_feature (614)..(631): n is a, c, g, or t
ctggaggaacatcccagttcacaaagcccccatctcttcctctggagccagagcctgcgntggaatcaagtccaactgaaacatcagaacaaataagagagaaataagaatagaatgaatgaccccaaaatagggttttcttgggcgaggatgtgctggattaggaaaggtgacatgacacaggcagagcagagtggcacccaccacagaatacagtgtgtgttattacgaggagccagcagttgagcctaaggtccttctacctacctggtattggcatttgaggtcggaaaccctctactgccccataagccagggaaaagtgaaaagagaacacagttccttttaagaactggcagcaaggcttgaggccttatgtatgtagctgagtcagcaaggtacatgatgctgtctgctttcaaaaggacttttctctcctagctgactgactccttccttagttcaaggaacagctgagacagacctctgctgagtagctctgtgatgacaaagccttggtttaactgaggtgatcctcaggttgtgaggtttattagtccccaaggcaaacacaaatattagattaataatccaactttaatagtatacatttnnnnnnnnnnnnnnnnnngccctggaagtttgaggccaagcctgctgagtattgcagctgcatttgcccaaagggaatccagaacaagtccctccctgtattttgttcttgagaggggtcagtctagaagctagatcctatcaggatgaggagcagcagcccagggcttgtctggatcagcaccaacgattttaaagaaaaaaggaagagtttcttagatgagtaattgttattgaagatagtcagtgataaccactgaccagatgctatcaatacactatgtgtcctttttagaataaagattacatatcatcattcctttggggaaaattgttattcaggtataaaaacaagagatcataataaaaacctaaaagaacctat

SEQ ID NO: 259042 - DNA, 645 bp, Homo Sapiens
  misc_feature (28)..(28): n is a, c, g, or t
  misc_feature (76)..(76): n is a, c, g, or t
caaggtgtgctacgagggccagccagtnggtgaattcatccactgcctgcagaatcatccagaacatatgtgagtngggccagggcaggccaggccgcttttttaccccagtggagaccagcagaagcctggggtacctagtcaccaggatctccaggactcccagggagcagagtcttctcatcttttcactggaggacaggaggctatggggcccagctacgcacctggagatcctgaactgtaaagccactggcagcctcatgccacccacatttgccagaaatgcagttgccctgtccctctccagatgtggggctttctccatatcctctgggaggggtggaatcaagccccagtgctgcctgcttggtggcgggggtgatgtatgtggagaagggttgggggagaggccggtagggcaggggctgctagtggctgtctcacatacaccagtaatcctgttaaagggctgaagaagtatcttagccacaggagcgatgaggcaaggattgtcagggaggggtctgggcttctgagctgatgcaggccccaaggacccctttgctgacctctgccaggacccacacagcttcgatggatctcagtgtttgttaacaaaatacaaagatctcaaacaaaaaa

SEQ ID NO: 259043 - DNA, 2458 bp, Homo Sapiens
tggctggaccggtccggattcccgggataccggttgggccacactcaacgtgggacgaagcttcgcctactgtttgactacgtgcgtgcagcctcccctcgatgtcggccctcgaaaagagcatgcacctcggccgccttccctctcgcccacctctacccggcagcgggggcagtcagagcggagccaagatgcgaatgggccctggaagaaagcgggacttttcccctgttccttggagtcagtattttgagtccatggaagatgtagaagtagagaatgaaactggcaaggatacttttcgagtctacaagagtggttcagagggtccagtcctgctccttctgcatggaggaggtcattctgccctttcttgggctgtgttcacggcagcgattattagtagagttcagtgtaggattgtagctttggatctgcgaagtcatggtgaaacaaaggtcaagaatcctgaagatctgtctgcagaaacaatggcaaaagacgttggcaatgtggttgaagccatgtatggggaccttcctcctccaattatgctgattggacatagcatgggtggtgctattgcagtccacacagcatcatccaacctggtaccaagcctcttgggtctgtgcatgattgatgttgtagaaggtacagctatggatgcacttaatagcatgcagaatttcttacggggtcgtcctaaaaccttcaagtctctggagaatgctattgaatggagtgtgaagagtggccagattcgaaatctggagtctgcccgtgtctcaatggttggccaagtcaaacagtgtgaaggaattacaagtccagaaggctcaaaatctatagtggaaggaatcatagaggaagaagaagaagatgaggaaggaagtgagtctataagcaagaggaaaaaggaagatgacatggagaccaagaaagaccatccatacacctggagaattgaactggcaaaaacagaaaaatactgggacggctggttccgaggcttatccaatctctttcttagttgtcccattcctaaattgctgctcttggctggtgttgatagattggataaagatctgaccattggccagatgcaagggaagttccagatgcaggtcctaccccagtgtggccatgcagtccatgaggatgcccctgacaaggtagctgaagctgttgccactttcctgatccggcacaggtttgcagaacccatcggtggattccagtgtgtgtttcctggctgttagtgacctgctgtccacccctcctcaacatcgagctctgttgtaaatacgtcgcaccagaggccactgtgatgccactgtctcctctccatcccgcccagccatgtgacactggctcccggtagacgggcaccccgagatgtaccaaccttttcatgtattctgccaaaagcattgttttccagggcccttgaccaacatcggcttccccagtccagggctcccctgctcctttcccttccctgtactggggtagctcctgcctgctctccctgcgttgcctagggtaaagcctccagatttgccatactgagcccctcttcctagcatcaggcgatacatctgagttcaaatgtcttcccaggctcagggacctccattccttgagattgtcttggcatggcccagccctggcctcatgggatggacaatgcatggggtggtctttatttttccctttcaaataaaacactagtcaggtaccgttttatcccagtcgtactcttccaggtttggaagacccagagaggccaagatcccatccttagccatagcgagcggtggtggtggatagcatcacaagaaacgagcctgaaaatcaggtccagccggtccaagcacatggcctcccatctgggagagcccactgtcccactcccacatgtctgggcacctgccctgggctgaggccaggctgctccaggggcctcctgcgccctcacctgccacagagcaacccaggttaaatacagcccatgcacaaagccacaggccaaagcctatggaattgtttttaatcatcaaatttaaccattttcataactggttcctggaggtgtgcagtgcccccttgcctcttcaaacctacagcttctctttgccatttgtggatttcacatcactccacacagaaacattacagcctggcatccccagtctttgccttcttccagctgcctcgacacagcactgtggcctgtccctattgcccaggcacgccatttccaagggcaggaaggggcagtgtcctgaagcccatcttttctgtgactgtcttaggtgatgtgtagccccctccacctttccactcaacaacctcccacccctgtcctgctgcatggtccggagtctgggacctactttgttttttgttatttatgaccttgtttaaagaaaataaatatctcccaaccttaaaa

SEQ ID NO: 259044 - DNA, 1372 bp, Homo Sapiens
  misc_feature (1341)..(1341): n is a, c, g, or t
aaagatggcggcctcggcagcggtgttctcgcgcttgcgaagcgggctccggctcggctcgcggcgactgtgcacgaggttggcgacgccgccccgccgggccccagatcaggccgcagagatcgggagccgcgggagcactaaggcgcaagggccacagcagcagccgggctcagagggtcccagctatgccaaaaaagttgcgctctggcttgctgggctgcttggagctggtgggactgtgagcgtcgtctatatctttggaaacaacccggtggacgaaaatggtgccaagattcctgatgagttcgacaatgatccaattctggtacagcagttgcgccggacatacaaatatttcaaagattatagacagatgatcatcgagcccaccagcccttgccttctcccagaccctctgcaggaaccgtactaccagccaccctacacgctcgttttggagctcaccggcgtcctcttgcatcctgagtggtcgctggccactggctggaggtttaagaagcgcccaggcatcgagaccttgttccagcagcttgcccctttatatgaaattgtcatctttacgtcagagactggcatgactgcgtttccactcattgatagtgtggacccccatggcttcatctcctaccgcctattccgggacgccacaagatacatggatggacaccatgtaaaggatatttcatgtctgaatcgggacccagctcgagtagtagttgtggactgcaagaaggaagccttccgcctgcagccctataacggcgttgccctgcggccctgggacggcaactctgatgaccgggtcttgttggatctgtctgccttcctcaagaccattgcactgaatggtgtggaggacgtgcgaaccgtgctggagcactatgccctggaggatgacccgctggcggctttcaaacagcggcaaagccggctagagcaggaggagcagcagcgcctggccgagctctccaagtccaacaagcagaacctcttccttggctccctcaccagccgcttgtggcctcgctccaaacagccctgaactctgggcctcctcaaactcagtgcctgggtccagggccccagtgcttccagaccaagacttgggccaccacttgtccaataaagtacatcccagacgccacacctgctgtgtcccgagagtctccagatgggggcatcagggtgaggtccgggactcttgggtcatcgtcccacagtggctgatcggctgccaagcacagtgggggtgctttgttggatcagagcagatttttcaccctggtctcggaatctaaaaaccctcgctgtgtaatncccccagacgacgcacaacaaaaaaacatgt

SEQ ID NO: 259045 - DNA, 383 bp, Homo Sapiens
  misc_feature (307)..(307): n is a, c, g, or t
ttgatggggggagagttgggcacagatgttgacctgatctgtcactcacttccaggatatttcatgtctgaatcgggacccagctcgagtagtagttgtggactggaagaaggaagccttccgcctgcagccctataacggcgttgcctgcggccctgggacggcaactctgatgaccgggtcttgttggatctgtctgccttcctcaagaccattgcactgaatggtgtggaggacgtgcgaaccgtgctggagcactatgccctgggaggatgacccgctggcgctttcaaacagcggcaaagcngcttagagcaggaggagcagcagccctgggccgagctctccaagtccaacaagcagaacctcttccttggcttcct

SEQ ID NO: 259046 - DNA, 609 bp, Homo Sapiens
ccaggtcaggtccttcgtgctccccgtggagagcacccaggatgtgagctcccaggtcatcccagagagctctgaagttagagaagtgcagttgccaacttgtcacagtaatgaacctgaagtggtttccgttgcaagttgtgctcccccacaagaggaagtactgggcaatgaacactctcattgcacagcagagctcgcggcaaaatctggcccacaagtcataccgccagcatcagagaaaactctgcctattcaggctcaaagtcagggcagcagaacacccctgatggctgaatccagtcccaccaactctcccagcagcggaaatcacttagccactcctcaaaggccagatcagactgttacaaatggccaggatagccctgccagccttttgaacatttctgctggtagtgatgatagtgtatttgattcttcttctgatatggaaaaattcactgaaattataaaacagatggatagcgcagtttgtatgcccatgaaaagaaagaaggccaggatgccaaactctcctgctcctcactttgccatgcctcctattcacgaagaccatttagaaaaggtgtttgatcccaaagtgtttac

SEQ ID NO: 259047 - DNA, 460 bp, Homo Sapiens
  misc_feature (26)..(26): n is a, c, g, or t
  misc_feature (47)..(47): n is a, c, g, or t
  misc_feature (161)..(161): n is a, c, g, or t
agcccccggtgaacccgccccccctngccctccccaaaatgccgggnattaacaggtgtgaagccaccgcgccccacccttgaggtggccatgttttccaaagaaccatggtgccctcagttttggacacacaggaactcaaatacaatcattttccctgnctgcctaagtaatgccttggtggctgcctctggttgcagatatgtgaagttaggtagcctttcctgttaacccacggttccaagcactctctcttaacaatcattcctactgtgaattttctacccggaaaagcccaggggtgggcaataacaattaagatcatttggtttctaaaagttcttcctctctgggaaagcagaactatacagtgggtggcatcctgcagattctagtctacatttgggaaaggtgtacgcctcttgcactttcagaggaacaagtcaaaaagtaattgctt

SEQ ID NO: 259048 - DNA, 716 bp, Homo Sapiens
gccagcatcagtcggaagggtgggccccaaaactccctggatttgagcctcttaataggcaaaactgttttcatataaaccccaatcaacatcatatgctcagattcataaagaaaatttcaagtcattatggtttatttctgctaagtaggaagaactactgaagatcctttaaaatatattgtatcatgtatacattattggatttgattctggaaaataatatattctagttcataatcccttgcttgcaaattgaaagcttttttcttagcaaatttggcagcaaaacctgatctgatgtgagaggatttatcttttatttaaaagtttacttggtgtaactattcctttgtttcactgcagaaatagaatatgtttcattatatggtgctgtctctaactccacaaaatgtagggtaatatatgatacagttaataaagtccaaaaaattctgaccttcaaggcatgtctggccccagaagttttggataaggaatctatattccattataacactcacccaattctattatcttgagatgtaatacttccataatgtgtgggctttgaagtatccagcaaaagcaaagtcacagaaacacaattagcatgatttgagcatttggaagtaatataactgaaagctgttccaaggttcctctggtctaaagtatgcatatatgctattatactattgattttcctacatgtc

SEQ ID NO: 259049 - DNA, 886 bp, Homo Sapiens
  misc_feature (31)..(31): n is a, c, g, or t
  misc_feature (82)..(82): n is a, c, g, or t
gggtcccccaatggtccctaaagcccaatcnactttgcctgtgaattgccttttaggccatggtcaaagtaacccattcccncccaataagatatgagggaaaagtcagttgtgggactcttgggaaaggtttctttgctctcataaagacacacccaggcgaagatggcccctttttgtttctggagctttctgcaggggagaggagctagtgaaatctgtaaactgctatcgccatcttgtggtcacaagaagaattagcccgaggaatggggcagcatacaaagcagggcagagcccaagagaacaccagagagccagagccctgataatgccataccctggaactgccctgtcttaagggttctcacgtgaagcagtgagtgttcttattactggagccatgagtcatgctttctgcttctttcactaaaaggcatctttcatttacttggcaaatcacctcttaactctattccgctgcctccctagagcaaaaaaccctatttaaaacttgtactattttagcaatccaaggaaataaaggaagagggaactgtcatttgcaaatgcctatagagtagaatattaaatacatattagaaccctcaaaatgacttaacattaacagatcaatatatgagaacatttattgagcagttgctccatataaaaaactgagctggaagctttatatgtattatcaaatttaatcctcattgcaaccctatattatctacctattataaacaaaagtgaaactatgaataattcgctaaaatcaaatacatgcaactgataagtggaagaggtagattttgaagctagtatggctggctccaaagtccacacttttttcttcctatcttacatttaaaaaactcta

SEQ ID NO: 259050 - DNA, 684 bp, Homo Sapiens
  misc_feature (543)..(543): n is a, c, g, or t
  misc_feature (663)..(663): n is a, c, g, or t
gggtcccggaaatcctgccttccatatgtgggcttccgcaggcagcctgagccagctatggctcacgttctgcaagcccaggcctgccaccagagggaaagtgccctagatgcccaggcatgccttcctcttggtggccaaagatttcccaggcagctcccagcaggctgtgagggggggctttccagaaatatgcccttaaagatgctctgatagagaaaacataacatgttctttggcaggttgtgggcatctatcatacagtaatcatgggcagtcgggatggtgtaggattggagcctcccgatgtctagacactttggtctgttcacagtttcaaaaacattttaattacaaaccactttatggtgtaaggtgacccacatggagttatcaagaacttctgagtaagtttgctaacttcttttgtggcagctgcaagttgactcaaaactacattccgctggtgagtatgggttgtctggcctggaaaacatgtgtgagttgctctaaggggctcgctgttctcttactatctggaangcctcaaagttcctctggtgggaaagattttcttctgcaaacaccctggggatttgtctcttgaaaaatcagggttttgggactctcctacgtaaccatcttctgtgggttggatatcanatgtgtatccaacccccagaa

SEQ ID NO: 259051 - DNA, 326 bp, Homo Sapiens
cctgtattttctgtatgaaactgccaatatcatgaatagaaagggagaaccataaaggagaaagaacgtgatgttctgttatgttcatgtaaacctaaagaaacagtgtggaggcaggcgcgatcagccgaactctagggacttggtgttgcttggaaggcatccatacctgcattttgcattcttcgtatgtaatcatattgccaaagacaaactatttcatcatttattgtaaataacacttttccccagacctaccataaagtttctgtgatgtattgtcttccagttgcaataaaaattactgagttgcatcaattgaagaa

SEQ ID NO: 259052 - DNA, 1711 bp, Homo Sapiens
  misc_feature (53)..(53): n is a, c, g, or t
  misc_feature (1082)..(1082): n is a, c, g, or t
  misc_feature (1499)..(1499): n is a, c, g, or t
  misc_feature (1546)..(1546): n is a, c, g, or t
  misc_feature (1609)..(1609): n is a, c, g, or t
gaacttagtggtggtcagaggtctttagtggcctggtcattaatactgtccangttctcttcaaacctgctccaatttatatccttgatgaggtagatgcagccttggatctttctcatacccaaaacattggacagatgctgcgtactcatttcacacattctcagttcattgtggtgtcactaaaagaaggtatgttcaacaatgcaaacgttcttttcaaaaccaagtttgtggatggtgtttctacagtagccagatttactcaatgtcaaaatggaaagatttcaaaggaagcaaaatccaaggcaaaaccacccaaaggagcacatgtggaagtttaaactacaaagttatttcttcatcttgacctgtttttttaaatgtaaacttttaaggacttgagataactaatttgtttatatacaaaaattaatgttactgtgttacttaacccatgttttctctttatataatcacttatcgcttacaaatgagcatatattcctcatctcttaactagtctaattatggtccaattattgcggttgtgattttatgcatatcatcaaatgtttttttcttatgcgggtcttttatatattagggatcctgagatacccgattctatatgtaaaagctaatatacaaaaaagcagattaaattacatgatagatgtacccgccaaacaaagggaaccgccgcgaaagccgacaacgagcgagacacgcaccggccgtagtaagtattggtcgcgcgccctccgcccctcaaaaacttttcaaaaccgttcatttgggccgggcggcccccggtgggaaagcggaacagggtcctaacgcgggttcccgagggaaaacccgcggcaccggaatcaagggcctgggaattcccgcacaccaaaaaaaagacgcccccggcgggcacaacgataaccgtggtctcggaaacacaatacccccgaacgcgggaagtccctggaggaggtgccgttcgtcgcgggacattctccgccccggcgcaggagaaacggtcccgagaggccgcacgatctctcgcgatatagttctaccagaaattnattaagtgcccgccgcctgcgatcgtctggtgtgtgtcgagcgaggtacccctgtcgccggcgacacaaaaataaaccgtgcgggtatagcgcgggcaaaaatcctcgcacccaccccttgatacacgagtgcagcgacttctttctcccgatcgccccccggtggcaacaataatggacggggcggaaaaacgctcacggtcccccaccctacataaggttgggcgctcgctctttgccgccgcgtgccaccccccccttttataaatcaccccgcaccgcacaagccggcgggggcgctgccgcttgatcatcccccccctgttgtttttggcgcccccttttccgcgccgctaacgcataaatttctctctgcgcccgccgctcgtaccgggcgaaaacagatatccggggggntgtataagacaagaagaaccgctgcgcgccgccactaatatgggcgncccacacgtgctgtatggcgcgtaccgaaagaccccggcggggggaaagtatcttccccccgncgtccggttgatctacggcgctttccactgcagcagaccacccacctgtttttcctcgcacaagataaacaggtctactgatcgggggacaccaagagcggc

SEQ ID NO: 259053 - DNA, 561 bp, Homo Sapiens
cccaaatttgtacagaattgaacagagcaaagatatttttcagagctggagttctggcacacttagaggaagaaagagatttaaaaatcaccgatatcattatcttcttccaggccgtttgcagaggttacctgcacagaaagacctttgccaagaagcagcagcaactaagtgccttaaaggtcttgcagcggaactgtgccgcgtacctgaaattacggcactggcagtggtggcgagtcttcacaaaggtgaagccgcttctacaagtgactcgccaggaggaagaacttcaggccaaagatgaagagctgttgaaggtgaaggagaagcagacgaaggtggaaggagagctggaggagatggagcggaagcaccagcagcttttagaagagaagaatatccttgcagaacaactacaagcagagactgagctctttgctgaagcagaagagatgagggcaagacttgctgctaaaaagcaggaattagaagagattctacatgacttggagtctagggttgaagaagaagaagaaagaaaccaaatcctccaaaatg

SEQ ID NO: 259054 - DNA, 1201 bp, Homo Sapiens
  misc_feature (301)..(325): n is a, c, g, or t
  misc_feature (952)..(952): n is a, c, g, or t
  misc_feature (1002)..(1002): n is a, c, g, or t
  misc_feature (1084)..(1084): n is a, c, g, or t
  misc_feature (1090)..(1090): n is a, c, g, or t
ggtctgggtgctgaggttgacccgatgggcaggtgaagaaaatcaccttctccattccccttgatttctttatcgtgtgccgcacgaggcatgctgaagggacacacacctttccccctttttatttacaaagtagagagctgagaaagacagctcatgttctgttttgttttgtacacattatctttctcaagagatgtgatgtccttaagtaaactgacctgccttcatggcttgtcctgtaatgaatgcgttcaagacagtgttttggggacaggaaagaggcattcttaggtaagcnnnnnnnnnnnnnnnnnnnnnnnnnagaggaaacccttctaggaagtagttcaatgaaaaacctaaaaatgcccaaataaacattcgcttacatattatatatcttgggcttctttttatgacagttcattcagggacccagtcagtaaacaggtagttaacttcgtgtaaccaagcaagggttttgtttatcttttttaaagtagaaaaaagtgaggctcaaactctctctttctccttgtcataactattggtttacagtctttatttgtttaaaagtaaagcacattgtatgtatttatttggcaatacatgaggccattaaaaccctgagcctaaggtaccacagttagtctcatttgcctcttgtcctgtgaactccacttagaatgtcattgaacttgggcagacataattctagtgtctgttccaaacgcactgtgtcacagaagctagaattaccattagaggcacaaacccctgagaatacacaagggggcacgcttccagtagatgtgttggggaaggaggagggcagaggggacaggggacaggattcagctttttgtggtgggtcctgagggttcctaccaggggtagccaggatctgggaaacagatcagcgactctagtctgaagtggctggcctggnttcggggggctgccttcagcaagattcaggcaggagagacggaaatagcncaccttccagggcgtgagtcctggagataaaaatggattttaacctaggacttgccgggagctggccctccgcggctgtcanaactanggcctgtgtgtgctggctctccccctgttttcggtgtctaactggcttttttctctttatggcttggcttcattcccgaacctgggggtgggggccacatcccaaccactt

SEQ ID NO: 259055 - DNA, 1093 bp, Homo Sapiens
  misc_feature (274)..(311): n is a, c, g, or t
  misc_feature (1023)..(1023): n is a, c, g, or t
  misc_feature (1054)..(1054): n is a, c, g, or t
  misc_feature (1062)..(1062): n is a, c, g, or t
cctgctttgccgaagtgggagaaaaaacagaggaaagaagagtagaaagggatattcttaaggaaatgttcccctatgaagcatctacaccaacaggaattagtgctagttgccgcagaccaatcaaaggggctgcaggccggccattagaactcagtgatttcaggatggaggagtctttttcatctaaatatgttcctaagtatgttcccttggcagatgtcaagtcagaaaagacaaaaaagggacgctccattcccgtatggataaaaannnnnnnnnnnnnnnnnnnnnnnnnnnnnnnnnnnnnngtctatcaagctatggaaaccaaccaagtaaatcccttctctaattttcttcatgttgaccctagaaaatccaactgaatggtatctctttggcacgttcaacttggtctcctattttcaataactgttgaaaaacatttgtgtacacttgttgactccaagaactaaaaataatgtgatttcgcctcaataaatgtagtatttcattgaaaagcaaacaaaatatatataaatggacttcattaaaatgtttttgaactttggactagtaggagatcactttgtgccatatgaataatcttttttagctctggaactttttgtaggctttatttttttaatgtgggcatcttatttcatttttgaaaaaatgtatatgtttttgtgtatttgggaaacgaagggtgaaacatggtagtataatgtgaagctacacatttaaatacttagaattcttacagaaaagattttaagaattattctctgctgaataaaaactgcaaatatgtgaaacataatgaaattcagtaagaggaaaagtaacttggttgtactttttgtaactgcaacaaagtttgatggtgtttatgaggaaaaagtacagcaataatctcttctgtaacctttattaataggtaatgttgttgtagccctatcatactcactttttaaggacacaggtatcatggaaagtccctatttcaggtaaggnccccttttacatacagtaggatttttaggcnggggatcnttttaggtgttaccttacctatttttagggg

SEQ ID NO: 259056 - DNA, 480 bp, Homo Sapiens
  misc_feature (274)..(286): n is a, c, g, or t
  misc_feature (437)..(437): n is a, c, g, or t
  misc_feature (458)..(458): n is a, c, g, or t
aaaacagaggaaagaagagtagaaagggatattcttaaggaaatgttcccctatgaagcatctacaccaacaggaattagtgctagttgccgcagaccaatcaaaggggctgcaggcggccattagaactcagtgatttcaggatggaggagtctttttcatctaaatatgttcctaagtatgttcccttggcagatgtcaagtcagaaaagacaaaaaagggacgctccattcccgtatggataaaaattttgctgtttgttgttgtggcagnnnnnnnnnnnnnggtctatccaagctatgggaaaccaaccaagtaaatcccttctctaattttcttccatgttgacccctaggaaaatccaactggaatgggtatctctttgggcacgttccaacttgggtctcccgattttccaataaccgttggaaaaacntttgtggtacacttgttgaancccagaactaaaaataatgtga

SEQ ID NO: 259057 - DNA, 646 bp, Homo Sapiens
tgtattccatgcccagcgctgccacgtgaatgtactctgctcacttccttcctggataacccatagccccacctcatcctcctaacccttgctttcctccctgaagtcagagagatcctactcaagagataactgctcctgacagcccttattacagaactgaagtactctccttagcttcagctctgtgcccacgtgccttggctttggatacaaggtactacagcactttgtccactctccaggcttacctgtgtcattccacatgcacatcttagaaaatgccagccttagagaattctccctagccccaaaatgtctttgcccagtgcaattccttcttcctgtattacccctttccctccttcacactatctgcctggctaattcttatttatccttagttcaagtatggccttttctgggaaggtgaccctccttggccaccccttgcatatactttgatccctagggcacaccccctttatttccctcatagaaacagccttctgtaaattgttccatgacaacctgtatttcaatttgtaagaaatttgcatgtactgtgagctccccaacgtcaggagactgacccttttgatatcattgctaagcctcattaaatgaatgaatgaaaatgttaaaa

SEQ ID NO: 259058 - DNA, 531 bp, Homo Sapiens
  misc_feature (76)..(94): n is a, c, g, or t
  misc_feature (129)..(214): n is a, c, g, or t
  misc_feature (496)..(496): n is a, c, g, or t
aggactcacgtgttgctcccaccttctcagcctcccaagtagctggggactcaggcgtgtgccaccacacttggcnnnnnnnnnnnnnnnnnnncagagatgtggtttctgcaaaaccccatctcaaannnnnnnnnnnnnnnnnnnnnnnnnnnnnnnnnnnnnnnnnnnnnnnnnnnnnnnnnnnnnnnnnnnnnnnnnnnnnnnnnnnnnngcaaaccctattttttatgatatgcaaaaaagtcctgtttcttactttcatatggagatggcagtttcttttccctttagatatctaacaagtaaacttcctgaaggatatttggctacagaagctcagaaagctatgagctgaatgtctggatactacttgtttcacttcatggttcaattaagaagaatagtcacaacttagaccagttatttttaatctaggaaggatgaactcttaaggaggccactaatgggcatgtaacaaagtaattcatataanaaaagtttaagtataacattctggttaggggcata

SEQ ID NO: 259059 - DNA, 943 bp, Homo Sapiens
tgctgggcaagcccaagcctgaagagatgaatgtcaagatgctggactttgagacgttcttgcccatcctgcagcacatttcccgcaacaaggagcagggcacctatgaggacttcgtggagggcctgcgtgtctttgacaaggagagcaatggcacggtcatgggtgctgagcttcggcacgtccttgccaccctgggagagaagatgactgaggctgaagtggagcagctgttagctgggcaagaggatgccaatggctgcatcaattatgaagcctttgtcaagcacatcatgtcagggtgaagcagagtcttccaggtgagtgcagcctctccctcctggtcccttccggggtcacatagggccttaagaataacaccatgtgccctagaaggcatctgtcccagccctgaccccttaagaggaaacctcttgggatcaggaagtgaggacagccctgctcactcaccatctcctgtctcctgcctgcccttgcctgttcaccctgtcttgaccctatcagtcacatcctcttgcctctcccaggatctctcaaggcaatgcccttccctcaagcctggggccctcctgtacaggctcctgggagtgagaaagccgatcccaagtggaagagaaggtccctggcctgtgctcttgaccccgttcttcctcacttctttccctaggttttccctgggatccccctgggtgtggtaaggggctgggtctaggagggtgaaatgccctttcctcctagcactttctttcaggtgcctggcccttggctttagccataccagggtgagttaaagagaggccccggctgggtgagctgagatggagtcctcgacttatcaccacaccactgccccaaggaccttacaggccctccctgttaataaacagctctaacacggccaggctgggctctgggattctga

SEQ ID NO: 259060 - DNA, 447 bp, Homo Sapiens
  misc_feature (29)..(29): n is a, c, g, or t
  misc_feature (37)..(37): n is a, c, g, or t
  misc_feature (59)..(59): n is a, c, g, or t
  misc_feature (282)..(282): n is a, c, g, or t
gggacttttgaaaacgttcttgccccaancctgcaancacatttccccgcaaacaaggnagccagggccaccctatgaggaacttcgtggagggccctgccgtgtcctttgaacaaggagagccaatggccaccggtccatgggtgcctgaagcttcggcacgtcccttgcccaccccgggagagaagatgactgaggcctgaagtggagccagctgttagctgggcaagaggatgccaatggctgcatcaattatgaagcctttgtcaagcacatcatgtncagggtgaagcagagtcttcccaggtgcctggcccttggctttagccataccagggtgagttaaagagaggccccggctgggtgagctgagatggagtcctcgacttatcaccacaccactgccccaaggaccttacaggccctccctgttaataaacagctctt

SEQ ID NO: 259061 - DNA, 858 bp, Homo Sapiens
ggtttccaccaattggcaagaagggatcagcctgtcctagagatcactcctctgccaaagatcccaacaagacaacatggctcccaagaagcctgagcctaagaaggaggcagccaagccagctccagctccagctccagcccctgcaccagcccctgccccagctcctgaggctcccaaggaacctgcctttgaccccaagagtgtaaagatagacttcactgccgaccagattgaagagttcaaagaggccttttcattgtttgaccggaccccgactggagagatgaagatcacctacggccagtgcggggatgtactgcgggccctgggcagaaaccctaccaatgccgaggtgctgcgtgtgctgggcaagcccaagcctgaagagatgaatgtcaagatgctggactttgagacgttcttgcccatcctgcagcacatttcccgcaacaaggagcagggcacctatgaggacttcgtggagggcctgcgtgtctttgacaaggagagcaatggcacggtcatgggtgctgagcttcggcacgtccttgccaccctgggagagaagatgactgaggctgaagtggagcagctgttagctgggcaagaggatgccaatggctgcatcaattatgaagcctttgtcaagcacatcatgtcagggtgaagcagagtcttccaggtgcctggcccttggctttagccataccagggtgagttaaagagaggccccggctgggtgagctgagatggagtcctcgacttatcaccacaccactgccccaaggaccttacaggccctccctgttaataaacagctctaacacggccaggctgggctctgggattctgaat

SEQ ID NO: 259062 - DNA, 1336 bp, Homo Sapiens
  misc_feature (62)..(62): n is a, c, g, or t
  misc_feature (123)..(123): n is a, c, g, or t
  misc_feature (656)..(696): n is a, c, g, or t
  misc_feature (1219)..(1219): n is a, c, g, or t
acagatgaatcgaaagatagctccggccctgcaactcaactgcagacctgctgaaacaaggngcagcctgcaatgtgctcttcatcaactctgtggacatggagtcactcactgggccacagnactcatcataaagccacatctgagacgttggctgcagaccccacgccagctgccaccatcgttcacttcaaagtctctgcccagggaatcactctgactgacaacccagagaaagcttctttttcagacgccactaccctctcaacactgtcaccttctgtgacctggatccacaggaaagaaagtggatgaaaacagagggtggtgcccctgctaagctcttcggcttcgtggcccggaagcagggcagcaccacggacaacgcctgccacctctttgctgagcttgaccccaaccagccggcctctgccatcgtcaacttcgtctccaaggtcatgctgaatgccggccaaaagagatgaaccctgccccttgcccagggccagtgccatggggaaggggcttgtggggaaggggacccatgaatcctgaccactcttgaacccagaaggaggactttgggccaatttcggaggagagaagaaagtgcaacgtggggagagggaagtgaattgcagaggggagggggaaannnnnnnnnnnnnnnnnnnnnnnnnnnnnnnnnnnnnnnnnaagatggaggagaagaacttggattcccctgggtagatggaaactgcaaaaacccaaagcctccaaaactaaccaggtccacctaacaccccctccctcccctaagaagatggatgtcctcaaaagagaaggaacaaacctccttgggaatccacattttttgggggaatggaaaagctctgtctccctaactcaactgctttgcaaggggaaatcaagctgggagaatctttttctggccacctgtagggtaggttgtcaaaccaaacagagccaccgtgggacatcaagtggaagaacttgtttgcttgaaagtatctcagacccaaggcacctcaggtctctttgctgtgcctccactatattgtcgtgtgggtgtgtgtctgcacccacatcctcacacattgatctagatctgcctttatccactcgaattataaacagctcggcttgtccttgtcccatgtgtttgtagacacacatgcatactgtccaaagattagggttggtggtggcagtgcancaggggagggacaaacaaccaagctatgggtgacagaggctctctcctggtgcctgcacctgcactctagtgaccctgggtgccgccagacccttctcttctacaaagaccccacca

SEQ ID NO: 259063 - DNA, 677 bp, Homo Sapiens
ctcagcttaaaattaaggaattagaccacaacatcagcaaacataaacgggaggctgaagatggtgctgcaaaggtatccaaaatgttgaaagattatgactggattaatgcagagagacacctctttggccaacccaatagtgcctatgatttcaaaactaacaaccctaaagaagctggtcagagacttcagaagttgcaagaaatgaaggagaaactaggaagaaatgtcaatatgagagctatgaatgtattgacagaagctgaagagcgatacaatgacttgatgaagaagaagagaattgtagaaaatgacaaatccaaaattcttacaactatagaagaccttgaccagaagaaaaaccaagccctaaatattgcatggcaaaaggtgaacaaggactttgggtctattttttctactcttttgcctggtgctaatgctatgcttgcaccaccagagggtcaaactgttttggatggtctggagttcaaggttgccttgggaaatacctggaaagaaaacctaactgaacttagtggtggtcagagacaaaaacagcagaaccatactacaggttaaaggaagttctcaggcaaaaggaaaatgataccagatggaaccttgggatctacataaaggaaagaagagtgttggaaactaacatggatttgg

SEQ ID NO: 259064 - DNA, 832 bp, Homo Sapiens
caccaaaccatttgtagagctacaaaaggtatcctttcttattttcagtagtcagaattttatctagaaatcttttaacacctttttagtggttatttctaaaatcactgtcaacaataaatctaaccctagttgtatccctcctttcagtatttttcacttgttgccccaaatgtgaaagcatttcattcctttaagaggcctaactcattcaccctgacagagttcacaaaaagcccactttagagtatacattgctattatgggagaccacccagacatctgactaatggctctgtgcccacactccaagacctgtgccttttagagaagctcacaatgatttaaggactgtttgaaacttccaattatgtctataatttatattcttttgtttacatgatgaaactttttgttgttgcttgtttgtatataatacaatgtgtacatgtatctttttctcgattcaaatcttaacccttaggactctggtatttttgatctggcaaccatatttctggaagttgagatgtttcagcttgaagaaccaaaacagaaggaatatgtacaaagaataaattttctgctcacgatgagtttagtgtgtaaagtttagagacatctgactttgatagctaaattaaaccaaaccctattgaagaattgaatatatgctacttcaagaaactaaattgatctcgttagaattatcttaataaaataatggctataatttctctgcaaaatccagatgtccgcataagcgaatggataatacctaataaactgccctcaattaaatccatggttaataaaatgtggtttctacatt

SEQ ID NO: 259065 - DNA, 1652 bp, Homo Sapiens
  misc_feature (1622)..(1622): n is a, c, g, or t
  misc_feature (1625)..(1625): n is a, c, g, or t
  misc_feature (1635)..(1635): n is a, c, g, or t
agatttaaatcatcccaatatagtgaagttattcgaagtcattgaaactgaaaaaacactctacctaatcatggaatatgcaagtggaggtgaagtatttgactatttggttgcacatggcaggatgaaggaaaaagaagcaagatctaaatttagacagattgtgtctgcagttcaatactgccatcagaaacggatcgtacatcgagacctcaaggctgaaaatctattgttagatgccgatatgaacattaaaatagcagatttcggttttagcaatgaatttactgttggcggtaaactcgacacgttttgtggcagtcctccatacgcagcacctgagctcttccagggcaagaaatatgacgggccagaagtggatgtgtggagtctgggggtcattttatacacactagtcagtggctcacttccctttgatgggcaaaacctaaaggaactgagagagagagtattaagagggaaatacagaattcccttctacatgtctacagactgtgaaaaccttctcaaacgtttcctggtgctaaatccaattaaacgcggcactctagagcaaatcatgaaggacaggtggatcaatgcagggcatgaagaagatgaactcaaaccatttgttgaaccagagctagacatctcagaccaaaaaagaatagatattatggtgggaatgggatattcacaagaagaaattcaagaatctcttagtaagatgaaatacgatgaaatcacagctacatatttgttattggggagaaaatcttcagaggttaggccgagcagtgatctcaacaacagtactggccagtctcctcaccacaaagtgcagagaagtgtttcttcaagccaaaagcaaagacgctacagtgaccatgctggaccagctattccttctgttgtggcgtatccgaaaaggagtcagaccagcactgcagatagtgacctcaaagaagatggaatttcctcccggaaatcaagtggcagtgctgttggaggaaagggaattgctccagccagtcccatgcttgggaatgcaagtaatcctaataaggcggatattcctgaacgcaagaaaagctccactgtccctagtagtaacacagcatctggtggaatgacacgacgaaatacttatgtttgcagtgagagaactacagctgatagacactcagtgattcagaatggcaaagaaaacagcactattcctgatcagagaactccagttgcttcaacacacagtatcagtagtgcagccaccccagatcgaatccgcttcccaagaggcactgccagtcgtagcactttccacggccagccccgggaacggcgaaccgcaacatataatggccctcctgcctctcccagcctgtcccatgaagccacaccattgtcccagactcgaagccgaggctccactaatctctttagtaaattaacttcaaaactcacaaggagaaacatgtcattcaggtttatcaaaaggcttccaactgaatatgagaggaaacgggagatatgagggctcaagtcgcaatgtatctgctgagcaaaaagatgaaaacaaagaagcaaagcctcgatccctacgcttcacctggagcatnganaaccactagnttcatgggatccccggg

SEQ ID NO: 259066 - DNA, 908 bp, Homo Sapiens
  misc_feature (652)..(652): n is a, c, g, or t
  misc_feature (818)..(818): n is a, c, g, or t
  misc_feature (842)..(842): n is a, c, g, or t
cactttccacggccagccccgggaacggcgaaccgcaacatataatggccctcctgcctctcccagcctgtcccatgaagccacaccattgtcccagactcgaagccgaggctccactaatctctttagtaaattaacttcaaaactcacaaggagtcgcaatgtatctgctgagcaaaaagatgaaaacaaagaagcaaagcctcgatccctacgcttcacctggagcatgaaaaccactagttcaatggatcccggggacatgatgcgggaaatccgcaaagtgttggacgccaataactgcgactatgagcagagggagcgcttcttgctcttctgcgtccacggagatgggcacgcggagaacctcgtgcagtgggaaatggaagtgtgcaagctgccaagactgtctctgaacggggtccggtttaagcggatatcggggacatccatagccttcaaaaatattgcttccaaaattgccaatgagctaaagctgtaacccagtgattatgatgtaaattaagtagcaattaaagtgttttcctgaacactgatggaaatgtatagaataatatttaggcaataacgtctgcatcttctaaatcatgaaattaaagtctgaggacgagagcacgcctgggagcgaaantgggccttttttctacgaatgcactacattaaagatgtgcaacctatgcggccccctggccctactttccgttacccctgaagagtcggcgtgtgggccccatctccatggtgcctccccgtctggggtggggtgtgaaaagtggaccggtatgtggtgttgaaantggtgtatatgggaagcaatcttnccctacacttgggcaagccagtcaattactaagtaccccctggcggggagatcaatccgggggcct

SEQ ID NO: 259067 - DNA, 575 bp, Homo Sapiens
  misc_feature (34)..(34): n is a, c, g, or t
  misc_feature (48)..(48): n is a, c, g, or t
tctcccgcgtgccccatctcccgtggaacgcaanaagaaccaaaaaancgcctcccctctgcctccaaatccgcaattaatggccgtccaaacacttttgcggaattccccgcaaccatgtcccccgggaacccattgaaactaatggttttcaatgccccccaggtgaaaccgtagggaaccgaaggctttgccttcctttgttttccaacctttttgctcaagcagaatacattgcgactccttgtgaagttttgaagttaatttactaaagagattagtggagcctcggcttcgagtctgggacaatggtgtggcttcatgggacaggctgggagaggcaggagggccattatatgttgcggttcgccgttcccggggctggccgtggaaagtgctacgactggcagtgactcttgggaagcggattcgatctggggtggctgcactactgatactgtgtgttgaagcaactggagttctctgatcaggaatagtgctgttttctttgccattctgaatcactgagtgtctatcagctgtagttctctcactgcaaacataagtatttcgtc

SEQ ID NO: 259068 - DNA, 630 bp, Homo Sapiens
  misc_feature (197)..(197): n is a, c, g, or t
  misc_feature (418)..(418): n is a, c, g, or t
  misc_feature (571)..(571): n is a, c, g, or t
aaaaccacatggaacatgcaggccatggagggattacctaatccttttttggtctgagatgtctagctctggttcaacaaatggtttgagttcatcttcttcatgccctgcattgatccacctgtccttcatgatttgcttaaaaaaggtaaactgttcattagcagagtaaaatgaaatattctgataacccgtantatttacaaaaatttattttcaacatttcattgactatcgttcaaagcataaactcaaaaaatattttttaatgtttcaattcttgcttaaaaagccgcaggatatatccagtatggcatacaaatcaagcaaagatctaaggtcactctaaagactctccgaaagttactgcttgtttccacctacatgattacctctagagtgccgcgtttaattgggntttagcaccaggggaacgtttgaggaaggttttcacagtctgtaggacatgtaggaaggggaattctgtatttccctcttaatactctctctctcagttcctttgggagagggtacagaggggaaaggaaaccgaggtaagggtcaacccttnggggtttagggtttaaccaaaacacaacaaaaaaccccctggggaaccccccccgcact

SEQ ID NO: 259069 - DNA, 514 bp, Homo Sapiens
tgataaacaaatattcttaatagggctactttgaattaatctgcctttatgtttgggagaagaaagctgagacattgcatgaaagatgatgagagataaatgttgatcttttggccccatttgttaattgtattcagtatttgaacgtcgtcctgtttattgttagttttcttcatcatttattgtatagacaatttttaaatctctgtaatatgatacattttcctatcttttaagttattgttacctaaagttaatccagattatatggtccttatatgtgtacaacattaaaatgaaaggctttgtcttgcattgtgaggtacaggcggaagttggaatcaggttttaggattctgtctctcattagctgaataatgtgaggattaacttctgccagctcagaccatttcctaatcagttgaaagggaaacaagtatttcagtctcaaaattgaataatgcacaagtcttaagtgattaaaataaaactgttcttatgtcagtttaaaaaa

SEQ ID NO: 259070 - DNA, 879 bp, Homo Sapiens
tgaagtttttcgaagtagtagactctcatcagatgctacagttttgacaccaaatacagaaagcagttgtgatttaatgaccaaaactaaatcaactagtggaaatgacgacagcacatccttagatctagagtgggaagatgaagaaggaatgaatagaatgcttccaatgagagaacgttccaaaacagaggaagacattctacgggcagcacttaagtatagcaacaagaagactggaagtaatcctacatcagcctctgatgattccaatgggctggagtgggaaaatgattttgttagtgccgaaatggatgataatggaaattccgagtattctggatttgtaaatcctgtattagaactgtctgattctggcataaggcattctgacacagatcaacagactcgatagggtaaaattgtgtgaccttgtttatcagttatgaccaaatgttaaaaaccaactagaatgtataagtgattgtgcttagcctttttgtaagggagatgtgtaagaaaccatgttgtaaatgcttattttattacaaaggagtagggatgataggatctgaattgatacagaattaagtgcaatttcatcatctgccttctgcttttcaagaccaatttaatggtcctgtcatgttactgattaaatttactttgtctggtctttatagcatttctgtttactatggtagatttccactttcaatttttaaaattaattttactttgaatgatttatgaagcctatttcattgtctaactatgaaaatattaagacttttttgttaattctcagccgatgtgaaggaagcatgaggagggatcgtcagattcagatttagaatagtgttcccgtttccagcatta

SEQ ID NO: 259071 - DNA, 966 bp, Homo Sapiens
tgcccagaacgccgtcccacctgcagacaccctgctgccagaactccaacaggtccccgaggtagcgaggccaagccatgcccattcactcctgcaccatctcagtgtgctccctcacacagggcctgagatgtgtggggcccatggcctggcagtgaaccatctaaaagcattatctatttttcaagcataaaccacgcagagaggctcagatgcatcgctgggctacagaagtggcctctggggaatctggagtatgttcagcctgccgaccgataactacgttccaggtggtgacaagtattagcgtcaactcaggtagatgccttttaaaaacgccctgccagaaacaccctagggaaaactggagtgaagagcgggtctttcagaacatttggtactttctggatgaatatctttttgatataccaagaggtatcaagtcaaagtctcacttctatagcgaggaagccattaacttgctgaatcctaaagggaagaatcaagccgcaggccacaggcatcctggacttagcttacatgagtcttacaaggccaggggcgggtcagagaaaagcagcggggtgaagtgtggagtgtggaagcaggggtgcagcagtgtgctagatctgtttcctttgaagtacagcagcttggcagcatgaagcatgagttgttccactgttctactgggtgtatggagctgggccaacaacctcagcagactatctaatgttctaagagccttcctcaaagaaaatgtttccaggacgggggagaaggccagaatgcatctgcaattccaacaggcatcgctatgctcttccttggtctgtaaggactggatgcctggagtagactgttttaagtaccaaaacaagacacccattttagtgtggaggaagaccagcctatatggcccagagcaataatatttggcatgagtatgccactcttgagaaaatt

SEQ ID NO: 259072 - DNA, 919 bp, Homo Sapiens
  misc_feature (869)..(869): n is a, c, g, or t
taaagaaatggttggttggtggttttttttagtttgtatgccaagtgagaagatggtatatttggtactgtatttccctctcattttgacctactctcatgctgcagagggtactttaagacatactccttccatcaaatagaaccactatgaagctacctcaaacttccagtcaggtagttgcaattgaattaaattaggaataaataaaaatggatactggtgcagtcattatgagaggcaatgattgttaatttacagctttcatgattagcaagttacagtgatgctgtgctatgaattttcaagtaattgtgaaaaagttaaacattgaagtaacgaatttttatgatattccccccacttaagactgtgtattctagttttgtcaaactgtagaaatgatgatgtggaagaacttaggcatctgtgggcatggtcaaaggctcaaacctttattttagaattgatatacacggatgacttaactgcatttttagaccatttatctgggattatggttttgtgatgtttgtcctgaacacttttgttgtaaaaaaataataataatgtttaatattgagaaagaaactaatattttatgtgagagaaagtgtgagcaaactaacttgacttttaaggctaaaacttaacattcatagaagggtgggagttttaactgttaaggtgctacaatgcccctggatctaccagcataaatatcttctgatttgtccctatgcatatcagttgagcttcatataccagcaatatatctgaagagctattatataaaaaccccaaactgttgattattagccaggtaatgtgaataaattctataggaacatatgaaaatacaacttaantaataaacagtggaatataaggaaagcaataaatgaatgggctgagctgc

SEQ ID NO: 259073 - DNA, 692 bp, Homo Sapiens
  misc_feature (31)..(31): n is a, c, g, or t
  misc_feature (40)..(40): n is a, c, g, or t
  misc_feature (48)..(48): n is a, c, g, or t
  misc_feature (55)..(55): n is a, c, g, or t
  misc_feature (68)..(68): n is a, c, g, or t
  misc_feature (72)..(72): n is a, c, g, or t
  misc_feature (84)..(84): n is a, c, g, or t
  misc_feature (90)..(90): n is a, c, g, or t
  misc_feature (101)..(101): n is a, c, g, or t
  misc_feature (104)..(104): n is a, c, g, or t
  misc_feature (108)..(108): n is a, c, g, or t
  misc_feature (114)..(114): n is a, c, g, or t
  misc_feature (117)..(117): n is a, c, g, or t
  misc_feature (126)..(126): n is a, c, g, or t
  misc_feature (128)..(128): n is a, c, g, or t
acccatgaagcagtttcagggtggggtgttnagttcttancaggacanttatggnttccagagacacnttcntgagagaagggnttatgntgatgtgttcntcntgcnttccantgngtggatggntntacaaagggccagggcgcaggcagtgtggacaacacactgaccccggtgctgtgggagtgggcactgttgggaggcagcgtgttccaggcaggtgcagaggtgggaggcagcatcttcccagcgagatgtccccaggtgaggggcctcatcgcccacccccagcgctgtccctacaggtgcagcaggagcgggacgagctctatcggaagttcaccgcagccatccaggaggtgcagcagaagacagggttcaagaacctcgtgctagaacgcaagctgcaggctctgagcgccgctgggggttggggcagtgccgcgctgtgctgcctgtcttcgcgccactgttgtcccaccgaatggacagctctgcaggtgctggcactaacttcattgacacctgagtcacagctgcccagtgggattctccagggggccgggacttccctaggaagtggtgagccaatgctccctgatgagcacaaagcccgctctgttgagggctgggtgggtgcagcctgcgtgcaggaaagggcaggcagcctcccgctgccagtcttcgctcta

SEQ ID NO: 259074 - DNA, 717 bp, Homo Sapiens
actgtttttctgtatgtacttagcagtgaaatatttataggcaacagattttaagaagtcagttccatggctattaaaaaatgtttaagttaatgaaatttacagtgcatattaaaagcatgatacaaatggaaatttaaaattttgtattaggaagcccagtttgctaaaagtagcattaatatcattcacatcagattttaatttgttacacatttttgtagttcagcaaaggcccctatgatgaaaaacaattaaaaagtgttatgacaaaaataattatctgtgtaaaaagggggagacccaaaagatttttcatatggttatttaattcagttaaatagaactgttatgaatttgagcggaatgaagatattcaaacactaacagaaaatcattagccttatattagagcattcaaatgcttatgtaactcttcaatccatctggcttcataaaaaccaaaattttgaacacaaaaaagtggcagagtttacattaccttttgtatgttcctaagtatgaaattgcatcaatttattatgaattaaatttgaaaagcatcacagatttaaaaacaaagtacaaaagagcctgattctttttaattccacaaatacctagcatctcaaagtaacatgtaaacaaacttctatgctgctcaatgaatccttccaatttcgataataaactaaatagtattggatctagtatacc

SEQ ID NO: 259075 - DNA, 1278 bp, Homo Sapiens
ttgaggaataaaaacatttatctatgtattcagaatcacacacaagttacctttacagttcaatttactatatagaaatcattgggttttatattttgcagttaacttttgaactgagattacaatattataacaaaaaactttacattaattcagaactttttagcataccaaattgaaatacataggttcaaatttcagatttatggcaaacagtcttcaaatacaatacagacatttcttaaaagttaccgtatcattcacatgtgatatttgcaactctgagctatttcatatagaacagctctcctgcagatatggcaaagttgatatgccaaaaagtcttcaaatacaatacagacatttcttaaaagttaccgtatcattcacatgtgatatttgcaactctgagctatttcatatagaacagctctcctgcagatatggcaaagttgatatgccatgaagttcaaggcctgtatagtcaagccaaggactcaaagttgcaccatctttaaaaaggtttggcatttctggaccacaacaatgcacaacatgtaaagaaggtaggaaacagttccccctcctttgttaaatggttaaaaaaagttacatggtagcttggaattttgcataaaaccccataatataccttggaaaagtccaagggcaatttgatggcaatggattggggccctatatatatatttttttaatagaacccatgagatttaaatgggcattaatcaaatcaaaaaatattaagcacctactggtttaagagatttaaatttattagagattcatgatcaatttctttccacctcgaaatcaaggtgtaaaaaccagctattaagtgcattccaaacttctcctatgtagcacaggtagaactttctgtccattggcaccaaagtgaagtcacatttcctcttgggagacagaaattccacacctgaacacagagtaagttaggaaaaaatgacccctgttgtttattactattgtgattctgagatctaggatttctaatatactagcagtaaacaaagcaaattcatggcaacaactgtcaggttagtgatgctaactcccttcccccaaccaccataaaattttagtaagaaaagaattaaaagtaatgactaagcagaacaaattggaaataacaagaaactaaggggacagttcaaaccaacaacaaaaaatcctaaatttgaaatcactgcaactgaagataataagtgtgcttcaccccaacccccatcccaactctcc

SEQ ID NO: 259076 - DNA, 1482 bp, Homo Sapiens
  misc_feature (99)..(158): n is a, c, g, or t
  misc_feature (1009)..(1009): n is a, c, g, or t
  misc_feature (1028)..(1028): n is a, c, g, or t
  misc_feature (1035)..(1035): n is a, c, g, or t
tgtaccggtccggaatttcgggatatcgtcgacccacgcgtcgagcggcggcgccggggcagctccgacgccctcccgcggggagggagcccccgcggnnnnnnnnnnnnnnnnnnnnnnnnnnnnnnnnnnnnnnnnnnnnnnnnnnnnnnnnnnnntgggaatgatgaagaagaacaattccgccaagcggggacctcaggatggaaaccagcagcctgcaccgcccgagaaggtcggctgggtccggaaattctgcgggaaagggattttcagggagatttggaaaaaccgctatgtggtgctgaaaggggaccagctctacatctctgagaaggaggtaaaagatgagaaaaatattcaagaggtatttgacctgagtgactatgagaagtgtgaagagctccggaagtccaagagcaggagcaagaaaaatcatagcaagtttactcttgcccactccaaacagcccggtaacacggcacccaacctgatcttcctggcagtgagtccagaagagaaggaatcgtggatcaatgccctcaactctgccatcacccgagccaagaaccgtatcttggatgaggtcaccgttgaggaggacagctatcttgcccatcccactcgagacagggcaaaaatccagcactcccgccgccccccaacaaggggacacctaatggctgtggcttccacctctacctcggatgggatgctgaccttggacttgatccaagaggaagacccttcccctgaggaaccaacctcttgtgctgagagctttcgggttgacctggacaagtctgtggcccagctggcagggagccggcggagagcggactcagaccgcatccagccctccgcagaccgggcaagcagtctctcccgaccttgggaaaaaacagacaaaggggccacctacaccccccaggcacccaagaagttgacgcccacagagaaaggccgctgcgcctccctggaggagatcctatctcagcgggatgctgcntctgcccgcaccctccagntgcgggntgaggaacccccaacccctgccctccccaacccggggcagctgtcccggatccaggacctggtagcaaggaaactggaggagactcaggagcttctggcagaggttcagggactgggagatgggaagcgaaaggccaaggacccccctcggtctccgccggattctgagtcagagcagctgctgctggagacggaacggctgctgggagaggcatcatcgaattggagccaggcaaagagggtgctgcaggaggtcagggagctgagagacctgtacagacagatggacctgcagaccccggactcccacctcagacagaccaccccgcacagtcagtaccggaagagcctgatgtgagggcagggtggggtctggaacttgtcgggttggacagactcttatctccgtgttgctggataaagcttttttatttacctcaatcgaaa

SEQ ID NO: 259077 - DNA, 1076 bp, Homo Sapiens
gtagttccgccatcggacggaagccgaccggggcgtgcggagggatgtggcccggaatattggtatggggggcccgggtggcgtcatgcaggtaccccgcgctggggcctcgcctcgccgctcactttccagcgcagcggccgccgcagcggacactccagaacggcctggccctgcagcggtgcctgcacgcgacggcgacccgggctctcccgctcattcccatcgtggtggagcagacgggtcgcggcgagcgcgcctatgacatctactcgcggctgctgcgggagcgcatcgtgtgcgtcatgggcccgatcgatgacagcgttgccagccttgttatcgcacagctcctcttcctgcaatccgagagcaacaagaagcccatccacatgtacatcaacagccctggtggtgtggtgaccgcgggcctggccatctacgacacgatgcagtacatcctcaacccgatctgcacctggtgcgtgggccaggccgccagcatgggctccctgcttctcgccgccggcaccccaggcatgcgccactcgctccccaactcccgtatcatgatccaccagccctcaggaggcgcccggggccaagccacagacattgccatccaggcagaggagatcatgaagctcaagaagcagctctataacatctacgccaagcacaccaaacagagcctgcaggtgatcgagtccgccatggagagggaccgctacatgagccccatggaggcccaggagtttggcatcttagacaaggttctggtccaccctccccaggacggtgaggatgagcccacgctggtgcagaaggagcctgtagaagcagcgccggcagcagaacctgtcccagctagcacctgagagctgggcctcctctccagaatcatgtggaggggccagaggcctgccagacccccagctgggccctgctcaccccttgttgctgggcttggaggggcctcttgaggaacttttaatttgcaggggtgcccgctatggacggggcattccagctgagacactgtgattttaaattaaatctttgtggtctttacaaaa

SEQ ID NO: 259078 - DNA, 940 bp, Homo Sapiens
  misc_feature (44)..(96): n is a, c, g, or t
  misc_feature (679)..(698): n is a, c, g, or t
aatatagaacagtcaggttttattacttttaagtaataaagagnnnnnnnnnnnnnnnnnnnnnnnnnnnnnnnnnnnnnnnnnnnnnnnnnnnnnacaacatacattaagtcgtgaatcagatgttaggggatgtggagatggaaggaaaattggtgacatcacaatatttttacaactttacaacaaatataaatctgagtttgttgcatctaccagtgtctagcaagggtggaaagcaaaggcacactcgggtttatggaccctccccccacacacagtggggaaaaaaactggggagaaatacttaaatgcagaagaccagctcaatacatgtgggtattttagggttaacaccagaagtgatgggttgtgggggtgtaggaatgtggatgtaagttttgacacaggtctccttaacagctgaggcagtgatgcctacaaacactggacaagacagccgcttacgtcaatgatgggtgctgcactgccagtactctcgggagtcaagcatgggaaagaagggggcagggggatacagacccatcaccttcctaatttctgcatttctagagaaaattcaaggaagaaaacaatatttcaggttctaagaaatacttccagggtttcaggagacagagttcacaggatgtgaacatggattccattacaaaagccnnnnnnnnnnnnnnnnnnnncaacaacaaccacctactcctaaacaacagcaaaactaatggacttttggaacaaagggctctcacccaccctcagctaagtactcaggtctgaaggcaaccacactgattatggaggctccactttttcactatccaactcaaaactgtcattgtcagtctttttttgaattctttttaaagacaaaactaaacccagaagatcgaactggaaataaaagcagacaaagagaccaccaacc

SEQ ID NO: 259079 - DNA, 713 bp, Homo Sapiens
  misc_feature (40)..(40): n is a, c, g, or t
  misc_feature (145)..(153): n is a, c, g, or t
  misc_feature (351)..(359): n is a, c, g, or t
caagttccttcaaagccagtgtaaaataggtccccctgcntggtacaaagaaaagcaaaaagaatttatgaagattgtgatcttcttattaaatcaattgttactgatcatgaatgttagttagaaaatgttaggttttaacttnnnnnnnnnttgtattgtgattttcaattttatgttgaaatcggtgtagtatcctgaggtttttttccccccagaagataaagaggatagacaacctcttaaaatatttttacaatttaatgagaaaaagtttaaaattctcaatacaaatcaaacaatttaaatattttaagaaaaaaggaaaagtagatagtgatactgagggtnnnnnnnnnttgattcaattttatggtaaaggaaacccatgcaattttacctagacagtcttaaatatgtctggttttccatctgttagcatttcagacattttatattcctcttactcaattgataccaacagaaatatcaacttctggagtctattaaatgtattgtcacctttctaaagctttttttcattgtgtgtatttcccaagaaagtatcctttgtaaaaacttgcttgttttccttatttctgaaatctgttttaatatttttgtatacatgtaaatatttctgtattttttatatgtcaaagaatatgtctcttgtatgtacatataaaaataaattttgctcaataaaatcg

SEQ ID NO: 259080 - DNA, 1689 bp, Homo Sapiens
tgacatctgtgccattgccatgagcctggtggcttatgtgatcaacagcctggtcaacatctgcctcatcggcactcagaacctcttttccctggtgctggccctgtgggatgcagtgaccgggcctctgtggaggatgacagacgtagtggctgccttcctagcccacatttccagcagtgctgtggccatggccatcctcctttggacaccctgccaactagccctggagctgctggcctcagctgcccgcctcctggccagctttgtgcttgtcaatctcactggcttggtgttgctagcttgtgtgctggcagtgacggtgactgtgttgcatccggacttcaccctgaggctggctacccaggcactcagccagctccatgcccggccatcctaccaccgtcttcgagaggatgtcatgcggctctctcgcctagcactgggctcagaggcctggcgccgagtctggagccgcagtctgcagctggcgagttggccaaaccggggaggggcacctggagctccccagggtgaccctatgagggtattctcagttaggacccggagacaggacactcttcctgaagcggggcgcagatcagaggcagaagaggaggaggccaggaccatcagagtgacacctgtcaggggccgagagaggctcaatgaggaggagcctccaggtgggcaagacccttggaaattgctgaaggagcaagaggagcggaagaagtgtgtcatctgccaggaccagagcaagacagtgttgctcctgccctgccggcatctgtgcctgtgccaggcctgcactgaaatcctgatgcgccaccccgtctaccaccgcaattgcccgctctgccgccggggcatcctgcagaccctcaatgtctacctctgaagcctccttccctgcctgcccacccctccatgctccacgcaggcactcacgctaggacagcattaacacctcatctccgggtcctggtctgaatcccctcctacccctgtggccatcctgccatacatccaggacattgagttggaagactatgatctgggtgggggcaggataacatggcttctctttacccagtgggtcccttcgatgctgagggtggtgagtatgtcactatgcaagggccctgagactatttgctgtgggctctcctccagcctgcccagggcccacccagatgcctctggggttacccctgtctgcttctggtttttctgttggagatctataggtccttttcctgcctccttcacatttcctccccagcttttgcggccacaacacatcagtgtcatttgggtgttttggcaactcaggggccttcggatgatcttaaacctttgtgttcagccagagcccctgtgccctggtaggcgttggggttagtatctctcgggtgccctcagagccacctctgcctgtgatcgtctgatgaggctccctcccaacctgatccaaaagccagtctcaggaattaacccctggggatgggggaagcattcggcacctgaactttggggggccacctggccctgtggggaacccaagctcactggggagttctccaggaagggaataaacggaattttctggctcctttccccctggcaattcccactttccccccggaaaaaaagggcatttccccccttgggccttcccccgtggcc

SEQ ID NO: 259081 - DNA, 458 bp, Homo Sapiens
tgcttactacacagttggactctcttgaaagacttataaaagttaaaccttagattgacttgggtctgtttctgagttgttctcctccattggttcgtgagtggcttctgctgctggctccatactgttcccacgactgtcttggaggcacattttagggtctggtaagaaaaacaggatgaagttgtctattacgatccatgtgaaagtccagaggaacttagtcattgactgtggtggggctgcaggacgataagaattcggaagtgaaagaactcagaaggcagtgccagcagctggagtctattaaacggggcaggatctgtgtcaaaagagcttctctccagagtagaaaggatcagtgcaaagaaaatcattggctcagattgcaacaggctgaagaaagcataagatattctcgtcagcatcacaccattcacgatgaaaagagacaagat

SEQ ID NO: 259082 - DNA, 761 bp, Homo Sapiens
  misc_feature (548)..(609): n is a, c, g, or t
  misc_feature (735)..(735): n is a, c, g, or t
actggttactaactactttaatgcaggagctcgtggataaaaaagatgagtggataaaaaagcaagtgagtattcacaacagcatgacaaacaacacaggtatactcacatatatggcatttgataatcagagacagcactttagctgcctttcttcactgcctagagaaatgggcagcaatcaaggcattcaaaggtctacctcctttccttcttccaaccataaaaccaacctaactcaaaagaaaggtattttaaatctttatagataaaaatgaatagagtgacaaaatacatcatttgttttttctttattcattatcaagatggtggctatgaagaactaaatgaatcaggtttgtaaagttaacagatgctaataatgtcatattgtgatgcaaagatgagtgcttttatcctcagttcccttgataattgtgttatcaaacacatattgtgttcaatgttttagtgtgcttaagtacacttaagagcaacgttaatatctaatatcagccaccaagataaaaggctaaaactcctgtcannnnnnnnnnnnnnnnnnnnnnnnnnnnnnnnnnnnnnnnnnnnnnnnnnnnnnnnnnnnnnctatatgcatatatacgatatgatctaattagcttttcaaaataagaaatattcaaattattttataaataacatgagaataaagatcatttcagaagtaacatatatacctttgttaacagagtnaaagaattgtttaaagaaacaactct

SEQ ID NO: 259083 - DNA, 1034 bp, Homo Sapiens
gggagggcgggcgcggggtcttggcgaacggtcttcggaagcggcggcggcgcgatgaccacgctacgggcctttacctgcgacgacctgttccgcttcaacaacattaacttggatccacttacagaaacttatgggattcctttctacctacaatacctcgcccactggccagagtatttcattgttgcagaggcacctggtggagaattaatgggttatattatgggtaaagcagaaggctcagtagctagggaagaatggcacgggcacgtcacagctctgtctgttgccccagaatttcgacgccttggtttggctgctaaacttatggagttactagaggagatttcagaaagaaagggtggattttttgtggatctctttgtaagagtatctaaccaagttgcagttaacatgtacaagcagttgggctacagtgtatataggacggtcatagagtactattcggccagcaacggggagcctgatgaggacgcttatgatatgaggaaagcactttccagggatactgagaagaaatccatcataccattacctcatcctgtgaggcctgaagacattgaataaccctgggcagtggttcttaggcagatactctagatgctttatggacaatattattttcattggatgattctggagctctattaggagaaaagtaatcattttaggtcttaaagacttcaagaaaatacaggttatcaatttatttttaaatctcattgtttccagttagcaatatcatacctattaaagctgttcattgtaacaaaattcaatcaaaaaggcagctaggtcagaaggaaacataccactctcatggttcatagtattcactgtatgtatgctagggaaaagacttgctccagtctcctcctcagttctgtgcctgagaaccactgctgcatatatttgtttttaaattttgtattgaactgttaattgaagctttaaaagcatatatgaaatgtataaatctaagatgtataatacattattgactctatgat

SEQ ID NO: 259084 - DNA, 559 bp, Homo Sapiens
  misc_feature (59)..(112): n is a, c, g, or t
  misc_feature (192)..(200): n is a, c, g, or t
  misc_feature (202)..(265): n is a, c, g, or t
cacgtgcctgtagtctcagctactcaggaggctgaggtgagaggatctcttgagcccannnnnnnnnnnnnnnnnnnnnnnnnnnnnnnnnnnnnnnnnnnnnnnnnnnnnnatgaaagcaagaccctgcctttagaaaagaaaaaagaaatcttttcaaacccaatattgttaagattgtctccatttttnnnnnnnnngnnnnnnnnnnnnnnnnnnnnnnnnnnnnnnnnnnnnnnnnnnnnnnnnnnnnnnnnnnnnnnnntcctaaatagttatcaaatccatctacttctgcctgccacctctctagtttaaaccacccttctctgtcccctggacacctgcgcagaaagcctaggagctggttccacccatcactcaccaggttaggtatttcaggcaagtcacaccctctcaggcctcagttttcctcttttgttaactgagggtgaaagtggggttagattagatcagcggctcttaacttttgaggggtcgtgggccctagagtcctgggaacgctatgcagtttcctcagcaaaatgcttgcatccac

SEQ ID NO: 259085 - DNA, 879 bp, Homo Sapiens
  misc_feature (295)..(358): n is a, c, g, or t
  misc_feature (360)..(368): n is a, c, g, or t
  misc_feature (448)..(501): n is a, c, g, or t
  misc_feature (573)..(719): n is a, c, g, or t
gtggatgcaagcattttgctgaggaaactgcatagcgttcccaggactctagggcccacgacccctcaaaagttaagagccgctgatctaatctaaccccactttcaccctcagttaacaaaagaggaaaactgaggcctgagagggtgtgacttgcctgaaatacctaacctggtgagtgatgggtggaaccagctcctaggctttctgcgcaggtgtccaggggacagagaagggtggtttaaactagagaggtggcaggcagaagtagatggatttgataactatttaggannnnnnnnnnnnnnnnnnnnnnnnnnnnnnnnnnnnnnnnnnnnnnnnnnnnnnnnnnnnnnnncnnnnnnnnnaaaaatggagacaatcttaacaatattgggtttgaaaagatttcttttttcttttctaaaggcagggtcttgctttcatnnnnnnnnnnnnnnnnnnnnnnnnnnnnnnnnnnnnnnnnnnnnnnnnnnnnnntgggctcaagagatcctctcacctcagcctcctgagtagctgagactacaggcacgtgccacgacacacagnnnnnnnnnnnnnnnnnnnnnnnnnnnnnnnnnnnnnnnnnnnnnnnnnnnnnnnnnnnnnnnnnnnnnnnnnnnnnnnnnnnnnnnnnnnnnnnnnnnnnnnnnnnnnnnnnnnnnnnnnnnnnnnnnnnnnnnnnnnnnnnnnnnaatatgacacaaaaagtgtaaatgatagaagaaatcaataaattgaacttcatcaaaataaaacgcttttgtttctcaaaatgcatgaaactattaaaaatgaaaagataagccatagactaggacgaatatttgtaaaaattctatctgatgtaggact

SEQ ID NO: 259086 - DNA, 828 bp, Homo Sapiens
  misc_feature (13)..(13): n is a, c, g, or t
taaaaaaatcacngctttaatgtctggtcctcgatcaccttagcacagcgcttctctgaggagaaatgccagctctgccgcatggtgcagggaatggtcggggggaagcctgcagcccaggcctgctacaagtctagtgaatgcagccaggcggcctcccctgccgcataaagtgcttgaacagagccgccgtgcctcagaggactgggcctgtcctggagagagctggagacaggaggcttctgagcaaagccagctccagccctgaaagccacagcagtgccactgcgtcgggccagcgctcccccgacaaccccaggttgcgggaaaagcagagttgacccagccaagaacagactgctgacctcctgggccgagtgggcaaacagatcctgcacacaacacacaggagctgctggggaaccctgagtgcttgtggagtggagactcaatcagattccagaaatttctctggggtgatgtggtggccatttctccctcctcctcctctctgttctttgatggggctgtggagagcccaggtgtggggtaggcctcactggtccagctcactagcaagaccctgctcgtaatcttccacatatttatatttcttctcccgatagtagagtcttttcttcatgcagtagaggactatgatgtcacacagcacggtcgccatgcctagcagtgccaggccagagccgatgttgatcatagtgggaatacaggaaattttgatagaggtgaagacattggcctgcagctgaacagcaagatcatggttatcgtggagcctgtctagtcagaattttccctgttttgagc

SEQ ID NO: 259087 - DNA, 1950 bp, Homo Sapiens
  misc_feature (463)..(477): n is a, c, g, or t
gagagtgagggtgttctgggttgaggtagactgccgtgggcatttaaagggggaacgcgggtgggtttaaagaagagcgagctggcgtcttgggagggagaagcggaaaacccagggtgggttagtccccaatagggggtgaaactatcagaaaggggaggaggtggggaccaaaaagggtattcaagcctaaaaattaagggggtgcgggcaattctttacccgagtaagggcttcttttgcgggttgtgcaactttaagtgctatggtttttgggtggtcaaaaaaaggcgcgggtgttcccggacattgttttgggtaaaatgcaaataaaataggggggtaataaatggccccgtgataactcagtagccatctgaatagtcatgcggtttaaggaatacatcgttgtatagtttgacatacgaatttgtcatttcctgcacatgcgcaccattggtgnnnnnnnnnnnnnnnggaagccagtgatagtgtatggatcggtcaggagcacggcctgtgagtcccctgtaatttagttaagctaaattaatacctcataccagatggctccaggaaaactgtcctgcaggtcagaagggagcacaagaagaaaagcacttggccagcgtcgaagcaactctgaccacagcaggagagaacttgaaccaatgctaccactgcatcagaaacacaaggataggtactaggcagaagccatcgttcccagcggagggagtgtgagctgctctgccactagagaggctctggaggcctacttagttgcataatcaaaacaacatcagtaactgcactttgaatcaaaacaagcagaaagagttcaacacttgctgttcataactggactgaagatttaacgtaaggctctgttgccgtgcaagtggaatctcttcctctaagactgactttcacatgccagggagagaaagatccatgactagtacactggaatctggttttgctacattctattcacaatcccaaagaaatgctatttcaatgcaagaccagatgtttggcccattattccagcaactccctttgacaggacgatttaccctgctacaaagaagcacaagatgtggtgttgcttaaaaagtcctgtatgtgaggaactctttcattttcttggggattggcagtgctaggacttggtaagttgttaggaaacttcgaagggctttccggcataagtgcttcagtgaggacaggaccctaggagctgtccagaactggacgtggccatctcttgtccctgtggcaatgactccaccatgtggaaaaaatgtgcagcaaagcccattggtcataggagcaaatgcaatgggagttttcagttccagggcccagatcctgaggagtctgtcatctgccaccgtggcaaggtacaagccttccggagagaagcacacagatctcagtgagctaatgtggacgtcactgtcatccatggcggggtcaacctgggtatgctggagtgacctcagcctttcgccggtgtaggggtcccacataatcacattggtatcgtaagaagccgtgacaagcagggcagagtcgggggagaagtcacaagagacaacactgctttgatggccctcttagcttccgaattaacgtgtaggacctcatgctccatagaaagaccgacttctctccagctgcagagcacagcatgctgcagtctggggagatggaacagcagtaaacccactgcaggtggcccgataacacttgaatctgtttaccgtgtttattcaggtcccagatgcgaagagtcttatcccgtgacgcggagaccaaaatcaaactgccactgggtgtgaagctcagatctctcacgacatcttggtggccggaaagattcaaaagcaggagccctgtctgcacctcccagatcttgatctgcccatcgttgagtcccgtagc

SEQ ID NO: 259088 - DNA, 1017 bp, Homo Sapiens
  misc_feature (953)..(953): n is a, c, g, or t
  misc_feature (971)..(971): n is a, c, g, or t
  misc_feature (987)..(987): n is a, c, g, or t
  misc_feature (1001)..(1001): n is a, c, g, or t
ggtcttatgtataatatttataaaagagggctgccagcctccccaccctatcccagtgtggccactggggtctttggctcccgggggcaggccactctgggctcggctgtttcttctcccagcagtggaatgtgagctgtggcccaggcttgtggcagggggagtcccagcctccccaggactggtgaagggacaggacaggggtctcttgggggtccctacaccagccccaccctcagcagaacctgctggccccagctatggggtatgggagggtgtcatcctgtgaagggagatgggagaagagtatccaagggcccaggagtcttgaaaagggcctagggaataaaaggggggaaaacaagtgggctgggggagatgaggccccagggcgcagaccgtggcctagcagcagggtcgggggatggctgcaggctgatcccagctgtgtatgttcctacaggctgtgtcacctcaggaggcagctgctgggccccagtgtatgcatctgtgcaaggagggaatgaggggcttgggcgggatctaaggcgacagccctaccctgctcccagttcaggaagcctctacagctccagagcctagcagggtagtggcccaagggctttggtcctggctcttgaacaaaaaccttccacagagaggacatggggccctggctgaatgcccacagtgttaatcgagtctttctcatcccccgactggccactggatgggaagcaggggctgaagagtctgggcagggctgctagggtgagtagacagaacaggatgagggtcaccctagtggtttcctccatgccggctggtccctgaggcccagtcaatgatgatgaagctcaagctcatggtcatcagcaagaagccaagcatagcaaaacacagggccaggattttgggggtggatcttgcaggctccttctccgtgggcatgnatcggaagtagacagatngcagggaagatgaagntgaggaatggggcngatgtggcaccgatga

SEQ ID NO: 259089 - DNA, 695 bp, Homo Sapiens
atgccacttctcctgttcaatgatgagactcctaatatatgagaggaggccctcctatgtatttcaaatgtggagaggcatatacttctactcagattgaaagatttatcttggaaatccttttttggtttcctttctacataatatgacttcttatttcattccaacttaattccaaaaatatttatccagcacctactgtgaaccagtactgtgctaggccccaggtattacagtagttatcaagacagacatgacctctgcctctaaggagcttagagcctagcaggggaacaggaacttagacaaatttaagtgctgttcccgtagggaacttttgaggtcaaatagtaggaggcactttcacgtaacataggaggtcaaggaaggctttctacacatttcatttaaatgaagacctaaagggaagcaagaaaaggcagaagagaatgttactggcaaagggaaaagcatgtgctagaagcaagcagagatgagagattaagcttgatgcttttgagaaattaaaagaagttcaagttcgtaatggctacagctgtgagatcaactcttttaagtctcatgacagtacctgtaactaataatattatcccctccatttttatggttgtggcaaatgaagaaaagatgttaaatattttgccctaggtcatccatctctagtaagtggcaca

SEQ ID NO: 259090 - DNA, 685 bp, Homo Sapiens
gggaactgggatactttcaaaatagcctgagttcagcaatttagacagtagatccttcaagtgtttgtctaagaaagagtgattaagacttaattgtcacatgacctaattgaaaattactgggaatagaaatcctaattttatcctagttgtagtacattgttacaatagtttacattgatgtacatagtacatccttacaatagtttacaacagtttacactttcatggtactgactggagaacttgtcagtaccatgaaaagtaaatatgcagtccatctttattttatgctgaatcaatatgaattttaatgagatcagaatctcaaaagttcagcaagtcacttaagtttctctggacctccatttccaccatttgaaaaatgactaaaaatcagagaccctaatcaagtatgtcacaaaagcacacatctattccctgagatgagaaataagtcatttttcctatctgctcccaagacatcacagctagcaaccactctaccttccccaagtaattaaggctttagagaaataaaagtcagttcctcaaaatctattagattgggttagaaaatcctatattgggacaatctctattagattactaatattattaatctattttagaaaaccctatcttttacaaactctgaagtatttttcaactacaaaattccatc

SEQ ID NO: 259091 - DNA, 487 bp, Homo Sapiens
aaatcttttaaggctggtgaaatacacgtgttagaattttaaaaaactgttttcctattacagctatttatggactagtagcttgcccctatatggatcaatgttacagctaggggaacaacagtagtagtaatggagactcaaagtagttagaactctgctgaagtaacattcagtaatttttctattaaaaaatccttgtggtaaaatattgacagtaaaaatccatcaaagttagtttttattaaaaccaaagcaccaatctgcccccaaaaattaaagacgaagactactgcctcagatgtccctctcaataagtaaaaccttcatggagaaaaatctgtgatctgactgactagcattattctcactcagaaacatgacaccagtatgtgaattacaacagtaaattcacattcaagatgaatatgcaataaacatttataaaaagacatcaactatttacatagggctataaaatactttt

SEQ ID NO: 259092 - DNA, 1261 bp, Homo Sapiens
  misc_feature (61)..(480): n is a, c, g, or t
ccgcacgcacgcgccgtcacccgccggcgccgaaggctgggtggcgaattcggcacgaggnnnnnnnnnnnnnnnnnnnnnnnnnnnnnnnnnnnnnnnnnnnnnnnnnnnnnnnnnnnnnnnnnnnnnnnnnnnnnnnnnnnnnnnnnnnnnnnnnnnnnnnnnnnnnnnnnnnnnnnnnnnnnnnnnnnnnnnnnnnnnnnnnnnnnnnnnnnnnnnnnnnnnnnnnnnnnnnnnnnnnnnnnnnnnnnnnnnnnnnnnnnnnnnnnnnnnnnnnnnnnnnnnnnnnnnnnnnnnnnnnnnnnnnnnnnnnnnnnnnnnnnnnnnnnnnnnnnnnnnnnnnnnnnnnnnnnnnnnnnnnnnnnnnnnnnnnnnnnnnnnnnnnnnnnnnnnnnnnnnnnnnnnnnnnnnnnnnnnnnnnnnnnnnnnnnnnnnnnnnnnnnnnnnnnnnnnnnnnnnnnnnnnnnnnnnnnnnnnnnnattcttataaagctgtcatcaacctgggaaggaattcaggctggaaaggagctcgaggagcagcacggcatccactgcaacatgacgttactcttctccttcgcccaggctgtggcctgtgccgaggcgggtgtgaccctcatctccccatttgttgggcgcatccttgattggcatgtggcaaacaccgacaagaaatcctatgagcccctggaagaccctggggtaaagagtgtcactaaaatctacaactactacaagaagtttagctacaaaaccattgtcatgggcgcctccttccgcaacacgggcgagatcaaagcactggccggctgtgacttcctcaccatctcacccaagctcctgggagagctgctgcaggacaacgccaagctggtgcctgtgctctcagccaaggcggcccaagccagtgacctggaaaaaatccacctggatgagaagtctttccgttggttgcacaacgaggaccagatggctgtggagaagctctctgacgggatccgcaagtttgccgctgatgcagtgaagctggagcggatgctgacagaacgaatgttcaatgcagagaatggaaagtagcgcatcccctgaggctggactccagatctgcaccgccggccagctgggaatctgaactgcacgtggcttctgatgaatcttgcgttttttacaaattggagcagggacagatcatagatttctgattttatgtaaaattttgcctaatacattaaagcagtcacttttcctgtgctgtttc

SEQ ID NO: 259093 - DNA, 552 bp, Homo Sapiens
attcttataaagctgtcatcaacctgggaaggaattcaggctggaaaggagctcgaggagcagcacggcatccactgcaacatgacgttactcttctccttcgcccaggctgtggcctgtgccgaggcgggtgtgaccctcatctccccatttgttgggcgcatccttgattggcatgtggcaaacaccgacaagaaatcctatgagcccctggaagaccctggggtaaagagtgtcactaaaatctacaactactacaagaagtttagctacaaaaccattgtcatgggcgcctccttccgcaacacggggggagatcaaagccactgggcgggctgtgaacttccctcaccatcctcaccccaaagctccctggggaagaagctgctggcaggcaccacccccagcctgggggccgggggctccccaacccaaggggggcccaaagccaagggccctgggaaaaaaacccccccggaatgaaaaagccccttccccttgggtggccccacagagggaaccacaagggctgtgggcgaaaaacttcccctg

SEQ ID NO: 259094 - DNA, 574 bp, Homo Sapiens
  misc_feature (191)..(192): n is a, c, g, or t
  misc_feature (205)..(205): n is a, c, g, or t
  misc_feature (232)..(232): n is a, c, g, or t
  misc_feature (240)..(240): n is a, c, g, or t
  misc_feature (327)..(327): n is a, c, g, or t
  misc_feature (336)..(336): n is a, c, g, or t
  misc_feature (348)..(348): n is a, c, g, or t
  misc_feature (379)..(380): n is a, c, g, or t
attcttataaagctgtcatcaacctgggaaggaattcaggctggaaaggagctcgaggagcagcacggcatccactgcaacatgacgttactcttctccttcgcccaggctgtggcctgtgccgaggcgggtgtgaccctcatctccccatttgttgggcgcatccttgattgggcatgggggcaaacacnncgacaaggaaatncctatgtgagcccctgggaagaacccntggggggntaaagagtgggtcactaaaaatcccctacaactaccctacaaagaaaaggtttaagccttaccaaaaaccccatttggttcattggnggcggcccntcccttttccgncaaacaacggggggcgaaggaattcaaaagnncacttgggcccggggcctgggtgaacctttcccttccacccaattcctcaacccccaaagccttcccttgggggaagaagcctggcttggcaagggaaccaaacggcccccaaggcctggggttgcccctggttggctttcctcaagaccccaaggggccggggcccccaaaggcccaagtgggaacccgtggg

SEQ ID NO: 259095 - DNA, 614 bp, Homo Sapiens
gtatttctaggtacaaataccagaattatacttgaaaatacagttggtgcactggagaatctattatttaaaaccactctgttcaaaggggcaccagtttgtagtccctctgtttcgcacagagtactatgacaaggaaacatcagaattactaatctagctagtgtcatttattctggaatttttttctaagctgtgactaactctttttatctctcaatataatttttgagccagttaatttttttcagtattttgctgtcccttgggaatgggccctcagaggacagtgcttccaagtacatcttctcccagattctctggcctttttaatgagctattgttaaaccaacaggctagtttatcttacatcagacccttttctggtagagggaaaatgtttgtgctttccctttttcttctgttaatacttatggtaacacctaactgagcctcactcacattaaatgattcacttgaaatatatacagaaattgtaatttgcttttttttaaaaaagggggctaaagtaacactttcctacttatgtaaattatagatcctaaatttcacgcaccccgtgggagctcaataaagatttactgaattgaata

SEQ ID NO: 259096 - DNA, 1021 bp, Homo Sapiens
  misc_feature (977)..(977): n is a, c, g, or t
ctgaaattcaatacttagcaattggtaagtggctggcaaaacatttaaggaaataaagggcttacctggtttctgtagcttatattattttttaaaaaaggaatgaaaatagggagtatggggaatgagagaggggaagggaagagtcaggctgacagggaagaagagatgctgattcaagctgtctgatcaaactaaaagggacttaatttagaaatgaaaattatttcttctcaattcatgattcaggtgaaccagtttggttttaacaaagaaaaaaacaagggaaaaaatatttgctaatgttaacagccctctcacaggctccttttcatctgttcagtaactggagactctttccaacatggtctttagagctttctagagatacgaccgtgactttgttggtcttcacgcactgggtgtgtctgtaaatacagcgctgtccacggtgtctgtcctgcttccatcccaaattcaggctttagcttaaaacatctttagtttaattttttaaaaaattcttttctttcccccagataaaatcttaatcttttgcactagactgttagccagggaaaacaaagcaagaaaccagtgtctggaaccgaacaggaacagaacaagagcatggttctccttaaatacatacatttaaatacattcaatctgacatgggtatgaaatttgcctgtcaacatttacttttgcaggagagatctaagttgcactaaggtgaatgcagtgaacagactgagcgactgtctggatgcgagcttcagactgtcaagagaagaggcagctcctcctgccacagccgagtggatgccaccctgggaaccagggccaggcctgtctgctctagcagaaccggctggcaggtcagttgggttgaaacaaatagacacagctctccagactggaagtgttttgagcaagtgagcccggtcagctgaagaagcaacctgcttcagcantgtcagcaatatttccgtgttgtgtctccctcctgcttaatcat

SEQ ID NO: 259097 - DNA, 733 bp, Homo Sapiens
  misc_feature (22)..(22): n is a, c, g, or t
  misc_feature (46)..(46): n is a, c, g, or t
  misc_feature (52)..(53): n is a, c, g, or t
  misc_feature (62)..(62): n is a, c, g, or t
  misc_feature (68)..(68): n is a, c, g, or t
taaaaattcgagagaggcccanagatatgggaatttttgcctcagntgattnngagtcacgngatgtnaacccatattttgtgaaacttgagctgattaaggaagaattgttagtcccaatatacatatcagaaaatgatggctcaagcaggtaacatgtcacagtatttggcagaggctggactataaaccaagttttgaaattccaaaactcatactcttttaattacgctacagcgcttccaggaaagggaaaacagagaagccaatacaacaggatttaaatgtaaaggaaaggagagaacagttagatatgcatgtgagacactttacagtaaggtaggctggcgtctactggccccccttggaaccctcgagttgatttgtgcctgcccggatggagaagacccatcatcttttgggcagggctggactgttccttggcagcttgttccttggtttcagaactaccttgttccctgtagccaacaagtcagtcaactaactctaatccagcaagtacctgatggatttgcaatgtttaatttttcatcctgcccacaaaatgagtctcctccttaatagatgctgccaccaaaataaaagctggattttgccaggaaaccaagaaaagttcttttaataagcttcctgtttacgtgagtgggccctttatgggatgggatgggttttacgttttttatttgaagcattcttactccatttctaaaag

SEQ ID NO: 259098 - DNA, 480 bp, Homo Sapiens
gaaaataaagtgggagaagaaagacaacataaaaagaatagggtataattaaattcattttctctctgaaaacatatttatatcttcatgcagcttttcaaccagccatgcgccgaaataagcaaatcgaaagctgcaaaagctgcagcagtgggaagtgttatgtgttaggccgaaaggctgtgggtgtgaatttactagtatagccaaaagaaaaaaaggtattcagcagctgttgttcagttctggggggattatctgcttagtgccatgacaagagcaaattctgattgagaagcacaagtcataacagcagctttacctctggcccaccaacctttctttccgagggtaggacagaagttttcttcacctggtcatacacaaattatataaaattcagttgccttgcaatgcaacaacaataccgtcaaaggtggaagaggtatccccagagcatggaaatagtatcccaattgt

SEQ ID NO: 259099 - DNA, 913 bp, Homo Sapiens
caggagaaagcgaatacagaggaaagagagaataaaattaattgggagatggagatgatatttggggatttgaaagcaaacaagatgtaagagaggccctcatttgactgaaaatgacacagaaaaaggtgatcaagtcttccagggcctgctgttactgatggagactacagctacaatgaaaaattactctcactaccatatcttggggaaggagcgctctagttgcaaggaatttgtaaataaaggccgagagactctaacaaacaagatggagaacaaaaacaaagattccattaaaaaatttgttaagtgaaaaaccaagaccatctcagtggacaaaagagccagaactcttcctcgtagagccggccgtggggaccgcacctgccgcccaaagagtggcgatttgaggtccttctccctggagagtgaatagctggagttctgagaatggtcaccttctctggagctgtgggtttatttcttctgatacttgaacaaaggagggccatggttttcttgttaagagcacaaaaaaatgttcttttaatctagaatgtccatgattcagggaaagagggaatttgctcatactcatggcaaaagcatttcccagctcatggtgaatccttaactctcctgcttggtgacagctgtgctgccctgggccctggataaaccaaaatgctttggattctggaaaacgtattgaagaggcatttataccactattaactaggaggtattttaggtgtggctaaggctctgaagtaatctcaattttcaaaatactgagattttcttccctctccggggtcttttccctctcatttcctttcccagctttagagtaaaacaacaaaacttctgaatggatgtaacatagggacattttcatgcaatattactc

SEQ ID NO: 259100 - DNA, 1247 bp, Homo Sapiens
ttgaatgaggaccaccggaatgtgaggaggaccacccccgtcccactgttccccaacgagaacctccccagcaagatgctcctggtctatgatctctacttgtctcctaagctgtgggctctggccaccccccagaagaatggaagggtgcaagagaaggtgatggaacacctcctcaagcttttcgggacttttggagtcatctcatcagtgcggatcctcaaacctgggagagagctgccccctgacatccggaggatcagcagccgctacagccaagtggggacccaggagtgtgccagtcgtggagttcgaggaggtggaagcagccatcaaagcccatgagttcatgatcacagaatctcagggcaaagagaacatgaaagctgtcctgattggtatgaagccacccaaaaagaaacctgccaaagacaaaaatcatgacgaggagcccactgcgagcatccacctgaacaagtccctgaacaagagagtcgaggagcttcagtacatgggtgatgagtcttctgccaacagctcctctgaccccgagagcaaccccacatcccctatggcgggccgacggcacgcggccaccaacaagctcagcccgtctggccaccagaatctctttctgagtccaaatgcctccccgtgcacaagtccttggagcagccccttggcccaacgcaaaggcgtttccagaaagtccccactggcggaggaaggtagactgaactgcagcaccagccctgagatcttccgcaagtgtatggattattcctctgacagcagcgtcactccctctggcagcccctgggtccggaggcgtcgccaagccgagatggggacccaggagaaaaagccccggtacgagtccccggctctcccggaagatgcagactgcagatgggctacccgtaggggtgctgaggttgcccaggggtcctgacaacaccagaggatttcatggccatgagaggagcagggcctgtgtataaataccttctatttttaatacaagctccactgaaaaccaccttcgttttcaaggttctgacaaacacctggcatgacagaatggaattcgttcccctttgagagatttttattcatgtagacctcttaaatttatctatctgtaatatacataaatcggtacgccatggtttgaagaccaccttctagttcaggaatcctgttcttcccagcatgggcactatttttgatgatggctgatgttgtgt

SEQ ID NO: 259101 - DNA, 838 bp, Homo Sapiens
  misc_feature (266)..(266): n is a, c, g, or t
  misc_feature (275)..(275): n is a, c, g, or t
  misc_feature (317)..(317): n is a, c, g, or t
  misc_feature (406)..(406): n is a, c, g, or t
  misc_feature (711)..(711): n is a, c, g, or t
gtatcttccacaatgtgacacagcgccttatacatgtgttcatatgacagcataaatatttgtggatttgtaagtgaaacaaaggctcatttctccactcataagatccaggagacagaagtaagggtaacagcgaaaaagccttccctgtaggtaggttaaagttttccgttaagagccaaacccatgtctaaattaagtaggaatccagaagatttttcatctcttctcttaaaaatttttaaattctgcccagtcacaggganataatgganttgcaggtaggactctctgccagaggctcccctcactcaganaaacacaagttccgttccatgtccccaatgcacacagaacaacgagaatctttatattccactttcatgaagctttgcaaacctcagtnaagaacaaacagaaatccccatttattccaagtattaaactgccatactataatacgcccaatagtgtccttaggagttagaaatatacaatagtggacaaagtttcctattatcacggagcttatatactaatgggaggaatgtaatcagtaaacaaatgaacaaatagatggtggcaagtgctaaaaatttcttagctcttggaagggacggagctatgtgtttgaagggaagttgctaggaaggagccccacataaaatgacttttaagaattatggcaacagtggtagtgtgtcaccagtncctggaggcctatggaactgaccatcatgatcaactaccaccttccacatagtgagtaagtgtgaaggcctcccattcattctatatctcacatgtctgctccacctgtgccaaaccaaagacacat

SEQ ID NO: 259102 - DNA, 712 bp, Homo Sapiens
  misc_feature (169)..(212): n is a, c, g, or t
  misc_feature (385)..(393): n is a, c, g, or t
  misc_feature (664)..(664): n is a, c, g, or t
ctctgggtgaaccacttctcacctgggctatcgctgagactccaccaattggttggcctacaggcctcacctcccgactcccctcactgctgggcgacattgaatttgaagttccattgcccagcacctccaaccccgactcccaagttccctaaagaaatgagcaaannnnnnnnnnnnnnnnnnnnnnnnnnnnnnnnnnnnnnnnnnnngtcctgtgttaccactggccaaggaaacgcgagtctcaggattccagggcctggacctggggtaaagggctgctctgggactctgccccccaacctcttggaggaccccgagtgtgggggcaggattgggtgtctgccttgactcacaggatctccccaggtcctaaagctgnnnnnnnnngtgggagaagatccaggaggcaggggtggtggacaaaagtaggagtgagactaaaaagtgggagtgagactagatttgatcacactcaccacccttctgtgccccctggacagcaatgtcccctggagcccctgcacaggctcatcagaacaaggcagaatctcctactcactaacctcctgagagccgtttatagggggatcacacttgtccaggagggctgcccctcctgctttcacacaaccactggccccaccatccctctcctggncagtctcagaagacccagggatcctcaaaaaccaggggagaaggaatc

SEQ ID NO: 259103 - DNA, 1065 bp, Homo Sapiens
caattaccatctcacctatacgtgcaagaaaggaacagttgcttgcggccagccccctgttgtagaaaatgccaagacctttggaaagatgaaacctcgttatgaaatcaactcccttattagataccactgcaaagatggtttcattcaacgtcaccttccaactatccggtgcttaggaaatggaagatgggctatacctaaaattacctgcatgaacccatctgcataccaaaggacttattctatgaaatactttaaaaattcctcatcagcaaaggacaattcaataaatacatccaaacatgatcatcgttgggagccggagttggcaggagtcgagggcgctgatccctaaaatggcgaacatgtgttttcatcatttcagccaaagtcctaacttcctgtgcctttcctatcacctcgagaagtaattatcagttggtttggatttttggaccaccgttcagtcattttgggttgccgtgctcccaaaacattttaaatgaaagtattggcattcaaaaagacagcagacaaaatgaaagaaaatgagagcagaaagtaagcatttccagcctatctaatttctttagttttctatttgcctccagtgcagtccatttcctaatgtataccagcctactgtactatttaaaatgctcaatttcagcaccgatggccatgtaaataagatgatttaatgttgattttaatcctgtatataaaataaaaagtcacaatgagtttgggcatatttaatgatgattatggagccttagaggtctttaatcattggttcggctgcttttatgtagtttaggctggaaatggtttcacttgctctttgactgtcagcaagactgaagatggcttttcctggacagctagaaaacacaaaatcttgttaggtcattgcacctatctcagccataggtgcagtttgcttctacatgatgctaaaggctgcgaaatgggatcctgatggaactaaggactccatgtcgaactcttctttgctgcattccttttcctcacttacaaaaaaggctgaatggaggactt

SEQ ID NO: 259104 - DNA, 802 bp, Homo Sapiens
  misc_feature (111)..(131): n is a, c, g, or t
gggtggtcctttagaaagaatggactaccgtgctataacaactactagacaccttcattttacggctgtggtatcggcagtttagggtatggagcaagtaatattgtgtgnnnnnnnnnnnnnnnnnnnnncttccatgtagcatctgcatacccaaaggacttattctatgaaatactttaaaaattcctcatcagcaaaggacaattcaataaatacatccaaacatgatcatcgttggagccggaggtggcaggagtcgaggcgctgatccctaaaatggcgaacatgtgttttcatcatttcagccaaagtcctaacttcctgtgcctttcctatcacctcgagaagtaattatcagttggtttggatttttggaccaccgttcagtcattttgggttgccgtgctcccaaaacattttaaatgaaagtattggcattcaaaaagacagcagacaaaatgaaagaaaatgagagcagaaagtaagcatttccagcctatctaatttctttagttttctatttgcctccagtgcagtccatttcctaatgtataccagcctactgtactatttaaaatgctcaatttcagcaccgatgggcatgtaaataagatgatttaatgttgattttaatcccggatataaaaataaaagtcacaatgagtttgggcctattttaatgatgattatggagcccttaaaggtcctttaatcattgggttcggctgctttttatgtaaccttaggcctggaaaagggttttcccttggctcctttgacctgtcaccaaaactggaaa

SEQ ID NO: 259105 - DNA, 977 bp, Homo Sapiens
  misc_feature (32)..(32): n is a, c, g, or t
  misc_feature (483)..(506): n is a, c, g, or t
ggacccctaaagggcccttaaaccatgggttnggcctgcctttatgtagtttaggcctggaaaagggtttccacttgcccctttgactgtcagcaagacctgaaagatggcctttcccctggacagcctagaaaacacaaaatccttgtaggtcattgcaccctatcctcagcccataggtgcagtttgccttcctacatgatgctaaaggctgcgaatgggatcctgatggaactaaggactccaatgtcgaactcttctttgctgcattcctttttcttcacttacaagaaaggcctgaatggaggacttttctgtaaccaggaacattttttaggggtcaaagtgctaataattaactcaaccaggtctactttttaatggctttcataacactaactcataaggttaccgatcaatgcatttcatacggatatagacctagggctctggagggtgggggattgttaaaacacatgcaannnnnnnnnnnnnnnnnnnnnnnngaaattttgtatatataaccattttaatcttttataaagttttgaatgttcatgtatgaaatgctgcagctgtgaagcatacataaataaatgaagtaagccatactgttttaatttattggatgttattttccctaagacctgaaaatgaacatagtatgctagttatttttcagtgttagccttttactttcctcacacaatttggaatcatataatataagtactttgtccctgattaaataatgtgacggatagaatgcatcaagtgtttattatgaaaagagtgggaaaaggatatagctttttaaccaaaaggtgttttgccccattcctaagaaaatggagcggattaatatagaaaaataagtgtggggcattttctttccctggttaagggggaaaatggtatgtgggtttgaacatttttcttcccccaattgctcctttcccccaattccgggttttttc

SEQ ID NO: 259106 - DNA, 1099 bp, Homo Sapiens
  misc_feature (68)..(68): n is a, c, g, or t
  misc_feature (1051)..(1059): n is a, c, g, or t
acgccatcgccccattggaattggggtacaaggtctggcagatgcttttatcctgatgagataccctntttgagagtgcagaagcccagttactgaataagcagatctttgaaactatttattatggtgctctggaagccagctgtgaccttgccaaggagcagggcccatacgaaacctatgagggctctccagttagcaaaggaattcttcagtatgatatgtggaatgttactcctacagacctatgggactggaaggttctcaaggagaagattgcaaagtatggtataagaaacagtttacttattgccccgatgcctacagcttccactgctcagatcctggggaataatgagtccattgaaccttacaccagcaacatctatactcgcagagtcttgtcaggagaatttcagattgtaaatcctcacttattgaaagatcttaccgagcggggcctatggcatgaagagatgaaaaaccagattattgcatgcaatggctctattcagagcataccagaaattcctgatgacctgaagcaactttataaaactgtgtgggaaatctctcagaaaactgttctcaagatggcagctgagagaggtgctttcattgatcaaagccaatctttgaacatccacattgctgagcctaactatggcaaactcactagtatgcacttctacggctggaagcagggtttgaagactgggatgtattatttaaggacaagaccagcagctaatccaatccagttcactctaaataaggagaagctaaaagataaagaaaaggtatcaaaagaggaagaagagaaggagaggaacacagcagccatggtgtgctctttggagaatagagatgaatgtctgatgtgtggatcctgaggaaagacttggaagagaccagcatgtcttcagtagccaaactacttcttgagcatagataggtatagtgggtttgcttgaggtggtaaggctttgctggaccctgttgcaggcaaaaggagtaattgatttaaagtactgttaatgatgttaatgannnnnnnnnaaactcatatattgggattttcaccaaaataatgcttttg

SEQ ID NO: 259107 - DNA, 1386 bp, Homo Sapiens
  misc_feature (798)..(798): n is a, c, g, or t
ggggcagtgagctggtggggggaccgcgaggcgagcgcgggagcctgggcggcgagccgggtgtgagctgcctgaaaatgcactcggatgccgccgctgtcaattttcagctgaactctcatctctcaacactggcaaatattcataagatctaccacacccttaataagctgaacctaacagaagacattggccaagacgatcaccaaacaggaagtctgcggtcttgcagttcttcagactgctttaataaagtgatgccaccaaggaaaaagagaagacctgcctctggagatgatttatctgccaagaaaagtagacatgatagcatgtatagaaaatatgattcgactagaataaagactgaagaagaagccttttcaagtaaaaggtgcttggaatggttctatgaatatgcaggaactgatgatgttgtaggccctgaaggcatggagaaattttgtgaagacattggtgttgaaccagaaaacgtagttatgcttgtcctaacttggaaattggatgcacaaaacatggggttattttactctacaggagtgggttaaaaggaatgacttctctccaatgtgatacaacagaaaaactcagaaaatactttggattacttaagatcattcttaaatgattctacaaactttaaacttatttacagatatgcgtttgactttgcacgggccgaagatggtgttagtgattgcgagctgctggctggcacccttgcagagcaggagtaagtgagtgctgttcagctttccagtcctgaaaaggccagcgcanctaggacataaacactgccaagtgcatgttgggactgttattaggaaaaatctggcccctttttccagtttttcaccaattcttagagcaatcaaaatacaaagttattaataaagaccagtggtgcaatgtcctagagtttagcagaacaattaatcttgacctcagcaactatgatgaagatggagcatggccagttttgttggacgagtttgtggagtggtataaagacaaacagatgtcctaggactttatgcatagcagcgagagagtcactgttaccacagttttgtcacccattagccataaattgctgtttgtatccaaagcgcatgctgcttctcttgcactgttcccctttcgcagggacatgttggtgtttgctattgaattggccagctctgcttgctgtgtggcattgttctcttggaaggctgctttgcagtttgtatttacactacagattggtgaatttgccaacgtcctcactgtgattatgtgtatattgctgtttaaattttgtatatgtgtataaaaggaaaaagcttcacctagagattatttctgaaaaatgtattgtaaaaataa

SEQ ID NO: 259108 - DNA, 533 bp, Homo Sapiens
  misc_feature (41)..(52): n is a, c, g, or t
gatcaaattgaccgcttttcatgagacaaccagatgctgtnnnnnnnnnnnncagcactgggatgtgttgaggagggggcagtttgctgtgctctgttctgtctgctgctctctctgggggccgcacaatgtccgcacacatcacggaggggagaaaggcatcagtaccaaacggaacaacctcttttttctacattgtccatacccggacatgtgaggctctattatcaacaggtggtgagaaaaattctgtttttattcgctttctggtaacttctgtaggccctggctcaaggacttagcatttcgtctcatgtacatctttttcttaagtgttctttgccatttctggaattgtccttggtttttccttagctcataggtcatagatgcagaaatatagtatttaaggcatccgcatccagcatcagatggctttgcatccagaaaaacattgataactcagtttgaagcaccaagcatgtgtaatatggctctatacaatataataaatgcataatgttaagcttttt

SEQ ID NO: 259109 - DNA, 821 bp, Homo Sapiens
  misc_feature (147)..(169): n is a, c, g, or t
  misc_feature (643)..(737): n is a, c, g, or t
  misc_feature (764)..(764): n is a, c, g, or t
  misc_feature (791)..(791): n is a, c, g, or t
cgtgtgactactcccccaggtggttatggagagggtgtccggtccctgtcccagtgccgagaaggaagcctcccacgactgcccggcagggtcctagaaattccccaccctgaaagccctgagctttctgctatcaaagaggttttnnnnnnnnnnnnnnnnnnnnnnntcccttacctcggtgccttcctctttttatttagttccttgagttgattcagctctgcaagaattgaagcaggactaaatgtctagttgtaacaccatgattaaccacttcagctgacttttctgtccgagctttgaaaattcagtggtgttagtggttacccagttagctctcaagttatcagggtattccagagtggggatatgatttaaatcagccgtgtaaccatggacccaaaatttaccagaccacaaaacttttctaatactctaccctcttagaaaaaccaccaccatcaccagacaggtgcgaaaggatgaaagtgaccatgttttgtttacggttttccaggtttaagctgttactgtcttcagtaagccgtgattttcattgctgggcttgtctgtagattttaagaccctattgctgcttgaggcaactcatcttaggttggcaaaaaggcaggatggccgnnnnnnnnnnnnnnnnnnnnnnnnnnnnnnnnnnnnnnnnnnnnnnnnnnnnnnnnnnnnnnnnnnnnnnnnnnnnnnnnnnnnnnnnnnnnnnngtaacatagttgagacaccatctctanttatggaacaattaacagtttaagganaaaaaaagggcagggcaggccgttattggt

SEQ ID NO: 259110 - DNA, 652 bp, Homo Sapiens
agccctttaaccatggtgcttgttaatgctttctgaagctttaccagctgaaagttgggactctggagagcggaggagagagaggcagaagaaccctggcctgagaaggtttggtccagcctggtttagcctggatgttgctgtgacggtggacccagacacatcgcactgtggattatttcattttgtaacaaatgaacgatatgtagcagaaaggcacgtccactcacaagggacgctttgggagaatgtcagttcatgtatgttcagaagaaattctgtcatagaaagtgccagaaagtgtttaacttgtcaaaaaacaaaaacccagcaacagaaaaatggagtttggaaaacaggacttaaaatgacattcagtatataaaatatgtacataatattggatgactaactatcaaatagatggatttgtatcaataccaaatagcttctgttttgttttgctgaaggctaaattcacagcgctatgcaattcttaattttcattaagttgttatttcagttttaaatgtaccttcagaataagcttccccaccccagtttttgttgcttgaaaatattgttgtcccggatttttgttaatattcatttttgttatccttttttaaaagtaaatgtacaggatgccagt

SEQ ID NO: 259111 - DNA, 508 bp, Homo Sapiens
  misc_feature (17)..(17): n is a, c, g, or t
  misc_feature (31)..(31): n is a, c, g, or t
  misc_feature (56)..(56): n is a, c, g, or t
  misc_feature (200)..(200): n is a, c, g, or t
  misc_feature (295)..(295): n is a, c, g, or t
  misc_feature (454)..(465): n is a, c, g, or t
ctcacaggggccgcctnggggagaatgtccngtccctgtatggttccggaagaaancctgtccatagaaagtgccccagaaagtgtttaaaccctggtcaaaaaaccaaaaacccccagcaaccagaaaaatgggagtttgggaaaaccagggaccttaaaatgaacattccagtatataaaatatggtaccataatatnggatgacctaacctatcaaatagatggatttgtatcaatacccaaatagcttctgttttgttttgctgaaggctaaattcacagcgctatgcaantcttaattttcattaagttgttatttcagttttaaatgtaccttcagaataagcttccccaccccagtttttgttgcttgaaaatattgttgtcccggatttttgttaatattcatttttgttatccttttttaaaagtaaatgtacaggatgccagtnnnnnnnnnnnntggcttcagaattaaaactatgaaatattttacagttaaaaaa

SEQ ID NO: 259112 - DNA, 649 bp, Homo Sapiens
  misc_feature (569)..(569): n is a, c, g, or t
  misc_feature (577)..(577): n is a, c, g, or t
  misc_feature (595)..(595): n is a, c, g, or t
  misc_feature (605)..(605): n is a, c, g, or t
  misc_feature (614)..(614): n is a, c, g, or t
cgagcaggaagtcgattatgatccggaggaaaagggagtttcgggctgatgctcgggccgtcatttccctgatggagatggggttcgacgagaaagaggtgatagatgccctcagagtgaacaacaaccagcagaatgccgcgtgcgagtggctgctgggggaccggaagccctctccggaggagctggacaagggcatcgaccccgacagtcctctctttcaggccatcctggataacccggtggtgcagctgggcctgaccaacccgaaaacattgctagcatttgaagacatgctggagaacccactgaacagcacccagtggatgaatgatccagaaacggggcctgtcatgctgcagatctctagaatcttccagacactaaatcgcacgtaggtggcgttgttccactcggctatcaggccacagcagccccctggtgcggcccgagaccgggcagagtggacctcacctggaaactcaccttcagcgcctcagccctggactgttagaggtgctgcagcggctcctgctctctgatcttattgcttataaactttggtgacngtaatgtnttaaggccgtatttttancatctgacangtgtttacnaaaaaatggttgtcccactggggaaatggaatgat

SEQ ID NO: 259113 - DNA, 943 bp, Homo Sapiens
  misc_feature (705)..(780): n is a, c, g, or t
ctgatgctcgggccgtcatttccctgatggagatggggttcgacgagaaagaggtgatagatgccctcagagtgaacaacaaccagcagaatgccgcggccatcctggataacccggtggtgcagctgggcctgaccaacccgaaaacattgctagcatttgaagacatgctggagaacccactgaacagcacccagtggatgaatgatccagaaacggggcctgtcatgctgcagatctctagaatcttccagacactaaatcgcacgtaggtggcgttgttccactcggctatcaggccacagcagccccctggtgacggcccgagaccgggcagagtggacctcacctggaaactcaccttcagcgcctcagccctggactgttagaggtgctgcagctgctcctgctctctgatcttattgcttataaactttggtgacggtagtgtgtaaggccgtatttttagcatctgacaggtgtttacaaaaaagtggttgtcgcactgggaagtggagtgatggcctcgtctccagtgctcctctgggctcttgagttgctgcttgaattgccgtgtagacatttgcttggagagtccacttgttatttgacggaggtaggtttcaacccagagttaatgtcaagcatgctaatttaactagtcactcacagatgacttttctttaataaagtcccttttcctannnnnnnnnnnnnnnnnnnnnnnnnnnnnnnnnnnnnnnnnnnnnnnnnnnnnnnnnnnnnnnnnnnnnnnnnnnnccttgtcggccgccctcggccctcgaaaaagttttctaaaccatctcttttggcgccggcgggccccagtaggttaagggaaacagtggccaataccgtgttctccaaggaagaatcctgtggccagtgaacatagggcctgtggaatctctcccacccaaat

SEQ ID NO: 259114 - DNA, 751 bp, Homo Sapiens
ctgctgggggaccggaagccctctccggagagctggacaagggcatcgaccccgacagtcctctctttcaggccatcctggataacccggtggtgcagctgggcctgaccaacccgaaaacattgctaggtatgtgcgccttctttatgctaagtctcgggtcggggaggctggctggttcccttgcaggacaaataggtgctgcggaggcgatgacggaggatccagcgctgaggatcgccgtgcgctggcagcacgtcctgccatgcaggttggcatcctgcgggtgtagtcccgctacgtcactgtggggcccgcaggtcaggttctgatcgtggtgtgactgtctcctgcgcgatgaccctgacataggcctcagaaaaccagtgccagtggctttccgagggccagcggggtggagactgcgccagcagcttaggaactcacgggaggacaaggtgtggtttgggcttttgctcttactactcgtcagggtcttcgatggcaatggtttatttttattgtgagatacgtacatacaaaagtgtatatgatgatgtaactttaaagaagaataaaactaatagccatgtatctactattcagctttgggcctggggtgcccctcccctatgcacctcatccctccctccggtgtggccgtcgccgtggccgcggcttacctctctgcttcccggtagagttttgccgtatttgtgtctcctcaaacaatctctcatttgctgctgcc

SEQ ID NO: 259115 - DNA, 687 bp, Homo Sapiens
  misc_feature (29)..(29): n is a, c, g, or t
ggggtaagtttggtaagaaaagggcaaantcccctggcccctaattccccagaagattcaagaaattagtaaggtttgaaggtggggccccaggaatctgcactcaaatgtgcctactctcaggatctgacctaaggggcctttcatatgtggccccctttcctcaccggaggacataagtgcatcacacaaacctcttgctgtgggcacttcctttggggttaaaaatgggaccatttgattaaggcaaccattgctaaccatcttacttccctgggctggagaaatatcaaatgtcacattttatgttcttaaaatctcagggccacagatttcctttgacaatgacatgctctgtaacatgaaatttatatcctaaagccttttgtccttccttcttaccacactcggtgggagattctgcagaagacttttggttcagtctagaaaatggaagtaaatgttacccctgagagagaagccacacccgaaagtctaacttaaggaatgtaaagagaacagcaagttgagagtaaaagctaaaatgttccaagaatctttcagcttctaggacaatgaaggttctgattccctaaaagaggactcttctttgggggcagggggtgtatcttggtattaaaagctcattgacaattactattcctcctcctcacctctgtgtttcca

SEQ ID NO: 259116 - DNA, 1134 bp, Homo Sapiens
  misc_feature (954)..(1059): n is a, c, g, or t
aatccactttagttttttccagaaacattcattttaagggctttgggacccaaagacattaaaggcagcctttgttactgttccccttccaaacccccttcagggttcttataagcttcagaaagctttccaagatgcttgcccgttctttgtatgaatccaagtaaacaactataccaaagcagctcttctgggagaagataaaacaggcacagatacatcaccaggccaactgcgtacctactcaacttgatacctgatcacatggccctacatccttaaaagcagcaccagggacaaatggagctatcaagaggtaaaatccaaacactggacagttaaaacacatacaaaccagttaaaagaacattagtaatggggcactaaatagagttaaggctggacagctggttcaaccataccttggtattgaaataattctgcaagatgaggaacttacagaggaaccttgaaagaggcaccatgatatgacagggttcactttcactgcatgtctttaagatatctactactcagcccaactgaccataaagcagctcgtggaactttaataaacaaatcctaataaaaataaataatttttagaatgttggagggtatgcctatttccttcagatctgatcaagacatgagaattataaaaccgatacaaactgttctgtgattatcacttgacagttctaacactgttatacagctcaattctatgctgcagcctttaagatacaaactggggttacatgagatcactcacttgttagagaagtatcagataaattttagaactgttccagttaaggaaaataattcttaatttcataatcctaaaactttttctaaaaatttttgcagggcaggtacttaactcatagctgttttagttgattaaaaaatctgatttaaaaataagtaaggctgggcgcagtggctcannnnnnnnnnnnnnnnnnnnnnnnnnnnnnnnnnnnnnnnnnnnnnnnnnnnnnnnnnnnnnnnnnnnnnnnnnnnnnnnnnnnnnnnnnnnnnnnnnnnnnnnnnttagccaggcaatgtggtgcatgcctgtagtcccagctacttggaaggctgaggtgggagaatcacctgagccca

SEQ ID NO: 259117 - DNA, 683 bp, Homo Sapiens
  misc_feature (24)..(24): n is a, c, g, or t
caccagaagccaaggcagatgctntcatgcttgctgtacagcctgcagaatagtgagccaatgaactctttttttatataaattgcccagtctcaggtatttctttatagcaatgtgagaaccaccttaaaaacatattcagatctgtaaatgcgatacatcacatcaaaagaatgaaggacataaccatatgtccatttctatagatgccaaaaaagtattcagtaaaattcagcatcccttcatgataaaaactcaactggatgtagaaggaacatgcctcaacacaataaaagccacagacagataaacccacagctagtatcatgaggggggaatctaaaagcctttcctgtaagatctggaagaaggcaaggaagcccactttcaccacctttcttcaacgtggtactggaagtcctagccagagcaattaaacaggagaagaaaagaaaaggcatccaaattggaaggaaaaatttagattacccttgtttgcagacaatagtatcttaaatttagaaaaacctaaggactctaccagaaaactgttagaactgaggtttagtaaaattgcaggatgcaaagtcagcatataaaaatcagcagcatttctgtatgccaagagcaaacaatctagaaaataaaccaagaaaataatcttatttccaatagctacaaat

SEQ ID NO: 259118 - DNA, 939 bp, Homo Sapiens
  misc_feature (59)..(59): n is a, c, g, or t
acaccgggggagaaaccatacaagtgccttgagtgtgggaaggccttcaaacgcagttngtacttcatgcagcaccatccaatccacactggagagaaaccctatgagtgtagtcaatgtcgaaaggccttcacccaccggtctacttttattcgccataataggacccacactggagaaaagccctttgagtgcaaagaatgtgagaaagcctttagcaatagagcccacctaattcaacattacatcatccacactggagagaagccctatgattgcatggcatgtggaaaggccttcagatgcagctcagaactcatacagcaccagcggattcacactggggagaagccctatgaatgcacccagtgtgggaaagcctttcaccggagcacgtacctcattcagcactctgtcatccacactggggagatgccctacaagtgtatcgagtgtgggaaggccttcaaacgcaggtcacaccttctgcagcaccaaagggtccatacatgagagaaccctattgctgcaatgaatacagcaaggcctttacccactgttattttatcattcataatgggacccacactgtaggaagaagtccttcgaatgcaaagaatgtcaggaaacttttcattttttttgtcagctctttcttaactaacacatgagcagtcacttttggagagagccctgttgatacagtgaatgtaaggatcccttcagtccccactcagttcctcctcattgcagaaggatcctaccaggggggaatggtggagggattccatcaaccttcccaagacctcctgctgggaagaaagacatttcaaatattactattaaaggaacagtcttttggccaaaccaaaaatctttccttttcgggaaatccctattgggaagaggtcccccccacattgtggtttttgggggggg

SEQ ID NO: 259119 - DNA, 703 bp, Homo Sapiens
  misc_feature (502)..(517): n is a, c, g, or t
ttaatactaaaactagtaatttgatactagttgtttataaacattgtaaaatatatcttttaaacaaattatcttggtagttaattcataagggtgggtttgggtaggaatagcagagtactttcagagggaaaggggagtcattcagaagtgatagcattttatttgtttgaatactctgccagtaaaatcagctgtacttagaaagttatctgttgtgtagaataatgatgtagagtttactaatcagtgaggatgtcttgtttttattttctgcaaactcagcctcactttaaaatgcattataacaatacctaattaaagataattttggctctgaaagttaccttattttttgttgagttagtgacttcatttttcttgccacaatataagcttttgagggatttttttaaattggtgcttttaataagcaaataaatcccagggttttattttcttcagtgatacccctatagaaactcttaaatgtatttgcgcnnnnnnnnnnnnnnnntttcttatgcatgctcgatgcattttcgtcctgagaaaaatgttctctacagaaactacccgtgtgtaaaaagaagattggcttaaaatggctactgtgatgggaacagtgtcttagggagatgcagcttggacttgaggtaaattgaatactttacaactgtggtttagagtttgctttaatgac

SEQ ID NO: 259120 - DNA, 997 bp, Homo Sapiens
  misc_feature (58)..(198): n is a, c, g, or t
ggctcacagcaggaatttaaactccccagtatcctggccgggctcggtggcccacacnnnnnnnnnnnnnnnnnnnnnnnnnnnnnnnnnnnnnnnnnnnnnnnnnnnnnnnnnnnnnnnnnnnnnnnnnnnnnnnnnnnnnnnnnnnnnnnnnnnnnnnnnnnnnnnnnnnnnnnnnnnnnnnnnnnnnnnnnnnnncatctgcttgtttttatttaatctgataaattattactttccttgtcacagttttgcatggggctcaagtcagtttttaaattaaatatatccttgggttccaagaggtaacctcagaacagccaaattcagggcataacgtttctttttaataatatgcttctactttgacctgagtgtgtaaagaaaaagagattactgcatatgactttgggtcagtttcttatctttcacaactctttggggagaacttccttagagaaggtgaatatttgaaatggtatcttaagatttcaatttcacacacagtggttgtaagaaataactgcctaccggtgggatttcattcctattcaacgggcaattaaattgctcaaatttaagtttaacatttagaatcaagtctcaaaatgtgtttttattatgaataattttaaagcaatcatgaccttattgtatcctcccttaacaactagtacatgccttatgcagaagagagactcaggaactatgaggtgattgggacatgtaaaacggttcttttaaaagttgagaaaatctctatttgatccctgccagtgggactgaaatttcattccttttccctttcccccaattccttgcaaatcttaaatatcctaaaatctagaaaatgttcaagttttccttcctgaataagaatgctagaagaagaatgaatcaatctacacgatggctctgaccccagatgggatcatttttttcccctgtgggcattttctatcctttttgcttattacatttacaattgttttctaag

SEQ ID NO: 259121 - DNA, 722 bp, Homo Sapiens
  misc_feature (43)..(98): n is a, c, g, or t
  misc_feature (142)..(142): n is a, c, g, or t
  misc_feature (230)..(359): n is a, c, g, or t
atgtttaaaaataactataaaatagcctcagaaaaaagagctnnnnnnnnnnnnnnnnnnnnnnnnnnnnnnnnnnnnnnnnnnnnnnnnnnnnnnnngaacatatgtctatatgtgacccatcatgataaatactgacatntattatttacactcaaataattttacattttcttctgttagactactccaagactggaattgttttgttttgttgtttttaatgagannnnnnnnnnnnnnnnnnnnnnnnnnnnnnnnnnnnnnnnnnnnnnnnnnnnnnnnnnnnnnnnnnnnnnnnnnnnnnnnnnnnnnnnnnnnnnnnnnnnnnnnnnnnnnnnnnnnnnnnnnnnnnnnnnaaatattctgaagtgtgaaatccttcatttctccctcatctgaaaggacagctttcagagacatcattcttttcagatgtctcctgaagttgtgattttcgttaaaagcaaactggagccatccaccaagttagggaacagctatgtccttgtgggttcatctgtggcactggaatcagcagtcatcttccaaatctgagatccctaaatccactgtcttgattgttcttttgccagttgtcaacaagcccttctcaaattcttcttcagttattttgcctttcttaagttttttcaagagtcttgtgtcattaagaagttcttccatgtcctcatcttcaatatcagaaccctcttcccttt

SEQ ID NO: 259122 - DNA, 776 bp, Homo Sapiens
  misc_feature (36)..(36): n is a, c, g, or t
  misc_feature (86)..(86): n is a, c, g, or t
  misc_feature (110)..(273): n is a, c, g, or t
  misc_feature (282)..(333): n is a, c, g, or t
  misc_feature (460)..(468): n is a, c, g, or t
gacttcacgccctgtaatccccagccacttttgganggtcgaggcggggccagataacaaagggtcagggagatcgagacccatcnctggctaatatggtgaaaaccctnnnnnnnnnnnnnnnnnnnnnnnnnnnnnnnnnnnnnnnnnnnnnnnnnnnnnnnnnnnnnnnnnnnnnnnnnnnnnnnnnnnnnnnnnnnnnnnnnnnnnnnnnnnnnnnnnnnnnnnnnnnnnnnnnnnnnnnnnnnnnnnnnnnnnnnnnnnnnnnnnnnntctgtctcnnnnnnnnnnnnnnnnnnnnnnnnnnnnnnnnnnnnnnnnnnnnnnnnnnnncctacttgagctaatatagaagttcatcaatgccacaagatcaacatacaaggttagatagtacttttatattataggaataaacaaaataagaattaaattaaaatttcattaatagtatcctagnnnnnnnnnttagaaatgaacttaacaaaataactgcacatactatacactgaaaattatttaaaatgctgaaagaaatcaaagagctgaataaactgagatatactcaatattcaaatatagcaatactgaatatgaagatcaaaatacccaacaaatttatctacagattcaatgcaaattccaatgtagcttttctttaatataaattgacaagctcttcctaaaatccatataaacatataaagaaaatcaaacacacaagaattctgaaaaataacaaaattcagtaacttacactcctgatataaattccc

SEQ ID NO: 259123 - DNA, 647 bp, Homo Sapiens; identical to SEQ ID NO: 4629

SEQ ID NO: 259124 - DNA, 634 bp, Homo Sapiens
cactggcataaaccttgaaatgaatttactgtatgaatagacatataacaagtagaacaatagggtgggtttttttaaagactgcaattgaagataacaggactgaaaatatcctttaactcatgtaactgagtaaaacatgttgaaaaaattcagaaaaaagtttcacaatcaatttataatctatcaatatattctaaatataacttaaaaagtgaaactataaaaaggtaaagtttagtcaaacttttgccccatctattttcattctgtaatttatatggagcaacatagactactccattattgtagaaaggggtcgatacaaagccatttaaaaatccaccctcatctatgttaccaaagacagcagccgttattttaataaaacactcatacaaataattgttaaacagccaaagaacacttcaggaatctcacttttcaactctgtttaaaccatacatataaaactcttcattcagcttaacatttcactgtggttacctgaaatcatttcctccctttagggacaccactataaccactataacagggtcagcgccaagttttctctcttcttgttctcatacctaactcctatctgaaaaccaaacccctgtgagagagacag

SEQ ID NO: 259125 - DNA, 586 bp, Homo Sapiens
  misc_feature (35)..(35): n is a, c, g, or t
  misc_feature (42)..(42): n is a, c, g, or t
  misc_feature (53)..(53): n is a, c, g, or t
  misc_feature (68)..(68): n is a, c, g, or t
  misc_feature (71)..(71): n is a, c, g, or t
  misc_feature (80)..(80): n is a, c, g, or t
  misc_feature (87)..(87): n is a, c, g, or t
  misc_feature (89)..(89): n is a, c, g, or t
  misc_feature (98)..(98): n is a, c, g, or t
  misc_feature (103)..(103): n is a, c, g, or t
tcacagtttgggtgcaatgttgcagaaaagggtcntgtttantgccagcgggntgtggccagggcccntgnttccccgcnttgttgnanacattagcnttttntgacactgaagtagtaggccggagtttggagctgctgcatctgctgttcctgtatcagccagaggctgttcaggtcttcctgcagcagtcagggctgcaagccctggaaaggcatcaggaagaggcccagctccaggatcgtgtgtatgctctccagcagacagctcttcaagggtgatcttgtttctcaatgtcactcattcccctctctcttaacatcaagcttgtttgtccagtagagcctttggagatttaggaccataatgaggtctcatgttctctgctcccacacctaagccaagacctttgggtcccagctcctccccttccactcagcactatccaggcaggaggaccaaaagggactcagtgtggtctacttactctggggccctagaatccctgcccccccgccacccttcatgtttgcttcagcagctggtagcttttgatgagacagaataaagttttatttttatatta

SEQ ID NO: 259126 - DNA, 693 bp, Homo Sapiens
ggtctacatagtctgaaaattctaaaagaatgctgtttaaattttgtttttatttcaatgatttctatgtgcatatacacgtattttaagtcatgagtaaccaccatataactgagttctactacaacctttcagtgctgtttgctttttacaattatacaattgcattctaaaatcattacataatagatttaacttttattttaatatattgtttatcatattgaaacatgcaaaaactctgcaagatcacttattcttggaattctggagtatctcagatatatctcctttttttgtgatggggaggtgtcggcacattactcaagtttgaaaatacaaatatgtattatttaagaaacataacacattacacagagatgtgactgggatgaggtgagtgaggcacatgcctcaggtacaaaattaagggggcaccaaaaacctcagtaatgaagataatattttaacacagtatttttaaaaatcaaatttatgcaaggtccatgaagagcaaaatatcaaatttttaaataaataccaaatcagtattactgattttttccttctgcctccggctccaatggcaccaagattttataaccacaacacaatgttggtccatttaatggtttcccgcatattcagtacaatcagtaatgccacgatgaatatctctgtgaatattcatac

SEQ ID NO: 259127 - DNA, 381 bp, Homo Sapiens
  misc_feature (298)..(311): n is a, c, g, or t
attcggcacaggaactggcagatttgcacccccccaccccgcctctctccctcaaaacaaccaaacaaaatgatttcagcccttgcttgcagagagatgagactcagacaaacagaagagaatgggggtaaaattcccagatccccggaagcttaaggtgggaaaggccttctgcgttgcgcgagtcctttgtcagccataaaacttcttgaccttttaaagcttagttagatcttggcgttgtagagacctgttgtaccagtttttaaatagtctcaaagaagctgtccagataacnnnnnnnnnnnnnngaatccagcattcaaaagttttgtttctattcagggttttctcctatgtctggatcttttaattggcttt

SEQ ID NO: 259128 - DNA, 664 bp, Homo Sapiens
  misc_feature (65)..(87): n is a, c, g, or t
cccccaccacctccccccaccaaaatctgcatctctatcagtgctcgacaattagttattatttnnnnnnnnnnnnnnnnnnnnnnnctgttaaacactgaggtaaatcaattttcaaatgattaccagtgtaacagaaaaatgcagttcgccctgattgttctcatccaaatgttttataatattccttaccatctgccacaagtcaggttcaccaaaaatctgtccctttccctaaatccaatgattaataaatatcaatgtattttgcattttaaaataaaatataactaatttaattttatgggtatcatttaccaatatgtttttaaaagtattttgctaagctagctttaatactcagggcaaatacaatctcaatggttcccacgttacactggcgtactatgttcttaaaaggtgatgggtaggggttggggtgggtagaaggaagaaaacaatttgcctggaatcagttacttccttacagatttcccaacaatctgcattatcaaaaataggaagacaatagaaggcagccactgcatttaaaaacattacagctggcactgatacaagagccccgatttgtcactttatacaaggaaataacaaagtctaaatgggtaaaaattagacttttagctattttccccaatacaca

SEQ ID NO: 259129 - DNA, 585 bp, Homo Sapiens
agggtcctgtcttgtaaaagaacagtcccatgctccatgcttccagacacccagcctcaccctccatgccagccagggctggccctgaacactcccctgggatccaaatgagcagtggggagagggtcagagagaaataatgagagaagggctaggcttgaaggaaaaggaaatggcgtggaggacggtgtgattaagcctctggaaactagagagcaacactcaaccagtgaagccggggcctaacccaggagaaacaatggcaaattgtagaggaggcgaacaggaggccagaggcctgggatctgctacattcatctggtccgcaggcaggaaacgcggggcagacacctggggaggctgcaagtgggatctgcctggcctcgtgcctcaaatggggctacatgtcttctgaaaccggtgagggcactggcaggtcttcttctcactgaggagtctcttgatctgagacatccgctctgcttggcggagtgggcagagggagctgggccaaaatcagttcccatatacaggatctcctggtagaggactcaggggtttgagggccttgtggggaccaggtgt

SEQ ID NO: 259130 - DNA, 1481 bp, Homo Sapiens
atgcaggggacggtgggatgaaaggggtccaggatgaggaggggggctgtgaggcactaaggacagtaggggtgtgcccttggtggggggccgcttgagggattccctagggaggggctttcaggctgggggagactgaaggtaaggattagggaggggaggggcgagacctatgagcgctgctctccagctgcatcagagctccctctagtggtacagaagagagatgacgcctccggctggggagggaggggctggcgcctctgagagagcccatttattatcagggtcacggccaagaccgtgggcttggtttctaggtaggtggactttgaggggcaaagacaacccacttttcctgccccctacccccggctcttagagaccatttaaatccatatccaaagtatatccagagccacctgggaccatcaggcttctggctagtctttctgggccaaacctgtcctccaccctgaggaccctcagggaaccaggaaggtgaggggctggctccgccccacctgtagcacaagagctggcccaggaggaggctgaagatgtgtttctagttcctgcatgctgctttgttgtgtgacctcggacatgtcacctccagccttcttcacccacctcacctatcaactagggctagtaattgcctgtggtgggtgggctggggggctctgatgccaaaatgcaggtagaagacacactgtgagaggcaaacgtcttcactcatcctgcagggaaaggccaagtgagcatctgggacccattcgagctgaatgacccccacccccttcatctgtgtctatggagggcagtgcgtgtcctcatcctggcgagaagaggaatctgatccaaagccctcatggcagagaggcaggagctgatggcttgaaagggcaagggtttgcccaaggtcatgcagaggaaggagtggggacgggttgaaggagatgttttctgcccctgagggccttgggaagagggtgtgggtaggaagttttgggaggacttgaggaatgctggtatcttggaagagttggggccccactcctggggagggagcactgggatttgagctccagatttgacctggagttgggctctaaagggaccctgctaaaagggagaagttggggaaacactgagagggggttatggtgagaagggggaaggatccaggacccacatcttaggccatgtgggcagctcaggagtccctcttgggctggatagtctgcacagaagattgcccaaaggggctggcgggtggcgagaaccatgactggccactggcattgcggaaaatgggtgacaactgctgctctggctcatccccgaagacctccacgtggctgtcggcttcggggtccaagggctctgccttggtgtcctggctcagccagcctatcatggcccagaagaggcagatggccctcgtgccgaattcgccacccaggcctcgctaccta

SEQ ID NO: 259131 - DNA, 760 bp, Homo Sapiens
  misc_feature (52)..(52): n is a, c, g, or t
gttcttgtaacatcgtgacatgctcatagtcctgtcccagttcatgggaccntgcgaccacctccctctcagcgatccactgctccaggtcgtccacctcccggttgagctggaataacctgtgtctctcatccagcttgcctcttctctcttcagcaaggtctttcagaccagcgtacagtttatccactttggactgccgcatgctaatgcgctcactttcaggatggctgtcggccaccagggcccggctggtcttggagagctgatgcacggtctctgcatagtcctccacagcttgttctaagatctggtgcttcttcaacatggagacagcactctgctcatccttggccttctcctctgacatcatgtacagctcctgctcgctcatccaggcttcggcctcagcagcgtcaaagtagtactgctgggacctgtgcgcctcctccagccgcctgtggcgtttctctgtctcctcaatgaggagaccccacagctgcttcaggtcggcaagcctctgtctgatggcctcagcgctgaggctgctgctgtcagtgacgatgttttggctcctctcaaagatgtcgtcaatgcgaggctggtgcccctggatttctttctggagggtctgatttttctttattaacagctgcacagtctggaggttgtggccatgatccgtggaagttgccaaaggcatcctctctccaacccacaagatctcgtcctccacatccctgttgaactgatggatctc

SEQ ID NO: 259132 - DNA, 931 bp, Homo Sapiens
aagctagaaaaaggccaaaaagcaaaacctgagaaaacaatacgtgttgttttctcaggaaaagaaaaaccttcatgaccctactgaagagcattggagatcagcttccgctaagatgctagcttggccaagtctgttatgttcacctgaaaaagtcttagcagagaatttttgcattcccacccaaaagccctctcagccactcaaatgcctatcttctccagtctacaagttacatgttcccacccagcattacagttcttgaacatgttatttctccacttactggtttaagttggttttagtcactggataagtattataatagagctacttagctgtggttttaatacccttctgttaacaatttgcaggcaaattaatggccttttctaacatagttcaacccaccaaagacctcgacaccatcgttaccttgaaaccgattatggatcatgcccacaaggatccaagctactggctgcatcgaggtgaggggtgaagggtctgtgctagatcaaaaggcacggggtggcgatgtggcagagaagttgcttgtggggagaccttgcttttaacaggcttctggaaaagctagggaaaagtggttgcccgctttccccctttccctccccttcaagcaccgcttgagatttgggctttattattaagagctgctataaaaacagcttgcttaaatgttaagagaagcccaggggtacttcaagcattcttcggatgcttcactccagaaagagggagttgaggcaagtcctcattactaataaaaatcaggtgaggctgacacttctcttgaccttaggataatagcgctttgttgtctctcctgccacaggaaggctccatggttgtcctactttaagccttcggtgcctttagtgaggggtacctgaaaaatcttaaaaaaagg

SEQ ID NO: 259133 - DNA, 443 bp, Homo Sapiens
  misc_feature (382)..(382): n is a, c, g, or t
  misc_feature (414)..(414): n is a, c, g, or t
cttaaagtaggacaaccatggagccttcctgtggcaggagagacaacaaagcgctattatcctaaggtcaagagaagtgtcagcctcacctgatttttattagtaatgaggacttgcctcaactccctctttctggagtgaagcatccgaagaaatgcttgaagtacccctgggcttctcttaacatttaagcaagctgtttttatagcagctcttaataataaagcccaaatctcaagcggtgcttgaaaggggagggaaagggggaaagcgggcaaccacttttccctaggcttttccaggaagcctgtttaaaaggcaagggtctccccacaaggcaactttttctggcccacatccgccaccccgtggcctttttgantctagggcacaggaccctttcaccccttcacntcgatggcagccagttggtttggggtttt

SEQ ID NO: 259134 - DNA, 435 bp, Homo Sapiens
ggggtggaaccctatggttaagaaaaaggccccattaaatttgccctgccaaattggttaaacagaaggggtatttaaaaaccccacagcctaagtagcccctattataataccttatcccagtgacctaaaacccaacttaaacccagtaagtggagaaataacatgttcaagaactgtaatgctgggtgggaacatgtaacttgtagactggagaagataggcatttgagtggctgagagggcttttgggtgggaatgcaaaaattctctgctaagactttttcaggtgaacataacagacttggccaagctagcatcttagcggaagctgatctccaatgctcttcagtagggtcatgaaggtttttcttttcctgagaaaacaacacgtattgttttctcaggttttgctttttggcctttttctccctta

SEQ ID NO: 259135 - DNA, 797 bp, Homo Sapiens
  misc_feature (275)..(275): n is a, c, g, or t
  misc_feature (721)..(721): n is a, c, g, or t
  misc_feature (748)..(748): n is a, c, g, or t
  misc_feature (763)..(763): n is a, c, g, or t
ggcagaaagaattcagaccagttattagttgctaaacaatttgttgttgaatgaaaagcaaaatcctggaaaaaaacaacttagagtattagggtctaacagcctgaaagtcattgtaaacttgacttgtttttctgcccctgaaattaagttagatgaattaaaacaaaaggcaaaggcagttatttaaaaaacttgtttttgctattgcatatttatttcatataacctcagatttattttgatttccatttcttggtgcctggcaccagaantttgtgcagatctatttcaaaaccacacattgtaaaatcaacactattgacagttatgggtaattgaatggcaaatggggtttccaactgggtgctccaactgggactcttaaacaaggcttgacaaattctgctttgtcaggtgtcataaaatatggttcagaacgcatctgtagtgtcaagggaaaatcacttatgccattccctgtattaccacttctgactcttgtccgtcctgaagtaggaattcacatggcttatgatggagtctttgttttaggaaacacgacacaaacgctaagactcttcagatatcatcactgaatctttaagttcaatccagttgctagatttggcctgtaacatttggctcagggattcctggtggccaaaggaaaacatcacaagagtcacattatctgtaagataggaacagactacttgtnttaaagaaaacttctcttaaaactcanagcataaagatgtcngaatgggatttaagtaatttctgccttcaaccta

SEQ ID NO: 259136 - DNA, 765 bp, Homo Sapiens
  misc_feature (19)..(19): n is a, c, g, or t
  misc_feature (63)..(63): n is a, c, g, or t
  misc_feature (71)..(71): n is a, c, g, or t
acagtaattcccatgcaanggaacaatatagagaagtgaaaaaaaatcacatgtgcttgcaantatgggantaaatttcagaaacataatgttgagttcaggaagccacaaacaagaggaacatgtaggattgcacctatacagcgttcaaagtaggctagaccaagcgatggagtttagggttgcatacctagttggtaaagtatgaagaaaattgaggaaataaccattataaattatggatattgcttatatcaggagatgcgaagaagggtttagggacttggaaagtggaatggaggtggatctagcctgttttaggtgttccttgtcttgcccttcatcatagttacttgagtgtttatgatacactgtggaatttcccagttttgtattggttcatttctaagtgcgcattataactttaatatacaaatttgtaattaggagaaatatagaaattattattactcatctcattatataccgaagggaaatatcaaatatttgtatacattcttacacaactctaagatagttgaaataggaactttcttatttagttgcaacataagaaaatttgagatgatgttatctgccaagcgcagatctctccaaaggatttcttctagccttaattatccacctcacaggacaaacctttgccattccccatctactttttctttcggctcctcaattcctgacacaacaaagttgtacatatttcccacactcttggtttagcagagttcttttatcagt

SEQ ID NO: 259137 - DNA, 805 bp, Homo Sapiens
  misc_feature (12)..(12): n is a, c, g, or t
  misc_feature (56)..(57): n is a, c, g, or t
  misc_feature (66)..(66): n is a, c, g, or t
  misc_feature (78)..(78): n is a, c, g, or t
  misc_feature (98)..(98): n is a, c, g, or t
  misc_feature (119)..(119): n is a, c, g, or t
  misc_feature (132)..(132): n is a, c, g, or t
  misc_feature (134)..(134): n is a, c, g, or t
  misc_feature (139)..(324): n is a, c, g, or t
  misc_feature (392)..(408): n is a, c, g, or t
  misc_feature (439)..(574): n is a, c, g, or t
  misc_feature (762)..(762): n is a, c, g, or t
  misc_feature (778)..(778): n is a, c, g, or t
ccataggacacnggaaaaaaagcaacatgtggggaacaagtgtcaaaataaagcanngaattagtntttaagccttgntaaccattaatggaagtagntttgataaaaattatttgagnccagcacagtggntnacacnnnnnnnnnnnnnnnnnnnnnnnnnnnnnnnnnnnnnnnnnnnnnnnnnnnnnnnnnnnnnnnnnnnnnnnnnnnnnnnnnnnnnnnnnnnnnnnnnnnnnnnnnnnnnnnnnnnnnnnnnnnnnnnnnnnnnnnnnnnnnnnnnnnnnnnnnnnnnnnnnnnnnnnnnnnnnnnnnnnnnnnnnnacccaggaggcggaagtcgcaatgagcactacactccagcctgggctatagagcgacactcagtctcnnnnnnnnnnnnnnnnncctatttgataaccataaattgatatgcctnnnnnnnnnnnnnnnnnnnnnnnnnnnnnnnnnnnnnnnnnnnnnnnnnnnnnnnnnnnnnnnnnnnnnnnnnnnnnnnnnnnnnnnnnnnnnnnnnnnnnnnnnnnnnnnnnnnnnnnnnnnnnnnnnnnnnnnnaattgatatacttttgattaaagctgtttacattagtctctcccactaaactgggttcccaggcttacaagggcaatgactggggatctcattcattgtcatactctgtctacacgaaatattcagcaggtatcaagtctgccactttcctttaaattaaagaacacagtttattgtggttggggctngtattttggatcgggnggtaaggggtgaagggaaggggggaaa

SEQ ID NO: 259138 - DNA, 1128 bp, Homo Sapiens
gggtgggcccgggttgggtcccccctcaaaaaggtccccggaagttggccgttgaccagggtttcaaaagtccttgggggactatttttgggtacttggtaaccccggctcttcagggaagggccccccagttatttcaggtgccccctttccaggccagtactccttttgcatattgcaccactgtactcagggcatcctggatgcgagctgatgcccctctactttgttgcaagtcacttgagagtccaatcacttctgttggggctaaggcaggtcttcatgatcaggtcaactccgatgcgttcagtgtcgtagtacgcgtatttcactgtcagaggcgtgaacatcactcccatggtctccccagggactccccattaaagtgcggacgtaggctttgatgctcatgcgcccgttctggagacttgtgtccacagtgaggtggatggggttgggggcctctcggctgtagtactcatggatcagcacagagtgctctgtgatgtcatggcccgtagcgtaccagcccaggatgagctcatttggagaaacttttttatgcagttcatacatattcttagcaaattccatgtcaacagccacttcatcttctgactcattgtgcggcactgaaaagcaattggtgacctccactgagtgtttgtcgacagttcccaacagggtcccgataactcgggcagcaccctcgttgcgtctctcgtagctgtccacaatggaggccaaaatgactgggtgcagcctgaccacgcggccgccggggaagggccctggaagagcaggaccaggcagagcgggcgctggggtctgcgctggagcttgcgctgaggccggggtctggccaggagccgcagttgcagccgctgctgccgcagggtctgaggatgaggctggagccgcagcgggaaccggagccgcagccggtgctggcgttggcgctggaactgaggctggggccgccgccgggactggggttggcgtggccggaggagcacttactggtaccgccggtgtggccatcttgtcgagaaagaagcctcgtgccgaattcgccacccaggcctccttcattgattgtgatgtggagggggacgtcgcgggtgcggc

SEQ ID NO: 259139 - DNA, 1265 bp, Homo Sapiens
tcctaggtagcgaggcctgggtggcgattcggacgaggcccaccggcggtaccagtaagtgctcctccggccacgccaaccccagtcccggcggcggccccagcctcagttccagcgccaacgccagcaccggctgcggctccggttcccgctgcggctccagcctcatcctcagaccctgcggcagcagcggctgcaactgcggctcctggccagaccccggcctcagcgcaagctccagcgcagaccccagcgcccgctctgcctggtcctgctcttccagggcccttccccggcggccgcgtggtcaggctgcacccagtcattttggcctccattgtggacagctacgagagacgcaacgagggtgctgcccgagttatcgggaccctgttgggaactgtcgacaaacactcagtggaggtcaccaattgcttttcagtgccgcacaatgagtcagaagatgaagtggctgttgacatggaatttgctaagaatatgtatgaactgcataaaaaagtttctccaaatgagctcatcctgggctggtacgctacgggccatgacatcacagagcactctgtgctgatccatgagtactacagccgagaggcccccaaccccatccacctcactgtggacacaagtctccagaacggccgcatgagcatcaaagcctacgtcagcactttaatgggagtccctgggaggaccatgggagtgatgttcacgcctctgacagtgaaatacgcgtactacgacactgaacgcatcggagttgacctgatcatgaagacctgctttagccccaacagagtgattggactctcaagtgacttgcagcaagtaggaggggcatcagctcgcatccaggatgccctgagtacagtgttgcaatatgcagaggatgtactgtctggaaaggtgtcagctgacaatactgtgggccgcttcctgatgagcctggttaaccaagtaccgaaaatagttcccgatgactttgagaccatgctcaacagcaacatcaatgaccttttgatggtgacctacctggccaacctcacacagtcacagattgcactcaatgaaaaacttgtaaacctgtgaatggaccccaagcagtacacttgctggtctaggtattaaccccaggactcagaagtgaaggagaaatgggttttttgtggtcttgagtcacactgagatagtcagttgtgtgtgactctaataaacggagcctaccttttgtaaatttaacaaaaaaa

SEQ ID NO: 259140 - DNA, 898 bp, Homo Sapiens
acggccattcgggatgcggaaacggattccccttcttatttgttgcgaagtcccctgaaggggtccaattcctttggttgggggttaaaaccggtttttcaaggatccagttcaactccagatgcgttccagtgttcgtagtaacggggttttttcactttccgagggggggaacatcactcccaaggttccttccccaggggcttcccataaaagtggcggacgtagggcttggatgctcaatgccggccggtctggagacttggttcccccagtgaggtgggatggggtttgggggcctctcggctgtagtactcatggatcagcacagagtgctctgtgatgtcatgggcccgtagcgtaccagcccaggatgagctcatttggagaaacttttttatgcagttcatacatattcttagcaaattccatgtcaacagccacttcatcttctgactcattgtgcggcactgaaaagcaattggtgacctccactgagtgtttgtcgacagttcccaacagggtcccgataactcgggcagcaccctcgttgcgtctctcgtagctgtccacaatggaggccaaaatgactgggtgcagcctgaccacgcggccgccggggaagggccctggaagagcaggaccaggcagaccgggcgctggggtctgcgctggagcttgcgctgaggccggggtctggccaggagccgcagttgcagccgctgctgccgcagggtctgaggatgaggctggagccgcagcgagaaccggagccgcagccggtgctggcgttggcgctggaactgaggctggggccgccgccgggactggggttggcgtggccggaggagcacttactggtaccgccggtgtggccatcttgtcgagaaagaagccc

SEQ ID NO: 259141 - DNA, 2298 bp, Homo Sapiens; identical to SEQ ID NO: 68269
  misc_feature (1451)..(1539): n is a, c, g, or t
  misc_feature (2166)..(2166): n is a, c, g, or t

SEQ ID NO: 259142 - DNA, 273 bp, Homo Sapiens
ggctgggtagggactgtttttgagatcactgggctgaaatgtattctaggggtgaaggatctaggatgtacctgctcgtcatttcctgacttcaccttttaccaattcttttcttaacaaatttaaaattggtcagagcaggagctgctagctggctttttaacagtgtttctcataatggcagcactcaccaaatagttcttctcttgtctcctaaaattaacttgcaagactaatgtaacaaacagtaaaatttaagctaaagaactcagt

SEQ ID NO: 259143 - DNA, 638 bp, Homo Sapiens
gcgacggaattcaccattcaagtaaaaaagaagccagtaaaagatcctgagatggattggtttgctgatatgatcccagaaattaagccttctgctgcttttcttatattacctgaactgaggacagaaatggtcccaaaaaaggatgatgtctccccagtgatgcagttttcctcaaaatttgctgcagcagaaattactgagggagaggctgaaggctgggaagaagaaggggagctgaactgggaagataataactggtgacaatagatgtgagttaaactttaggaaaaaggattccctttttttaaaaaaaatcaatacctcaaaagcaggctttgggacaagaaaaccccaaagtggcctgcttttcccatcccaggagctcattatccagtctgtgccaactgaagtaggagactgactgtgagtgctggctaaaagccctgggtggtgaggctcacagtactggtttccaggaggaagagcctttgtgcatttgactgaggccagtttctatgaagagcaagtagctgaggagaggtcgaatttactgctttttccaggacaattctggaagtaaagaaaatgtaattcaagctggttagcttaattttgtgccattctttaacataaga

SEQ ID NO: 259144 - DNA, 768 bp, Homo Sapiens
  misc_feature (541)..(558): n is a, c, g, or t
ggagtcagatgcaccatggtgtctgctggagaatactggacacagtaggaagaagtataggtgtccagaagaaaatctaagaggaatattgtaatttgttaaaaaaaatagttttgagttttaacagcagttagaataaagcatgctgttgacttcactttcaaatttcagtgtaggtaatgactaaaaattactttgaaactttttacagtaatactgtaatagcttaaacagtgatttaaaatgcaatttaatctaggcaaaaaaaactttagagtaagttttcctcctggctgtcagttggaaattctaacctgagtggtcattttacattcccagtctcttgagaagtggattctactcttagacgcacagtctgaagtctgacttcctaacggcaacccctttatgactagacacatttctcctttttccttttaaaaatctaagcgacaggaggtgttgcattaactccaaggaaaagtacagaataaacaatgtagaaatgtcactcctcatttacaccttttagacagacagnnnnnnnnnnnnnnnnnncccccccaaaataattgattgcttccagtgagtgggtggagatgaatctcagcagcatctgtgagtactacaggttggagcttcctgtctgtaaaatgggactgcaggggagggggtgttgtgaatgagttggactggatgacttctaacattctgtgatgcctaattttgcaaaatcacttttcattcacccaataaatttttttcttc

SEQ ID NO: 259145 - DNA, 413 bp, Homo Sapiens
  misc_feature (301)..(301): n is a, c, g, or t
  misc_feature (303)..(303): n is a, c, g, or t
  misc_feature (310)..(311): n is a, c, g, or t
  misc_feature (327)..(327): n is a, c, g, or t
  misc_feature (338)..(338): n is a, c, g, or t
  misc_feature (359)..(359): n is a, c, g, or t
  misc_feature (362)..(362): n is a, c, g, or t
  misc_feature (366)..(366): n is a, c, g, or t
  misc_feature (372)..(372): n is a, c, g, or t
  misc_feature (392)..(392): n is a, c, g, or t
ttagagctgcttggagagctaagctggaagggtgcttatccctgcgtagaaacgcctgccaatgctttctcatttggacccagactccagatcgggagcagtcttatagctggatcagctaccaagagaagttgtaaaccaagaagagaaaagcatttcaatttgggacatttatttgcacctggaaatggggaatgggctgtcagaccagacttctatcctgtccaacctgccttcatttcagttctttccacattgttattctgggtttggactgtgctggaaagacaactgtcttatncnggctgcnnttcaatgaatttgttnataccgtaccnaccaaaggatttaacactganaanattnaggtanccttgggaaattctaaaacngtctcttttcacttctgggat

SEQ ID NO: 259146 - DNA, 930 bp, Homo Sapiens
  misc_feature (838)..(861): n is a, c, g, or t
ttggaaccagttaacacaaaacactttaattgacagtatacaattttccaaaatatatttttgtaagaaaatgcaataattattaactatagtttttacaaacaagtttctcagtaaattccagtgtacttcagacccctgtccactaagacatatatgatcccccagttcctgggcaaactgttgaacattcactgcagacaaaaagaccaacaccaaagagtcatctgtgtcctccatgctgtgtttgcagcagacctgagggatcagctagtgaccgtgacaaaagctatgctacagttttactcttgccctctctgcctcccccatcatgtttccttggtccctcagtcctgttggagtaagttccatatataaaagctcatccaaaactttgtttcttggcagaaagaaagaattgttcacttacatcttaaacctaaatgattcagagaaagtgtagaagaccagttcttatgtttgtgttcatgccctccctagccttgctagggtaacaactgggaaaggaattctgtcctttgtgtcattctggcaccttcgagtagcaattcttaatttaccgattattccttctgaggcgcacagtctgtggatccaggttttaatcttgtttctgtcctgaaccatgtgattttgaggaagtcacttcatctttgtgagcttcagattatctttttctctagaaaaagattggactagatcttgaaatacctttctccatgactacagggttgcctgccaaccagagcatattgactccaacctttactgaaatggagctgtgactttgctggggagggggcagggttgcattttnnnnnnnnnnnnnnnnnnnnnnnnacctgatctacaagacaaatactttatcataagtttgtcttgttatatttcattttttgtttaaaaaaa

SEQ ID NO: 259147 - DNA, 1198 bp, Homo Sapiens
  misc_feature (942)..(973): n is a, c, g, or t
acggaagtggtcgtcgtcgcggcaccggtgggagctaggcgcgaggctcggagtgcggccagcgggcggaggcggtctcgcatcggcggcgacggagggctcaggcgtcgtcgtttgggtggggggccgctgaactgacaagcgacatttcagctcctttcacccgccggaaccccggagccggggcccgctcagccggcgttaccatgaccaaggccggtagcaagggcgggaacctccgcgacaagctggacggcaacgaactggacctgagcctcagcgacctgaatgaggtcccggtgaaggagctggctgcccttccaaaggccaccatcctggatctgtcttgtaataaactgactactctaccgtcggatttctgtggcctcacacacctggtgaagctagacctgagtaagaacaagctgcagcagctgccagcagactttggccgtctggtcaacctccagcacctggatctcctcaacaacaagctggtcaccttgcctgtcagctttgctcagctcaagaacctgaagtggttggacctgaaggataaccccctggatcctgtcctggccaaggtggcaggtgactgcttggatgagaagcagtgtaagcagtgtgcaaacaaggtgttacagcacatgaaggccgtgcaggcagatcaggagcgggagaggcagcggcggctggaagtagaacgtgaggcagagaagaagcgtgaggctaagcagcgagctaaggaagctcaggagcgggaactgcggaagcgggagaaggcggaagagaaggagcgccggagaaaggagtatgatgccctcaaagcagccaagcgggagcaggagaagaaacctaagaaggaagcaaatcaggccccgaaatctaagtctggctcccgtccccgcaagccaccaccccggaagcacactcgttcctggnnnnnnnnnnnnnnnnnnnnnnnnnnnnnnnnatttggtgtggcgggagggctggttgcttgtcgggtgacagagctgcagcagcagcccctctgcaccagcgtgaacaccatctatgacaatgcggtccagggtctacgccgccatgagatcctccagtgggtcctccagaccgactctcagcagtgagcttgtccccagcacatgcggcctcccagccttggagtttggattcctatggaattgggttctgctgg

SEQ ID NO: 259148 - DNA, 2596 bp, Homo Sapiens
  misc_feature (450)..(481): n is a, c, g, or t
  misc_feature (845)..(860): n is a, c, g, or t
  misc_feature (2400)..(2400): n is a, c, g, or t
  misc_feature (2539)..(2539): n is a, c, g, or t
  misc_feature (2569)..(2569): n is a, c, g, or t
  misc_feature (2577)..(2577): n is a, c, g, or t
gtagcgaggcctgggtggcgaattcggcacgaggcaagaacctgaagtggttggacctgaaggataaccccctggatcctgtcctggccaaggtggcaggtgactgcttggatgagaagcagtgtaagcagtgtgcaaacaaggtgttacagcacatgaaggccgtgcaggcagatcaggagcgggagaggcagcggcggctggaagtagaacgtgaggcagagaagaagcgtgaggctaagcagcgagctaaggaagctcaggagcgggaactgcggaagcgggagaaggcggaagagaaggagcgccggagaaaggagtatgatgccctcaaagcagccaagcgggagcaggagaagaaacctaagaaggaagcaaatcaggccccgaaatctaagtctggctcccgtccccgcaagccaccaccccggaagcacactcgttcctggnnnnnnnnnnnnnnnnnnnnnnnnnnnnnnnnatttggtgtggcgggagggctggttgcttgtcgggtgacagagctgcagcagcagcccctctgcaccagcgtgaacaccatctatgacaatgcggtccagggtctacgccgccatgagatcctccagtgggtcctccagaccgactctcagcagtgagcttgtccccagcacctgctgcctcccagccttggagtttggattcctatggaattgggttctgctggacacaacctctttttagcatcagacctacctgccatcatcaaatggctgcagattggtacatgagacctcctctttgtaggacttcttcattccttagtcagggttccctgaaggaatgaggagaaatgggaggtggcnnnnnnnnnnnnnnnncagttacctgcatgcctaaaggagtaggcttgggggtggggagagagaaaacatagccttttctagttgttatataaagctgtgtaaaggcaaggctcgtttctactaaatggtcagctgtcactacatttatacttttgtatgccacaaaccctttcattcctccctgggaatcagggtagatcaggaggaactgggggggactagaacaccacgctcagtaaatccagtctaaactgggaggtaggggtattcctgttttctttaggacctcagagatgtaagcattttagcagccacacaaaatctctggctatgaaagggacttcatgaccatccagtccaatataacacttgcagacagagaaactgaggtcttccatgacttgcctagtctcccagctagtttgaggcaaaactggattcccactctggtattctttcttccctttacatcattttccctcctttataatgtcctgagagaccagaactcacaccagaatcgattattcctcaggtgaagcatagactctttcatggtagacagatttcacgactcagagatagaaatctcttgctatcatcaggtcacgggcagctcctgtggagtcctgcccaacttatgtggcttccataaaatggcaacagtccaggctccttgcctaattttagagcattaactccctaattgccagtaagcaaggaggtggatctctgcaaacctacactgtctatgacagctctagttgtacttggtgtgactaaatacctcaaaggcaacctgcttctgcaggttttgaagtgtcagcttcataagacactgaggtttagaattgtttgattctagaccataactgaagggcataaatggaaacaggatatgaagggaaacaagtagcatcatggagctgaaaagtggtgcatcacccaatggctagcacaaacaaggatcacactgtccattctcttgtctgctaaattaagcattttcttgcctcctttgcttcatcttttcacaacagctggatagagggatcagaaatgactgtgtcatggtgctcattcactgcaaactcccagttgcaagctccttggctcccccggagggagcaaagaatctcatagttcagagacacagagggccttttagccctaatgaccttttggatgggactgcaactcatgactatcctgatattagaagaaaggactttgttaatcttctcccccatagctctgctgcgtaggtctacatcttactcagaatcactacacattcctttagtcttcctccaagctccagagccattggtacaaatgctttattgaaactaaatacataatacacacaatgagatgaagacaatatagaagtccgcatagtcatcataatcccgttccttggccggttgaggcagctcagtggctgagcccagtcaagccaacccgcagcttcactcacgacttcaagatttgatgctaattcttttggatttctacagttattaaataagtgtctgagtggactgtctttgtncctttgtgttttgagggctggctgggtaggagtgggggtggtttgtctgtgggcagtgaatttttgccagggagagggaacattaaatgccaaaggtagggtgggcagtatttcagtctctgccccagccgacaggggnaggaggaccttcacaaataataagggcccnagaaagancggggccccacccgggttt

SEQ ID NO: 259149 - DNA, 369 bp, Homo Sapiens
ttctcaagagcaaaatcaccctctggccccttggcaggtaaggcctcccggtcagcattatcctgccagacctcggggaggatacctgggagacagaagcctctgcacctactgtgcagaactctccacttccccaaccctccccaggtgggcagggcggagggagcctcagcctccttagactgacccctcaggcccctaggctggggggttgtaaataacagcagtcaggttgtttaccagccctttgcacctccccaggcagagggagcctctgttctggtgggggccacctccctcagaggctctgctagccacactccgtggcccaccctttgttaccagttcttcctccttcctcttttcccc

SEQ ID NO: 259150 - DNA, 1031 bp, Homo Sapiens
gggaccggggtgaagggtcataaaaatggcgctggccgctcgattgctaccccagttcctgcactctcggtcgctgccctgcggggccgtccgactccggactcctgctgtggccgaggtgaggctgccgtcggccacactttgctacttctgccgctgtcgcctcggcttgggagcggcgttatttccacgaagcgctagggccttggcagcctcggcgctacctgcccagggctcccggtggccagtgctcagcagcccgggactccccgcagccttcgcttctttccctgcctgccctcagcgcagctacagcacggaggagaagccccagcagcaccagaaaaccaagatgatcgtcctgggattctccaaccccatcaactgggttaggactcgaattaaggccttccttatctgggcctatttcgacaaagagttcagcatcacagagttctccgagggagcgaagcaggcttttgctcatgtatccaagttgctgtcacagtgtaaatttgatctgttggaagaacttgtggccaaagaggtgctacatgcattgaaagaaaaagttacttcactacctgacaaccataaaaatgcccttgctgctaaacatagatgaaattgtatttaccatcaacaggagacatctccatttactatgatgaaaaaggaaggaaatttgttaacatcctgatgttgcttttggtatctaaacagtgccaacatccccagtggaaactttaagaaggagccagtggtattccaagtttaagttggggaaacagaaagtgggaaactaaacaacttcttagggcaagctatgagtttcagagggagttcacacaaggagtaaagcctgactggaccattgcacggattgaacactcaaaattattagaataattttcttggaaaaatcagcttatggactttagcagttgctgtgaaaaactaaggaagaaaaattttggggtcatttgatcttcacttaatctaagtctgtgaattacttttatattattttg

SEQ ID NO: 259151 - DNA, 673 bp, Homo Sapiens
acacagctagaaatgcaagccaaagagcatgatgagaggataaagcagctacaggtggaactttgtgaaatgaagcaaaaaccagaagagattggagaagaaagtagagcaaagcaacaaatacaaaggaaactgcaagctgcccttatttcccgaaaagaagcactaaaagaaaacaaaagtctccaagaggaattgtctttggccagaggtaccattgaacgtctcaccaagtctctggcagatgtggaaagccaagtttctgctcaaaataaagaaaaagatacggtcttaggaaggttagctcttcttcaagaagaaagagacaaactcattacagaaatggacaggtctttattggaaaatcagagtctcagcagctcctgtgaaagtctaaaactagctctagagggtcttactgaagacaaggaaaagttagtgaaggaaattgaatctttgaaatcttctaagattgcagaaagtactgagtggcaagagaaacacaaggagctacaaaaagagtatgaaattcttctgcagtcctatgagaatgttagtaatgaagcagaaaggattcagcatgtggtggaagctgtgaggcaagagaaacaagaactgtatggcaagttaagaagcacagaggcaaacaagaaggagacagaaaagcagttgc

SEQ ID NO: 259152 - DNA, 593 bp, Homo Sapiens
  misc_feature (110)..(197): n is a, c, g, or t
agtataacagttatttaaatagcatttacattgcattaggtattagtctagggataaagtatacaggcggatgtgcgttggttatatacaaatatgtcattttatgtaannnnnnnnnnnnnnnnnnnnnnnnnnnnnnnnnnnnnnnnnnnnnnnnnnnnnnnnnnnnnnnnnnnnnnnnnnnnnnnnnnnnnnnntacttatttacctttattgtcattgcaagcttcttatggaaactttataggaatgaaaatatacatgttaagaagattaaacattagatagtagatggtttgttgcatgctagaactgttagtattgttgaatcaattactttggtttcatgaaaaaataaacgataaatatctttaaagagaactagaagaattttttgtttgagtgattccaggctgtagtatgatcatttactgaagtagtttgattggctggctaacttagaattattgtttcttgttttgtactgcaataggggttataattgtaagataaaaatgtgtgtgtgtttaagggaagtaggtggtggttaaaattcttggaaaattttcagaatactttaaaaataaagttcc

SEQ ID NO: 259153 - DNA, 951 bp, Homo Sapiens
  misc_feature (482)..(482): n is a, c, g, or t
cttggcctcaccaaagtgctgggactacaggcatgagccactgagcccagccaggctttttctaattctatgctttattctataaattcctctgcttctaagcctcacagcttccaactgcctttgatttcagatccaaattcctctgattctataattcagcctccaaatgcttctgattctggaatctagacttttccctaaagattcctctggttctgaatcttataacctcaactccctaattccagaccccagcctcctaaatctattctgggcttcccaccccactgaacttacccaattccttctttcagtcttaagttttcccattctagacccctaccctctaggctgtgctgctcctggacttcatgcctctccattctcattgcctacaatctctgtgccccagaaccccctccacttcccaccccagccctccagacatgcacttaccttgactttaccccacatgtttnggggcacctggggctccctcaccccttgggtggtttgcaatctgaagacttctccagccacacaggcacatgcacaggcacggtgctgtctgcatattgccaggtggggagagaagccaggacccctcagctgtctgccaccatctatgtgcctcccttaccccccagctttctttctacagatggtgctactcttggtctcccacaggaaaaggcctccccccttcttagccccatttaccccgtttgtggaaggcactgctcgctctgttttgtcagagagtggcctatccagattggtgctatgggggggtctgacccctccctcctccctctggaggtgatgtgggccctcaatggagggaattgtgctgggctagggaaaggggagggactagactggccacactggctctgaaactcaccaatctctatacaccataaagacctcaccttggtaggcaccgaa

SEQ ID NO: 259154 - DNA, 692 bp, Homo Sapiens
  misc_feature (83)..(83): n is a, c, g, or t
  misc_feature (98)..(98): n is a, c, g, or t
tttttggtctgttaggggcaaatatttaatgcacttagtggaaacaaattcttaaggtttatactttggaagatgaataggtntaagtcagtcacaantctcagatttagatttgattgactaacagggacaaccttgcaaaagaagctggctgtgttcttgggtgatgggctggtcgtgatgcaggttaccagcccttaggcttttctttgtttccatgagggctgccacagaactggccctaaacacttctgtagcactctcaagctcagggaatgaattcagggtctgatgagtgccatcagaaatacatcttgcaggaagagatagtaattggaatagttgtgaatctagccagatactttgtatcatccttgtgcagtattaccacatgttagatcttcctgtcgttatttagaagtaacagctaaagcaatcattcctacacacttcattttgacagtgcaaaagctttaaaatatgtttccctgatggcaaaatatgcttgataaccagagagaactatcctttaaaaagcagtttttagtgcacaaacagctgtcttccatttttggcatacaaagggaacaactaaaatgactaatctcactaagtattacaataaaagtgctgacaaaaccttaactatatacttcacatctttagtagccctgtaattacagctccagttt

SEQ ID NO: 259155 - DNA, 558 bp, Homo Sapiens
taaacagctgagaaccaggataagccagctggctcgttaaacactatcctttggctttgcgaagagaacccatagttccatccttttttctcagagacgaaatgtcttctcaataggactacagtatggagaaagaaaggactttctggagaggacaatgtttgttattccgatgttcatctttgacttgagtgccaagcccaatttcaacagtgcaaaaaaagactctcaggaagcagcatgggggtcaaaggcttgtgtagtagctgtctacccactgggcaaggcctcgctccaccagggaccggtttatcaacaccacttcatctccaaccacactccacagctgaatcagaggaagaccagttggactgtaacttgtcacctgagcaagcagtgctgtattccccgtcatctcaaacaaaacggcatctgcttccggtgaaaactgggtcatcgtctgacaagggcatcacactgtccagaaggacttctgctccctgaaacggcagggtgacaaagtcagacctgatttgccggagcacgtctactttcacc

SEQ ID NO: 259156 - DNA, 480 bp, Homo Sapiens
gatctaactagaaggagtgagttagctttggaattattagccatctgaacagccaattttattttattttttggaaatgtaattcacatatcataaaatttaccaatttaaagtgtacaattcaatggtctttagtgtatcaacaatgttatgcaaccactaccactatctaaattccagaatgtttccatcacccctaaaagaaaccccatgccaattagcatgaacaatttttaaaataaacacggtatgggccagaaacacgccaagaaagacaccatgagccccactgagatggcaggggtgacactggggttcaggagctccaggggaagctcctgaatgctggcagtgtggccgtgccatccccaaaagaacctagggtttctttacatgccaagagaaagtgccaagtcttttagcctaagtcctacagggagtaactggaaaacgtactggagcaactggaaatttaatgta

SEQ ID NO: 259157 - DNA, 1057 bp, Homo Sapiens
  misc_feature (266)..(296): n is a, c, g, or t
  misc_feature (764)..(779): n is a, c, g, or t
  misc_feature (802)..(901): n is a, c, g, or t
  misc_feature (903)..(904): n is a, c, g, or t
  misc_feature (908)..(909): n is a, c, g, or t
  misc_feature (920)..(934): n is a, c, g, or t
gttcatttattcattctgtttctatatagcaaaactgaatgtcaaaagtaccttctgtccacacacacaaaatctgcatgtattggttggtggtcctgtcccctaaagatcaagctacacatcagttttacaatataaatacttgtactaccttaatgataaggactccttaaagttccatttgctaatgattaatacactgtttgggctggccagtttttcatgcatgcagcttgacgattgagcacagtcaggcctttgtattnnnnnnnnnnnnnnnnnnnnnnnnnnnnnnncctattcaaatgggttctagttcaatttgtttagtataaattgtcatagctggtttactgaaaacaaacacatttaaaattggtttacctcaggatgacgtgcagaaaaatgggtgaaggataaaccgttgagacgtggccccactggtaggatggtcctcttgtacttcgtgtgctccgacccatggtgacgatgacacaccctggtggcatgcccgtgtatgttggtttagcgttgtctgcattgttctagagtgaaacaggtgtcaggctgtcactgttcacacaaatttttaataagaaacatttaccaagggagcatctttggactctctgtttttaaaaccttctgaaccatgacttggagccggcagagtaggctgtggctgtggacttcagcacaaccatcaacattgctgttcaaagaaattacagtttacgtccattccaagttgtaaatgctagtcnnnnnnnnnnnnnnnnccaataaaaagaccattaacttnnnnnnnnnnnnnnnnnnnnnnnnnnnnnnnnnnnnnnnnnnnnnnnnnnnnnnnnnnnnnnnnnnnnnnnnnnnnnnnnnnnnnnnnnnnnnnnnnnnnannaaanntttttgggggnnnnnnnnnnnnnnntaaaaaatttttctaaaactttcctttgggcggccggggccccaaaagggaaaggaaaagggggcaaacgttgtttccataagaaaacccggggcaataaaaaggggtttgaaattccccacc

SEQ ID NO: 259158 - DNA, 387 bp, Homo Sapiens
  misc_feature (261)..(291): n is a, c, g, or t
  misc_feature (309)..(309): n is a, c, g, or t
  misc_feature (326)..(326): n is a, c, g, or t
ggattcattctgtttctatatagcaaaactgaatgtcaaaagtaccttctgtccacacacacaaaatctgcatgtattggttggtggtcctgtcccctaaagatcaagctacacatcagttttacaatataaatacttgtactaccttaatgataaggactccttaaagttccatttgctaatgattaatacactgtttgggctggccagttttttcatgcatgcagcttgacgattgagcacagtcaggcctttgtattnnnnnnnnnnnnnnnnnnnnnnnnnnnnnnncctattcaaatgggttcnagttcaatttgtttagnataaattgtcatagctgggtttacccgaaaacaaacacatttaaaattgggtttaccccca

SEQ ID NO: 259159 - DNA, 644 bp, Homo Sapiens
aaggtttattcgagtcaagatccaggcaagatctagatcttgcattttgttaatataatctatagatttaactttcctgtttttaatttttgaagaaactaagttgtttgtcctatagaattgtccttcagtggattttactgaatgtatcctaatgggatcatgtacaccttttctgtcccctatatgttctataaactgacagatctagagggcttctgttgttctgttttgcttttccacaaaaataattcataggtgatatatgctcccatgttgtatcacatcatggcacataatggctctcatcttgtaacattaagattgatagtgggtttggatgctgccagcccactccattcattacaaaagttctctatcagcttttcccctgatggatttagccatcattaatgatatttgcccacatctgggattccattagaggttgccaaccagtgatatcttgtcattccttctgcatctattagctggaatcctataaagaacttgtgctcattaattcacgaggcaggataaaatagaaatttcaaattctgattgaataggcgcccattttgaagtttctgtattgagagtcaggcctacagtaaaagtagcaatagaaagctgattgtttcaac

SEQ ID NO: 259160 - DNA, 1010 bp, Homo Sapiens
  misc_feature (835)..(835): n is a, c, g, or t
  misc_feature (864)..(872): n is a, c, g, or t
atgttgccaagccatttctaaagtgaccttatcaatttaattaccattggatgagggtgttgctttcatcgcaccattgtagattgtcttttttatttcaatttgcgtttatttataactggttgcaaaggtacacagaacacacgctccttcaacttatctttgataaacccaagcaaggatacaaaaagttggacgacattgagtagagtcatggtatacggtgctgaccctacagtatcagtggaaaagataaggaaaatgtcactactcacctatgttatgcaaaacagttaggtgtgctggggctggatactgctcttttacttgagcattggttgattaaagtttaggtaccatccaggctggtctagagaagtctttggagttaaccatgctctttttgttaaagaagagagtaatgtgtttatcctggctcatagtccgtcaccgaaaatagaaaatgccatccataggtaaaatgctgacctatagaaaaaaatgaactctacttttatagcctagtaaaaatgctctacctgagtagttaaaagcaattcatgaagcctgaagctaaagagcactctggtggttttggcataatagctgcatttccagacctgacctttggccccaaccacaagtgctccaagccccaccagctgaccaaagaaagcccaagttctccttctgtccttcccacaacctccctgctcccaaaactatgaaattaatttgaccatattaacacagctgactcctccagtttacttaaggtagaaagaatgagtttacaacagatgaaaataagtgctttgggcgaactgtattcccntttaacagatccaaactattttacatttnnnnnnnnngttaaactaaacttctttactgctgatatgtttcctgtattctagaaaaatttttacactttcacattatttttgtacactttccccatgttaagggatgatggcttttataaatgtgtattcattaaatgttacttt

SEQ ID NO: 259161 - DNA, 1008 bp, Homo Sapiens
  misc_feature (62)..(62): n is a, c, g, or t
gctggatcaaggccaacccatgtccctgatggccactcacgctgggggaccttcagcaaccntctgggaacacaaccaagcaatcatcaagcacctcctcgaaaactccacggccagcgtgagcgaggcagagagaaaggcgcaagtatactaccgtgcgtgcatgaacgagaccaggatcgaggagctcagggccaaacctctaatggagttgattgagaggctcgggggctggaacatcacaggtccctgggccaaggacaacttccaggacaccctgcaggtggtcaccgcccactaccgcacctcacccttcttctctgtctatgtcagtgccgattccaagaactccaacagcaacgtgatccaggtggaccagtctggcctgggcttgccctcgagagactattacctgaacaaaactgaaaacgagaaggtgctgaccggatatctgaactacatggtccagctggggaagctgctgggcggcggggacgaggaggccatccggccccagatgcagcagatcttggactttgagacggcactggccaacatcaccatcccacaggagaagcgccgtgatgaggagctcatctaccacaaagtgacggcagccgagctgcagaccttggcacccgccatcaactggttgccttttctcaacaccatcttctaccccgtggagatcaatgaatcccgagcctattgtggtctatgacaaggaataccttggagcagatctccactctcatcaacaccaccgacagatgcctgctcaacaactacatgatctggaacctggtgcggaaaacaagctccttccctgaccagcgctttcaggacgccggatgagaaagttcatggaaagtcatgtacgggaccaagaagacctgtcttcctcgctggaagttttgcgtgagtgacacagaaaacaacctgggctttgcgttgggccccatgtttgtcaaagcaaccttcgccgaggacagcaagagcatagccacc

SEQ ID NO: 259162 - DNA, 1274 bp, Homo Sapiens
  misc_feature (80)..(92): n is a, c, g, or t
ttaatttcctatgggctaaagaatccaaatattttaaaaatctgtctctcttttcttctctcataaagtgaattattccnnnnnnnnnnnnnatgtaagtgtatatattcttagtttttcttgaaatcattgtaatgttaactttgttgtttcaaatatcttggtgattgcttcattatctcttcaacaaaaaaaacctttaattttgccattgaaactgtagaactatgccatgcttttattagaagcagtgctctgtgttaacaacaagaatggtgtaattagaattgggatgtggatatttactgtatgacaacacatttacagttctgtaatgcaaggatgcagtttaaaaatgtgaagtagtgatggtttttgaaataagctttaaaatatagggatcttgaaggctccctggggtaactattttataacttagataaaatggctagtcatatctgtgtgtttgtaaagttatttttttaatattttaagattacaattttaacaaatgtagaaatgagccaaactatttaaattttaaaacagtaaaacaaaatgaaacttaatagctcacaaaattccagtccatgtttcatgacttattttagtcaatgaattttctatttatactaaacatatggacattttaaatgtgtttctaatatttttgattatctataatgtgcctgtcttcaattcacaagattgggttataacaattatttgccagattaacactagggaattatttgataaccagcttatcttatcagtagttttattgctgatcaggcaaaaatagttttccaaagttatttttaataaagtatatacaaaattcttatatattactagtcatgataaagtaaattaagcagtttttaaaacttagtgtgagtttgttcatcacaggtctgatatgagtttaagggatttcgcactccctgaatcagagaagtaagaccccttccttagattcctgttatacattttttaaaatgtagagtttgttttggagacattttcagtgcattgttattgccatatttatataatatgactattctaaaggctgtgaggccatggggtattggttaagttgcttgcttttgctttgtccattttcatcattttaaaatgggggataataacagaacttgtttcctagggccattgtaagtcacttgaataaaaaatagttttgaagcatgagagtcatacagagcggtccacctaaaaggcactcctgataataataaatgattttaaac

SEQ ID NO: 259163 - DNA, 1031 bp, Homo Sapiens
  misc_feature (257)..(271): n is a, c, g, or t
  misc_feature (291)..(303): n is a, c, g, or t
tggtgcaacactttcattaataatcctaagtcagcatcctaacttgatcttttaaactccacgataccacaataaggtaggcaacatcaaggcatagtagagagcgcacgcctcctaagaacacccttgagtaaacattgacactgggacagctgccccccatactgccgatgagacggagagaacatcattcagtgcaaagggaaaagctcatacgttatcagcccaaaaaatggttttgcaagagagaaaaaaannnnnnnnnnnnnnngttggggaggaatagaaggnnnnnnnnnnnnngaatccaaaggctaaacatgatgaatagacacaagcgagctcattctctacggtttagcatgtatggcgctatttgggagtgtaaatagagtagataccttttcacattataatattggcctgcatgattcaagtattcaaactgatatgttttggggaaaacaaagtggaaaatgtgcagagaatagctgttcccacaggcggcccctggctgcaggcggcgagccccacttagtgctcctttccctcgcgtctgaggtcccggtcggtgagtctgcatctacactgttacatggactctccacccccacccaggtggtcaacagaaagaaaagcgttaatgggagatgggctgttaattcctcgggggtcgctgctgcttgggggaccccacaggcgtgtggaataatgcggggtcccccagagtgaagtgccgtgaaggtctccacagttagttcccgacagcccagcaccattccagtgattgagatcggtccggctggagaatgagtgggaacagtcgagggagcccagccggctctggctggacccgagagactgccagccgggagaaggggtcagagactggctttgtgcaaagaaacgactgatctcctcttcactggcaaactcagcaagaatagtagtgttccccagtacacacatgtgcagagacttttgtgccttcactacctcttcttttgaactgtagcggaccagagcatttc

SEQ ID NO: 259164 - DNA, 2434 bp, Homo Sapiens
  misc_feature (1684)..(1686): n is a, c, g, or t
acactcctcagttactcctgacatccaaccaggtgccgtggacagaagggccatcttctgcccagcggtctggcagcctggagacctttcccctggcctagtcctcgctgcccgtcaggtatcagtttggacgccgcattccaatccaggaagccttcctctcccgggcaagatgagaccacctagttgcaggaaaacaagctaagggctcccactgattatacattatgccctttccagtctgtggaaaaaagtgtcttccatgaaaccggtccctggtgtcaaaaaggttggagaccgctgctctacggtttgattggagccgcggggaccctcgcgccgtcgccgccgccgcctggatccccgcaccatgccgtcggagaagaccttcaagcagcgccgcaccttcgaacaaagagtagaagatgtccgacttattcgagagcagcatccaaccaaaatcccggtgataatagaacgatacaagggtgagaagcagcttcctgttctggataaaacaaagttccttgtacctgaccatgtcaacatgagtgagctcatcaagataattagaaggcgcttacagctcaatgctaatcaggccttcttcctgttggtgaacggacacagcatggtcagcgtctccacaccaatctcagaggtgtatgagagtgagaaagatgaagatggattcctgtacatggtctatgcctcccaggagacgttcgggatgaaattgtcagtgtaaaaccagaaaaaatgcatctcttctagaattgtttaaacccttaccaaggaaaaaaaagggatgttaccaactgagatcgatcagttcatccaatcacagatcatcaaacagtagtgttcccacctaggagtgttaggaagttgtgtttgtgtttcaagcagaaaaactgagctccaagtgagcacattcagctttggaaactatattatttaatgtaggctagcttgttttcaaattttaaaagtttaaaaataaaatactttgcattctaagttgccaataaaatagaccttcaagttattttaatgctcttttctcactaataggaacttgtaattccagcagtaatttaaaggctttcagagagaccctgagtcttctcttcaggttcacagaacccgccgcctttttgggtagaagttttctactcagctagagagatctccctaagaggatctttaggcctgagttgtgaagcgcaacccccgcaaaacgcatttgccatcacagttggcacaaacgcagggtaaacgggctgtgtgagaaaacggccctgactgtaaactgctgaaggtccctgactcctaagagaaccacacccaaagtcctcactcttgcaggggtagacatttctggtttggtttgttctctagatagttacacacataaagacaccactcaaaaggaaacttgaataatttataattttgatcgagtttcttaaaagaccctggagaaagagtggcatttcttctgtttcaggttttgtctgagttcaaactagtgcctgtgttgttacggaaagcagcagtgtaccagtgtcactctggagtacagcgggagaaacacaaaatagtataactgaaaacattaacattcagacacactcccttctgccttccggcttaaagctgtggatgatccacgtttgttttnnnttaatgttaaatgtgtaactcagtattactgaaaaggtacccacattttgaatagtagttatcactcttaggtcagacagccatcagaattctcccacaccaagtgcatgtcagttgtggagaaaacatagcaaaaagagccgtacgctctttacagatactaatgtcaagagttaaacctcctcaggttcaacctgtgataaaagactagtgcttcccagtacttgcatggggttcactatttatagttttcttgggagtatcacaggaaaatcacaattacaccactttagaccctatgtgtagcaggtcacaacttacccttgtgtgtttagatgtgtatgaaatacctgtatacgttagtgaaagctgtttactgtaacggggaaaaccagattctttgcatctgggccctctactgattgttaaaggagttcctgtcacctgctccccccaccccccgcatgcgtctgtccacttggctaacttttaatatgtgtatttttacattatgtatattcttaactggactgtctcgtttagactgtatacatcatatctgacattattgtaactaccgtgtgatcagtaagattcctgtaagaaatactgctttttaagaaaaaaaataacatgctgaggggtgacctatatcccatgtgagtggtcactttatttataggatctttaaaacatttttaatgaactaagttgaataaaggcacaattaaaaactgtcatcaaagcc

SEQ ID NO: 259165 - DNA, 566 bp, Homo Sapiens
  misc_feature (12)..(12): n is a, c, g, or t
cccctacctganccacacggtagttaacaataatgtccagatatggatgtaataccagtcctaaacgagacagtccccagttaagaatatacataatgtaaaaatacacatattaaaagttaagcccaagtggacagacgcatgcgggggtggggggagcaggtgacaggaactccctttaacaatcagtagagggccccagatgcaaagaatctggttttccccgttacagtaaacagctttcactaacgtatacaggtatttcatacacatctaaacacacaagggtaagttgtgacctgctacacatagggtctaaagtggtgtaattgtgattttcctgtgatactcccaagaaaactataaatagtgaaccccatgcaagtactgggaagcactagtcttttatcacaggttgaacctgaggaggtttaactcttgacattagtatctgtaaagagcgtacggctctttttgctatgttttctccacaactgacatgcacttggtgtgggagaattctgatggctgtctgacctaagagtgataactactattcaaaatgt

SEQ ID NO: 259166 - DNA, 912 bp, Homo Sapiens
  misc_feature (38)..(38): n is a, c, g, or t
gtaatatttgtacccatgggctaagggggaattaattnctagtgtgtgggtaagaattttatacctataaaaaccattgctggtaggtttgccattaaaaacattataaaccataattttgctaaaaatgggtttcttttcagagggtacttttcgtttcactagcccagtttttaaaaatcgtaactagcaaattttatctcctatacatagatatatgaaaatccctaggggactgtaagaatagctggactgaataaaattttcatttaaagtccaagggtggggagttgacaacttttaggagatacaacaggcttatagttctctgtcaaactcttagttgttaatagctttagtactgtcattcatgagacacaactcctaagagaaaacaaagaaaaggccaatcacgtaagatcttgttaactcaagactgtgacataatgaccccaaataaaaacaatttttaattaactcacagtagaaaacaccaataaaacaactctctaatttccactagtttactgcagcccaatgaagttgattacatacatcagtcattcaattggagtaatttttcctacaaatttgttccagagatcatgccataagcctggttaagtaaaagaatgatgaaaatgccaaagttctatcaagtaagcaaatattctctttcgtgtggcagacagaactctggaagaaacagaatgcatgtcatgtaatacttacatttaaggctcaggtgactgtcagaaagtatttcttttacccagcaaagaactgtgagctgaaacacaaatggcagttcatctgaaagaactaaaaccatccactggctgcacattgaaaaagcaataaataatgacacagaaaacaaaagaaattgcataattctttcctcgaaaatgc

SEQ ID NO: 259167 - DNA, 707 bp, Homo Sapiens
tgcaagacagtgacatctttcacaaatgcaacgtctccagcattctcagccaggcaccggaaagccccagtgtagccgtagtatctctcattgctgttgggcacgcacttattctcaccctgctcgtcgccaatacacagagcacagagattagatctcgggtcagacccaggggcacagctttgactgaaatattcatcaaatttgcaggagcccgtctggttgaagagcaggcccatggggatattccagcctgcagtcctgtccacggcggtgtggcaggacttcttgcctttcacagagttccaggtaaggctagtgtctgatctcctaaccaccgccacagcaagatatccttccacaggtctatccacacagttaggatcagggtcactgctttgttgggatttgtagttctctgccaggacaggcaccaaaccacatttgcctgcagtgtacacataccctccatccaaactcatggcatcagcttctcctttcagcaccagggcaatgcagtcctctgtggtggaggccgaggagcaggtcacgctgccttcgctcaagccactccactggttacacttgcgcagctcctgctcgcccaccgcacaccacacaacccgcgcacgccgggcagccacttcctcctcacttttcctcaagttctggatggcagtgaagtagccggagccaaggtacagccc

SEQ ID NO: 259168 - DNA, 1327 bp, Homo Sapiens
  misc_feature (603)..(603): n is a, c, g, or t
  misc_feature (605)..(605): n is a, c, g, or t
  misc_feature (1271)..(1271): n is a, c, g, or t
  misc_feature (1273)..(1273): n is a, c, g, or t
ctcgatgacgcgcttccggcacgggatgttttcggttgtttgaccgagagagttgtaggcgcaaagctgaggaaaggagagtgtggagaggggcctggtgtggtggggcccggtgtttgggaccggagggtgttgacggctgatgagttccttgggtttgctctttcttcacctgaaaagaagactccaggaagggcagcacatgccggagaaagatgaattccagcttgaccgcccagaggcgcggcagtgacgccgagttgggaccctgggtgatggctgcgaggtccaaggacgcggcgccgtcccaacgcgacggacttttgcccgtgaaagtggaggaagactcacccggaagttgggagcccaactatcccgcggcttcgccggaccccgaaacttctcgactgcactttaggcagctgcgttaccaggaggtggctggaccggaagaggcgctgagccggctccgagaactctgtcgtcggtggctgagacccgagctgctctccaaggagcagatcctggagctgctggtgctggagcagttcctcaccatcctgcccgaggagcttcaagcctgggtgcgagagcactgcccananagcggggaggaggcggtggccctggtgcgggctctgcagcgagcgctcgatggaacctcatcccaggggatggtgactttccaggacacggctgtgtctctaacctgggaggagtgggagcgcctggacccagaacggagggacttctgcagagaaagtgcgcaaaagggattccggggagcacagtttcccccgagtttggaaagcagagtggagaacaaagagttgattccaatgcaacaaattttagaagaagcggagccacaggggcaactacaagaagcgttccaggggaagcgccccctgttttctaagtgtggcagtacccatgaggacagggtggaaaagcagtccggagaccccttgcccctgaaacttgaaaattctcctgaagcagaaggactcaacagcatctcagatgtcaataagaatggttccatagaaggggaagactctaaaaataatgaattgcagaacagtgccaggtgttccaaccttgttctatgtcagcacatcccgaaagcagagaggcccactgacagtgaggaacacgggaacaagtgcaagcaaagtttccacatggtgacgtggcacgtgctgaaacctcacaagtctgacagtggagacagtttccatcattccaacctttttgagacccaaagcagntncatgaagaaagaccttttaaatgtggtaactgtgggaagagtttaaacaacgct

SEQ ID NO: 259169 - DNA, 1268 bp, Homo Sapiens
catttccttaaggaagggtttttttctctctccctcccccacaccgtagcggcgcgcgagcgggccgggcgggcggccgagttttccaagagataacttcaccaagatgtccagtgataggcaaaggtccgatgatgagagccccagcaccagcagtggcagttcagatgcggaccagcgagacccagccgctccagagcctgaagaacaagaggaaagaaaaccttctgccacccagcagaagaaaaacaccaaactctctagcaaaaccactgctaagttatccactagtgctaaaagaattcagaaggagctagctgaaataacccttgatcctcctcctaattgcagtgctgggcctaaaggagataacatttatgaatggagatcaactatacttggtccaccgggttctgtatatgaaggtggtgtgttttttctggatatcacattttcatcagattatccatttaagccaccaaaggttactttccgcaccagaatctatcactgcaacatcaacagtcagggagtcatctgtctggacatccttaaagacaactggagtcccgctttgactatttcaaaggttttgctgtctatttgttcccttttgacagactgcaaccctgcggatcctctggttggaagcatagccactcagtatttgaccaacagagcagaacacgacaggatagccagacagtggaccaagagatacgcaacataattcacataatttgtatgcagtgtgaaggagcagaaggcatcttctcactgtgctgcaaatctttatagcctttacaatacggacttctgtgtatatgttatactgattctactctgcttttatcctttggagcctgggagactccccaaaaaggtaaatgctatcaagagtagaactttgtagctgtagattagttatgtttaaaacgcctacttgcaagtcttgcttctttgggatatcaaaatgtattttgtgatgtactaaggatactggtcctgaagtctaccaaatattatagtgcattttagcctaattcattatctgtatgaagttataaaagtagctgtagatggctaggaattatgtcatttgtattaaacccagatctatttctgagtatgtggttcatgctgttgtgaaaaatgttttaccttttacctttgtcagtttgtaatgagaggatttccttttaccctttgtagctcagagagcacctgatgtatcatctcaaacacaataaacatgctcctgaaggcat

SEQ ID NO: 259170 - DNA, 745 bp, Homo Sapiens
  misc_feature (67)..(67): n is a, c, g, or t
  misc_feature (73)..(188): n is a, c, g, or t
  misc_feature (567)..(582): n is a, c, g, or t
cagggtaatacagataccccttgagacccccctgcctttcaaatccctggggtaaaatattcaatantgaaannnnnnnnnnnnnnnnnnnnnnnnnnnnnnnnnnnnnnnnnnnnnnnnnnnnnnnnnnnnnnnnnnnnnnnnnnnnnnnnnnnnnnnnnnnnnnnnnnnnnnnnnnnnnnnnnnnntgtgacggttaatactgagtgtcaacttaattgaattgaaagatgcaaagtattgatcctgggtgtgtctgtgagggtgttgccaaaaaacattaacatttgagtcagtgggctgcggaaggcagacccacccttaatctggtgggcaccatctaatcagctgccagcgaatataaagcaggcaggaaaacgtgaaaaggagagatgggcctagcctcccagcccacatctttctcccgtgctagattgcttcctagccctgaacatcagactccaagttcttcagtctggggactcagactggctctccttactcctcagcctgcagatgacctattgtggaccttgtgatcatgtgagttaacatttaataaactcnnnnnnnnnnnnnnnntccattagttctgcccctctagagaatgctaatacagatggcaaggtcaatttcaagaatttggacttgaatttagtgactttgaagattccagaaggtgagtgagggagagttacaatgaagtcaggcatttcactaattgtttcattgattgattgattga

SEQ ID NO: 259171 - DNA, 986 bp, Homo Sapiens
  misc_feature (92)..(124): n is a, c, g, or t
gcacagaccattcggaagacacggtccctgccctctaggagctgacaggctaaagcaacaggatggacagacatatacatttccccttctcnnnnnnnnnnnnnnnnnnnnnnnnnnnnnnnnngtttcgttctgatgtatatggactgcccagaatagggggggtggtggtttgttcgtggtgtctgggggaggaaggaatccttaccctggcttccttaatcggggaaggcttcctgaaggaggtgggctcagaggtgagttgtgaatgaagcgggtagggagtgggctgggtggatggtttggggatgtttgggggaggtgagtaaaggggtagagggagaacgctctttgggattgtgttgggaaaagaagaaccaaagtggactgtacttgcatttcagtgaatgatttgagttgtgcgactaaaggctttttggaagagggttgtccagttaggaaaggtggatgggagttggggagggggttttctgttctccctttgagctgatttccttcctctcccacgtcctcaattaactcctgcaggtctcgaagtgctgcagctaaaactcatacaactgccttggctgggcgaagtccttcccctgcttcagggcgacgcggggagggagatgcgcctttcagtgaaccaggtactaccagcacacaacggcctagtagcccggagactgctacgaaacagcctagcagcccttatgaagacaaagataaagacaagaaggagaaatctgcaactcgacctagcccctctccggaaaggagcagcacaggcccagaaccacctgctcccactccgctccttgctgagcgacatggcggctccccacaaccccttgcaaccacccccttaagccaggagccagtgaaccccccatctgaggcctctccaactcgggaccgttcaccacctaagtctcccgagaaacttccccagtcttcttcctcagagagcagcccaccat

SEQ ID NO: 259172 - DNA, 759 bp, Homo Sapiens
cccagggctggggacccctgctttaactgatgcattgatttgataaagtattttacaagcctgataatgttataaccctgtttattcaggtcagatttatgccaactttgctgagaatatggagggtatagatgagtgaacatcaacaaacataacttctaccatggttaagaattttacttaggaaaagtattgaagttcaaatccagatagtattacatttgaaattgttataagggttattaatttaataaaattcatcatcaggtttcccctataagctttctcctaggttaattttccacaagcattgttttatatacactgtaatcaggataacacaagcttagtgttagatcttgtaggaaaccaagattagaaacattagaaatttgcagaatttaagaaattatgttttgtggtaatctatggccaacgatgttagaacctagcgcaattgtaaagtgaaattcaaggagaaggaatgaggagttagggaagcagcatacttgaatattagagaaggagaggagctgtgggtcaggaatcagagagacctgctaaaaccagacagatataaacaccaaagacggaagccaaataggtagccaaaaatccagatatttgagaagcaggaaatttatagcaaccaaagaaatagggcaagagaggcaggtgaacacacatgatacctcaattgacaatcttcctcccaccaagccagacacgttgtaaatgctgcttcctattggagcccag

SEQ ID NO: 259173 - DNA, 896 bp, Homo Sapiens
cagttccacctaagtcatcttctccagggtcagctttaaaaatgtacaccttgatgacctcagggcaagtgccatccactttacaaggatcaatttccgactctgtgtccatggtcattccagaagaaccatcgtgttctattttgccagcatcatccaaggaaatcataaggtagtcctcacagttgcctttgtcatcatcctgctggtccacagggatcccattggcatctatgactgcttcagaggcacagtctgctaccaatacttcttctgaaactacgtcggtagtcagaggatcagtgacaatttctgcttccactacactatcatgaaccacatgttcaacatgtccaacatgtccaacatgtccaacgtcagacacatgtatagaatcacccgtcaagacgtgttctggcatagacattgaggctgaagtaatgtcagaagctaaaacatcatctgggactgtgcaatgtgctaaagaaacttcttcagttacatctgagtccagcacttgctcaggaatgatgaccgtttcagacacatctgcttcttccatgatatctgggcactgaacatcttctataacaacgtcctcaataacatcttggattacaactgaatctgggtcatcaggaacaaagttatgcacagttatgtctgaatccacaacatctgaaacaaaaacagtttcttgtacttccacaacaatttgatcaccatccatgtgtgtaccatcagctgttgcatcaaaaaatgagtttggctcttgttgtaattcaagcccatcttcatccatggcctttaattctcatcagtcacagctccggacggacgtgcgggcggccggagacggtggcgggtgctgcaggccggcctttctctggagcact

SEQ ID NO: 259174 - DNA, 775 bp, Homo Sapiens
gtgcagacagctgcgaggactgtcatgatggcaccagatgcaccaagtgatggtccatatcttcctgtggcaactttacccaggtaactgacaaaattggaaataacacttgaggctggattcgatgtgaaatatctgatcattgtccgctgcagagaaggtactctccataaacagaatacaaggacatttgcagctataatacctgtcacagtccgctggccatcacttaggttattccaccacttgttaatctcctttctgaagtctccttctttttgtggtcttatgctatccaaccaatcagcttttataccatcaaaataactctggaccctggatttcagtgattcatattgccaaatagcagctgatccaaatgcacagcctgtaaacccaacagtaaaaaataaaggttttatgagactccttataggatagggagaaggataaaagactgtttcttccacaggaggaatcaaagcacttctcttgtatgcttcaccacttgtccctgggtctgatcttcgaggttcaaccttcctgggtgcttttctgaatccgcatttttgttgaataaagaagttaaacctgcgtccgaggagctgcggcggggttaggaccgcagtgagctcctcgcagctgcggccgcccaccgacgcaccccacgcctggccgcagccccagcctctctgcgcccagcctcgccacgccatcttcccaacctctgccccaccatggcccgaccttaccaaccccagctgcgcaactactt

SEQ ID NO: 259175 - DNA, 1190 bp, Homo Sapiens
acccaggaaggttgaacctcgaagatcagacccagggacaagtggtgaagcatacaagagaagtgctttgattcctcctgtggaagaaacagtcttttatccttctccctatcctataaggagtctcataaaacctttattttttactgttgggtttacaggctgtgcatttgggatcagctgctatttgggcaatatgaatcactgaaatccagggtccagagttattttgatggtataaaagctgattggttggatagcataagaccacaaaaagaaggagacttcagaaaggagattaacaagtggtggaataacctaagtgatggccagcggactgtgacaggtattatagcctgcaaatgtccttgtattctgtttatggagagtaccttctctgcagcggacaatgatcagatatttcacatcgaatccagcctcaaaggtcctttgttctccaatgttgctgtcaacattcagtcatttctccttatttcacatggcagcaaatatgtatgttttgtggagcttctcttccagcatagtgaacattctgggtcaagagcagttcatggcagtgtacctatctgcaggtgttatttccaattttgtcagttacctgggtaaagttgccacaggaagatatggaccatcacttggtgcatctggtgccatcatgacagtcctcgcagctgtctgcactaagatcccagaagggaggcttgccattattttccttccgatgttcacgttcacagcagggaatgccctgaaagccattatcgccatggatacagcaggaatgatcctgggatggaaattttttgatcatgcggcacatcttgggggagctctttttggaatatggtatgttacttacggtcatgaactgatttggaagaacagggagccgctagtgaaaatctggcatgaaataaggactaatggccccaaaaaaggaggtggctctaagtaaaactgggattggacagtagtggtgcatctggtccttgccgcctgagagccccaggagacatcggctagagtgaccatggctatgctcccgtctggaagatgccagcatctggcctcccactgttttcagctgtgtcccccagtccgtgtctttttagaatgtgaatgatgataaagttgtgaaataaaggtttctatctagtttgtaagcaaaa

SEQ ID NO: 259176 - DNA, 636 bp, Homo Sapiens
cctcatcatatcacacaaagagatgcagatagatctttgaccatacctgatgaacagttacactcatttgcggtttccaccgtgcacattacgaagaacagaaatggaggtgggagtttaaataactattcctcctccattccatcgactcccagcaccagccaggaggaccctcagttcagtgttcctcccactgccaacacacccacccccgtttgcaagcggtccatgcgctggtccaacctgtttacatctgagaaagggagtcacccagacaaagagaggaaagccccggagaatcatgctgacaccatcgggagcggcagagccatccccattaaacagggcatgctcttaaagcgaagtgggaaatggctgaagacatggaaaaagaaatacgtcaccctgtgttccaatggcgtgctcacctattattcaagcttaggtgattatatgaagaatattcataaaaaagagattgaccttcggacatctaccatcaaagtcccaggaaagtggccatccctagccacatcggcctgtgcacccatctccagctctaaaagcaatggcctatccaaggacatggacaccgggctgggtgactccatatgcttcagccccagtatctccagc

SEQ ID NO: 259177 - DNA, 655 bp, Homo Sapiens
gtcaaagatatatcagacattagtcaaatcgatgaaaaccaattttattcagtaactactgaccgtagaggaaggggctggttctgttcgcatttgtgcagaggtgatggcattctaatgggagagagaggcaggggagagggcagggggcagggcacaagtgaaacattacaaaagattggtcattttaaatgtctgcctcatcaggacagctgtgtctgccagctggcaatattagaagttaggattctaacctcccacagagactggaagacagaggctcagtccttcctgagaactacacctcaaaagtattgcctttcagatcctgggggcaaagatacattgaagtccctaggagatacacacatatatcaaagggatggaggaaggattcccttcttagtaagtgctataagaaagaaagatcctgaaactgccatcatcaagtattggctagactaaagtaagttcccctggcagccttgagctttcttaggtaggcattgtcatgggagcctagggtcattcgtgagacatggtctcatgctactagaagccatgatagactctgatcatctcttagcacagaggtttaaactcagtcgttttgtgctgagtttggtggttctcactttctctctccccattccat

SEQ ID NO: 259178 - DNA, 1152 bp, Homo Sapiens
gaattgccaattccttgtttgtgcaaaatggatttcatgtcaatgaggagtttttgcaaatgatgaaaaaatattttaatgcagcagtaaatcatgtggacttcagtcaaaatgtagccgtggccaactacatcaataagtgggtggagaataacacaaacaatctggtgaaagatttggtatccccaagggattttgatgctgccacttatctggccctcattaatgctgtctatttcaaggggaactggaagtcgcagtttaggcctgaaaatactagaaccttttctttcactaaagatgatgaaagtgaagtccaaattccaatgatgtatcagcaaggagaattttattatggggaatttagtgatggctccaatgaagctggtggtatctaccaagtcctagaaataccatatgaaggagatgaaataagcatgatgctggtgctgtccagacaggaagttcctcttgctactctggagccattagtcaaagcacagctggttgaagaatgggcaaactctgtgaagaagcaaaaagtagaagtatacctgcccaggttcacagtggaacaggaaattgatttaaaagatgttttgaaggctcttggaataactgaaaattttcatcaaagatgcaaatttgacaggcctctctgataataaggagatttttctttccaaagcaattcacaagtccttcctagaggttaatgaagaaggctcagaagctgctgctgtctcaggaatgattgcaattagtaggatggctgtgctgtatcctcaagttattgtcgaccatccatttttctttcttatcagaaacaggagaactggtacaattctattcatgggacgagtcatgcatcctgaaacaatgaacacaagtggacatgatttcgaagaactttaagttactttatttgaataacaaggaaaacagtaactaagcacattatgtttgcaactggtatatatttaggatttgtgttttacagtatatcttaagataatatttaaaatagttccagataaaaacaatatatgtaaattataagtaacttgtcaaggaatgttatcagtattaagctaatggtcctgttatgtcattgtgtttgtgtgctgttgtttaaaataaaagtacctattg

SEQ ID NO: 259179 - DNA, 760 bp, Homo Sapiens
ggtggacagcatgattcaaagactacaacaggagcaagacctgagacgttctggtgaagcaggtatcagtaataccagccgtttaagtagaggctccataagttctacctcagaggttcattcaccaccaaacgtaggactaagacgtagtggacaaattgaaggtgtacggcaaatgcacagcaacgcaccaagaagtgaaatagccacagagcgggatctggtagcttggagtcgaagggtggtagtacccgagctatcagctggtgtagccagtaggcaagaagaatggagaactgcaaagggagaagaagaaataaagacttacaggtcagaagagaaaagaaaacacttaactgttccaaaagagaaaaaaatacccactgtctcaaagaatcatgctcatgagcatttcctggatcttggagaatccaaaaagcaacagacaaatcaacacaattatcgtacaagatctgcattggaagagactcctagaccctcagaagagatagaaaatggcagtagttcttcagatgaaggcgaagtagttgctgtcagtggtggaacatccgaagaagaagagagagcatggcacagtgatggcagttctagtgactactccagtgattactctgactggacagcagatgcaggaattaatctgcagccaccaaagaaagttcctaagaataaaaccaagaaagcagaaagcagttcagatgaagaagaagaatctgaaaaacagaagcaaaaacagatt

SEQ ID NO: 259180 - DNA, 1173 bp, Homo Sapiens
  misc_feature (907)..(907): n is a, c, g, or t
gaattcccacctgaggagttcaaggaactgatggacctgccgacgtgtggagccaggaacttaaaacaacatttagccaaagccacagcttcagggattatggggagcccaaaaccagccatcaagtccatctcggcctcagcactcttgaagcaacagaagcagcggatgttggagatgaggagaaggaaatcagaagaaatacagaagcgatttctgcagagctcaagtgaagttgagagcccagctgtgccatcttcatcaagacagccccctgctcagcctccacggacaggatccgagttccccaggctggagggagccccggccacaatgacgcccaagctggggcgaggtgtcttggaaggagatgatgttctcttttatgatgagtcaccaccaccaagaccaaaactgagtgctttagcagaagccaaaaagttagctgctatcaccaaattaagggcaaaaggccaggttcttacaaaaacaaacccaaacagcattaagaagaaacaaaaggaccctcaggacatcctggaggtgaaggaacgtgtagaaaaaaacaccatgttttcttctcaagctgaggatgaattggagcctgccaggaaaaaaaggagagaacaacttgcctatctggaatctgaggaatttcagaaaatcctaaaagcaaaatcaaaacacacaggcatcctgaaagaggccgaggctgagatgcaggagcgctactttgagccactggtgaaaaaagaacaaatggaagaaaagatgagaaacatcagagaagtgaagtgccgtgtcgtgacatgcaagacggtgggtgaaggtgggggctgcagcaacccatgggccctgtgtggtgcttttgtgactcggcagcatgtggagaacctgtgggatctgnggccctatctcgtgatgtgtcagttaattaggctggaaagcaaagggcgcaggtggcccaggacccggctttcctgcctgacctggctgctgtgctctgctgatggagtgtttgtccaggggattcttctctcatttgaccacaggcccccagtttggatggggtcctaacatctcttgccctgggaccactggggtccgcggtggcgtctgaactgcttctttcctcagggtttgggcgctatccctcgcctcaacggtttctca

SEQ ID NO: 259181 - DNA, 799 bp, Homo Sapiens
ccccatcttaaaaaggatggcagtatatttattatatcggtcttcccggcttcacagtctgatccccccagggaaagcagctggaaaacaagagcatgtgaaggaagcgcagcagctcctcgccagccagacagccagccccgcaccgcaggagtcgacatgcacggcagcctagacgccatcagttaaacttatatgattcatagtccagcgtttgagtgagcactccagtcagaacgaactctgcattgtgaacatctatgcctctggcaaaatattctcggcataaatgaaggtcattttcacaggatattaaaattatttccgacaaactcgagttctgcttgtgctccatgagcttccggaaagatggctgcttggataacacctttcctcctgcacactctacgattgccttcatagtggaaagacttgggcagattccaggtgtgatgtaaaaatattttgccttaaagagtggagaaacgtgtgcccgttttaaggattcttccaagctgaaagagaaaagtacttctgcctcagcatctcggagaatgtagttctgctcatcaatgaacttctgacacctgaagcattcttccagccactctggcgtcactatgtgcttcacgacagaaatcgccgtcaggaacttcacggtgcgagtcactttgctggcaatgaggtgtgtgcacttctgtgcagactccgcaacctctccaccaagaatgtagagcttcttaatatactgttgaacctggacaggctcgaatccagtgaaaagcacaaaaggggtccc

SEQ ID NO: 259182 - DNA, 487 bp, Homo Sapiens
  misc_feature (30)..(30): n is a, c, g, or t
  misc_feature (36)..(36): n is a, c, g, or t
  misc_feature (43)..(43): n is a, c, g, or t
  misc_feature (54)..(54): n is a, c, g, or t
  misc_feature (59)..(59): n is a, c, g, or t
  misc_feature (98)..(98): n is a, c, g, or t
cggatatgaatccatagcccaccgtttgantgagcnccccagncggaacgaacnctgcnatgtgaaccacctgaacggggtggaaacagacactttangttagagatcccactgcctgtccgtgcacacatactcacacaggtaagcggggaaacgtaccctaacctctggcaaaatattctcggcataaatgaaggtcattttcacaggatattaaaactatttccgacaaactctaaggaaaagaaaatgagtttctcagtgaccgaacgctgaatgtgatacagggcaatgacggactcgctggcggactccactctacccaccgagttctgcttgtgctccatgagcttccggaaagatggctgcttggataacacctttcctcctgcacactctacgattgccttcatagtggaaagacttgggcagattccaaggtgtgatgtaaaaatattttgcctaaaattaaatgaaaatatatgta

SEQ ID NO: 259183 - DNA, 1919 bp, Homo Sapiens
  misc_feature (24)..(24): n is a, c, g, or t
  misc_feature (1481)..(1481): n is a, c, g, or t
  misc_feature (1662)..(1662): n is a, c, g, or t
  misc_feature (1717)..(1717): n is a, c, g, or t
  misc_feature (1761)..(1761): n is a, c, g, or t
accagcatctcccagttcataatncaacccttcagatttgccttattggcagctctactctggaggtttgtttagaagaagtgtgtcacccttaggccagcaccatctctttacctcctaattccacaccctcactgctgtagacatttgctatgagctggggatgtctctcatgaccaaatgcttttcctcaaagggagagagtgctattgtagagccagaggtctggccctatgcttccggcctcctgtccctcatccatagcacctccacatacctggccctgagccttggtgtgctgtatccatccatggggctgattgtatttaccttctacctcttggctgccttgtgaaggaattattcccatgagttggctgggaataagtgccaggatggaatgatgggtcagttgtatcagcacgtgtggcctgttcttctatgggttggacaacctcattttaactcagtctttaatctgagaggccacagtgcaattttattttatttttctcatgatgaggttttcttaacttaaaagaacatgtatataaacatgcttgcattatatttgtaaatttatgtgatggcaaagaaggagagcataggaaaccacacagacttgggcagggtacagacactcccacttggcatcattcacagcaagtcactggccagtggctggatctgtgaggggctctctcatgatagaaggctatggggatagatgtgtggacacattggacctttcctgaggaagagggactgttcttttgtccccagaaaagcagtggctccattggtgttgacatacatcccaacattaaaagccacccccaaatgcccaagaaaaaaagaaagacttatcaacatttgttccatgagcagaaaactggagctctggcctcagtgttacagctaaataatctttaattaaggcaagtcactttcttcttcttaaagctgttttctagtttgagaaatgatgggattttagcagccagtcttgaaggtctctttcagtatcaacattctaagatgctgggacttactgtgtcatcaaatgtgcggttaagattctctgggatattgatactgtttgtgtttttagttgggagatctgagagacctggctttggcaagagcagatgtcattccatatcacctttctcaatgaaagtctcattctatcctctctccaaacccgttttccaacatttgttaatagttacgtctctcctgatgtagcacttaagcttcatttagttattatttctttcttcactttgcacacatttgcatccacatattagggaagaggaatccataagtagctgaaatatctattctgtattattgtgttaacattgagaataagccttggaattagatatggggcaatgactgagccctgtctcacccatggattactccttactgtagggaatggcagtatggtagagggataaatagggggcggngagggatagtcatggatccaagaagtccttagaaatagtggcagggaacaggtgtggaagctcatgcctgtaattataaccttcagctactaagacaggtgtggtggctcacgcctgtgattttatatctcagttactaagacagagtccatgagagtgttaatgggacattttcttttanataagatgttttatatgaagaaactgtatcaaagggggaaagaaaatgtatttancaggtgaaatccaatcaagaatcttgtctgagctactggaatgnagttccccggtctttgagacccataatattttgtcaatatggtggggataacctgtaacctgccttcctggaggtaaccaatatccagtttttggccctgggggggtgaaacacgctaaaccaagggtcctggccatccgaaataacaccggccacaa

SEQ ID NO: 259184 - DNA, 463 bp, Homo Sapiens
  misc_feature (356)..(356): n is a, c, g, or t
  misc_feature (423)..(423): n is a, c, g, or t
  misc_feature (430)..(430): n is a, c, g, or t
  misc_feature (440)..(440): n is a, c, g, or t
  misc_feature (447)..(447): n is a, c, g, or t
ccagcatctcccagttcataatcacaacccttcagatttgccttattggcagctctactctggaggtttgtttagaagaagtgtgtcacccttaggccagcaccatctctttacctcctaattccacaccctcactgctgtagacatttgctatgagctggggatgtctctcatgaccaaatgcttttcctcaaagggagagagtgctattgtagagccagaggtctggccctatgcttccggcctcctgtccctcatccataggcacctccacatacctgggccctgagccttgggtgtgctgtatccatccatgggggctggattgtattttaccttcttacctcttgggctgnccttgtggaaggaatttatttcccatggagttgggctgggggattaagtgccagggttggaattggngggggtncagtttgttntccaggnacgtgttgggcccgtt

SEQ ID NO: 259185 - DNA, 906 bp, Homo Sapiens
tgaaatccgatcctacatggaagagttcccattcccatactatatcattcttcgagatgtaaacgcacttcctgagacactcagcgatgccctcagacagtggtttgagttggtgacagcctctgaccacccatagaacagaaagaagagtccaaagtgagacttaactgtggtcagaaggtcacattgcttacccaggtgctcccttttggacaactacaaaaaattttattgtaatatttttattttacaacgtgatcttacagcctacagaatgctctctggctcccggctttgcctgggctgaggtttttataccaaacctggaagcagcagcaggtgcctgaactcgtaactagagaagagttatccttcttccctgccttggaagccctggcctgggaggaggtcataccccaccgttggagcccagctgcctgttttcttttgcaggggatctgggcacctgtgctttgaggagatgctgccaggagcatgggactctgacagtcctttgtataaaggactaaagggagctgcccttttgaccctgttctaagctctgccttgccaagcccatagtgtgtgcccaaaagctgtcaagtggccaagacagctcgtttctggagagtatgagggtgtgttttcttattgtgaaaggaactaccttctcttagagggtagggaagaatgtggtgtgtgtgtgttctcataaagcaactggacattataggtgcccaggtcatctataaaaacgatccttgggctgtgtaaaaatgaagtggcttttcagtatcctctttcacacttgctgcttcgggagactatgcaatgatgggaaggtgattgcccctttatttcattcagtgccatggtccctggtggtggagaatttatttggttaag

SEQ ID NO: 259186 - DNA, 563 bp, Homo Sapiens
ttaaaacattttttaaattaaaaaataaaatagagctggaatagaaacaatgccagaaaggtaaacaaaagacaatacctgaaacaaaattcgtcctactactgaattttatttttgggggttggggaggttggatttgtgtattttcatggcagatggctaaactgtgagtgattagtcatcaatctggaaaaaaggctcttgggaaagtatggcaataactaaagaaatctgtaatcccacaaaagttgatcaaaacagaaaactttagtaaatattccaaggtaataaagaccctgtgtggcatacgtatttgcaatatacaaacattcaaataaaatcaagttaccaaaccccatacttatactggactttcttagcagttcttctacattaactttaggaaacgtatacagccttactcagcatcttacttcatacgtgatgaaacagaaacagagatcttattaatacaccttagaatgtaaaatacatgggaaaaaactgacttagtacaagaacctgaagtagaaaatgctaatgaagggaagtaagctgccttg

SEQ ID NO: 259187 - DNA, 715 bp, Homo Sapiens
tgtccatagacaagtcgaggctgctgtcattgagagctgtcaatttgacaccttctgttgaatgctttttctttttctgaagcacatgattaggtagtagttgatggagttgctttctttttacatgcattgcagcaattttcatatccacctcaaacatcttgctgtttattgcttgcctataaactgtatctgtgaaagactgaatatcataggtgagatcaacactgaggttttcagagttttctgtttttttaaacactaacccaatcacccacatcgtgcgaaattcttccttgtcgggattttctttgggtgctggaaatgactggggattcacatgagccagtgtaataaattcattcttctccaagcttccaaccaggattcggatttttgattccaccaagcccacccattccaggcgttgtttttcctgttggtgcacttgcctagaagtacaatataatgccctttgaagataaagacaacatgcctatttattttatttacacgctttgtgctggatattaaaccataaagtaataagcttccttacagttatagatccacatcaatttagcaagggggactacaatctcaatatgcacataaaatcatatatgctaaattccatgtttctaactactagtgagtttaattcttctgaaaaaggcagtgactttatgaataattaccaaaaagcagcttaatt

SEQ ID NO: 259188 - DNA, 310 bp, Homo Sapiens
atttgcaatctttcttccccgcatttagtcacctttcacgtttaagtatttattcttttatttatgaacctcaattgcaaataaatacatgggccaaagatgtttggtttgcccatggagttttaattaaaaaaattaataaggaaaacaaatacccaaaataaggaagactgacaaatgagtgagtggatgagagagtgaatggtgcttgacgtaggagcagtagtgctttagggaccagcatgaaggtggtgaccgggagccctgattcatgggattctgtccacctgactttataagaaccaagaat

SEQ ID NO: 259189 - DNA, 916 bp, Homo Sapiens
  misc_feature (555)..(555): n is a, c, g, or t
  misc_feature (559)..(559): n is a, c, g, or t
  misc_feature (562)..(562): n is a, c, g, or t
  misc_feature (564)..(564): n is a, c, g, or t
  misc_feature (568)..(726): n is a, c, g, or t
  misc_feature (732)..(732): n is a, c, g, or t
  misc_feature (748)..(748): n is a, c, g, or t
acaaacaaaaaaaacaattcttcattcagaaaaattatcttagggactgatattggtaattatggtcaatttaataatattttggggcatttccttacattgtcttgacaagattaaaatgtctgtgccaaaattttgtattttatttggagacttcttatcaaaagtaatgctgccaaaggaagtctaaggaattagtagtgttcccatcacttgtttggagtgtgctattctaaaagattttgatttcctggaatgacaattatattttaactttggtgggggaaagagttataggaccacagtcttcacttctgatacttgtaaattaatcttttattgcacttgttttgaccattaagctatatgtttagaaatggtcattttacggaaaaattagaaaaattctgataatagtgcagaataaatgaattaatgttttacttaatttatattgaactgtcaatgacaaataaaaattctttttgattattttttgttttcatttaccagaataaaaactaagaattaaaagtttgattacagtcaaaaaancccncancncccnnnnnnnnnnnnnnnnnnnnnnnnnnnnnnnnnnnnnnnnnnnnnnnnnnnnnnnnnnnnnnnnnnnnnnnnnnnnnnnnnnnnnnnnnnnnnnnnnnnnnnnnnnnnnnnnnnnnnnnnnnnnnnnnnnnnnnnnnnnnnnnnnnnnnnnnnnnnnnnaaaaanaaaaacaaagttgtgngccgctcccctcgccccccaagaaaatatctctttcaaccccttttggcgggcgggccgcggccccaccaagagagaagagagaaccccggggataaaccttcgtgttctcaaaaagaacaccaccgccggcacaacacaaagcgggcttgtccttcttcccaccaac

SEQ ID NO: 259190 - DNA, 740 bp, Homo Sapiens
gtatgtggatcaatgtacactataattttcctttaagccttttcggatctgtttcagggaagcattctccactcaccatccagtttcatctgctctgggcaataatagtgaatcacagctaagagagcagcaccatcactgccgtctctcatcaaatcctccaacaacgggaagtagggtgactgcctagcagaaaggtgctctcgtcgatagcggacctgtagttgataaaaggaaaacggtctctgcatgtgatgtctcttcactaccatatatgttacaggcacactgttagatcgagaattaacataacgcctaacagacaacatggagaacaattgcaatcatctagaaagagttagaaacgtctggattacgtactttgcctggaacatatatgtcaagatcccaaggagctgggcttcatggctacactgggtaacagcaactacttgctagcaataccagagccagtctactctaaactgacctggaagcagaggctgccactagtgcaggcacacacgggaaaggacacagaacacacacctacactaccgaaagccgacgtactagacactaacgagaaacaagttaaatggtgaacatcctgacgctcagaagacccaagttactgttacttttctgagtaatatcactagcctcagtcattaagaaaaacacaaaacagcatgaatatttagtttgagaaatttcagaagccaggttagacaaaattt

SEQ ID NO: 259191 - DNA, 1339 bp, Homo Sapiens
ggcctgggtggcgaattcggcacgaggccccggtgtcctcgctccagcccatccgccatgacctgcagcccgacccaggtgacggcacgcattcatctgcgtattgtcccgactacaccgtgagggcgctctctgatctgcagctcatcaaggttacgcgactgcagtacctcaatgcactcctggctacccgagcccagaacctgccacagtcccctgagaacaccgacctgcaggttattccaggcagccagaccaggctccttggtgagaagaccaccacagcggcagggtccagccacagcaggcccggcgtcccggtggaaggcagccctgggcggaacccaggcgtttaacggctcactaggcagccccagatctggggaacagatgagcacgtggggagctggagtgagctgagcagaagttttgtgcccgcctgcccccatcccctccaggccacgttttagatggcccttgtagttgcgggtcctgggtgtcctcagaactagacatcaatgcctggatccttcagccggccctgccctcctttaggagacaggagtcaccagggcacagccctccaggcccgcctcaggaaggaatgaaaggaatgccatcatctctagttcccagggcccagccttccccttctcccccggggcagggacagtgcggcatattcagattcagacctctttgggctgagccaccttgtgagtgcagttactgcctttgtgtggccgtgacctctatttgtttgcttttaatttgccaacctatcgctgctggcagcactttttgagcaagccgagagcacccattttggctgggggttcagatcgatggccttgtccatgttgtcctttctggcttccctgatggtgtcatgtttcagcgcatgcgccccagcctttcccatgtgccaaaccagaagctccactgcccgtaggctgtccctgtagccctgctccctccctggaggctgctcttctgattctgagagctggcctagtggtgctgagggcccctttctgcttctctgcccacctgctgagttgccactcgcagtgttgtcagttcccgtgttctgagaagaggtcatgcctgggaggaagggatcgtcatgctgcatcgaatcctctctccgccgtgtggcccccaggagagtagctgcctgttgcacctgctccacacctccccacagcctccctgcaggtgctgtgtggccgtgatgtgcagagagcagtgagggagggttcatgaaccaggtggatcctctttaaaaaaacaaagtttttggtatatctccgttacaatcacaagaactggcctttgg

SEQ ID NO: 259192 - DNA, 729 bp, Homo Sapiens
  misc_feature (685)..(685): n is a, c, g, or t
ggcggtagtgcgtcggctgctgccccgggtctggcagaactcgggttttttgggctgagacagtggcagctgcggccccgaccccaagtgcggggacctccggcgaataaaggtcggcctgcgggtaggccggtagggcctgcggtccggcctgcgggagaactgggtcgtcagtcctccgagtggtggggctggggactttgagggagttggctctagggcacagtccctgcctggccaggtcggaggaacaagtgctgggatctggcgtgtgtgctccaggggctctttccgcggccctttccacctcttttcactttggggacggtaggcctttataaacggactaatgctgggtgatttgttcctgtggttgttgatgccgaggaaagactctgggccccaggactcacctaaactggagttcgaatactgttcgctcgctgtgtgaccttggaaaaaataacaagcttttctgaagtgagaagctgttctcagccacgagtcctgtgcaagatcactaatgattacctggcatttctgcgacacaggcaggtcctcagggtttgtgcaagtttgcaaacatgttcaccctgtctcagacctcgagagcatggttcatcgatagagcccgtcaggcacgagaagaaaggcttgtgcagaaggaacgggagcgggcagctgntgtgatccaggcccatgtccggagttttctctgtcggagtcgac

SEQ ID NO: 259193 - DNA, 1002 bp, Homo Sapiens
  misc_feature (897)..(929): n is a, c, g, or t
  misc_feature (990)..(990): n is a, c, g, or t
gcggtagtgcgtcggctgctgccccgggtctggcagaactcgggtgttttgggctgagacagtggcagctgcggccccgaccccaagtgcggggacctccggcgaataaagaaaaaataacaagcttttctgaagtgagaagctgttctcagccacgagtcctgtgcaagatcactaatgattacctggcatttctgcgacacaggcaggtcctcagggtttgtgcaagtttgcaaacatgttcaccctgtctcagacctcgagagcatggttcatcgatagagcccgtcagcacgagaagaaaggcttgtgcagaaggaacgggagcgggcagctgttgtgatccaggcccatgtccggagttttctctgtcggagtcgactgcagagagatatcaggagagagattgatgacttttttaaagcagatgaccctgagtccactaaaagaagtgcacttgtattttcaagattgccaggaaactgctgttcctattcagaatcaaagaggataatgagagatttgagaagttgtgtcgcagcatcctgagcagcatggatgctgagaatgagcctaaggtgtggtatgtgtccccggcttgttctaaggacctcaccctcctttggattcaacagatcaagaacattttgtggtactgctgtgattttcctcaagcagctcaagcctgaaatcctgcaggactcccgactcatcaccctgtacctcacgatgcttgtcaccttcacagacacttcaacgtggaaaattcttcggggaaaaggtgaaagcttcgaccagcgatgaaccacatttgtgcaaatataatgggacatctcaaccagcatggattttattctgtgctgcagtgctgtgatgggctgtttcctgatttggttnnnnnnnnnnnnnnnnnnnnnnnnnnnnnnnnntccgttggcagaagctggtatgactggcagttgtctcgctagaggaaccttctacttcatnccataattaaac

SEQ ID NO: 259194 - DNA, 1055 bp, Homo Sapiens; identical to SEQ ID NO: 6152
  misc_feature (696)..(813): n is a, c, g, or t
  misc_feature (836)..(992): n is a, c, g, or t

SEQ ID NO: 259195 - DNA, 535 bp, Homo Sapiens
  misc_feature (352)..(444): n is a, c, g, or t
ttttaaaagtttaatttgagattccttattaaaagatccagaaaagccaacttaaagagaccctgtgtggtaaaacactattcctgctgcacttgtgtaaatattaggccaactttaaagacactaaatttattttgcaaacagattactcttactaatactttgatgatgtttgataaaaagggagtaagtatagagaaaaaactttcagagaaaaaaatatagtgcacctgttattagactctagctcattgtttttgaggttttttcgtctacctgaaatctagactggatcttgaattttttgtttcctgtaatatctggcaatgggctgggtgtcagagctcgcaannnnnnnnnnnnnnnnnnnnnnnnnnnnnnnnnnnnnnnnnnnnnnnnnnnnnnnnnnnnnnnnnnnnnnnnnnnnnnnnnnnnnnnnnnnnntacaaaaagttcaaaaatttgctgggcatggaggcatgcgcctgtggttgcagctgcttggaaggtggaggtggaaggattgcttgggcca

SEQ ID NO: 259196 - DNA, 696 bp, Homo Sapiens
tgttaccattctgaagaagaagaaaccaatagagattcccaaagtgagaaagatgatggtagtgacagagactctgatagagagcaagatgaaaaacaaaacaaagatgatgaagcagagtggcaagaattacaacaaagcatacagcgaaaagagagagctctattggaaaccaaatcaaaaataacacatcctgtgtatagcctttactttcctgaggaaaaacaagaatggtggtggctttacattgcagataggaaggagcagacattaatatccatgccatatcatgtgtgtacgctgaaagatacagaggaggtagagctgaagtttcctgcaccaggcaagcctggaaattatcagtatactgtgtttctgagatcagactcctatatgggtttggatcagattaaaccattgaagttggaagttcatgaggctaagcctgtgccagaaaatcacccacagtgggatacagcaatagagggggatgaagaccaggaggacagtgagggctttgaagatagctttgaggaagaagaggaggaagaagaagatgatgactaagcagtactctgaatggaccacagtgtttgcacatatttgcaactttttgctgttttggaagtgtatcataaaccagaaacagtacagaactgatgttgagggaggtgtagtttttttactctagaaatg

SEQ ID NO: 259197 - DNA, 2516 bp, Homo Sapiens
gctgggtggcgaattcggcacgaggcaagagcctggaggtggaagtgctggaggatgacatgtctgcagttgagttcaggcagacgggctacatgctgagatgttccctgtctcacgccatcactctggaattttatcaggatggaaatgggcgtgagaatgtggggatttataacctctccaaaggagtcaaccgattctgcctgtccaagcctggtgtgtacaaagtgacccctcgctcctgccaccggtttgagcaagcgttctacacctatgacacgtcttcacctagtatcttgacattgacagccattcgccaccatgtccttggaactatcaccaccgacaaaatgatggatgtcactgtgactatcaagtcttccatcgacagtgaacccgccttggtcttaggccctctgaagtctgtgcaggagctgcggagggagcagcagctggctgagatcgaggcccgcaggcaggagagggagaaaaacggcaatgaggaaggcgaagaaagaatgaccaagcctcccgtgcaggagatggtagatgagttacaaggccccttctcgtatgatttctcttactgggcgcggtctggagagaaaatcactgttacaccgtcatctaaagagctgctcttttatcccccttcaatggaagccgttgtcagtggagaaagctgcccagggaagctgatcgagatccacgggaaggcaggcctgtttttagaaggccagatccaccccgagttggaaggagtcgagattgtcatcagtgaaaagggggcaagttcaccgctgatcacagtctttactgatgacaaaggtgcctacagtgtttggccccctgcacagtgacctggagtacacggtgacctcacagaaggagggctatgttctgactgcagtggaaggaaccatcggagacttcaaggcctatgccctggcaggcgtaagctttgagataaaagctgaggatgaccagcccctcccgggagtcctcttatccctgagcggtggcctgttatcgttccaacctcttgaaccaggacaacggcattctgacatttctcaaaactgaaccctggccagtattacttcaaacccatgatgaaggagttccggtttgagccatcctcacagatgatcgaggtgcaggaaggccagaacctgaagatcaccatcacggggtaccgaaccgcttacagttgctatggcacagtgtcttccttaaacggagagcccgaacaaggggttgccatggaagcggtgggccagaacgactgcagcatttacggagaagacaccgtgacagacgaagagggcaagttcagattacgtggattgctgccgggatgtgtgtaccacgttcagctcaaggcagaaggcaacgaccacattgagcgggcgctcccccaccatagggtgattgaggttgggaataatgacatcgatgatgtaaacatcatagttttccggcagattaatcaatttgatttaagtggaaatgtgatcacttcctctgaataccttcctacgttatgggtcaagctttacaaaagcgaaaacctcgacaatccaatccagacagtttcccttggccagtccctgttcttccatttccccccactgctcagagatggcgagaactatgttgtgcttctggactccacactccccagatcccagtatgactacatcttgcctcaagtttctttcaccgcagtgggctaccataaacacatcaccttgatttttaatcccacgaggaagctgcctgaacaggacatcgcacaaggatcctacattgccctgccattgacgctgctggttctgctggccggttacaaccatgacaagctcattcctttgctgctgcagttgacaagccggctacagggagtcggcgcgctcggccaggcagcctctgacaatagcggcccagaagatgcaaagagacaagccaagaaacagaagacaaggcggacgtgaggaggaaggggacagttgcagtctcacttgggacaggccacagccaggggtccggccactacccgcccgtgggataaaagccaaaagcatgcgtcagctaacttcagcctgtgctgctgggcccgcaccccatgtcccttgtcactgtggcatcctgcacccatcctcacccctccgtagagcccctcgtgcaatgcaatgaatggaccctcctgtcactctgctgaacagaatttattttctgagtcaaatataatttattattatttttgtcaaagaagtatttaagctgtgctgtggtgtgagaatgtcattcttgatcttcagccttcgtttgcaagaagagttccagttgacgtggtgtttggttccatggcggggtaccctagggattcatctgttttcttcacttccctttgcatctgagatcctgctggaaaccacagcaacctgtatccactattaggaggtaaaaatcaataaaatggcccattcatttgtgttgtagctcaaaattaaaaa

SEQ ID NO: 259198 - DNA, 474 bp, Homo Sapiens
  misc_feature (17)..(17): n is a, c, g, or t
  misc_feature (22)..(22): n is a, c, g, or t
  misc_feature (36)..(36): n is a, c, g, or t
  misc_feature (57)..(57): n is a, c, g, or t
  misc_feature (74)..(74): n is a, c, g, or t
aaccccaacaaccgtcnaatgncagggccaatgttnggaaacccttgtgcccaatgncccctgttccaggccancctcccctccgtgggaaataaaaatccaaggtgatgtgtttaatggttagccccaactgcggtgaaaagaaaacttgaggccaagatgtagtccatactgggatctggggagtgtggagtcccagaagcacaacatagttctcgcccatctctgagcagtggggggaaatggaagaacagggactggcccaagggaaactgtctggattggattgtcgaggttttcgcttttgtaaagcttgacccataacgtaggaaggtattcagaggaagtgatcacatttccacttaaatcaaattgattaatctgccggaaaactatgatgtttacatcatcgatgtcattattcccaacctcaatcaccctatggtgggggagcgcccgctcaatgtggtcgtt

SEQ ID NO: 259199 - DNA, 803 bp, Homo Sapiens
ctaaaacgacaaaaagactaaggacaattacataatgcattcccaagccttttatggatatcagggcctggggggactatctggcctatttgggttctttcattcaccaaaattctattatacatgccaagggttaaagggaacaccatcagtcaagagacggctgggccctagaatggaatctattagcataaaatggaacagtgggacccaaagagctatcagcaaaattccctttgtaacagacgtaaaaatcatgaatttgaggggaaaaataaactagttttggtgggatgcagtggctaacaggaattacttattagaaggtaatgaagttgctaaattttccttgtttttgaatccctgtgttctgttggtctcttgaagcaatctgagtgggaaaggaaagtgaaagaaatgttttatgccagctgcctcttgtattcccattaatgggagtctctacattaatgctctacataatttggtcagactgatgagaggcaatagatttccaatgctgatgagatccagagccctggagcccatttatggcttgacattcacccagcaagacgctgacgtggcagcaaacacggctccaatgtccagcttacctcatagttatcccttcaatccttcttgatgagattggtctgagagatgagactgtactgaaatcacaagagctataactgccagagaaaaattaaatggggtcttcaagtagtgactgagccagcaaactaagtggcaaagagggagacaagagcagttcctaaagaaggttgaagtcaagcaat

SEQ ID NO: 259200 - DNA, 683 bp, Homo Sapiens
  misc_feature (46)..(54): n is a, c, g, or t
  misc_feature (313)..(571): n is a, c, g, or t
  misc_feature (590)..(609): n is a, c, g, or t
gcgtaaaggcagttgaactaatggcagaagaagactgtcaaagcannnnnnnnnaaccactttatgtcatggaaagcttcaaaatttcttaggcccagttaattgctctacatgaagagttcttcattaaacaaatcactaattagaaatacaggcaagagaaaagaatatataaaatttggcaagtaatagcaggttagatttgcttaaggcaggtgtcttacccattttcatggttggaacaatccttgatttctgggcctaaaataacttttgaaataattttctaagaaaattatttgcatctggctgnnnnnnnnnnnnnnnnnnnnnnnnnnnnnnnnnnnnnnnnnnnnnnnnnnnnnnnnnnnnnnnnnnnnnnnnnnnnnnnnnnnnnnnnnnnnnnnnnnnnnnnnnnnnnnnnnnnnnnnnnnnnnnnnnnnnnnnnnnnnnnnnnnnnnnnnnnnnnnnnnnnnnnnnnnnnnnnnnnnnnnnnnnnnnnnnnnnnnnnnnnnnnnnnnnnnnnnnnnnnnnnnnnnnnnnnnnnnnnnnnnnnnnnnnnnnnnnnnnnagagtgaaactccatctcnnnnnnnnnnnnnnnnnnnnttatttgcatctgaattaatggctgaagtattaattaatgattgctgaagagaaccctgaaacttagtacttgg

SEQ ID NO: 259201 - DNA, 1373 bp, Homo Sapiens
catcgctgacaggcagcgttccccagagctcacacaggccgctatcatggagaagctggtggcttactcatccgatcaggcacactcctcagtggaaagagctgggttaattggtggagtgaaattaaaagccatcccctcagatggcaacttcgccatgcgtgcgtctgccctgcaggaagccctggagagagacaaagcggctggcctgattcctttctttatggttgccaccctggggaccacaacatgctgctcctttgacaatctcttagaagtcggtcctatctgcaacaaggaagacatatggctgcacgttgatgcagcctaacgcaggcagtgcattcatctgccctgagtttccggcaccttctgaatggagtggagtttgcagattcattcaactttaatccccacaaatggctattggtgaattttgactgttctgccatgtgggtgaaaaagagaacagacttaacgggagcctttagactggaccccacttacctgaagcacagccatcaggattcagggcttatcactgactaccggcattggcagataccactgggcagaagatttcgctctttgaaaatgtggtttgtatttaggatgtatggagtcaaaggactgcaggcttatatccgcaagcatgtccagctgtcccatgagtttgagtcactggtgcgccaggatccccgctttgaaatctgtgtggaagtcattctggggcttgtctgctttcggctaaagggttccaacaaagtgaatgaagctcttctgcaaagaataaacagtgccaaaaaaatccacttggttccatgtcacctcagggacaagtttgtcctgcgctttgccatctgttctcgcacggtggaatctgcccatgtgcagcgggcctgggaacacatcaaagagctggcggccgacgtgctgcgagcagagagggagtaggagtgaagccagctgcaggaatcaaaaattgaagagagatatatctgaaaactggaataagaagcaaataaatatcatcctgccttcatggaactcagctgtctgtggcttcccatgtctttctccaaagttatccagagggttgtgattttgtctgcttagtatctcatcaacaaagaaatattatttgctaattaaaaagttaatcttcatggccatagcttttattcattagctgtgatttttgttgattaaaacattatagattttcatgttcttgcagtcatcagaagtggtaggaaagcctcactgatatattttccagggcaatcaatgttcacgcaacttgaaattatatctgtggtcttcaaattgtcttttgtcatgtggctaaatgcctaataaacaattcaagtgaa

SEQ ID NO: 259202 - DNA, 603 bp, Homo Sapiens
tggtttaacatgaagatggagtgctaatggaaatgcccaaaaccttcagagattgacacgctgtcattttccatttccgttcctggatctacggagtcttctaagagattttgcaatgaggagaagcattgttttcaaactatataactgagccttatttataattagggatattatcaaaatatgtaaccatgaggcccctcaggtcctgatcagtcagaatggatgctttcaccagcagacccggccatgtggctgctcggtcctgggtgctcgctgctgtgcgagacattagcccttttgttatgagcctgtgggaacttcaggggttcccagtggggagagcagtggcagtgggaggcatctgggggccaaaggtcagtggcagggggtatttcagtattatacaactgctgtgaccagacttgtatactggctgaacatcagtgctgtttgtaatttttcactttgagaaccaacattaattccatatgaatcaagtgttttgtaactgctattcatttattcagcaaatatttattgatcatctcttctccataagatagtgtgataaacacagtcatgaataaagttattttccac

SEQ ID NO: 259203 - DNA, 714 bp, Homo Sapiens
ggacaaaagtgagaaatcaatcctggaaaaatgtcagaaggacaaagaatttgataaatgttttaaagagaaaaaagataccaaggaaaaacataaagacacacatggcaaagacaaagaaaggaaagcgtctctcgaccaagggaaagagaagaaggagaaggctttccctgggatcatctcagaagacttctctgaaaaaaaagatgacaagaaaggcaaagagaaaagctggtacatcgcagacatcttcacagatgagagtgaggacgacagagacagctgcatggggagcgggttcaagatgggagaggccagcgacttgccgaggacggacggcctccaggagaaggaggaaggacgggaggcctatgcctccgacagacacaggaagtcttctgacaagcagcaccctgagaggcagaaggacaaggagcccagagacaggagaaaggaccgaggggctgccgacgcggggagagacaaaaaagagaaagtctttgaaaagcacaaggagaagaaggataaagagtccacagaaaagtacaaggacaggaaggacagagcctcagtggactccacgcaagataagaaaaataaacagaagctccccgagaaggctgaaaagaagcacgctgccgaagacaaggctaaaagcaaacacaaagagaagtcggacaaagaacattccaaggagaggaagtcctcgaaaaa

SEQ ID NO: 259204 - DNA, 653 bp, Homo Sapiens
catcaacatgaggcaaggaatcattgaaaaccacctgtgtctcctttgggagaatgacatatctttagtatttacgtagcttattcttctatatctacatatgcaaagctttccttaacagtaaagggtacatatgcatagtgggaggagatcagacctttacaagtgaaggaaagcaacttcagaaatgaattattttctttgctttattatttttaccaagacagagaagtattgtattgagagataatctattttcataatcaatatgtgcctaaattatatttaaatcatttcactctgtactatattttcaggaattacagaatgtggtattcattcacttaaaggtacctctgtagaaataacctaaaactgcagaaggatctgaaagatctaaacatggtgtgcttagaaactgcagattttagatctaatgtatactgcattaataaatgatataaagtgtttgttgaaaaggagtttcttctcttccttttgaaaatcatcactttctgtattttgcttacatttcttcaatatgtgttgacaaccagccctgtggttctgggtagcaaaggaaatacagtataacttaatttgttatggattagtctttttgaaagtaccattaaagtaaatttatttcttta

SEQ ID NO: 259205 - DNA, 600 bp, Homo Sapiens
  misc_feature (66)..(78): n is a, c, g, or t
aatgtttttaagtgctatgcatatttatagagttattatagttattcaaatccataagcaggttannnnnnnnnnnnnactgtttgaaaagaaataagtagtgtcattcatatgagttcctgagtggatatgcgaatctttggtcttctcgacaggtgccctttctcttaccactagttgcttacaaaaatagcacccaaacacatggcacttggaagaaaaagacccactgaatctgagaaagtactttctggtggcaaatgaatttatcattttagtatagttttcgataaaggatatagcaacatcttttgataattgtgctttacaacttgaatgctgattcaaggcattatttggatgtgagtttaatcttttcagccttgtaaatgggaaaatatatattaaaattgattgtcaaatacagcatttctttggaaaccaccttaaaacattagtgctatggttatgagtgtatgtgccagtacttaccagtcaatgcattgtggatatgagctttcgttgactgcttctctgcagtcgttgatgctaataaatattggcctggttcttcatataataaattaatttttcaatttc

SEQ ID NO: 259206 - DNA, 1574 bp, Homo Sapiens
  misc_feature (1516)..(1516): n is a, c, g, or t
cacggaagcacatattgcaagtttccactttccagatgaccatattaatgctctttaataatagagaaaaatacacatttgaggaaattcagcaagagacagatatccctgaaagagagcttgttagagccctacagtccctcgcctgtggtaaaccaacacagcgggttcttacaaaagaacccaaatcaaaggaaatagaaaatggtcatatatttacagttaatgatcaattcacatccaaactacacagagtcaagattcaaacagttgctgccaaacaaggtgaatccgacccagagaggaaagaaacaaggcagaaagtagacgacgacagaaaacatgagatagaagctgctatagtgcggataatgaaatctagaaagaagatgcagcacaatgttctagtagcggaggtaactcagcagttgaaggcgcgattcttaccaagtccagttgttattaagaaacgtattgaaggacttattgagagagaatatttggcacgaacacctgaggatcgcaaagtatacacatatgtagcataaaatgcgttcagaaatttgatttattcttggactgtactcttcgcatggactgggaagttcttttaaatcattaaatattaagacgacccatctcttctattaaattacagtacatgttctagaccattgagatcaagcctttactccctttgagagtttccaacatcagttgattgagcttcaggctttacaacgtttatccctgtagagatcatctttacagttcctcgggaaaatgtgaatgtgctgcgttttgttttctttactgtatgaaaacaggaaaataaaagagaaatttagaaaatacagctcattacaataaaattgttggatttcatttccccaggtcttcagtgttgatgtaaatgtgttttgtagtgttgcttagcactttgcgcattgtgtaagttgggtaacaaaaatggcaaaagaaatgcagatttcccagttatcttgctctgaagacatttctttagctagtcttatttaattttaaaggtttgataaatatacaaagacccaagcatacaatttgagcatgctgtattctaccacttgcacttactcatcttctagccttatgaccaggaacctttgttttgggctcaagtacacatcctgatttggtttctccctgttgtaatttgagatttcccaaattaagtcttataatgattaggttttgttctgagttatttctagagaaagaaagtattttagtatgtgtaaattgtacaataatttttttgctgttgtactcactgctaatagtggattgtatagggtggtgtttttatttcatttattgtagacaaaaataatgaatttagtatacacatacccactaattcaagtatgtcagagcacaaagttggcagctggttatatttaattcagcccctctgaaaagcacatacagtctatactttttgtttataataaccctagggtcctcccctgcccctaantatatattttttggtgaacctgtgggtgcactatttaatttttctgggtttcaaaatg

SEQ ID NO: 259207 - DNA, 885 bp, Homo Sapiens
  misc_feature (117)..(117): n is a, c, g, or t
atcattccatatttcttatacgccaggggtcctcaacccttgggcccaccaactgatagccagtcccatggcctgttaggaactggaaagcacagccaggaggagattggtgggcgnagcaagcgaagcttcatctgtatttacagctgctccccacggctcagggtaccacctgagctctgcctcctgtcagatcagcagaggcattagattcccataggcacgtgaaccctattgtgaattgtatgggagggatctaagttgaatgctccttatgagaatctaatgcctgatgaactgtcactgtctcccgatcacccccagataggaccctctagttgcaggaaaacaagctcagggctcccactgattctacattatggtgagttgtataattatttcattatatattacaatgtaataataatagaaataaagtgcacaataaatgtaatgcgcttgaaacatcctgaaactattcccaacccagtctgtggaaaaattgtcttccactaaattggtccctggtaccaaaaaggttggggtccactgctctgcttctagtactacctctatgcacccatgctactgaagtccatgcacttgcccaacagaatcaaagataaattatatgaaagcaattatgcccagcataatgtattaggcaaatatttggcatcatgattgtatgtaatatgattatatgtgataggatattattttagggatactctaaaaccatgtacacacaagagtgggcctttgccacagtgagtttaaagtgtgttccttgcagcctttgccacatcactaaaaatgggcaaatcatattttcttaaaggaattaattgggactgaacaatggctcattgggtttgggtttct

SEQ ID NO: 259208 - DNA, 519 bp, Homo Sapiens
  misc_feature (13)..(13): n is a, c, g, or t
  misc_feature (65)..(65): n is a, c, g, or t
  misc_feature (98)..(98): n is a, c, g, or t
  misc_feature (120)..(120): n is a, c, g, or t
tgaacccctttcntggagtggctccaaggcccccaagccaattacagctggattcttatccattnacagtagtcatgttcttatgacaggggttcccnagtccctgggcccacagactgntacccaatccatggccttgttggggaaccaagcccacccagcagacagtggagtgggtaggcaagcaagccaaagcttcatctgtatttacagccactccccatcgctcgtattaccacctgagctcggcctcctgtcagatcagctgcagcattcgattctcacgggagcatgaaccctattgtgaactgcggatgcgagggattaggttgtgcactctttatgagaatctaatacctgatgatctgtcactgtctcccaccacccccagatgggaccatctagttgcaggaaaacaagctcaggctcccactgattctacatgatactgacttgtataattatttcactatatataacaatgtaataataataaaaataaagggcacaataaatgta

SEQ ID NO: 259209 - DNA, 827 bp, Homo Sapiens
  misc_feature (16)..(16): n is a, c, g, or t
  misc_feature (41)..(41): n is a, c, g, or t
  misc_feature (67)..(67): n is a, c, g, or t
  misc_feature (78)..(78): n is a, c, g, or t
  misc_feature (102)..(102): n is a, c, g, or t
tctgctgagtcaatcnttaaacaggttactcggcaagaggntagattacctgcttcttttcttaggnttattttgatnctggacaggtacaattacttatcntcattctccccaattcaaccgctcaaaagtgtcacaccccaaaattggtcaatttaaaatgggaacacaaatttagcaactgccagactgtgttacattaaggcagcgtaatctcaacacgaggcacctgttaaataccagcctgtctgctcaggtcacgcatgagagttctgctttgcttgcactcatactctggacctgttggtgcaatcaaggtcttgctttcaagtttacaagtaggttaatcaggaatacaagaatcaactgctggttccatagcttctggatccagtgtccctttaccttcagaagcctgaacacacttagaatgtaacagatgttgtaatcttgaattagaatgtcaatctactaatgttcagtacacagattgctgtaaaatgtattggctaatggattcaacaacagttccagttttgtttaagcaatagtacagccataattttcaactgacatttaaaaatggtctagttacaccttgtgtcaaagtgcagaactgctacattattggttacagacatctatgtgctataaaaacagctttggtacaataaattatcaaaaaagaaaataaatttttgtaaaattcacagcataattgtgaggcaaaaaagcagtcacataaaattctgcattttttaaaaatgttcaggatgaacagaagacatctttgtgcagaagaaatggtggagataccacgtgccgag

SEQ ID NO: 259210 - DNA, 1500 bp, Homo Sapiens
gcacactttgggctgggatggcagtggggcataatggagccctgggcgatcgctgaatttcttccctctgcttcctggacacagagagaagtctaacgaccagagtattgccctgccaccactatctctagtctccctagcttggtgccttctcctgcaggagtcagagcagccacattgcttgccttcataccctggaggtggggaagttatccctcttccggtgctttcccatcctgggccactgtatccaggacatcactcacatgccagccctccctggcagcccatgttctcctcttttctcaccccctgactttccctgagaagaatcatctctgccaggtcaactggagtccctggtgactccattctgaggtgtcacaagcaatgaagctatgcaaacaataggagggtgtgacaggggaaccgtagactttatatatgtaattactgttattataatactattgttatattaaatgtatttactcacactttgcctctaaggagctagagtagtcctctgggattaaggtgataaataacttgaggcactttccctcaaccagcccttaactagaacacagaaaataaaaccaagactggaaggtcccctctacccctcccaggcccagagctagctgactgtgtatgagcctgggagaatgtgtctcctccacagtggctcccagaggttccacacactctctgaagctccttctcccacactgcacctactccttgaggctgaactggtcacagacaaactgggatccagcacagtccagcagttctcaaaatgaggtcctcaggccacagtgcgtgagaacttgcttggctgtttgttaaatgctaattcttgggccccatcagagctactgcatcgaaacctgggggtaaaacccaatattctgcatttcttatcaaactctttgggtgataactaagtgtctgaagaggtgactatttcctgacagaaggacccaaagagggaagcaggacataggtaggcagacagacacagggccctgtgcctcaagacacctgtttattggggacacgactctgcaatagggatgacaggaatcgtaccaaaaatagcgacgtctacagggcccctgatggggctagaagggtacagtgccccccaccctcaccccttgtacaaaaataaactctcacgcctatggaccagcaaagactggcagagtggctcctcaacagggacacaaaccttctctgccagcccagggaccccgttctttgaccctcacctctgccacttctaaggcactgtgactcccttgggctgggagaaaacacgccagcccaccctcctacgcccgccgccccttccacctctggtccgcctggggctgggatatgggtcccacgctgccccctgctggcttctctacccaactacctctagcgctcccccgctccggcggggtaagctcactaagctaatcgcccctgagggcccactccgaatcg

SEQ ID NO: 259211 - DNA, 1340 bp, Homo Sapiens
  misc_feature (546)..(546): n is a, c, g, or t
  misc_feature (1109)..(1153): n is a, c, g, or t
  misc_feature (1269)..(1281): n is a, c, g, or t
aaaatttttattttcagtacattaaatttactcataaaaacattctaaaaatgtacaatttgtcctttttaacaaagtataataaaacataaaaaccccaaaaacagaatacttgacatttacaattcaaaatcaaattagcggaatattaaatatttacaaaactatatcttttaaaaatatttataaagttacatgcaattttgtagaattgacaaaagaatggctcaaaaatgggagaattttccttcattcctaaaaagaaaatatgtccaatagaagctgtgaaggtatcgagtacacaaggtgtccagtttcagtaccaaagccttctctttttgtgcacgtaagactcacacatgtgatgagggcttgttacaacgcacgtgaggccgcggcggatggccactgcccccttccttggtgaacagtggagcaatgttaacctttggcctcaaccagcacagtatatggttttctagaatattgcgagtgttgagtgttgattaaagatgctttcatttcagacccctgggacttttcaancaaattcgccttcttcagaaccccatggcttttcagtgccacctgactcattctttggaagtcacctgcatgctggaaatggcagccacccccgctcaggtcgcaacaggactctccctctgggaacagccagtcgaagtccaagcagggagacggctttccctcacaaccttgaaagacccatcagtcatcatgatgtacaacgagcaaggcataaaataaaacactgggaagcaggaagagtgacaagaaaatgaacagggagcaaggagggtgcaacccagttccccatcctggcaagtgcctaaagccccgctcagcctctgttccagctgggtgatgtttaggcaaagtcactaccccgccccactactgtgccccaagacagagtctgtggtataaactaactgtgctgactttgggcaataaaggacctagaattctaagtactgaattaaaaatacagaacctactaacactactgtattaacaagctgactcctataatcttttggagatgacagatgatactggtttttaaaatacccaatcacatatatgcnnnnnnnnnnnnnnnnnnnnnnnnnnnnnnnnnnnnnnnnnnnnnctcccatttcctcagtgctctttagcaatgagtttttatgttaaacacttccaactgtcagtattaccatgaaatcaacattagaaaataaggtagaaaactgagtgttttgcttnnnnnnnnnnnnnggattaaatagctgttgtatccaaacatcacgttctgcttccatctctacattccaccc

SEQ ID NO: 259212 - DNA, 1079 bp, Homo Sapiens
  misc_feature (1069)..(1069): n is a, c, g, or t
ggggctgctatggaggcgctggccatgggttcccgggcgctgcggctctggctggtcgcacccggtggcgggatcaaatggagatttatagcaacatcgccagcttctcagctgtcaccgacagaattgacagaaatgcggaatgatctctttaataaagagaaagccaggcagttatcattaactccccgaactgagaagatagaagttaagcatgttgggaaaactgaccccggtactgtcttcgtgatgaataaaaacatttcaactccctacagttgtgccatgcatttaagcgagtggtattgcaggaagtccattctggctctggtggatggacagccttgggacatgtataagcctttaacaaagtcctgtgaaattaaatttcttactttcaaagattgtgatccaggagaagtgaataaggcatattggcgttcctgtgctatgatgatgggctgtgtgatagagagggcattcaaagatgaatatatggtcaatttggtcagagctccagaagttcctgtaatttctggtgccttctgttatgacgtagttttggatagcaaacttgatgagtggatgccaacaaaagagaacttacgttccttcacaaaggatgctcatgctttaatttataaagatcttccatttgaaactctggaaagttgaagcaaaagtggcattggaaatatttcaacacagcaagtacaaagtagatttcatagaagagaaggcatcctcagaaccctgagagaatagtcaagctacacagaataggtgacttcattgatgtgagtgagggccctcttattccaagaacaagtatttgtttccagtatgaagtatcagcagttcacaatcttcaacccacccagccaagtctcatacgaagattcccagggcgtgtctttacctgttcacttaagagcacattttacaatatgggataagctattggaaagatctcggaaaatggtaactgaagatcaaagtaaagcaacagaggaatgtacatctacctaataactttctaaaatttaaatatgtataataaaataaattnttttaaatat

SEQ ID NO: 259213 - DNA, 677 bp, Homo Sapiens
ctgattgaggtgtccagccccatcactttacaagccttggttcagtgtggacagcctcagtgctccactcacatcctccagtggctgaaacgtgtgcatgccaacccccttctgatagatgtggtcacctacctggtggccctgatccccgagccctcagcacagcagctgcgagagatcttcaacatggcgagggatcagcgcagccgagccaccttgtatgcgctgagccacgcggtcaacaactatcataagacaaaccctacagggacccagaagctgctggacattgctaattacctgatggaacagattcaagatgactgcactggggatgaagattacacctatttgattctgcgggtcattggaaatatgggccaaaccatggagcagttaactccagaactcaagtcttcaatcctgaaatgtgtccaaagtacaaagccatcactgatgatccagaaagctgccatccaggctctgcggaaaatggagcctaaagacaaggaccaggaggttcttcttcagactttccttgatgatgcttctccgggagataagcgactggctgcctatcttatgttgatgaggagtccttcacaggcagatattaacaaaattgtccaaattctaccatgggaacagaatgagcaagtgaaagaactttgtggctt

SEQ ID NO: 259214 - DNA, 1046 bp, Homo Sapiens
  misc_feature (131)..(142): n is a, c, g, or t
  misc_feature (897)..(931): n is a, c, g, or t
acagggtctcactacattgctcaggctagtcttgaactccgggtctccagcaatcctcctctcacctcagcctcctcccaaagtgctgggattacaggctaacaccccagcccacccccacccccgctttnnnnnnnnnnnnaaagagatggagtctcactacgttgcccaggctgacctcaaactcctaggctgaagcgatcttcccacctcaccctcctgagtagctgagatgacaggcatgtgccaccacacccagcttggacattccttttttagtttgttctggatttgaatttataaaacccatctcagtgtaggaattcagaatcatttctagaaggggcttccattaaaaattaaagggagcaaaagaattttttcacgggtattagctattatgttcctttgttccagtaactttacctggtgaagattaaccctgaaaccagcctagaaagtagattcatttcccagaagcttttaaaaaggaactctggagccaaatgaaattgggttgtgagtttaatgaaaatcaggcagaaggccccaaaaaagcctaactgagcctgtttcttcctcttccttcctgtgttttcaaggaaggatacctatgtgaaataatttggagggtattttttatagactaaggtttgtgttctcttagcccagagacacagagaaagttaaagatggaaggtacataggcgcagaagagttcaaacttcattacagctttgtcttagtgatgcttcctccctcctctcatcactttctctgaaatagacaaaattggtcacaatataagacagtgtttattgatgcctgctaggtttcatactcattatcttctgaaactttatagcaaatagggagcaaataatctgtcatttattnnnnnnnnnnnnnnnnnnnnnnnnnnnnnnnnnnntgaaggcttagagcaatgtgtaaattgcagctaacaggagacaaagttatgaagcatgaaatgccaattctctccatctttcccttcagcattgattccttccttacatattgta

SEQ ID NO: 259215 - DNA, 828 bp, Homo Sapiens
  misc_feature (22)..(22): n is a, c, g, or t
  misc_feature (48)..(48): n is a, c, g, or t
ggtcttgctatattgtccaggnggtctcaaacccctggcttcaagcanttctcccaccgcagcctcccaaagcactgggatgacaggcatgagctgctgcgtgtggccctcacatttgtgaatgttgccatccatttaatcagaagagattttaagtactgagaagccatcatgctcacgatgacaaagttttccgtaatttcaatttttgcttgaaagttttaatttttttcattggcaataaacactatcaactgttttcttctaaataaccatagttgtcattcctttcaaataaatattgtctttgaaaaaagtggcctagctcagtccaacttgaacaattacacaagattgttcatcacacttgggcatggggcagacacactttttgtgtgcttcccattttgtcacacagaatactaaaaaggtgcgtactcagggtcaagggttaacaaaattaataatttttatctcttcataaaggaagttcttaagttcaaatggcattaaacatttttttattgtgacatctactagtaatttattgcctctgccttgattcttgctaagatacaagtagttctactcctcaatgctgctgcaccaacagtgcaaatgtcaacacagtgaaaaatggcaattaatcacttagtattatcagaaaatatttctgaactcaggcaactcctaaaagggcctcagggataaagttgccagacttagcaaataaaaatacaggatgcccagttaaatttgaatttcagatatacaataaatactttttttagtataaatgtgccccaaatattacatggcatgtacaca

SEQ ID NO: 259216 - DNA, 292 bp, Homo Sapiens
ggttttgattaattctcctttggttttagctaattcagctttaatttgattaaactttagttctaaacaagcagtagcttcctgggggtcaggaagagatgcaatatataagtgagcaatttcagcctgtttcttaatatcagcaacattatcttgaagagaatcaataatatcttcaaatcctacataattatgtgtttcctaaaaatagcaaaaaccacatgcctaatattaacagtagggttcaccctttacatgtggtaccatctaatttagacacgtttttaaaaaa

SEQ ID NO: 259217 - DNA, 842 bp, Homo Sapiens
  misc_feature (62)..(112): n is a, c, g, or t
  misc_feature (505)..(505): n is a, c, g, or t
ggaggatcccttaagcccaggagttcgaggcagcagtgcaccatgactgcatctgtgactannnnnnnnnnnnnnnnnnnnnnnnnnnnnnnnnnnnnnnnnnnnnnnnnnncaaaaacggttcctcatcacagacagtttaagatgtactggtctaaagaaagcttacaaagcatacaaagactcactagactataagaatgatggaaataggactaaatcagttctccactacattcctaaatgaatatttaacacatcttacatataatgaaataacacaagcagatctacaaatgtacaaataacacgaggtagcactgcaaactgctgagagaatggttctctcctcttccctttgtcataggaaactttcctattccttcccttttgccactctccccaaaactaaaagacaatatcagacctaccaatagttatatctctattcaccttccaaaccaatggcccttcaatgaaatcatctacctttttgttaaatccnaaattctggcaaaataaagaaaatcatgcacaaataatttcccaagcactcagtaacatgattatctatataatacagtctcttttaaagaaattcttaagtataaaatacaccatttacattcaactatcattattgctatttgtcagttcttgaaaatggcacaaaagccatattaaagtaatctgcatacaattttctaaaaaggaaaaggtatcttgcagaagaacattcaggagtactatcttcaaacctcactctaaacagatgataacagattatgaagatcaagttacaaacattcagtcactagattctcaacgtatcctttaatttt

SEQ ID NO: 259218 - DNA, 718 bp, Homo Sapiens
gccgctgccccccaaagtcagctctctaaaagcaagcatgttttagaccactcactctttccctctttcttcaggaatgaattgggaaaggctgatgagtaaaacataccatccttttctattttcttgatgctgtttacaacatagtttggtgatatccagagctaatgtacatgctttcaaaagctaatctgcctgttgatgataactaggtacagcgactttaaatacagttgctataatcctgaaaagccccaggagcacatcagggagctgggaaacacagttgcagagaactcagctgtatgttgccctctgaccttggcccagaccttcagaggctcagtctgttgagtctgttgtgactgtcttatgaatcaatctgttgtgccaaccctttctgagattcagagaggtccagctagaaaaagtggcagttttaaccaccaacgtagaagctttttttccccacaagaccattgtactgcaatacttgactatttgtgtagcaaacagcctcttaggttggagagtattgatttcaaataggaagttggtagactaggtgtgaggatgaaataatgaccttgatttttgggtgtgtattgcagaagcctcgtcgctttcaagtcacatcatatatgcgatctggcctaaccatggagatattggttatcaagttgcagatgaatacacagttctatccaacaggaaactg

SEQ ID NO: 259219 - DNA, 726 bp, Homo Sapiens
  misc_feature (61)..(140): n is a, c, g, or t
  misc_feature (504)..(544): n is a, c, g, or t
  misc_feature (592)..(660): n is a, c, g, or t
gggcatggtggtgggtgcctgtagtcccagctactaggaggctgagacagagaatggcgtnnnnnnnnnnnnnnnnnnnnnnnnnnnnnnnnnnnnnnnnnnnnnnnnnnnnnnnnnnnnnnnnnnnnnnnnnnnnnnnncaaaaaaagaaatgttatgaaaaatttggaaatattcgtcactagctgtatgaccttttgaaaaaggtccgcctaataccatgctcatctataaaattggggtatgatgattatcaatttacaggattgtggtgcattttaaatgaaacaagttccattaagtgcttattgctgaaggtataattcagtgaatgttctttccttttcttagagcagagtttggtattttattttcacctaagccattttggttcagttcttaaggctttgattatttttttaagttgaatggtgtttagtgtgcccatgttcataacagcatattattcacaacagccatacaggctgggtgtggtagctcatnnnnnnnnnnnnnnnnnnnnnnnnnnnnnnnnnnnnnnnnntgagtccaggagtgtaagggcaatatggtgaaaccctgtctatacaannnnnnnnnnnnnnnnnnnnnnnnnnnnnnnnnnnnnnnnnnnnnnnnnnnnnnnnnnnnnnnnnnnnncctgagcccaggaggtcaaagctgcagtgtgccttcattgtgccacgcactctagcctgggcgaca

SEQ ID NO: 259220 - DNA, 872 bp, Homo Sapiens
  misc_feature (692)..(692): n is a, c, g, or t
  misc_feature (757)..(757): n is a, c, g, or t
  misc_feature (785)..(785): n is a, c, g, or t
  misc_feature (791)..(791): n is a, c, g, or t
gggagacggaagtgagcgacacactctgcgtcctcgcctcaccaggaaactactaaagttcctggggaagcaaagtagaatttcataagaacaaaatggatggagaggagaaaacctatggtggctgtgaaggacctgatgccatgtatgtcaaattgatatcatctgatggccatgaatttattgtaaaaagagaacatgcattaacatcaggcacgataaaagccatgttgagtggcccaggtcagtttgctgagaacgaaaccaatgaggtcaattttagagagataccttcacatgtgctatcgaaagtatgcatgtattttacgtacaaggttcgctacactaacagctccaccgagattcctgaattcccaattgcacctgaaattgcactggaactgctgatggctgcgaacttcttagattggtaaataaaataaattataataaactgttaactcttttcagaatttaataacctgtaggtcagttagtaacttttttcatatatagcatggtggcctgtatgcagttgaactatataaaggtcattggcaaagcaaattaatcctgttttttttgctagcaatcaaagttgaaatttggttggctacctccaccaaatttaaggacctttttcccagcctgggaaaataacccaattttgcccattccccggaagggagaanccacccacacacagacccacgcgggacgcgacaagaagagtcggaacaacaccagcaaacagcangccgagaactaggaaccagacaacgacncgaggnggaagtggggggggccgcctttggccctccaaaaaaatttttttaacaccacctcctttttgggggccccgcggcgcccaa

SEQ ID NO: 259221 - DNA, 991 bp, Homo Sapiens
  misc_feature (691)..(691): n is a, c, g, or t
gcggccctgggataggggctgtggcagtacgcggggacccggctgcggtggctgcgggactgacgagaaactactaaagttcctggggaagcaaagtagaatttcataagaacaaaatggatggagaggagaaaacctatggtggctgtgaaggacctgatgccatgtatgtcaaattgatatcatctgatggccatgaatttattgtaaaaagagaacatgcattaacatcaggcacgataaaagccatgttgagtggcccaggtcagtttgctgagaacgaaaccaatgaggtcaattttagagagataccttcacatgtgctatcgaaagtatgcatgtattttacgtacaaggttcgctacactaacagctccaccgagattcctgaattcccaattgcacctgaaattgcactggaactgctgatggctgcgaacttcttagattgttaaataaaataaattataataaactgttaactcttttcagtatttaatacctgtagttcagttagtaactttttcatatatagcatgttgcctgtatgcagttgaactatataaagttcattgcaaagcagattatcttgtttttttgcatagcaatcaaagttgaaatttgtttgctacatcaacaaattaaggacattttcacaaactgagaaataaacaaatatgccaattcgtanggtggttttgccttatcctttgaatgtgacttaaaatcagcaatgatgatatagtaaatactgaaatttaggtgtaaatcaatacgttctacagggaaataatgaggctaagtatttttatgtttttagtggttttttagaaacctaatcttatagccgccattagcattactagagttatgcaaataattgcattataaacatgtttataacttagccaaaacattgatttttataactctccaagtatgagttgaaatttcttatgtcttttgataaactgcagtattctttaagtgt

SEQ ID NO: 259222 - DNA, 852 bp, Homo Sapiens
aaacttcccagcacctccaccttatcctggagaatcccagacagatctgcaaccccccgcaggtgcacaggcgctgcagccttctgaggaaggaatggagacagatgaggctgtatctggcatcctggaaactgaggctgctacagaatcttctaggcctccagtcaatgctcctgacccctcagccggcccaacagataccaaggaagccagaggaaatagcagtgaaacctcacactcagtgccagaagccaaagggtctaaagaagtggaagtcactcttgttcggaaagacaaagggcgccagaaaacaacccgatcacgccgcaagcgaaacacaaacaagaaagtggtggctcctgtagagagccatgtccctgaatccgaccaagctcaaggtgagagtcctgctgcaaatgaggggacaacagtacagcaccccgaagccccacaggaagaaaagcagagtgagaaaccccattccactcctcctcagtcatgtacttctgacctaagcaagattccctccacagagaattcgtcccaagaaatcagtgttgaggaaaggactccaaccaaagcatctgtgcccccagaccttcccccacctccccagccagcaccggtggatgaggagcctcaagccaggttcagggtgcattccatcattgaaagtgacccggtgaccccacccagcgatccaagcatccccatacccacactgccttctgtaactgcagcaaagctctcacctcctgtcgcctctggggggatcccacaccagagcccccctactaaggtgacagagtggatcacaaggcaggaggacacgggctcagtctactccatctc

SEQ ID NO: 259223 - DNA, 962 bp, Homo Sapiens
  misc_feature (890)..(890): n is a, c, g, or t
gggaaaagaccatgccaactacctttaacagagaagggaataaacagaaaaataaatgtgaaataccttcagaagaattctctaaagatgttgctgctgctgctgctgacagtcctaataaacatgtcagtgtaccagatcgaatcacaggaagggcgggactaaaggaactacaagctgttagcccttcccgaatttggaattttgttgaaattaatgtttctatggaagaactgcagaaattaagaagaactcgaatatgtcacttaattcggccattggatacagttttggatgatagcattggctgtgcagtctggtttgcttctagaggaattggttggttagtggcccaggaaggagtgaaatcctatcagagcaatgcaaaggtagttctcactggaattggtgcagatgagcaacttgcaggttattctcgtcatcgtgtccgctttcagtcgcatgggctggaaggattgaataaggaaataatgatggaactgggtcgaatttcttctagaaatcttggtcgtgatgacagagttattggtgatcatggaaaagaagcaagatttcctttcctggatgaaaatgttgtctcctttctaaattctctgccgatttgggaaaaagcaaacttgactttaccccgaggaattggtgaaaaattacttttacgccttgcagctgtggaacttggtcttacagcctctgctcttctgcccaaacgggccatgcagtttggatcaagaattgcaaaaatggaaaaaattaatgaaaaggcatctgataaatgtggacggctccaaatcatgtccttagaaaatctttctattgaaaaggagactaaattgtaatgtgattcacaatgtaacaatataaaaataagnttttatataattatataaaagtaagatactctgctgctttactattgtataatatagtagttttaaagttat

SEQ ID NO: 259224 - DNA, 894 bp, Homo Sapiens
  misc_feature (583)..(583): n is a, c, g, or t
gctggtaccggtccggaattccgggatatcgtcgacccacgcgtccgtgctgtgagggctgaggacggggccctagtctctggttttctggtcttaacatccttatctgtgtccgccacggaggtgactgagctgctagcgagttgtcctgtcccaggtacttgagttttggaaaagctgactcacgcccatccatctcacagcccttccctggggacagtcgcttccgccttgacacctcactctcagttgaataactcaagcttggtcatcttcagactcgaattcttgagtagacccagacggcttagcccaagtctagttgcagctgcctcggcaagtccccatttgctcaggcagccctgaatgggcctgtttacaggaatggtaaattgggattggaaggaatatagcttccagcttcataggctagggtgaccacggcttaggaaacagggaaagaaagcaaggcccttttcctgcctttcccgggatctgtctactccacctccacgggggaggccagtggggaagggctgtcacctcttccccatctgcatgagttctggaactctgtcctgtnggctgcttgcttccagctccccccaatctccatcgcagcgggttcctcctgtcttttctacagtgtcataaaacatctgccctaccctctcccaaaggtcaattttaattctcaccaagtttggcacatctctgtatgtcgctgatgtcttagacgcgagccctttcctaaactgttcaggctctctttccttgggtggttgtcgcaaggggtgatgacttgaactgtccccaggcctgtttcctgaagggtctggctgtcaggaaagcctgggcaaaattagggcaggggaaagcgcccggtggtttccc

SEQ ID NO: 259225 - DNA, 833 bp, Homo Sapiens
  misc_feature (724)..(724): n is a, c, g, or t
aaaacaccctgcccctaccctctccccaaaggtcaaattttaaaatcctcacccaagttttggcacatctctgtatgtcgcttgatgtccttagacgcgagccctttccctaaactgttccagcgctctcttttccctttgggtggttgttgcaagggtgatgacatgactgtccccaggcctgtctccctgaagcgtctgtgctgtcaggacagccctgggcagagatgaggcaggggtgaggcgtgcgtgtgcttttcctccttgttggatgtcttccatatcatctgtttccatagctacaatccatcccttggccttaactttggaatttggagattatatgcaaacatgtgtaaaggctcatgaatatggatgacactggaattttataaattctaaaataaaacccgaaaccagatgtagcatgctgggactcattttgtcacgctgccgcctgtgtgttctctttctcgtcaccctggagtggtgactggcatctgtgggtagttcgtctttcggtgtgattttctcagcagttctcaacactcgtgttcaacggcccctcgggagccacattgagggagacccacggtgtggtcatggcaagagggtggctgcctgtccctgtcctctggctgccagacagtcagcagttgccctgcagccctcattgagggtggaacaaccgtccttgtggagcagcacctgccactcccttttnaggactctgccagcctcagtggcattcctgggcaccctgggacccggcctgtgagttatgacgagctgaagttgggtggtggggggtgcgggcggagcttcggctggag

SEQ ID NO: 259226 - DNA, 634 bp, Homo Sapiens
  misc_feature (539)..(539): n is a, c, g, or t
aggaaaaccacactcacgcctaacccctgccctcatcctactgccccgggctgtccctgaacaccacagacgcttcagggagacacaccctggggacagtcatgtcatcacccttgcaacaaccacccaaaggaaaagagagcgctgaacagtttaggaaagggctcgcgtctaagacatcaagcgacatacagagatgtgcaaaacttggtgagaattaaaattgacctttggaagagggtaggggcaggatgttttatgacactgtagaaaagacaggaggaacccgctgcgatggagattggggggagctggaagcaagcagccaacaggacagagttccagaactcatgcagatggggaagaggtgacagcccttccccactggcctcccccgtggaggtggagtagacagaacccgggaaaggcaggaaaagggccttgctttctttcactgtttcctaagccgtggtcaccctagcctatgaagctggaagctatattccttccaatcccaatttaccattcctgtaaacagnccattcagggctgcctgagcaaatggggacttccgaggcagctgcaactagacttggctaagccgtctgggtctactcaagaattcgagtctgaa

SEQ ID NO: 259227 - DNA, 982 bp, Homo Sapiens
  misc_feature (450)..(476): n is a, c, g, or t
  misc_feature (590)..(617): n is a, c, g, or t
caatcagatctgcggcaaagtgtctggtaaaaacggcagcattgagaactgtctcagtaaacccacaccaaaaagaggtccccgcaagagagcgacagtggacgtgcccccctcccgtctgtcagcctccagttcatccaaaagtgcttcgagctcatcatgaagatgccaacgcccgtggtcgatttatatatatttttttgtaattattatattctagtttggagtacttgctgtaggattcaagctgtctttgcactagctctaaagaagattttcttctggttttagagaactaattttgttttagcattaaactgttgaacttttttttgtacttagaaaacctagatactgcagtcagattttggaaactgccgtatagtcactgttttaaaaaccccggaggggctgtattaatttgtattgccccatggctgacaaaagccnnnnnnnnnnnnnnnnnnnnnnnnnnngtaactgttggggggaaaaaggctttttaacccatttttgaagagggtgaagtttggagaacaaatttaaaaaccatcagtcatgtgagcagattttttagaagggataggagnnnnnnnnnnnnnnnnnnnnnnnnnnnngaaacttgaaatggctttgctttggctgtcgtcttctgccgtgtgccagatgagcttgtgatctgggaagccggggcacccccgttttgtttctctgggcggttgtggcagctgaaggcggacgttgtttcctaaccataggtggaacgaggagacgggagcgagtgggctctccaccagcacatcactatgcatctgttccaggaaagaagaaaagcgagcgaggaagacggaaaagactgcctgccttggaggggtcacatgagggagacctgtgcctgatttcattaggaaatccattctgttattttttggtgctgttggctactttatcaaaaaacccttcaatagcatccttaagattt

SEQ ID NO: 259228 - DNA, 745 bp, Homo Sapiens
  misc_feature (172)..(222): n is a, c, g, or t
  misc_feature (240)..(283): n is a, c, g, or t
tttagtccagtctgagattagcgcattcaaagaatctgtcataacgtttactatagactcttgtcgcccacagaatcagtttccagttcgtgtgtgacatgttctattgttgaatcagtacagagttcttatgtgtgtgagttttctatggtgactacacaaaacctcaggnnnnnnnnnnnnnnnnnnnnnnnnnnnnnnnnnnnnnnnnnnnnnnnnnnnctttcctccatcatgggnnnnnnnnnnnnnnnnnnnnnnnnnnnnnnnnnnnnnnnnnnnnccccagtcccagctgcttaggggccaccacactcctcggccctcctctaaggccagcagcgcaggtgcggccctcctcgggttctaacctctcctgcttctggcatctctcagactcagcaggaaaggctctcaagctttaaaggcccatggggctgccctgggcctgcaagatgacctaggacaatctccccatgtgaggcactcacaaggtctgggggtcacaaaacgggcatcttgggggccattatcctgcctacctcaccgtaattcccagggtccttgacatttttcgtaataaaaagtttaaaagtggtaattacagaactataaagctgcatcggatgccccagccccatcaccctccagggccattcccctcacacctgccctcccctgcagcactgagcgaatcccagacactgcagagccttttccagttcacgtctctggaagagcccat

SEQ ID NO: 259229 - DNA, 472 bp, Homo Sapiens
aaactgaattctgccagcagcccccatgatggaggaaaggaaggatcctgccctgccagcaccttgacctctgacctccacaattgtaagcctgaggttttgtgtagtcaccatagaaaactcacacacataagaactctgtactgattcaacaatagaacatgtcacacacgaactggaaactgattctgtgggcgacaagagtctatagtaaacgttatgacagattctttgaatgcgctaatctcagactggactaaagttgggattaaatttaatttgtacttgagttcagtgcattgctgttctgggcataggaaatccaggttgctggtgatgaacagctgaaaagagctgtgtcaccatggttgtctctgtcagtcatgtgaccacccttacccttgtaaaatcaagcaagggagagattattttctaatgtaaatgaaaataaaaaataaagcagcttgcagaa

SEQ ID NO: 259230 - DNA, 1512 bp, Homo Sapiens
  misc_feature (27)..(27): n is a, c, g, or t
  misc_feature (57)..(57): n is a, c, g, or t
  misc_feature (62)..(62): n is a, c, g, or t
  misc_feature (75)..(75): n is a, c, g, or t
caggggaaagttggaatcttgctcacntaaaagaagcactttcacttgactcccagntgggnaatgcagacatgnagatgactctgaagcgagcagtgagtatgctcgaggcagaccacatgctgccatccaggatttctgctgcagctactttcatacagcacgagtgcttccagaaatctgaagctcggaagagggttaaccagcttcgtggcatcctcaagcttctgcagctcctaaaagttcagaatgaagacgttcagcgagctgtgtgtggggccttgagaaacttagtatttgaagacaatgacaacaaattggaggtggctgaactaaatggggtacctcggctgctccaggtgctgaagcaaaccagagacttggagactaaaaaacaaataacaggtttgctgtggaatttgtcatctaatgacaaactcaagaatctcatgataacagaagcattgcttacgctgacggagaatatcatcatccccttttctgggtggcctgaaggagactacccaaaagcaaatggtttgctcgattttgacatattctacaacgtcactggatgcctaagaaacatgagttctgctggcgctgatgggagaaaagcgatgagaagatgtgacggactcattgactcactggtccattatgtcagaggaaccattgcagattaccagccagatgacaaggccacggagaattgtgtgtgcattcttcataacctctcctaccagctggaggcagagctcccagagaaatattcccagaatatctatattcaaaaccggaatatccagactgacaacaacaaaagtattggatgttttggcagtcgaagcaggaaagtaaaagagcaataccaggacgtgccgatgccggaggaaaagagcaaccccaagggcgtggagtggctgtggcattccattgttataaggatgtatctgtccttgatcgccaaaagtgtccgcaactacacacaagaagcatccttaggagctctgcagaacctcacggccggaagtggaccagtgagtattgggcctgatttcctactttttaaaataatgatattatagacatacctacattcaattcagagatgaaacagtgagggaagagaaaaaggtttcttattttagtaaagacaattctcagaaattacagagggcttcggtctcagcttatgcaaagtcaagtcaggctgcttgactgacaagtcaaagtcagtactctttcagttacagatctcagaatcctgcctcaagctggtttaagcaaaaaagaggaaattttggcttatggcactgaaaactccagggtgggccttctatctgtcgtgactggacttaggtggcaccagtgattacagttgaatttcttcatctccggggctttggtattcctctgactggaggaagatctcaaaggctccttccataagggtaacaagacacgccatgcatattccaggctcccgtttatcagccaatgtgtccccac

SEQ ID NO: 259231 - DNA, 533 bp, Homo Sapiens
ctggtggttcagccccttctccaaccccttcataagcttgggccactgcctgggacccagcagacactgcccaggactctttagtgcactcactcttgtctgccccctaccttccctcctggaaccacactacttgaatcgaccattactttgcctcgctggcagagttgggtcaagtgccctctccttgaccttgagatgaaggtcaagagcacagggaccaggccttggttaggctgagctcccagcaggacaccgcctgcagaaaggacctgccctgataatgtcccttccccagattctcaagcagatgcccaagggaggtccccacagagccagagtgcctgaggcttcctgcttgagaacctgccccctggatcttggacacttacagattgagctgtatgaattcagcgggtctcactccagagggtcagaacgtttgctttagttttttcatctgttttgttccttgagtcagtgctgttgatgacgagttgtcttgaataaatcatgtgttctttgcaatgggc

SEQ ID NO: 259232 - DNA, 815 bp, Homo Sapiens
  misc_feature (312)..(514): n is a, c, g, or t
  misc_feature (521)..(686): n is a, c, g, or t
  misc_feature (701)..(715): n is a, c, g, or t
  misc_feature (742)..(754): n is a, c, g, or t
caaatgggagccaaggcacctcgggcagcgccaacgactcccagcacgaccccggtaaaatgtttatcggtggactgagctggcagacctcaccagatagccttagagactattttagcaaatttggagaaattagagaatgtatggtcatgagagatcccactacgaaacgctccagaggcttcggtttcgtcacgttcgcagacccagcaagtgtagataaagtattaggtcagccccaccatgagttagattccaagacgattgaccccaaagttgcatttcctcgtcgagcgcaacccaaggtgttcnnnnnnnnnnnnnnnnnnnnnnnnnnnnnnnnnnnnnnnnnnnnnnnnnnnnnnnnnnnnnnnnnnnnnnnnnnnnnnnnnnnnnnnnnnnnnnnnnnnnnnnnnnnnnnnnnnnnnnnnnnnnnnnnnnnnnnnnnnnnnnnnnnnnnnnnnnnnnnnnnnnnnnnnnnnnnnnnnnnnnnnnnnnnnnnnnnnnnnnnnnngtctgcnnnnnnnnnnnnnnnnnnnnnnnnnnnnnnnnnnnnnnnnnnnnnnnnnnnnnnnnnnnnnnnnnnnnnnnnnnnnnnnnnnnnnnnnnnnnnnnnnnnnnnnnnnnnnnnnnnnnnnnnnnnnnnnnnnnnnnnnnnnnnnnnnnnnnnnnnnnnnnnnnnnnnngccacattttggcgnnnnnnnnnnnnnnnaaaaaaatttttaaaaacctttctttnnnnnnnnnnnnnccccacaggagaacaagaaacccggggcaaaactttttttctcaaaagaaacacccgggcc

SEQ ID NO: 259233 - DNA, 871 bp, Homo Sapiens
  misc_feature (301)..(310): n is a, c, g, or t
gggacctcgtgatccgtccaccttggccttgcaagcgctggattacaggcatgagccactacacccagccgatttttcctttttgattaaagatgctattacaatgtaaatatttcttacacagaaagtcacagcacatgtgcccattgatacaaggctgctgaggcctggtctccagttggaaatataattaagggtggcaaggactggagtcagttggagagtgcatagccagtctgtgaagacaactgccagatactggcaatactccagcctggtgacagagtgagactctgtctcnnnnnnnnnngtttcaatgtttactcctagagaagccaaaaatccagatttgtatatgaaatcttaccattttaaaagattggcagctaattatttttttaaaaagctgtgcagtgtgatgtgtcccaaacggactggctcatgggtggccacgtcacaacctctgatctcagaccgtgcatgccttgtcctcttaagacaactcctgtggcaccgtttctccctccacagggccaaagccatagtgtccggtcccaaggacaaggctcttccagtgctaggagaggtatgagcagcctctcacctgtgagctgtggggatcacaaggctgcctgcctcagtcttggagtcctgttgggtgaatgaggcagatgggaaagagcctcaccagcagctgcttttggagcaggggtccaaggaagagagggtggcctcgacatcaaactgcctggatttttctaccaccctgttacatcataacaacttctgaaacacacaccagccctgagttctgggctcatttgaagcctggaatagcaataaatctttttaacttgcggacagttaaaaa

SEQ ID NO: 259234 - DNA, 864 bp, Homo Sapiens
  misc_feature (353)..(353): n is a, c, g, or t
gaaagatgcagccactcctgcttctgctggcctttctcctacccactggggctgaggcaggggagatcatcggaggccgggagagcaggccccactcccgcccctacatggcgtatcttcagatccagagtccagcaggtcagagcagatgtggagggttcctggtgcgagaagactttgtgctgacagcagctcattgctggggaagcaatataaatgtcaccctgggcgcccacaatatccagagacgggaaaacacccagcaacacatcactgcgcgcagagccattccgccaccctcaatataattcagcggaccatccagaattgacatcatgtttatttgcagctgnagcagaagagttcagacggaatcgaaacgtgaacccagtggctctgcctagagcccaggagggactgagacccgggacgctgtgcactgtggccggctggggcagggtcagcatgaggaggggaacagatacactccgagaggtgcagctgagagtgcagagggataaggcaagtgcctccgcatcttcgggttccctacgaccccccgaaggcagatttgtgtgggggaccggcgggaactggaaggctgccttcaagggggattccggaggccccctgctgtgtaacaatgtggcccacggcatcgtctcctatggaaagtcgtcaggggttcctccagaagtcttcacccagggtctcaagtttcctgccctggataaggacaacaatgagaagcttcaaactgctggatcagatggagacccccctgtgactgactcttcttctcggggacacaggccagctccacagtgttgccagagccttaataaacgtccacagagtataaat

SEQ ID NO: 259235 - DNA, 748 bp, Homo Sapiens
  misc_feature (121)..(129): n is a, c, g, or t
  misc_feature (716)..(716): n is a, c, g, or t
  misc_feature (736)..(736): n is a, c, g, or t
gaaaaaaggaaagccggacaaaactgacacattacgtttaagtgaataatgaaatgagttccactgaattaccatcagaaactgtgggtctagaggatagaagagtaaaacttttagattnnnnnnnnngccagttaattaatccaaaaggaaggaagaaaaagagaggcagagaaacgaaaaacaggatgaacagaaaacaaatgataatatggtacacctaaacccaatcatattataattatgttacaattcaatggattaacactgcaatgaaaaggaagaaattgtcagaatggattataaacaacaggatccgaatatatacgctttaaatatacagtaacctatgtgctgaaattaaaagaatgagaaagttatactatgcaaaatataaccattaaagggaagaattggctatactgacatcataaaggtacatttcaagccaacaaaatattatagttaaaaatgacattttataatgagaaagggttccatttatcagaaagacataacaatcataaatatgcatacaactaataaaacagctttaaaacccatgaagcaaaaattgaggaaaactcaaaggagaaacaaaaatctacaattatgtgagagattttaacactcctttctaaagcaattgatagaaaaacttaacacaatcattaaaggccataaaagatctgaatactatcaagtgcaatgacatnacctaatattgatatttaangagcactctgcc

SEQ ID NO: 259236 - DNA, 595 bp, Homo Sapiens
gccgtactgcctgatacacagtcatgttatacggcagcaaatgttctccaatataaaactgcagcctgtgtcttacatttcctgaatttaggaactgagcagccagagactcatctatttcctcatctgatccatcgtcatcgctgtcttcatcatcttctcttactcttccataccctctaactacaaggtatctctcgatggcttgtaccaaagccagagggtcaatcttgacaggtccacccttccactgcttcacatttgcacagtctggatgcctttgtaactggcattttaattgatgtgtgttgaaaaattttaaagcctgtgatcctctgttgagagaaaagctgcctcctgtcccatttccactagggaaatcatgtactttgactggaaattgttccatctggctgaggcagttgttcatcttgtgaactaatgccaacaaaggtgcattacccactggttccactcttccaatgggctcttctccaggaagtggagaagaaaaaaatacatgaagaaatcgctttaatctgatctctctgctcacagcatccttttcacttttagatgtcaaataaagcaacag

SEQ ID NO: 259237 - DNA, 739 bp, Homo Sapiens
  misc_feature (694)..(694): n is a, c, g, or t
  misc_feature (716)..(716): n is a, c, g, or t
aagactctcaactttctagcttacagagatagataaaaggtaaatccattcactgtggcaggaaatcctggagtcccagatttaaagagatcacaggttcaattggaggagcttttaagcttagaagtggaaatgtcaggtagacagttaaatatacagactggagttcagaggagaaggttatgaagaaaatacatttgggggtcaatattgttaatagaaccattaggtacaaaaatcaatcagccgactacttaatgagctcctacagtactacaggcactgtttagattttgtggacacagctgtgaacaaaataaacatgtcctcatttatcctatattctatttcaggaatactgccaacgaatcagtagtaacatcaactactagtactacagtgaaagtgacatctcaggtgagacctaaacattaagaaaatgctaggcataggaagagtagacgagaagagcattccaagcagaaataacagttagagcttttagcaaggacaagcttatcatatctgaagaacagttcaaagaggccagtatagatggactgtagtaaatgcagactggtataagacagggtcagagaagcagccaaggactagattatgtagtgtctaagcagtgagtgattttacgtattttaaaaagaatttatagactactctagctgctctgtggatnaaattgtaaggtggcaaaaatnaaagtggggagactactatgtcc

SEQ ID NO: 259238 - DNA, 663 bp, Homo Sapiens; identical to SEQ ID NO: 13272

SEQ ID NO: 259239 - DNA, 595 bp, Homo Sapiens
  misc_feature (60)..(60): n is a, c, g, or t
aagacggggattggccatcgcttccggaagttgtgagctttgtttcggagcgggacctcnccgagacgcactgggggccgagatgaatcctgcttatctgtgaaatgcagttaacacatcagctggacctatttcccgaatgcagcgattgttgatccatttcagatacttgtggcagctaaacaaagcagttcacctctacaaactggcgaaaaatgaagacaagaactctatctactgaaattattttcaacctttccccaaataacaatatttcacgcaggctttgacaaaaatttggtatctcagcaaatgacacttcaattctaattgtttacattgaagagggagcaaaaacaaataaatcaagaatacctaatatctcaagtagaacggtcatcaggtttctctgaaaaatcttcctgaaataatgaatattacagaagtcaaaaagatatataaactctcttcacaagaagaaagtatcgggacattattggatgctatcatttgtagaatgtcaacaaaagatgttttatgaaatgtcagaaatattaacaaaaattctcagcattaaagaaaacattgattttcc

SEQ ID NO: 259240 - DNA, 2433 bp, Homo Sapiens
  misc_feature (2168)..(2180): n is a, c, g, or t
  misc_feature (2212)..(2212): n is a, c, g, or t
  misc_feature (2404)..(2404): n is a, c, g, or t
tgtacggccggaatttcgggatatcgtcgacccacgcgtcgccttataacagtgatactgtgcttgtccaccgagttcacaggttatttagagcgtcatggtcttatcaacttcggcatctataagaggataaaacccctaccaactaaaaagacaggaaaggtaattattataggctctggggtctcaggcttggcagcagctcgacagttacaaagttttggaatggatgtcacacttttggaagccagggatcgtgtgggtggacgagttgccacatttcgcaaaggaaactatgtagctgatcttggagccatggtggtaacaggtcttggagggaatcctatggctgtggtcagcaaacaagtaaatatggaactggccaagatcaagcaaaaatgcccactttatgaagccaacggacaagctgttcctaaagagaaagatgaaatggtagagcaagagtttaaccggttgctagaagctacatcttaccttagtcatcaactagacttcaatgtcctcaataataagcctgtgtcccttggccaggcattggaagttgtcattcagttacaagagaagcatgtcaaagatgagcagattgaacattggaagaagatagtgaaaactcaggaagaattgaaagaacttcttaataagatggtaaatttgaaagagaaaattaaagaactccatcagcaatacaaagaagcatctgaagtaaagccacccagagatattactgccgagttcttagtgaaaagcaaacacagggatctgaccgccctatgcaaggaatatgatgaattagctgaaacacaaggaaagctagaagaaaaacttcaggagttggaagcgaatcccccaagtgatgtatatctctcatcaagagacagacaaatacttgattggcattttgcaaatcttgaatttgctaatgccacacctctctcaactctctcccttaagcactgggatcaggatgatgactttgagttcactggcagccacctgacagtaaggaatggctactcgtgtgtgcctgtggctttagcagaaggcctagacattaaactgaatacagcagtgcgacaggttcgctacacggcttcaggatgtgaagtgatagctgtgaatacccgctccacgagtcaaacctttatttataaatgcgacgcagttctctgtacccttcccctgggtgtgctgaagcagcagccaccagccgttcagtttgtgccacctctccctgagtggaaaacatctgcagtccaaaggatgggatttggcaaccttaacaaggtggcgttggggtttgatcgggggttctgggatccaagtgtcaatttgtttcgggcatgttggcagtacgactgccagcaggggttgagctcttcctcttctggaacctctataaagctccaatactgttggcactagtggcaggagaagctgctggtatcatggaaaacataagtgacgatgtgattgttggccgatgcctggccattctcaaagggatttttggtagcagtgcagtacctcagcccaaagaaactgtggtgtctcgttggcgtgctgatccctgggctcggggctcttattcctatgttgctgcaggatcatctggaaatgactatgatttaatggctcagccaatcactcctggcccctcgattccaggtgccccacagccgattccacgactcttctttgcgggagaacatacgatccgtaactacccagccacagtgcatggtgctctgctgagtgggctgcgagaagcgggaagaattgcagaccagtttttgggggccatgtatacgctgcctcgccaggccacaccaggtgttcctgcacagcagtccccaagcatgtgagacagatgcattctaagggaagaggcccatgtgcctgtttctgccatgtaaggaaggctcttctagcaatactagatcccactgagaaaatccaccctggcatctgggctcctgatcagctgatggagctcctgaatttgacaaaggagcttgcctcctttgaatgacctagagcacagggaggaacttgtccattagtttggaattgtgttcttcgtaaagactgaggcaagcaagtgctgtgaaataacatcatcttagtcccttgggtgtgtggggtttggnnnnnnnnnnnnnaaattttgaagaataaaacttcatattccccncacggaagaccaaccacacgacagcgacacgaacaaagcaacaagcacaacacaggcaacccccacacatctatggtgttgagattcctaccccccaatcaaacactaatcacgtgactccgggcgcctgactcaagaattcaccttcatcctctttacgcctgagccaacaagcccaacatacatataccnacatctcgtgcgctcgctcacgccgcccg

SEQ ID NO: 259241 - DNA, 456 bp, Homo Sapiens
  misc_feature (37)..(37): n is a, c, g, or t
  misc_feature (53)..(53): n is a, c, g, or t
  misc_feature (66)..(66): n is a, c, g, or t
ccccatcaagctgaatcaggaacccccagatgccccnggtggattttccccantgggatcctaatnattgcctaaaaagagccttcccttaacatggccagaaacaggcacatgggcctccttccccttagaatgcatctgtctcacatgccttggggaactgctgtgcaggaacacctggtgtggcctggcgaggcagcgtatacatggcccccaaaaactggtctgcaattcttacccgcttctcgcagcccactcagcagagcaccatgcactgtggctgggtagttacggatcgtatgttctcccgcaaagaagagtcgtggaatcggctattttaggggaaaaagagaaaattggcaggctgcacatatacctttattcttgtacttaaattgctaagtacttaaattgctgttgacctttttaaaggctgaccccccaaattactattca

SEQ ID NO: 259242 - DNA, 680 bp, Homo Sapiens
tggctactacccctgcacctgttcccctgctgtccccaggcttctctgcctgaatctgcctctctctgcctcttttctcctgtccctccaggagtctctctgcctcaaccactctctctgccccttcatctctctgagctggtgtgtctggtcctaccctctgtttggggagctgtctggctctgtcccccacctcttggccagcctgtgtctcctgtctatgactgagcccaattgcctgttgcctttctgcaggtgtttccacgagcctatccctacccacctgtttgtttctgagtctgcctgtgtgtccctttctccctgtctctgcctgtcttccaagatcccctagcatcccctcctcccgcccatctgtctttctgtcccttctgtggtctgtctgttcctgtgctgtttctcatgcctgctttctttgtaacttcagttctcctactctctctctgtctcctctctgcacctttttctgccatccatcccatcctgctgtccgtatgctctgtgagtccatcccctctgtctgcctgtcactctctctagctgtgggtctacaccctcaatctttcaggccatttcccccaccatcaacacacaaacaaaccgctgtctccctccaagtgggtccagatagggggcgccccttctccacctcttcccccgcc

SEQ ID NO: 259243 - DNA, 1710 bp, Homo Sapiens
  misc_feature (1241)..(1245): n is a, c, g, or t
  misc_feature (1248)..(1327): n is a, c, g, or t
  misc_feature (1329)..(1330): n is a, c, g, or t
gctgggtggcgaattcggcacgaagcgcagagtggagtcaaaggcaaccagtgctcgctgcggtctctggggatcgggaccgcggcggcggcccgcgagcgggatgttccggggcttgagcagttggttgggcttgcagcagccggtggcaggcggtgggcagcccaatggagatgctccacccgagcagccgtccgagacggtggctgagtctgcggaggaggagctgcagcaagcgggagaccaggagctcctccaccaggccaaagacttcggcaactatttatttaactttgcatctgctgccacaaaaaagataactgaatcagttgctgaaacagcacaaacaataaagaaatccgtagaagaaggaaaaatagatggcatcattgacaagacaattataggagattttcagaaggaacagaaaaaatttgttgaagagcaacatacaaagaagtcagaagcagctgtgcccccatgggttgacactaacgatgaagaaacaattcaacaacaaattttggccttatcagctgacaagaggaatttccttcgtgaccctccggctggcgtgcaatttaatttcgactttgatcagatgtaccccgtggccctggtcatgctccaggaggatgagctgctaagcaagatgagatttgccctcgttcctaaacttgtgaaggaagaagtgttctggaggaactacttttaccgcgtctccctgattaagcagtcagcccagctcacggccctggctgcccaacagcaggccgcagggaaggaggagaagagcaatggcagagagcaagatttgccgctggcagaggcagtacggcccaaaacgccacccgttgtaatcaaatctcagcttaaaactcaagaggatgaggaagaaatttctactagcccaggtgtttctgagtttgtcagtgatgccttcgatgcctgtaacctaaatcaggaagatctaaggaaagaaatggagcaactagtgcttgacaaaaagcaagaggagacagccgtactggaagaggattctgcagattgggaaaaagaactgcagcaggaacttcaagaatatgaagtggtgacagaatctgaaaaacgagatgaaaactgggataaggaaatagagaaaatgcttcaagaggaaaattagctgttcctgaaatagaagaataatccttaacagtctgcaaactgacattaaattctagatgttgacaattactgaaaannnnnaannnnnnnnnnnnnnnnnnnnnnnnnnnnnnnnnnnnnnnnnnnnnnnnnnnnnnnnnnnnnnnnnnnnnnnnnnnnnnnnannccttgttcggccgcctccggccctcaaaaaacttttctaaacctttctttgggccgcgggggcccaataaggaaagggaactggggccataccgggttcccaaggaaaaaccgggcccataactaggggctggattcccccccaataaaaaaacccccgggggggaaacccaaggggtttttaaaacaattcccaaagggggatttctggagggccctttcctgaagatctattccacggggagtccccaagcgagactctccatatattatatttaaccccccccgccctgtggcccttctattgcgaaagaacgtgggtgggaatttcctttaaaaaacattttgggccgcgaaatggggaaagccccttcaaaaaac

SEQ ID NO: 259244 - DNA, 1024 bp, Homo Sapiens
aaaacatggccaggctggtaccggtccggaatttcgggatattgtcgaccacgcgtcgataaaaggagatatggacatttccgttcctaaactggagggagatctgaaaggtcccaaagtggatgtcaaaggccctaaagtgggcattgacactcctgatattgacattcatggtccagaagggaaactgaagggccccaaatttaaaatgcctgacttacacctcaaggcaccgaagatctctatgcctgaagttgacctgaatctgaaaggtccaaaggtgaagggcgacatggacatttctctgcccaaagtggaaggcgacctcaagggccccgaagttgacatcaaggaccccaaagtggacattaatgccccagatgtggacgttcaaggcccagactggcacctaaaaatgcccaaagtgaaaatgccaaagttcagcatgcctggcttcaaaggagagggcccagatggggatgtgaacctgcccaaggctgacattgatgtctcaggacccaaagtggacattgaaggccctgatgtgaacatcgaaggaccagaggcgaaacttgaaagggccccaagttcaagatgccagagatgaacatcaaagcccccaagatctccatgcctgatattgacttaaacctgaaaggacccaaagtgaagggcgatgtggatgtttaccttcctaaagtggaaggtggactgaaggggccgaagctgaattaaggggccaaaggtgggcctcaaaccccggtgtggtgttcatgggccagactgcacggacattgccaggagaattgcccatttcgactgctggttcacgcaagtcccattggatttgcctgcagggccatgatgttcgaccagggggggattacaagagacaggccagcaactaggccctgagtcggataatacacaaccagtggggcgtgagcacaaaagatttccgatgtgagcaatatatccgcatgctcgcttctcgatatgacacggcccgtggcgtttactaata

SEQ ID NO: 259245 - DNA, 2654 bp, Homo Sapiens
  misc_feature (1964)..(1984): n is a, c, g, or t
  misc_feature (2088)..(2096): n is a, c, g, or t
  misc_feature (2213)..(2213): n is a, c, g, or t
  misc_feature (2360)..(2360): n is a, c, g, or t
  misc_feature (2372)..(2372): n is a, c, g, or t
  misc_feature (2423)..(2423): n is a, c, g, or t
  misc_feature (2520)..(2520): n is a, c, g, or t
  misc_feature (2522)..(2522): n is a, c, g, or t
  misc_feature (2552)..(2552): n is a, c, g, or t
aattcagaaactgagaggattaagatgactactacatggatgaaaatgaagcagaatctgagacagacaagcaagcagccctggcagggaatgacagaaacatagatgtttttaatgttgaagatcagaaaagagacaccataaatttacttgatcagcgtgaaaagcggaatcatacactctgaattgaactggaatcacatatttcacaacagggccgaagagatgactataaaatgttcatgagggactgaatactgaaaactgtgaaatgtactaaataaaatgtacatctgaagatgattattgtgaaattttagtatgcactttgtgtaggaaaaaatggaatggtcttttaaacagcttttggggggtactttggaagtgtctaataaggtgtcacaatttttggtagtaggtatttcgtgagaagttcaacaccaaaactggaacatagttctccttcaagtgttggcgacacgggcgcttcctgattctggaatataactttgtgtaaattaacagccacctatagaagagtccatctgctgtgaaggagagacagagaactctgggttccgtcgtcctgtccacgtgctgtaccaagtgctggtgccagcctgttacctgttctcactgaaaagtctggctaatgctcttgtgtagtcacttctgattctgacaatcaatcaatcaatggcctagagcactgactgttaacacaaacgtcactagcaaagtagcaacagctttaagtctaaatacaaagctgttctgtgtgagaattttttaaaaggctacttgtataataacccttgtcatttttaatgtacaaaacgctattaagtggcttagaatttgaacatttgtgggtctttatttactttgcttcgtgtgtgggcaaagcaacatcttccctaaatatatattaccaagaaaaagcaagaagcagattaggtttttgacaaaacaaacagcccaaaagggggctgacctggagcagagcatggtgagaggcaaggcatgagagggcaagtttgttgtggacagatctgtgcctactttattactggagtaaaagaaaacaaagttcattaatgtcgaaggatatatacagtgttagaaattaggactgtttagaaaaacaggaatacaatggttgtttttatcatagtgtacacatttagcttgtggtaaatgactcacaaaactgattttaaaatcaagttaatgtgaattttgaaaattactacttaatcctaattcacaataacaatggcattaaggtttgacttgagttggttcttagtattatttatgggaaataggctcttaccacttgccaaataactgggccacatcattaatgactgacctcccagtaaggctctctaaggggtaagtaggaggatccacaggatttgagatgctaaggccccagagatcgtttgatccaaccctcttattttcagaggggaaaatggggcctagaagttacagagcatctagctggtgcgctggcacccctggcctcacacagactcccgagtagctgggactacaggcacacagtcactgaagcaggccctgtttgcaattcacgttgccacctccaacttaaacattcttcatatgtgatgtccttagtcactaaggttaaactttcccacccagaaaaggcaacttagataaaatcttagagtactttcatactcttctaagtcctcttccagcctcactttgagtcctccttggggttgataggaattttctcttgctttctcaataaagtctctattcatctcatgtttaatttgtacgcatagaattgctgacaaataaaatgctctgttcaacttaaatatcaatgtcttaatacccgcacacaaatacatctgtaaacgaaatcatttctctaaaagggaacaaaatatcataaatatgttttacttacctcccacacnnnnnnnnnnnnnnnnnnnnnacccccgcccactcctgaaatctgccttttgcctttatccccgggtccgaaccgccatctgtacggaagccaagtgttatcaatataactcccccaatatgctnnnnnnnnnggtatataccccgcccacccacctcaagcaacgctaattaggctcccagccgctatttatattcccatagtaacacagcgccacgccgcgcccctacaagatctaacattgggacgntctggagacaaccattttggcgcgattacacagagagatacagcaacttcacttctcgccagcggcgccgctctttctctgtttctttcctccagacgccacctatcatatttacaccatgatcaacacagattgagaccgccctcntgttctcgcgcnctcaacccctaaaccacctccatgtgttgtgatgctccaaccgccccacanactggtgttctcctctatgacacgcttttgacggcgccggctcatctctgtctctcctcactctccgctatgatgattcaaggcggaaaacgatgtntngtatatcaccagctccgctctcctctcctntgtacgtcgccacactgcgtactgcgcgtgtttatagcagtaccatatcgacaccactccagcagtcttctcgacccacataccagagtatacactacctcg

SEQ ID NO: 259246 - DNA, 577 bp, Homo Sapiens
  misc_feature (247)..(285): n is a, c, g, or t
tgacttgagttggttcttagtattatttatggtaaataggctcttaccacttgcaaataactggccacatcattaatgactgacttcccagtaaggctctctaaggggtaagtaggaggatccacaggatttgagatgctaaggccccagagatcgtttgatccaaccctcttattttcagaggggaaaatggggcctagaagttacagagcatctagctggtgcgctggcacccctggcctcacannnnnnnnnnnnnnnnnnnnnnnnnnnnnnnnnnnnnnntgaagcaggccctgtttgcaattcacgttgccacctccaacttaaacattcttcatatgtgatgtccttagtcactaaggttaaactttcccacccagaaaaggcaacttagataaaatcttagagtactttcatactcttctaagtcctcttccagcctcactttgagtcctccttggggttgatgataggaattttctcttgctttctcaataaagtatctattcatctcatgtttaatttgtacgcatagaattgctgagaaataaaatgttctgttcccctttaaaaa

SEQ ID NO: 259247 - DNA, 429 bp, Homo Sapiens
  misc_feature (108)..(146): n is a, c, g, or t
taaggccccagagatcgtttgatccaaccctcttattttcagaggggaaaatggggcctagaagttacagagcatctagctggtgcgctggcacccctggcctcacannnnnnnnnnnnnnnnnnnnnnnnnnnnnnnnnnnnnnntgaagcaggccctgtttgcaattcacgttgccacctccaacttaaacattcttcatatgtgatgtccttagtcactaaggttaaactttcccacccagaaaaggcaacttagataaaatcttagagtactttcatactcttctaagtcctcttccagcctcactttgagtcctccttggggttgataggaattttctcttgctttctcaataaagtctctattcatctcatgtttaatttgtacgcatagaattgctgagaaataaaatgttctgttcaactt

SEQ ID NO: 259248 - DNA, 468 bp, Homo Sapiens
  misc_feature (137)..(175): n is a, c, g, or t
agtaggaggatccacaggatttgagatgctaaggccccagagatcgtttgatccaaccctcttattttcagaggggaaaatggggcctagaagttacagagcatctagctggtgcgctggcacccctggcctcacannnnnnnnnnnnnnnnnnnnnnnnnnnnnnnnnnnnnnntgaagcaggccctgtttgcaattcacgttgccacctccaacttaaacattcttcatatgtgatgtccttagtcactaaggttaaactttcccacccagaaaaggcaacttagataaaatcttagagtactttcatactcttctaagtcctcttccagcctcactttgagtcctccttggggttgatgataggaattttctcttgctttctcaataaagtctctattcatctcatgtttaatttgtacgcatagaattgctgagaaataaaatgttctgttcaacttaaaaaaa

SEQ ID NO: 259249 - DNA, 701 bp, Homo Sapiens
gggaaaaccaaatcccattcctgcaccccagtccaataagcagataccacttaagataggagtctaaactccacagaaaaggataataccaagagcttgtattgttaccttagtcacttgcctagcagtgtgtggctttaaaaactagagatttttcagtcttagtctgcaaactggcatttccgattttccagcataaaaatccacctgtgtctgctgaatgtgtatgtatgtgctcactgtggctttagattctgtccctggggttagccctgttggccctgacaggaagggaggaagcctggtgaatttagtgagcagctggcctgggtcacagtgacctgacctcaaaccagctttaaggctttaagtcctctctcagaacttggcatttccaacttcttcctttccgggtgagagaagaagcggagaagggttcagtgtagccactctgggctcatagggacacttggtcactccagagtttttaatagctcccaggaggctgatattattttcagtgctcagctgaaataccaaccccaggaataagaactccatttcaaacagttctggccattctgagccctgcttttgtgattgctcatccattgtcctccactagaggggctaagcttgactgccctaagcaggcaagccagaaatgggggatcggtcaacaataatatgccaaaaatcac

SEQ ID NO: 259250 - DNA, 1003 bp, Homo Sapiens
aattcgcgccaaggccttttctttgacatggtaggcctatttgcctaagaagaatggattgtacctgagcctggttctggggaacgtcaacgtcacgctcctgagcaagcaggctaagtttgcctacaaggacgagtatgagaagttcaagctctacctcaccatcatcctcatcctcatctccttcacttgccgcttcctgctcaactccagggtgacagatgctgccttcaacttcctgctggtctggtactactgcaccctgaccatccgggagagcatcctcatcaacaacggctcccggatcaaaggctggtgggtgttccatcactacgtgtccaccttcctgtcgggagtcatgctgacgtggcccgacggtctcatgtaccagaaattccggaaccaattcctctccttttccatgtaccagagcttcgtgcagtttctccagtactactaccagagcggctgcctctaccgcctgcgggcgctgggcgagcggcacaccatggacctcactgtggagggcttccagtcctggatgtggcggggcctcaccttcctgctgccttttcttttctttggacacttctggcagctttttaacgcgctgacgttgttcaacctggcccaggaccctcagtgcaaggagtggcaggtgcttatgtgcggctttcccttcctcctccattttcctcggcaatttcttcaccaccctgagggttgtgcaccacaagtttcacagtcagcggcacgggagcaagaaggattgaggctgggccttcccctgccggcccagaggggcttctgtcctgtgtgttgggggagggggatggggaggcgccccctcgagtgtgcgtgtatcagggggtctcttctattctcccttgggttttatgggcgctgtggggccctgaaggaagacctgggcccagtgccctcaataaagagaggcccagaacagcgacaacaagtgaacccaccgcccgcgctgacatcacac

SEQ ID NO: 259251 - DNA, 1517 bp, Homo Sapiens
  misc_feature (1172)..(1172): n is a, c, g, or t
  misc_feature (1468)..(1476): n is a, c, g, or t
aggtagcgaggcctgggtggcgaattcggcacgaggggagcctcgggtgggccggggttgctgcgccgtcctccactactggctactggcgctgcagccatgcagcccccgcccccgggcccgctgggcgactgcctgcgggactgggaggatctacagcaggacttccagaacatccaggagacccatcggctctaccgcctgaagctggaggagctgaccaaacttcagaacaattgcaccagctccatcacgcggcagaagaagcggctccaggagctggccctcgccctgaagaaatgcaaaccctccctcccagcagaggccgagggggccgcacaggagctggagaaccagatgaaagagcgccaaggcctcttctttgacatggaggcctatttgcctaagaagaatggattgtacctgagcctggttctggggaacgtcaacgtcacgctcctgagcaagcaggctaagtttgcctacaaggacgagtatgagaagttcaagctctacctcaccatcatcctcatcctcatctccttcacttgccgcttcctgctcaactccagggtgacagatgctgccttcaacttcctgctggtctggtactactgcaccctgaccatccgggagagcatcctcatcaacaacggctcccggatcaaaggctggtgggtgttccatcactacgtgtccaccttcctgtcgggagtcatgctgacgtggcccgacggtctcatgtaccagaaattccggaaccaattcctctccttttccatgtaccagagcttcgtgcagtttctccagtactactaccagagcggctgcctctaccgcctgcgggcgctgggcgagcggcacaccatggacctcactgtggagggcttccagtcctgggatgtgggcggggcctcaccttcctgctgcctttttctttttctttggacacttcctggccagctttttaacgcgctgacgttgttcaacctggcccaggaccctcagtgcaaggagtggcaggtgcttatgtgcggctttcccttcctcctccttttcctcggcaatttcttcaccaccctgagggttgtgcaccacaagtttcacagtcagcggcacgggagcaagaaagatttgaggctgggccttcccctgccggcccagaggggctntctgtcctgtgtgttgtgggaggggatgggaagcgcccctcgagtgtgcgtgtatcaggggggctcttctattctcccttgggttttatggggcgctgggggcccggaaaggaagacctgggcccagtggccctcaataaaaaagaaggcccggaataggaacaacctaaaccgaggattaacttacgacactgccaaagaaaaaagaacccctccgaggcttcttttgtggggggggcggaaaaaaggaggaatgaaatgggccccgggccataactggtttcccgcaaccaacnnnnnnnnngaaaaaagggggaaaattgggcggagtcccccaaaagaggg

SEQ ID NO: 259252 - DNA, 698 bp, Homo Sapiens
gtttaaaatccgccttccagatgattaaagtggctgtcctgatattttctcccccatcagagtcatctttgcccttgggatttccatgcctttatcaatatcccagtggaatggttttccatcgggtttgcctgacctgatgctgctgtttggtgacatccgccagggcatcttctatgcgatgcttctgtccttctggatcatcttctgtggcgagcccatgatggtaagagccgccgggagggcagacgtctgtaccagctgctctgtgcaggctgccaagctgacacctgcccccctttgcctctagtcagcagtgggtgagccagaataaactagtagttacaagtgggaactctggaggcagaccctctggttcacattcctgcttcaccacctgctgaccagctgagtggctttaggcaaatgacattatcactctgaatctcgggtccctcatctataaaatgggatgtaaagacctactgcatggggttttcatgagaattaaatgacagaatgtgagtaacttaagataaacacacacattctaatgattagtattatttcttgcccttgagcttgagtttcttgtctgctggcttctgccctgcttgtcctgtccccaggaatacaggttaaccatcaaagaatgtgggcctggctctttccacgccggccgtttctcttaagtccga

SEQ ID NO: 259253 - DNA, 909 bp, Homo Sapiens
aaaacatgagcaccaagaagctgtgcattgttggtgggattctgctcgtgttccaaatcatcgcctttctggtgggaggcttgattggagaaaatgcagaagtctccatggacgtttccctggcttaccgtgatgacgcgtttgctgagtggactgaaatggcccatgaaagagtaccacggaaactcaaatgcaccttcacatctcccaagactccagagcatgagggccgttactatgaatgtgatgtccttcctttcatggaaattgggtctgtggcccataagttttaccttttaaacatccggctgcctgtgaatgagaagaagaaaatcaatgtgggaattggggagataaaggatatccggttggtggggatccaccaaaatggaggctacaccaaggtgtggtttgccatgaagaccttccttacgcccagcatcttcatcattatggtgtggtattggaggaggatcaccatgatgtcccgacccccagtgcttctggaaaaagtcatctttgcccttgggatttccatgacctttatcaatatcccagtggaatggttttccatcgggcttgactggacctggatgctgctgtttggtgacatccgacagggcatcttctatgcgatgcttctgtccttctggatcatcttctgtggcgaccacatgatggatcagcacgagcggaaccacatcgcagggtattggaagcaagtcggacccattgccgttggctccttctgcctcttcatatttgacatgtgtgagagaggggtacaactcacgaatcccttctacagtatctggactacagacattggaacagagctggccatggccttcatcatcgtggctggaatctgcctctgcctctacttcctgtttctatgcttcatggtat

SEQ ID NO: 259254 - DNA, 661 bp, Homo Sapiens
tgagccacctcaccaggccccgttgcaatcttactccacttcgttttcacagcagtcccgggacatgcccattattaggcctatttgatagatgatactgaggctgagtcgggggtcacaagccaaagccacaccgctagaagggctcaggacccagcccagctcccgtcctcttggtggcatcaagcttgtgtgatatgaggtcttatgtctgctcatgacagccttaaaagcaataaacagatacaacttccagcaacttcccactcagctgcaaggctgcgggggggtcctgcctcgagccataaggtgagcagctagccagtgccgggccagtgtggagaaggctgaattgcctgtgaagctggggttgcaggcaggaatattcatggagcccctgaccatgtactcacactgctcttcctcagttcagggttcttggatttgctcaagtccacccaaatatccctttacgattctcagggtcccactccttccagatccaatgccctaaactttacataagagttccggcaaggctgtgacttcaacttgtgttgtaactgcaacctgcagaatcaaatttagggttatgttttcagttgtatcagtcttacggctacaagatattaaagagattcttttctgggtattacaccgg

SEQ ID NO: 259255 - DNA, 434 bp, Homo Sapiens
  misc_feature (29)..(29): n is a, c, g, or t
  misc_feature (53)..(53): n is a, c, g, or t
  misc_feature (72)..(72): n is a, c, g, or t
  misc_feature (83)..(83): n is a, c, g, or t
accctccatatccaacaacaaagcttgangccccacccaagaggaacgggaanctgggctggggtccctganccccttcctancgggtgtgggctttggccttgtgacccccccgactccagccctcagtatccatcctatccaaataggccctaataatgggcatgtcccgggactgcctgtgaaaaacgaagtggagtaagattgcaacggggccctggtgaagggtgtcacgccctggcccaccaccggtctaatttcaacactgcaagacaatgattccatcttgctgttggaacattcttctcatgtttgacaccgttccaaggcaccagctttgaactaaagatacacatatcttttatttaaagtacagcagagctaaatgaacactggcaagtatctctttgtagactacagatgttccttaatta

SEQ ID NO: 259256 - DNA, 1395 bp, Homo Sapiens
  misc_feature (12)..(12): n is a, c, g, or t
  misc_feature (31)..(31): n is a, c, g, or t
  misc_feature (36)..(36): n is a, c, g, or t
  misc_feature (77)..(77): n is a, c, g, or t
  misc_feature (153)..(153): n is a, c, g, or t
  misc_feature (221)..(247): n is a, c, g, or t
ttggaaggcgcnccttttttcccccctgggngtatncattttgggggtatcattaggcctttctgggattttcctgncggagggtgaccggaaaagctttaaaattccacaccaaaccattaacaaaaaacccaagtgcaagagcattaccangaacagacttcctttgtgcaagttaaaatgatacaagtttacggttcaggaaaacaacctacttcttnnnnnnnnnnnnnnnnnnnnnnnnnnnggaaatattcagttgagctctgcatttttaaacacaaatatacagtcaaaaggaggcttaagggatttaaagcttgcaaaaattggtcccaacagccttcagactttttgctgcaggaaaattttttgcccaatggtcacagattaaagggatatctaatccccaagagcccttttgtcccaatatacttcctgtttgaaagtttaacccttacaagtaattgatatataagtgaataaaaatagcacatgtccaggcaaaaaagggcatgagctgggcctgagttgccacttaaaactgtcattcaatatcatagaaaatcctcaaaggctgcccagaaacagggccccaggcactgctgaacatgccagccaccaagtcaacaaccacccgacccaactgagcattaaacttcaagtatccaaggtgctacaatagctggtcctctaaaggacctcaggctgactctcagaagcccccacgtccaccccaccccattatacaaaaagtaaaaacattgctcatggtcattacaaaatacgggggtggaaagtgaggaataagagatatgctctctgaatacaccagccttacaaatacaaacaacgtctttaacattttgtacaactagaaggtgcatgaagctggtatccaagcaataatttcaaacgctttcttttctccccattctgtatcaaactggaaaatggttccgttgggttaacagtgtcattttaaaatgccataaattaaataagttagttcacattttttttcccccagcacttaagttacagttagtctctaatgtgcttttgaagcttgctttagcagttccaggtctcttctgcggacagtggtggctctgggacaaccatattcgtccagctgcaaaggtatgaattgttcaagcaccccaaggccctgtccagcaggactggtaaatagcttagtccatgatggtttaaagtttccactgaatcccaaaaatatggtactccctttgtcataaagatgagctggtttggctaatcccagaggtactagtaagtgtgaaatgtttaactgctttatttctcctcttgtgctcaacagaacaatggaccttggagggatgcctgtttttaaatactcttcaatgcgactga

SEQ ID NO: 259257 - DNA, 1003 bp, Homo Sapiens
  misc_feature (45)..(75): n is a, c, g, or t
  misc_feature (813)..(838): n is a, c, g, or t
tccaataatatatttaataggtaagatctcattcatcaatatacnnnnnnnnnnnnnnnnnnnnnnnnnnnnnnnctaactttgattaagacatgtgcccttagtaagggcattcacaattagaaaggtttatcggtagcactttgaggtagcatattttgtaaagtcacagggctgctctgcagtttctcctggatacaaaggtagaggccatcagcctttgcccctggaagaggaaagtgaaattatctgtactcattgccagtgtcagcctgaacacactttctaccacccacccttggccatccctcctctacactttatgcgtcgggggtttagaacaacgtaaaggcattttgctgcttctttcctcttggtacggcagcatcccaggctgtggagccagttgcctcttgccgcatgtgattcaccagcaggagacgcatgcaccctgtggaaagggaagctgggcatcacagcatgctttttaattggctttaacatttcattaagtaagagtagactcatctcgctagcataggctctataaagaaggttcatttctgagtattctctccacgattctgacctctagaaagcgctcctttttttcctccctgggtgtaatcattttggggtatcaattaagctttctgggattttcctggcaggagggtgaacagaaaagctttaaaaaatccacacaaaacaataacaaaaaacccaagtgcaagagcaataccaagaacagacttcctttgtgcaagttaaaatgatacaagtttacggttcaggaaaacaacctacttcttnnnnnnnnnnnnnnnnnnnnnnnnnnggaaatattcagttgagctctgcattttaaacacaaatatacagtcaaaagaggctaaggattaaagctgcaaaaatggtcccaacagcctcagacttttgctgcaggaaaattttttgcccaatggtcacagattaaagggatatctaatccccaagagccctt

SEQ ID NO: 259258 - DNA, 546 bp, Homo Sapiens
cgttaatgaaaaatggattgtaactgctgcccactgtgttgaaactggtgttaaaattacagttgtcgcaggtgaacataatattgaggagacagaacatacagagcaaaagcgaaatgtgattcgaattattcctcaccacaactacaatgcagctattaataagtacaaccatgacattgcccttctggaactggacgaacccttagtgctaaacagctacgttacacctatttgcattgctgacaaggaatacacgaacatcttcctcaaatttggatctggctatgtaagtggctggggaagagtcttccacaaagggagatcagctttagttcttcagtaccttagagttccacttgttgaccgagccacatgtcttcgatctacaaagttcaccatctataacaacatgttctgtgctggcttccatgaaggaggtagagattcatgtcaaggagatagtgggggaccccatgttactgaagtggaagggaccagtttcttaactggaattattagctggggtgaagagtgtgcaatgaa

SEQ ID NO: 259259 - DNA, 501 bp, Homo Sapiens
  misc_feature (197)..(197): n is a, c, g, or t
tggctgttgtgagtcttcagcaccctcccatgtaccttatatccctctctgaaacagaacagctccaatagcaacaagctagttgttctgccagatgtttctatgtggattctgtaatgttcctccatacagttaaaacatcctaacttgtttttcaagctcactcaggcctacgccaaacgtttctgttttttttnaaccatgaggtttaatttatttttgtgataggagggatatttacatattttagtggaccacattttaagttggatggtgtgctctaaaatactgaaaaacaatagcccatatacctatgtatttgtttttgatgggttgtttactctgaaataaaatgtatggttttcttaaaaggaagttttaaagtacctattttgtgtcatcctgtattgaaaagaatgtcaagcttgttaaaatgacatgtaacaaaaatgtattttgatttgtatttcagaaactaaaaaataaaatgttgaaagattt

SEQ ID NO: 259260 - DNA, 441 bp, Homo Sapiens
ggcaactagaaaaataacaaaattagaatgaatacttaatatcctccttttaaatccataccaaaaacaagccccaaatatatttacaacgctggaaatgatgtgtactacttttatttaaaaaaataagagtaaaggaactaactagatgtatatggtgccaatttttaaaagtcttgcttaactccacaggtctcaaaatagctaataaagaaaccatgtctccaatcatttcaatacaagctgtaaaaatgccttaaaaatctcaggtctggcattacttccatttaaacgcatcaagataaaagttcactgaaacatcagctgccaccattactttaggaatctttatctgtttagggatttttcccctagactattatagccagtttgtcaatcaaaagtagcattcagtatgcttaactttcattatcaaaaaag

SEQ ID NO: 259261 - DNA, 527 bp, Homo Sapiens
  misc_feature (119)..(119): n is a, c, g, or t
aattgtgtcttacagtcaagtttgtagattttcataagccacaattttaaaagatgcagtaatcttccaacttccaatatttatccattcgttgtggacccacagattgcatctttaanttcataataagtttccttaactatcttatgtttctagtctttcaagcttagtgataaggtggaagcacaagaaaaatttcagtagaatacagtttttattttgtaaacactaatgtattaaacttgctatacattaaagcaaataatatatatttttatttgaattgtatatgtgaattggaagttataattagttgattttttcattttgttagaggtattttcactgaacaaggtcaattggttacctcagtattacagccaatatagtccaagggaccatttctccccgagtctcttacactttattgtgcgatgtccacgtttttgtgactcttcaagctgttggtgaggtgggacgaatgcacttgcttcctgtggcaataaagattttctgtgcctcaaaaa

SEQ ID NO: 259262 - DNA, 1450 bp, Homo Sapiens
  misc_feature (1254)..(1254): n is a, c, g, or t
tgtatgatatcgtcgacccacgcgtacgggtctgtcgagatgcttgtgatggtcatgagattggaaggatgctggccctggctctacttgatagaattgtctccgtggataaacagcagcagtggcttttgtatctttctaacagtggctacttgaaggtcctcgtagacagcttggtagaagatgaccgtactttgcagagcttactcaccccacagcctccccttttaaaagcactttatacttatgaatctaaaatggcatttctcacaagagtggcaaagatacagcagggtgcattagagctgctaagatcaggggtgattgtgagactagctcaatgccaagtctatgacatgcgcccagaaacggacccgcagagcatgtttggcatgagagaccctccaatgttcatccctaccccagtggatcgctaccgccagattctcctcccagctctccagctgtgccaggtcatcctcacatctagtatggcccagcacttgcaggcagcagggcaggtattgcagtttcttatttcacattctgataccatacaagcaattctgcgctgtcaggatgttagtgctgggtctttgcaggaattggctctgctgacaggaattataagtaaagcagcacttcctggaatattaagtgaacttgacgttgatgtaaatgaagggtctctaatggagctacagggacatatttggaagattccagcgccagtgcttaggactactaagtcgctttggtggctctgacagactgcgtcagtttaaatttcaagacgataatgtggagggagataaagtaagcaagaaagatgagattgaactggctatgcagcagatttgtgccaatgtaatggaatattgccagtcactcatgttacagagttcccctaccttccagcatgctgtgtgtctcttcactcctaggcctttcagaaacagttaatagagatggaccgcggcaagatacccaagctccagtggttccatactggcgcctgcctggtttaggcattatcatctacctgctgaaacagagtgctaatgatttcttcagctattatgacagtcatcgacagagtgtcagcaagctacaaaatgtagagcagcttcccccagatgagataaaagagttgtgtcagtctgtgatgcctgctggtgttgataaaatctccactgctcagaaatatgttctagcaagacggcgcttggtgaaggtgatcaacaatcgagctanactgctttccctttgttcttttatcatagagacctggctatttattctttggcgccatctggagtactacttggtacattgcatgcccccgggattcccagaattccttattttgcctcgagaaaccttgtttaaaacccaaaaaaattgcaaaatttcctttcccctcaaaaaaccatctttgaatttttaaaaa

SEQ ID NO: 259263 - DNA, 711 bp, Homo Sapiens
aatgtagagcagcttcccccagatgagataaaagagttgtgtcagtctgtgatgcctgctggtgttgataaaatctccactgctcagaaatatgttctagcaagacggcgcttggtgaaggtgatcaacaatcgagctaaactgctttccctttgttcttttatcatagagacctgcctatttattctttggcgccatctggagtactacttgttaccattgcatgcccacggattctcaagattccttatttgcctcgagaaccttgtttaaaagcagaagactgcaagattccttcgcctcagaaaccaatctagattttagaagtgggctggctatagtgagccaacatgatttagaccagcttcaggctgatgcaatcaacgcttttggagaatcactacaaaagaaacttctggacattgaaggattatattcaaaagttcgatctcgatatagtttcatacaggctcttgtcagacgtatccgtggcctcttgaggatatcaaggaactgagagcccgtgcttatgctcttctatgagagagatgaattggggagaattgtctccattttatagattagtttctttctaaattatgaccaaaaatattttgctatttctttctttgtatatggacatcttttctgtaaacttcttcccctagttccatcctcactagtaaaaaataaatactttttaaaaaaaca

SEQ ID NO: 259264 - DNA, 1549 bp, Homo Sapiens
acagagcgctagtccttcggcgagcgagcaccttcgacgcggtccggggaccccctcgtcgctgtcctcccgacgcggacccgcgtgccccaggcctcgcgctgcccggccggctcctcgtgtcccactcccggcgcacgccctcccgcgagtcccgggcccctcccgcgcccctcttctcggcgcgcgcgcagcatggcgcccccgcaggtcctcgcgttcgggcttctgcttgccgcggcgacggcgacttttgccgcagctcaggaagaatgtgtctgtgaaaactacaagctggccgtaaactgctttgtgaataataatcgtcaatgccagtgtacttcagttggtgcacaaaatactgtcatttgctcaaagctggctgccaaatgtttggtgatgaaggcagaaatgaatggctcaaaacttgggagaagagcaaaacctgaaggggccctccagaacaatgatgggctttatgatcctgactgcgatgagagcgggctctttaaggccaagcagtgcaacggcacctccacgtgctggtgtgtgaacactgctggggtcagaagaacagacaaggacactgaaataacctgctctgagcgagtgagaacctactggatcatcattgaactaaaacacaaagcaagagaaaaaccttatgatagtaaaagtttgcggactgcacttcagaaggagatcacaacgcgttatcaactggatccaaaatttatcacgagtattttgtatgagaataatgttatcactattgatctggttcaaaattcttctcaaaaaactcagaatgatgtggacatagctgatgtggcttattattttgaaaaagatgttaaaggtgaatccttgtttcattctaagaaaatggacctgacagtaaatggggaacaactggatctggatcctggtcaaactttaatttattatgttgatgaaaaagcacctgaattctcaatgcagggtctaaaagctggtgttattgctgttattgtggttgtggtgatagcagttgttgctggaattgttgtgctggttatttccagaaagaagagaatggcaaagtatgagaaggctgagataaaggagatgggtgagatgcatagggaactcaatgcataactatataatttgaagattatagaagaagggaaatagcaaatggacacaaattacaaatgtgtgtgcgtgggacgaagacatctttgaaggtcatgagtttgttagtttaacatcatatatttgtaatagtgaaacctgtactcaaaatataagcagcttgaaactggctttaccaatcttgaaatttgaccacaagtgtcttatatatgcagatctaatgtaaaatccagaacttggactccatcgttaaaattatttatgtgtaacattcaaatgtgtgcattaaatatgcttccacagtaaaatctgaaaaactgatttgtgattgaaagctgcctttctatttacttgagtcttgtacatacatacttttttatgagctatgaaataaaacattttaaactgaaaa

SEQ ID NO: 259265 - DNA, 712 bp, Homo Sapiens
tcaaagtaatgcaaaataattagaagtaaaaactttgagagctctatttggaaaagcttcacatatccacacacaaatatgggtatattcatgcacagggcaaacaactgtattctgaagcataaataaactcaaagtaagacatcagtagctagataccagttccagtattggttaatggtctctggggatcccattttaagcactctcagatgaggatcttgctcagttgttagactatcattagtttgattaagcaactgaagtttacttcataaattactttttcctatatccaggactctgcctgagaaattttatacattcctccaaaggtaagtattctccaaaggtaagtatttgactattaacacaaaggcaatgtgattattgcataatgacactaaatattatgtggcttttctgttaggtttataagttttcaatgatcagttcaagaaaatgcagatcatatataactaaggttttacaccagtggttgacaaactatggcccacaggctaaacccagcctccccttgtttttataaataagttttattagaacataaccacactcattcatttctgtattgtgtatagctgctttcacgctatactagcagaactgaatagttgtgacagagactgtatggaccgtgaagcataaatatttaccatctggcccattctaaaaaaagtgtggcaattcc

SEQ ID NO: 259266 - DNA, 714 bp, Homo Sapiens
acacacacatacacacaactatcaaaaactccctttttttaaaattttggtacaaagattccaaaaagcttaataaaatgtaataagcacttagcacttaggacactgtagaactttctttggaagtttaattgcaatgaactttaaaacttgaaacttcaattcacttttctaaatgtgaatgcatacatttcatttgagctttatgctttcccagctaccaaagtaattgccatcttaaaaaacacaactgacctcatctccactgtcttttccaaacagcttccaagactatcttctgattctgactttccaaaaagcaggcattaatgttaactttcaaaaaatcatctagaagagaaacttggtcagttgtaatgggagttctgtccccaactcttgtcacctcgtaaaaagaacatccaggtaattcatggcattttccattattcattgggcagacacagcttagatttctctgccttccacaggagaatgtgcagatttccactaacttcaactggaactcaataatcagaatggctttaaaatttagttaaaatttaagcatgccatgaatttggaattttaatatattaattaggttattttcaaaacaagattctgtattataaatagaatttcaataaagatgttataaaaataagaacacatcttaggatctaattttgagattcgccaaaatttgagtcc

SEQ ID NO: 259267 - DNA, 621 bp, Homo Sapiens
cagcagcaaacaggtaaaatctgacatcgagaagcattattttaatgtaggaccagttataatcttaaagaactgactaggttctaaaataatagaactgagaaataggactgagaaatgaccaacatcaagtataatacggtacacttagcacttgtttctatagaaaacatttcaaatcaagttctttatgatgtgaaccagattttccaaatgcctaaaccacttctgagctttaagcaaggcctcagaaattcagcgggtgcctgggaggcttcattcacattcacctctaaggagaggctaaaagaggaatttccagatggcagctactggctcagaaccagggggtcccttgccaagtctgtctctatgtggctcccggaattgctgaggtctcacttctcagagggctttgatggaaaataaagcaacagctgacgctcacgagcctcggaactctggccaggctccctgaggggtgcatcctaggagaactgaaaaatgggattggagcttttgccttatccttacaccccaagttctttgtgtggcagaacatctatgaaaaaataataaaatattgtctgatatttccctttacttctggtattgcttttg

SEQ ID NO: 259268 - DNA, 1395 bp, Homo Sapiens
aggcatcgagtggctacacatacaggagagtggaaacataaaactgtacaaagtcacacttggcacacagttgatatagtcacagctggagctactagggctttctaagggcacactcagcagttcttaccaatgatgttttcttgcccagttgtgaataagccataggtagaagctcctggaggcttctggttgattgtcttgcagggctgtcttactagaactgggatcctagacctaacactgcaaataacagttctgtttctaacatctaacaccatgctactaatttaccctggactccggccaggcacagatttctatatattcacaatacaattcaggatattttgataatatttggaaacatgcctcaaacatgcaacttacttcagaggaaaaaaatagatatttttaattacaagcattcaaaagtcaagaacaaaaactgtgatccaaaccagtgtaagatcgtccatcccagcatacttaaaatgtttggtataaaaatactcacttttcttggttttattgttgacttctcttacgtttcgtttgaaaatatctccaaactgtacagaaatttcagaccatgcattcacaaataatacgctatttcttacaattatacagtgtaaaagagtaaaacatttttattaattatatttttttcttcgagaaaaacagatgtgtgatagagcctgtgacaaagtcttgaagggatcaaaactgggcaagggtttttcaagccagcatgctccagttttgtagaacagctagagaacagtagccaccactgaagattgcattaatacccacaagacagattgcagccgccatcacacacctgggacatagtattcagcagaactgacgggacttccagccctgagaagtagcctcggaggaggtagagcaggcgctaactccgctgggtacagagggtacggggcccacacttcagggctactggggtaaagtgcaggcactgtgagctcatatggctctctggcaatgaactgaggtacagtgttgggcagaggagtactggggtttggagtccctacgagtttgttcttggccatcttcgtgtttgccttagcaaactctagtcgtagtgtttgcggaatttcaggatcgaagcggatgccattcaaagcattctttgcagcctctgcttctgagcgactgtcaaactgacaaacctacaggctgtttagatgtgagctttataagagaaccctcatagcccttaaatggtctgaaaagcagatagagctcccgaggtttgatatccagaggaaggccactgaaaaatagggtccggacctcctcctcctgaaggttggcctccgctcggggtgttctccttctcggctttgccgccgttgttca

SEQ ID NO: 259269 - DNA, 918 bp, Homo Sapiens
  misc_feature (12)..(12): n is a, c, g, or t
  misc_feature (875)..(875): n is a, c, g, or t
caggtgatgcanttacagaaccaaatcgtggcacgtattgctgtgtctcctctcagagtgacagtcataaatactgtcaaacaataaagggagaatggtgctgtttaaagtcacatccctgtaaattgcagaattcaaaagtgattatctctttgatctacttgcatcatttccctatcttctcccccacggtatcctaaactttagacttcccactgttctgaaaggagacattgctctatgtctgccttcgaccacagcaagccatcatcctccattgctcccggggactcaagaggaatctgtttctctgctgtcaacttcccatctggctcagcatagggtcactttgccattatgcaaatggagataaaagcaattctgactgtccaggagctaatctgaccgttctattgtgtggatgaccacataagaaggcaattttagtgtattaatcatagattattataaactataaaacttaaggggcaaggagtttattacaatgtatctttattaaaaacaaaaggggtgtatagtgttcacaaactgtggaaaatagtgtaaggaactgtacattgtgagctcgggttatttttctcttgtaccatagaaaaatgtataaaaattatcaaaaagctaatgtgcagggatattgccttatttgtctgtaaaaaatggagctcagtaacataactgcttcttggagctttggaatattttatcctgtattcttgtttgaattcctcctctatttaagatatatacatggaatcgaagtgtttatgtaatagttctatccttttgcctgcaggtcagttgtaataaatctaggatgtgatgatgactttgtaatttgattttctgaaatcagnccctgagaggggaaaatcttaaagtaaattacattaaattatc

SEQ ID NO: 259270 - DNA, 582 bp, Homo Sapiens
attacatcagatgccttaggctaaggccctggcacacaggaacacatgtgctacaaaggagctttggggacttaagtcctgaggatccaggaggtgaggtgacttgtccaagattccactggtttagtggcagagcctagacttccactcggatctatttagtgcttgccccctgctctctcctgtcgtgccccaccacctcctggcatcacagggcaaccgttgtcaaggctatgctcacgggaggctgggcaccacagtgtttccaagagcaagctggatccgagtagattccctagggcttgttggaggaactagtttgactcccttatactgtggacgcagtagccttgctgtagggagttgaagagtactccacaacagtatcttaagtttaactgggcacttccctctggaaatcacagtgttgtgcaccaggaacacaaagatgagtcaaatctttatcctgcctttgaggagctcactgtttagttggggaaaccatttgtaaaacagccattaaccatacagtgtgatcaacactgacaggagcacaggaaaaacatctagcttatgtgaaga

SEQ ID NO: 259271 - DNA, 1510 bp, Homo Sapiens
  misc_feature (1065)..(1075): n is a, c, g, or t
actacggtttaaggtagcgaggcctgggtggcgaattcggcacgaggggttcatataaaaatggtaacacctagaggtataatagaaaaaagctgtcaaggacctcgtatgtcaacaggccctgatatccatcacttcatcatgggatctgaaggaactcttggtgtaataacagaagctacaataaaaatcagaccagtccctgaataccaaaagtatggctcagtagctttccctaattttgaacaaggagtagcctgtttaagagaaattgcaaaacagagatgtgctccggcatctattcgcctcatggacaacaagcagtttcagtttggtcatgctcttaaacctcaggtttcctctatttttacatcatttttggacggattaaaaaagttctatattacaaaagtttaaacggactttggacccaaattcagctaagttgtagccacattactgtttgagggggatcgtgagaaggttcttcaacatgaaaaacaagtgtatgatattgctgcaaaatttggtgggttggcagctggagaagataatggacagagaggttatttgctgacctatgttattgcatacattcgagacttggctttggaatactatgtattaggagaatcttttgagacttctgctccttgggacagggtggtagatctctgtagaaatgtaaaagaaagaataacaagggaatgcaaagagaagggtgttcagtttgctcctttttctacatgcagggtgacgcagacttacgatgcaggtgcttgtatctacttctattttgcctttaactacaggggaattagtgacccactgaccgtatttgaacaaactgaggcagctgctagagaagaaatccttgctaatggagggagcctgtcacatcaccatggagtgggcaagttacggaagcaatggctaaaggaaagtatctctgatgtcggctttgggatgctgaagtctgtcaaggaatatgtggaccccaataacatctcttggaaacagaaaccttttataaatccattagtaccattacaaaaaaatgtcaannnnnnnnnnnaagttttcaactgtggttatactagtaatcaaatatatcatggactatattttggatacatttgtttctttggtttaaaataagtttgttttcattctgtagtttgttttgtttctacatctatggattgacagatagtattcctaaatctctctcattgtaggtacatcattttacattcagcggttgtcatttcaaattttagtcaggcagcacaaagctgtcaattattccagaggaagctgctgccagctgttttgtattgttgcttcctcttggggaacaaagacagatttggtatcattgattgctcagctagcctctttttaaaagaacgtttctgggaatcagatgtctagggaaggattccactgaggagtgatacacgtgtacattgtttaagagcatagtctagtgtgagtaggccattaaggg

SEQ ID NO: 259272 - DNA, 628 bp, Homo Sapiens
gggaaaaaggcatcagcctcagggcctccttcatcttcatctctgtctgcagtacctggcatgtagcacgcactttcctcctgatgccccgggggcacatcccatacccactgccccccaactacagctatggcctgtgccctgggaatggcaccacaaaggaagagaaggaaacagctgagcatgaaaacagggagctacagtcaaaggagttcctttcagcgaaggaagagaccccaggggcagggcagaagcaggaactccgctccttctggagctacgctttctctcggcgctttgcctggcacctggtgtggctgtctgtgatacagttgtggcactacctcttcattggcactctcaactccttgctgaccaacatggccggtggggacatggcacgagtcagcacctacacaaatgcctttgccttcactcagttcggagtgctgtgtgccccctggaatggcctgctcatggaccggcttaaacagaagtaccagaaggaagcaagaaagacaggttcctccactttggcggtggccctctgctcgacggtgccttcgctggccctgacatccctgctgtgcctgggcttcgccctctgtgcctcagtccccatcctccc

SEQ ID NO: 259273 - DNA, 1839 bp, Homo Sapiens
  misc_feature (274)..(282): n is a, c, g, or t
  misc_feature (401)..(401): n is a, c, g, or t
  misc_feature (915)..(960): n is a, c, g, or t
  misc_feature (1404)..(1404): n is a, c, g, or t
  misc_feature (1618)..(1618): n is a, c, g, or t
  misc_feature (1675)..(1675): n is a, c, g, or t
  misc_feature (1759)..(1759): n is a, c, g, or t
  misc_feature (1768)..(1768): n is a, c, g, or t
gtgaagtttccttaattagactaattattttatccccatcccagggtataaacaggaattgttttgatagtggtggagttattcactgcaacaaagcaacaatgttgtccatgattcaaaatctaagcagtttcgattttgcctgtgaatatggtgtctgtcattcagggcatagctcactgtaggctagcctctgcttacttaagtctcttctctgacatactcaatggaagaatatttagatttatttaaagttcttaatgccaacagtttnnnnnnnnnttaaaacatttgaatgaactgtaaagtacagccataccttggacatgcaaatataaatctatggagcattctcaagacagtttgtcatggctctgttgattgcaactccctggatagcnttggaatttgatttaggttatattctgcttattatgtatactgtgttcttatatatgagaaagcacaaatgcgaaagaggtcatgtcttctcaaaatctagcaaaggaagtagtctgcattggtgtgcattacagtattttgcttaatgaaagcctcagttctgaatgttgatatgagtagttaaaaggaagtggggccattttatgtgtttatctgtgtcaagtatttctggtaataagaagcacttaatttacacatattttaatcctgtgaaagattccacatagagaaaagaaagatacctaaccttcaacaaatgttatttttggaaacacaatttttgtcattaaatgttatattatttcacatatataaaacagatgttatgtaagaatgttgtatattttaacataaatcatttagagaaattatctagattcattaattttcatagtgcctttttcacatgagtcagctggaaagtctgcaataaacagtatttgctgtctgttnnnnnnnnnnnnnnnnnnnnnnnnnnnnnnnnnnnnnnnnnnnnnncacccccgagaaccccgtagaggccacaaaaaaccccccaatataatcgccggtgggaggccggaccccagtaggggaaggtagacgagaccgtagcgggggatacccgcggggggcaagcgcagaggggcgtgcaaatgtttatttttgtctcggggccccgggcgatcgggcggcgccgcaacagaccaatccgatgaagactccgccccgagtgtggcgccggcgggcgaggcccccgcggagggggagccttcagaatgtggaccggcccttctgcgcagcgcgggtgatcgactgccacaagaacaacccacagtccactgcgacgttccgactaacaccacctcgacggagtttgcgctactgacgatctacgtgcgacgcacaatgaccaccatatgaaaaccaggtcgtcgcccccctgcgcgtgtcggagcaccngctccgtccaattgtgtggtccgacctctactcacgtcagacaacaaccgctgacgcacgcagggtgcgacgcggttttgattgtaatacgtagtcccgcgtgatcctatgagtatgcgtgggcgccgtcagcaccacaccgcgccacacgccgagccagcggacgcgtgttgtgctacgccgccccacatgtcgtccaccccgccctgtagtngtctctgcactcacgcgcgcttatctgttacagccacaggactctccctccgccgcnacccgcgagcgcgggtatgcgacatctataccccgagcaatacgcgcgatcgctcgggtggaaggtgatgacgggactgcgacncgccagcantacgcagcggggcacagactctgctgccacgaccgccgcgctgatgagagcgtcggcacagaaatcgaccg

SEQ ID NO: 259274 - DNA, 1306 bp, Homo Sapiens
  misc_feature (815)..(835): n is a, c, g, or t
  misc_feature (1036)..(1036): n is a, c, g, or t
  misc_feature (1038)..(1040): n is a, c, g, or t
  misc_feature (1042)..(1045): n is a, c, g, or t
  misc_feature (1050)..(1050): n is a, c, g, or t
  misc_feature (1173)..(1174): n is a, c, g, or t
  misc_feature (1229)..(1238): n is a, c, g, or t
aggttctggagaaggagaagaaacgtaagaagcgaagtgaggatgaatcagagacagaagatgaagaggagaaaagccaagaggaccaggagcagaagaggaagagaaggaagactcgccagccagatgccaaagatggggattcatacgacccctatgacttcagtgacacagaggaggaaatgcctcaagtacacactccaaagacggcagactcacaggagaccaaggaatcccagaaagtggagttgagtgaatccaggttgaaggcattcaaggtggccctcttggatgtgttccgggaagctcatgcgcagtcaatcggcatgaatcgcctcacagaatccatcaaccgggacagcgaagagcccttctcttcagttgagatccaggctgctctgagcaagatgcaggatgacaatcaggtcatggtgtctgagggcatcatcttcctcatctgaggaggcctcgtctctgaacttgggttgtgccgagagagtttgttctgtgtttcccaccctctccctgacccaagtctttgcctctactcccttaacagtgttgaattcaactgaaggcgaggaatgttggtgatgaagctgagttcaggactcggtggaccctttgggaatgggtcatgaaagctgccatggggtgaggaaagaggagacagtgggagaggacaatgactattgcatcttcattgcaaaagcactggctcatccgccctacttcccatcccacacaaacccaattgtaaataacatatgacttctgagtactttttgggggcacaactgttttctggttgctgnnnnnnnnnnnnnnnnnnnnnctccagagcactttggtctagactaggctttgggtggttccaattggtggagagaagctctgaggcacgtcatgcaggtcaagaaagctttctttgcagtagcaccagttaaggtgaatatgtattgtatcacaaaacaaacccaatatccagatgaatatccgagatgttgaataaacttagccatttcgtacacatggnannncnnnnccccnttacaccctaccgccgccacaaggccctaacctctgttaacagtccataacaccttacgtcctaataccccctgccctaacgcaacccgaccttttttttcccctacccccttttaagcgaanntgctttttgggggggcccccggccccaagaaaagttttcataaaaattttctttnnnnnnnnnncgccccaagggaaaaagaaacggggcgcccaccgtttttttaccaaaaaacccgggcacgtaaaacgg

SEQ ID NO: 259275 - DNA, 994 bp, Homo Sapiens
tggtagcgaggcctgggtggcgaattcggcacgaggatgcaccgttacagagcacctggggagcaggatggcgatgctatgcccttgggtagtgctgtggatatcctggccacagatgatcccaactttagccaggaagatcagcaggacacccagatttatgagaagcatgacaaccttctacatgggaccaagaagaaaaaggagaagatggtgagtgcagcattcatgaagaagtacatccatgtggccaaaatcatcaagcctgtcctgacacaggagtcggccacctacattgcagaagagtattcacgcctgcgcagccaggatagcatgagctcagacaccgccaggacatctccagttacagcccgaacactggaaactctgattcgactggccacagcccatgcgaaggcccgcatgagcaagactgtggacctgcaggatgcagaggaagctgtggagttggtccagtatgcttactttaagaaggttctggagaaggagaagaaacgtaagaagcgaagtgaggatgaatcagagacagaagatgaagaggagaaaagccaagaggaccaggagcagaagaggaagagaaggaagactcgccagccagatgccaaagatggggattcatacgacccctatgacttcagtgacacagaggaggaaatgcctcaagtacacactccaaagacggcagactcacaggagaccaaggaatcccagaaagtggagttgagtgaatccaggttgaaggcattcaaggtggccctcttggatgtgttccggggaagctcatgcgcagtcaatcggcatgaatcgcctcacagaatccatcaaccgggacagcgaagagcccttctcttcagttgagatccaggctgctctgagcaagatgcaggatgaccatcaggtcatggtgtctgaagggcatcatcttcctcatctgagggagcctcgtctctggaacttgggttgggcccaagaa

SEQ ID NO: 259276 - DNA, 515 bp, Homo Sapiens
gagacaaggtaggtgaaaggagccgcacacttgggacactctatccttgcactttgtaacaatgttgggaaagacatgcttgttgacactctgggttggaccagacacaacactcctgcaggccttggcggaatcagtcgggtgcctgtgctgtgtccatgtgccgaggtccacggtggaaggagattgctgagtagctgggtgttcttggtgtcctggaactgggtccctccttgcagcttcatacctggggtttgtaccaccaggacacctgctgtgaaagcagggaagtagtagtgaaggtctcttaagctgtctgttctgttttctgacatgtcattagagcccattgctgacaggagcttcctccaggttgcaagcggtgggcttgcgcatgcagggagagttatcaggctgtggctgactgtcttgactggggctgccccagccctaaaaataatatcgtttcttgtcttgcttcatcctaacctggcttcctgacagctcccccggat

SEQ ID NO: 259277 - DNA, 563 bp, Homo Sapiens
gaaacatgttttagtagaagttttatttgaaaaagaaaaataagcataaatatattcccagtgctggagagggtgggctgagggactggggccagcacggaccacccaaggcctctgcttcccgccgccaccctcctcgctgccattctctgggctggaatgtgaagcctcagtcactctaaatgaagaattttcttttgaatgttttgtatgtaaaatagcaagtggctatttttaaagttaagtttgtataaatagttagatattctagatttacattaaattgtaaaataaatggacttattgaagcatatcttgatttttaagcttatcttgattttcaaacatgcatagctatttttatcactctaatcagtaaggctactatctagactcgaatgctttcatacaagtgattttcaaaaattagtcaataaaaattgatgtcagtgcaggcccaggcccgcccccagatacactagtttctaggtctggggccagcctagtaattgttactaggcacacaggtgatgctgactcgatggcctgagacacaccccttg

SEQ ID NO: 259278 - DNA, 1016 bp, Homo Sapiens
tttcacatcataaaatatttattaataagtaaaatgattttcccctgcctttggttattaaaaaatgagtatcattgatgataccaattgccaacactggttttacattattcagtcatgaaacagaatagaaagatgatcgatagatatctatagacataaatgtgtagaagaccataccatacagcgatttgtttaattacaaaatactggttgtgctagcagttggaaatgtactggcacatccttaaagttatctttttttatataagtaaagaaccacacaaataaattcacttgaatttgataatttggaacatgggcaatgaatacagtgcctgttgaggcctgaaagagagagaaaatcaagaacagtgtgggagaagaaaggcaatccttcgttgaaaagcttttctcttaacaatccttagtgcctgaaaaataagccattttgataacaagagtataaaaagccttatgatctgcaaagtaaatcgtatctggtttaaatttcatcccaagtctcaggttatggctgaggagctatactaagtatctttgtaacacatttctttgaatttttataactaagacaagaaaatttttttatcagatctaggcagaaatactgatcttcatttacaagtatagtaattacttgcactcaggactatatagacatggggctctgaaaaccaaacagaaggaaacgccaaaccataaccacaaggcaaaattaaaagtaactcagagaagcagcgggtgatagtttatgatttcaatataaaaaagaatgcattacctctcagatgtcaccttaaagccagaaaattaagatacaatcaagaaggggatgaatggttttatgactataccacctactacttcaagattaaaatcatcccagagttctgaaatgtcttcattagttaagtaactatacaatttatttcagtctctttttaatgtagaaaatcactttgtaataagatctctacataaggtaaaaaagcacc

SEQ ID NO: 259279 - DNA, 1028 bp, Homo Sapiens
  misc_feature (73)..(91): n is a, c, g, or t
gcccgcacctcgggggggcactcgacctcccctccacacgcccgagcctgggtggcgaattcggcacgagggnnnnnnnnnnnnnnnnnnnactcctaaaaatgatgcatttatttatgccacttttataagaacaatccctttgcgatcccaaaacctgggcagagaatgaaaagagacaaacagaaccttctccaaaatggtagtcctcacaacagaggtgtagtgcaagagacacataaaatggcagctcttgagaggagtgtgtgcacacccagcggggtaggcagcccctagctgcggagtgtggccagccgggactgcatggcctccagagcctcttcctcctcctcctcatcctctgaggcagccatcgctcctggaggttctggctctggaagggcatcagtcactttactgggtgctttgcccaaggcccctgctgtaatttcaaagagaattctgtcaatttccatttctgcttcttcctccatttcttcctgatcgtccatgctttcaaaaatgtcctctaacatctcctctatgatcccagccttcatcatttctttggacaactccctcatggtggcctgaatctctggaatcttcacaagactttgcatggccttcatcacttctgtgctcttctgcagggaaccagccactcgcaagaccgcgagctggttcttcatccccatgagcactgagttcatgtgtgctttggatgcatacagcttgctcacagccttccttgacctgatcatctccttggccagaactatgcagacatccttctggcccttcttggcagcatctttcacagatcgtttcactttttcttcctctctttggatatcccttatttgcctgtcaacaactctcatttcctttcttatcttcaatgaacactcattgaccagttctttgggcggcttctcctgggtctttccaaacagccccatgacgaactgaacccgtcttgccccttccggctttcagttccccgcgcccaggcaggtcacgggccc

SEQ ID NO: 259280 - DNA, 1033 bp, Homo Sapiens
gggattgttcttataaaagtggcataaataaatgcatcatttttaggagtatagacagatatatcttattgtggggaggggaaagaaatccatctgctcatgaagcacttctgaaaatataggtgattgcctgaatgtcgaagactctacttttgtctataaaacactatataaatgaattttaataaatttttgctttagcacttggccccattgtagattgccctgtgcagtaaactttcaaggtgtcggctgccccagattgcttcatttgctgggtgtggaaagagttgctatggccaggcatatgggatttggaagctcagcagaagtgacttctgctctgtggttgctgctccccggctttcacagacatggtatggcagccattcttttatctatttaaccaagaggatgctggggaattgtgctgcttgtcctgttggctggtggctgcattatgtcctggggtgtgcatgtgggtctatttagagcttctgtcccttccttcccattgcaagttgcacccagatgagacagctgtagtactaggtctctttcacctctcattgcctgtccctgcttcgagctggttgtcttgtgcgtgggacatgggccttccctatctggtgttttctcaaagtcaagagctgacccaagagcacactaaagtgtgggtcatgcatcataaacaaacatttcactcatctggggacatttcttaagatacatttataaatcatttcagcagtagtactttgtatgtgttgagagtttacagagctctttgacatacgcgatcttagtctttacaaataaggaaaacagctcagtttgggaagtatcagagatgggattcaaacccagatcctctggtccaagttgtatgtgcactgaactaatcaggcaggaaaaaagcccagccactgtctcacagattgttttttgtatattgtagcaaaatcctgaaacaatggggtccttccagtctcatcatacaaaatggcaatcttggctgggtgcggtggttcat

SEQ ID NO: 259281 - DNA, 1104 bp, Homo Sapiens
caaaactgaaaacttctcgcccgagggaggaattcttgtgacccaaaaggttaccccccagagttagtgggcccaacggggcaaaaaaaatgcccaaactaggtgggaagaggaccatccctccccgaaaaattcttcttaaaaaggcaggagaaggtagaacccaatgccttcccccctaggggcccagccaaaccaaatccagggtagcatactggagaaaaaaggtcatagttcccgacaaatctggttttccctgccttattatcaaacccacctaacccctcacttttccccaaaaaaaacacaacccacattatcttaagcaagccctcctccaccagtcataatccaaatacttgaatacagcaaccaaaacacactacttctcatgaaactttcctctgcctattttaaggtaggtttgcccggtcctatggcccagtagagatgacacaggagaacacggaaacatccaaaatgttcactggttcagagtgtgtacacagtaattttgatgtctgttgcctcaaatacctcctcgatcatcgcagatacattttcccattgcagacgatcaagaccacatccaatcctgggcatggagaggtcagtgactccattcttcagacaatgagacttcattgcctctaaactcttctgtaagttttcataagttggcttgtgcgaagcccttttctttgtaatcaagtaatatatatatcgcccatctctcttcagaacagccacttctccagatttcttttgttgatttaaaagttcttgcacccctccaaatttcttcttaaagaggacagctatcccagcgcccatgcgacaatcctcactgatacagtgggctaaagagtctgttttcgggcatgcaaaaaggtctcctttcacataagtgattctgcttccttctggatcttcattaaggctgctggccatgatactgagtcgctatttccagaatttaagtgtttcttcagcctagggcgggtcagcgaggacgcagtctgtcctggggtcctatgggagggtgcggggaggctcgctcaaagcccccctcgtgccgaattcgccacccaggcctcgctcttt

SEQ ID NO: 259282 - DNA, 796 bp, Homo Sapiens
acctccacagctactttgcagagagactctactatgccatgaagggagcagggacgcgtgatgggaccctgataagaaacatcgtttcaaggagcgagattgacttaaatcttatcaaatgtcacttcaagaagatgtacggcaagaccctcagcagcatgatcatggaagacaccatcggtgactacaagaacgccctgctgagcctggtgggcagcgacccctgaggcacagaagaacaagagcaaagaccatgaagccagagtctccaggactcctcactcaacctcggccatggacgcagacagatgcctcagcatgaagggcttggggacttgtggatcaatccttcctccctgcaggagcttcccaagctggtcacagagtctcccgggcacagccggaaagctggctgggagcccttttgttttagaacacacatccttcagcagctgagaaacgaacacgaatccatcccaaccgagatgccattaacattcatctaaaaatgttaggctctaaatggacgaaaaattctctcgccatcttaataacaaaataaactacaaattcctgacccaaggacactgtgttataagaggcgtgggctcccctggtgggtgaccaggtcagctgccctggccttgcacccctctgcatgcagcacagaagggtgtgaccatgccctcagcaccactcttgtccccactgaacggcaactgagactgggtacctggagattctgaagtgcctttgctgtggttttcaaaataataaagattatagtattcaactc

SEQ ID NO: 259283 - DNA, 1888 bp, Homo Sapiens
  misc_feature (675)..(675): n is a, c, g, or t
  misc_feature (1550)..(1617): n is a, c, g, or t
  misc_feature (1870)..(1870): n is a, c, g, or t
aaaaaagccaggcagagcccgggggcgaggggacggcaggcaggtgtggcgctgccctggggcgggcttgcacccccacacccaagtgagcggcctgctcactcctcagctgcaggagccagacgtgtggagtcccagcagaggccaacctgtgtctcttcatctccctgggaaaggtgcccccgaggtgaaagagatggcctggtggaaatcctggattgaacaggagggtgtcacagtgaagagcagctcccacttcaacccagaccctgatgcagagaccctctacaaagccatgaaggggatcgggaccaacgagcaggctatcatcgatgtgctcaccaagagaagcaacacgcagcggcagcagatcgccaagtccttcaaggctcagttcggcaaggacctcactgagaccttgaagtctgagctcagtggcaagtttgagaggctcattgtggcccttatgtacccgccatacagatacgaagccaaggagctgcatgacgccatgaagggcttaggaaccaaggagggtgtcatcattgagatcctggcctctcggaccaagaaccagctgcgggagataatgaaggcgtatgaggaagactatgggtccagcctggaggaagacatccaagcagacacaagtggctacctggagaggatcctggntgtgcctcctgcagggcagcaaggatgatgtgagcagcttttgtgaacccaggaactgggccctccaagaccccacaggatctgttatgcggcaggcgagaagattcgtgggactgatgagatgaaattcatcaccatcctgtgcacgcgcagtgccactcacctgctgagagtgtttgaagagtatgagaaaattgccaacaagagcattgaggacagcatcaagagtgagacccatggctcactggaggaggccatgctcactgtggtgaaatgcacccaaaacctccacagctactttgcagagagactctactatccatgaagggagcagggacgcgtgatgggaccctgataagaaacatcgtttcaaggagcgagattgacttaaatcttatcaaatgtcacttcaagaagatgtacggcaagaccctcagcagcatgatcatggaagacaccagcggtgactacaagaacgccctgctgagcctggtgggcagcgacccctgaggcacagaagaacaagagcaaagaccatgaagccagagtctccaggactcctcactcaacctcggccatggacgcaggttgggtgtgaggggggtcccagcctttcggtcttctatttccctatttccagtgctttccagccgggtttctgacccagagggtggaaccggcctggactcctcttcccaactttcctccaggtcatttcccagtgttgagcacaatgccaacctttagtgtttcttccagccagacagatgcctcagcatgaagggcttggggacttgtggatcattccttcctccctgcaggagcttcccaagctggtcacagagtctcctgggcacaggttatacagaccccannnnnnnnnnnnnnnnnnnnnnnnnnnnnnnnnnnnnnnnnnnnnnnnnnnnnnnnnnnnnnnnnnnngtcttacaaaacacttctctatcatgcagccggagagctggctgggagcccttttgttttagaacacacatccttcagcagctgagaaacgaacacgaatccatcccaaaccgagatgccattaacattcatctaaaaatgttaggctctaaatggacgaaaaattctctcgccatcttaataacaaaataaactacaaattcctgacccaaggacactgtgtttattagaagcgtgggctccccctgggggnctgacccaggtcagctga

SEQ ID NO: 259284 - DNA, 471 bp, Homo Sapiens
cagttccactcctctgtggtgagcttgctcttcataataactggctctggagtcacatcaacaatggtggcattgccatctggggcccacatgagccctctggggcgtgctgcatccctactgggatgcggtggggctctgaggttgggaccagcagcctgagcctggttcccacttcactacacagcaaattgtatacccaagggagtggttatgacttgctgctcctcattcatgtgaggaagtggtgccttgccctgggatcatgtgtgtcagaaccacagcaggcctgggaggcacgtccagctggggttggggaggacaggcctgcatgacagagctggggagtggtggggacacaggcagaggaaccagcactgcctgccttttgattcaaagcaacttcagaagatccctgtgtccatttccacatattggttatttgaacatttcctaaatgacttcctcatc

SEQ ID NO: 259285 - DNA, 443 bp, Homo Sapiens
  misc_feature (27)..(27): n is a, c, g, or t
  misc_feature (168)..(168): n is a, c, g, or t
  misc_feature (326)..(326): n is a, c, g, or t
  misc_feature (417)..(417): n is a, c, g, or t
ccctcgagcagccaggaagcctgcgantctgggaaatggctctgcttagggcttctcgggaatttgaggccagcctgaggaactgcaggactcaggtgcaatgtgccagccacttggaactgctaactgagcctccagatggtagtgaatggtctctttgccttcagntgggatgaggaagtcatttaggaaatgttcaaataaccaatatgtggaaatggacacagggatcttctgaagttgctttgaattcaaaaggcaggcagtgctggttcctctggcctgtgtccccaccactccccagctctgttcatggcaggcctgtnccttccccaaccccagctgggacgttgcctcccagggcctggttgtgggtttctgaacacacaggattcccagggcaaagggaaccaattnccttaacatggaattgagggaggcag

SEQ ID NO: 259286 - DNA, 1803 bp, Homo Sapiens
  misc_feature (356)..(379): n is a, c, g, or t
  misc_feature (1680)..(1680): n is a, c, g, or t
  misc_feature (1764)..(1764): n is a, c, g, or t
  misc_feature (1792)..(1792): n is a, c, g, or t
catgtataggtgcccaggaagcagggtcaagtcggtcgggacacggagctccaccacagttaagatgaagcctttccacatttcccgacacaagtcatcccattaaagactctgaatgcagttgcttcagtacccataatgtattcttggtctcccctacagcagaattttatggtggaagatgaaactgttttacataacattccttatatgggagatgaagttttagatcaggatggtactttcattgaagaactaataaaaaattatgatgggaaagtacacggggatagagaatgtgggtttataaatgatgaaatttttgtggagttggtgaatgcccttggtcaatatannnnnnnnnnnnnnnnnnnnnnnngagacgatcctgaagaaagagaagaaaagcagaaagatctggaggatcaccgagatgataaagaaagccgcccacctcggaaatttccttctgataaaatttttgaagccatttcctcaatgtttccagataagggcacagcagaagaactaaaggaaaaatataaagaactcaccgaacagcagctcccaggcgcacttcctcctgaatgtacccccaacatagatggaccaaatgctaaatctgttcagagagagcaaagcttacactcctttcatacgcttttctgtaggcgatgttttaaatatgactgcttcctacatccttttcatgcaacacccaacacttataagcggaagaacacagaaacagctctagacaacaaaccttgtggaccacagtgttaccagcatttggagggagcaaaggagtttgctgctgctctcaccgctgagcggataaagaccccaccaaaacgtccaggaggccgcagaagaggacggcttcccaataacagtagcaggcccagcacccccaccattaatgtgctggaatcaaaggatacagacagtgatagggaagcagggactgaaacggggggagagaacaatgataaagaagaagaagagaagaaagatgaaacttcgagctcctctgaagcaaattctcggtgtcaaacaccaataaagatgaagccaaatattgaacctcctgagaatgtggagtggagtggtgctgaagcctcaatgtttagagtcctcattggcacttactatgacaatttctgtgccattgctaggttaattgggaccaaaacatgtagacaggtgtatgagtttagagtcaaagaatctagcatcatagctccagctcccgctgaggatgtggatactcctccaaggaaaaagaagaggaaacaccggttgtgggctgcacactgcagaaagatacagcttgaaaaaggacggctcctctaaccatgtttacaactatcaaccctgtgattcatccacggcagccttgtgacagttcgtgcccttgtgtgatagcacaaaatttttggtgaaaagttttgtcaatgtagttccagagtgtcaaaaccgctttcccgggatgccgctgcaaagcacagtgcaacaccaagcagtgcccgtgctaccctggctgtccgagagtgtgaccctgacctctgtcttacttgtggagccgctgaccattgggacagtaaaaatgtgtcctgcaagaactgcagtattcagcggggctccaaaaagcatctattgctggcaccatctgacgtnggcaggctgggggatttttatcaaagatcctgtgcagaaaaatgaatttcatcttcagaatactgtgggagagattattttctncaaggtggaaggtggacagatgaggggnaagtgttatgg

SEQ ID NO: 259287 - DNA, 895 bp, Homo Sapiens
  misc_feature (458)..(459): n is a, c, g, or t
  misc_feature (586)..(586): n is a, c, g, or t
  misc_feature (591)..(591): n is a, c, g, or t
  misc_feature (602)..(602): n is a, c, g, or t
tttctcagcttcccggcccagctggggcacccactggaaggagaggccaggcggaagaccctggctccgtcatggcctctgccctgaggccaccccgtgtccccaagcctaagggtgtcctgccttcacactactatgagagctttctagagaagaaggggccctgtgaccgggattacaagaagttctgggcaggcctgcagggtctcaccatttatttctacaatagcaatcgggacttccagcacgtggagaagctcaacttgggagcatttgagaaactcacagatgagattccctggggaagctcacgtgaccctggcacccacttcagcctgattctccgggatcaggagatcaagttcaaggtagaccttggagtgtcgggaaatgtggaaaggcttcatcttaacggtggtggagctccgtgtcccgaccgacttgaccctgcttcctgnngcactatacatgatgtctgaagtcttggccaaagaggagggcgcgcgtgcactggagacaccctcgtgctttcctgaagtgagccggctggaggcaccactgctcctggagcgctaccccgagtgcnggaanctgctgctgcnggccaacgggggacggcgcccacgggctgttcggccaccacgccggcaaatgaccacgggaacccaccgtggtccggcattacaaaggggaaaccggaagggcccccaagtaacgggatccaagggggaaacaacccgttttctttgaccctccccgggaaccccggggggccaatatttttctggtcgcgatacccaaaaagggggtggggggccatttccggtttttaaccgggggcttccccaaaagggggcttaggccttcccggggaaccccaattagggggaaaagg

SEQ ID NO: 259288 - DNA, 708 bp, Homo Sapiens
ttccatcagaaatatttcttactagtgctttaagctccagagtaaacagtcatttaaaatggagttcactgggcaggtttcccctttaatctagatagaaatactctttatcagagatttaaggcactgttttgctaactggtaaataaaaccaaatgtaaatatgtaagaatgtttatttgttgcacataacttttttggtataaaataaatgtagaagttacctgtggaagttgtgctcccattattcttaaactgcagggttgcattccaaaagaactgaaatgaagtctttttagactcagtaggagccttatattcttgaagtcaatactgtaacctcatttctaaggtatacagggttgattctttttctcttaaatcatatgtaacttgcagaagattcagagtcctcagacctctagttcttggaattcctgtaggtttacggtgtatgtgattgtcaagaattaatgacaaaaatgtgtcactgcctacagttctgtgaacactcagaatgtattaatgagctgtttttccatagttttactttagcttaccttgaatactccctgtataatcctctaaaaaggtagcatcggcaagaaagatgaatccgttggaaatacagctgagccatacttcacggaatagaacaagtgtgttctgtgctggagctcaaggacctgtggaaagggactgccccca

SEQ ID NO: 259289 - DNA, 1048 bp, Homo Sapiens
cggcacgaggtaaggttccacacccagctctctcagctgtttttaaatgaatgtgtgtgaggaacagatgggaaagttgggagatctgtctacagagaagcaaagttgtggttctcttgctaacttcaaggtgagggacattgggcaccctaagtttgggaacttggttgataaatacgtatatggtccattccataaatcagtggtgagtgactggcctgggttctagacctctgggaaccagcacctgagtcacagctgtctaggcctcggtgctggcctgggttctagatctctgggaaccagtgcctgagtcacagctgtcagtgcagccatttgcccagggctgctcccgagggggatgatgggaaattcagcagtgtagactcactttaaacaagctccggtgatcctgaaatgctgaagatcgtgtaggtgggttgtggggtcagcagagctgccatctgcccacgtctggaaaacaacacacggtgagtcaccggtttggccatgagatctccccacttaaaggtgctgtgagcttgtctctaagatatatacctcttccttttgtcttttgctgtaagctttgaccttttgcagatctgatgaaaatacaacctcttattgtatagtttgccttgattataagtcatagtaaatcaagctgttcgcatttttgcaggccttgcattttctactgggaggttcatcaaaccttcccacttagcaatagccctgactcaggcagaatgcctcataaattagccttcgaaagaaaagtgcacgctcagacagtgtgtggaggggcaggagcgtgatgcagacaaggacttagtcatgactgattttccttagccagtttgtaatggcttatggggaacattgtgagcttcctacctgacatgttggcagaagtagaatattaggatcctcaagcatctctaccgtaagtccaaagaatttaggtccctattgtcactttgttttgcaatgttttttataaaaatgcaattaaatacctcactattaaactgccatgatgcct

SEQ ID NO: 259290 - DNA, 551 bp, Homo Sapiens
  misc_feature (230)..(252): n is a, c, g, or t
tgaaaaagacttttaaatgccctttctgcagttggaaggttttctttatatactattcccaccatggggagcgaaaacgttaaaatcacaaggaattgcccaatctaagcagactttgccttttttcaaaggtggagcgtgaataccagaaggatccagtattcagtcacttaaatgaagtcttttggtcagaaattacctttttgacacaagcctactgaatgctgtgnnnnnnnnnnnnnnnnnnnnnnnctatttgagtgaaaccttgtgaactctttaattagagttctcttgtatagtggcagagatgtctacctctgaattcaaaagtgtaatgatgtacttattcatgctaaactttttataaaagtttagttgtaaacttaacccttttatacaaaataaatcaagtgtgtttattgaatggtgattgcctgctttatttcaaaggaccagtgctttgatttttattatgctatgttataactgaacccaaataaatacaagttcaaatttatgtagactgtataagattataataaaacatg

SEQ ID NO: 259291 - DNA, 377 bp, Homo Sapiens
  misc_feature (47)..(69): n is a, c, g, or t
  misc_feature (162)..(162): n is a, c, g, or t
gggggtcagaaattacctttttgacacaagcctactgaatgctgtgnnnnnnnnnnnnnnnnnnnnnnnctatttgagtgaaaccttgtgaactctttaattagagttttcttgtatagtggcagagatgtctatttctgcattcaaaagtgtaatgatgtnacttattcatgctaaactttttataaaagtttagttgtaaacttaacccttttatacaaaataaatcaagtgtgtttattgaatggtgattgcctgctttatttcagaggaccagtgctttgatttttattatgctatgttataactgaacccaaataaatacaagttcaaatttatgtagactgtataagattataataaaacatgtctgaagc

SEQ ID NO: 259292 - DNA, 1211 bp, Homo Sapiens
  misc_feature (987)..(996): n is a, c, g, or t
agaaccttatagggccttctaaaacataagagtttcctttgttgcttcaaatatttgaacattatgttaaagatcaagtattaattttagttgtactctagaaagctaaagtgccacattcggggctatttttatgattcagcaatcttttctaaattgtgtagcatgtgtatgagactatttatacccaaggatatgaaggaacataagtgactacaaggctctaataagccacggtggcaggaggttcaagcggttctgttcactaaatttttctcctgtaagctttgaatggaaacttctgtatcacatgatgtgtttcacttatgctgttgtgtatatacctaatatttctatttttgattttattttaatacacctcgtccaataacatctcaagctttttatttgcatttacattttcagctgtggtcagtgtaaaaattggtcatcagctgggggcggggtggttagaagtgattcaacagagctacatgctttaaacttgcccaagttctacctccttcctttgaacatttcagattggagaaccaaggagttgattgcctgaacacctgaacatccgtttatgggggccagatagaatttgttttcaaataggcttaacaggcatcattaaaatttcattctgtgtgttttgtttaggcttgaggtgcttagaagatgggataaaatattctacttttttctaaattttaactttgtttcctatgtgatttttttaaatgtcctttctaaaatattctaaaattattgattcacaagtgccatgttcagaactatagaatattactgttacataatgtctgcacagctggtcccttgattcagtggtaaagtttttgtgtacacccccctgcttgcattttatttcagaaccacaagtattacccaatatgtttacatggagaggaactataaagaatccctaaggcaaaaagaagtctctataaaatgactagaggnnnnnnnnnnagcataacaaatttatttaaagaaaattattaaatttatcttcgccttgttttgcttctcccagttcctcctcttcttgccattttccacttgtctttccctcccaatcaagcctgtgatccttacctccatgtgggcccttcaccagcttgggcctcatctctggtgtccagcatgtgtggaagtcacacgttcccttgatgaacagcacacac

SEQ ID NO: 259293 - DNA, 1618 bp, Homo Sapiens
  misc_feature (110)..(155): n is a, c, g, or t
  misc_feature (316)..(379): n is a, c, g, or t
  misc_feature (436)..(504): n is a, c, g, or t
  misc_feature (533)..(571): n is a, c, g, or t
  misc_feature (573)..(573): n is a, c, g, or t
gggtgaagggagatataggaggggtgatacataagggagtgagagtggggatatgacgggtagtgggggagtgtggtattgtagtacgaaatggagatcgtaggatgttnnnnnnnnnnnnnnnnnnnnnnnnnnnnnnnnnnnnnnnnnnnnnnatggataggggcggaacaaagcggtagggtggtgggccttttatgaaagaacttagggaggggaggatcggggaagaaaggcgtatatgggggtgggtggagcgataaggccgggaaggcgattttagggggtggaatgggggagtacgagtcgacggagnnnnnnnnnnnnnnnnnnnnnnnnnnnnnnnnnnnnnnnnnnnnnnnnnnnnnnnnnnnnnnnngggaagggacggacggggtaagaaagtagaggggtgtgtaaaattgggtgaagtggnnnnnnnnnnnnnnnnnnnnnnnnnnnnnnnnnnnnnnnnnnnnnnnnnnnnnnnnnnnnnnnnnnnnntgggttggtggtttgaggatggtgaatannnnnnnnnnnnnnnnnnnnnnnnnnnnnnnnnnnnnnngnttttttggaagttcaattgtctttatttttcttatacagattcagagaagtaaaaaccagtaccaaactccaggtaaaatggtttgatctgatcgatttggctgcatactttcggtacgtataacattctaaacttaaaatagaaatttttatattacaaaacgtagaagtaaaattttaaaaagttaaagtactagcacatatatgtgttaggaaaatggtctctgtcaattgcccattttcccaattaaattaacctacgatttcctttttttaacagcttatttttttcataaaagttgtactttgagaagttactttctaattacgtcatgagaacacaacttgtaattagcaacacttctgtcagtctagatcacttcttctgcagagagcttttcaaccaagttggcatcaaccagcacaataaagttttcactgttttacctgtttcctgtatatggtgtaatcagtgaaagaaatggcatttcacatcctaaataatacggtgaaacactgtctaaaaattacttagatttaacagaattgcaattaggttttgacaatgtatttacttcaagacaatgtattttatcaggaaaaaatatcttgaaagaaagatctctgaaattatttttcatttgatacgccttttctgtgacaaaattttggggtgaaatgatgatgtttgctgattgatttagtactaaaaagactagtactaagaagactaaagacagttatcttataataagaaatatagtataaatagcaccttatcaagaattctgcaggggttttaacacttacaataataggaaatagccattaaaaagttgctctaactttagatttctaactttagtgttctttaacaaaggccatattttgtggccttaaaaacaaaaaattatatctggctttatctattagtaaacacaaagggtccatattttattctgaaaaaatatttattatattcattcataaatgttctaactaatttaactaaaaaaatcttctagtattttctgatgccacaagc

SEQ ID NO: 259294 - DNA, 848 bp, Homo Sapiens
aacaatggcattgttcatggtcaaggatgacaattggaactatctgaggaaagcaaagacctgtctgccccagacagctcctcaaggggttcctatgcctgaaactttagcaatatttcactccttgaaaggttaaagcccaaccatggtgatatgttagctagaagaaacagcactggtttgtttatgttactaactttcaccacccgttttcagtaggtaaagtaagactgatcattgaacagaaaaggttatttctgtgatgaggttgagggggtagtggaaagcatgtatggctagtaagccccaggtacagctatgtgagagagagtcacctggacagggaagtcccccaaatggtggccagaagagcagaaaacggggtgggaaaaattctacctcacagttttgcataggggatagctatgcttttacgggacattttagcgtttaaaaatattttcaatattgtctctttattcaataccacccagctgtagttttttcacactctgatgactctcttatccactcttttacctctcccagctgttctattacatacagcattcacctgtattagtctatagaattataatcatctgtgtgtttctaatgctcattttcaaaaatatgtatggtttattcgatttttcctattaaaattttaagggctgggaaatttggcttctactgtaaatccttataatgttccacacattgtaaatatgcaataaaaatgttaacaactataatggcagcaggttttggtatgtatttctttgatatattgtcactttggacaataagtttgatttctgttaataaaagttgttcataaaatctaa

SEQ ID NO: 259295 - DNA, 337 bp, Homo Sapiens
ttagggaactctgggttctaaaatgggataaaataggatattaataaaaaatggaatgactaggtataattaagggacgagtagacatgagtaatttggggatacaattttggagatgttgagtggtggtagatggttcaaattaatgttgaaggattttcatattgcatttgccttactcagtttttaatcaagtactatgataagaaaatagatgtggtgattatccccctgggtgaaaaccagctaaagatagcaattaatgccaaaaaaggggatgtaaaaatctagtgaaatggtgacagccctgatcttacgttcctgtaacaaaacaaca

SEQ ID NO: 259296 - DNA, 526 bp, Homo Sapiens
aaagaaaccacttccactttattataacatctggatgcataaggactcatgtaaagcagtcatacaccattatcattaaaacccatatggtaaaatacatacacagtccaacaaaaggctaatacatagtaaagcctaagcatactactatgtaatattataatacataacttggagactttagttaaagtactatgttatctattcagttttgaaaacattcattaagattttaaatgcaaattcattccttatttggaataaaacaaagtcctctaagttataacaagtattggtcataagttttcaaacctattcattaaattacaaagaacccaaagaattctgtgatgtccagtagaagtatgtaataaaaacattgcatatgtttctagtgtgatgtctttagcaattgtttactgaagtaaaatgcaaacatcaatctttcaaaatacaagatcagaagggagttttcttcttttttggctatttgtgaaatccatcttcatcacattttaccaaaaat

SEQ ID NO: 259297 - DNA, 1010 bp, Homo Sapiens
  misc_feature (321)..(355): n is a, c, g, or t
  misc_feature (444)..(463): n is a, c, g, or t
  misc_feature (621)..(621): n is a, c, g, or t
  misc_feature (624)..(624): n is a, c, g, or t
  misc_feature (627)..(627): n is a, c, g, or t
  misc_feature (935)..(935): n is a, c, g, or t
  misc_feature (941)..(941): n is a, c, g, or t
tgggtggcgaattcggcacgaggggattttctttgcctttgtgtttgatgccgtcgtgtgggaaaagtcaactccgatgccaccattgcgggccggacgaaggatgctttcttcctagaggctccgagctgagctgcgaactcgccccccgcccttgggacaagaagacccagtcacatcactgcacccgtcctgtgtcctcaccattgctatgcaaagtgattcttgttgtacataagatttaaataatgcacctatttaagacatgttgacaaattgcgggtctgggacccgcctcttatttatgaagtctttgaccgnnnnnnnnnnnnnnnnnnnnnnnnnnnnnnnnnnnacctggcgtgtagtactgtataaaccagtcagctgtcgggttagtggtagtattattgttatttttttaaaggaaacaaacagacaacnnnnnnnnnnnnnnnnnnnngaacctccttggaaaaattaattgctttttcgtaatggattctctatgctaatgctctctcgtctgtctgtctgtctgcccactcccccacccaccactgtgcgtttctgatttccaaatgtctccaactccctcacgaggtggggctcaggctgganganganggattaagatccccttgctccactaaagcccaagctctttctctcggcaccttttaaacttgaatgggaggctgctaacccgccctctccagtccaccccggtaaaagagctgttccccacccccaaggagctcctgtccctgtcagcctttgctgtcccctgtccccaacggaggactctgtcacccctgggctccccctgccatcgtgggcttcacctggccccatgcatgcccgcctctctgcatgggctcttgggaaaaaagaaatgggtgcctccgcccaatcgaatggccttccaaacccancccggnaacccccaaatggtgaccacgggaacaaaaacatcctttttgcccccccggttccgaaaacaaacaacc

SEQ ID NO: 259298 - DNA, 852 bp, Homo Sapiens; identical to SEQ ID NO: 2977
  misc_feature (712)..(712): n is a, c, g, or t
  misc_feature (735)..(735): n is a, c, g, or t
  misc_feature (739)..(752): n is a, c, g, or t
  misc_feature (754)..(763): n is a, c, g, or t

SEQ ID NO: 259299 - DNA, 700 bp, Homo Sapiens
  misc_feature (654)..(654): n is a, c, g, or t
aagaaaactcagctaggaattagaaacatcatttgtcctcttggcctgttcagctggtgactgtagatttgatgaaaaggaaacttgggactccggaggaccaagatggagcgagacggtcaatactgatggacttgcagctagcaccatggcagccctgcctggtctaaggaagctggcaggaggcgatggtacctggcgggggcagactgcccacctccccactccttcagaggactgtttcctgcccttcacaccatcatcatgttgggccctgcatgtaaataaaagcacttggagcgagcccagggacacagggcacacactgggctcacagatgttgctgcagctgagccagaaaacattccaggcaggaaaagcaggtgcacacattcacacaggcctctggtcactcgaccagccagaatgagacggactccttgacctgggaagtcaagtcccaggggggaagggctggaaatcacacgtgggtcaacttcttgggctctctctgctccccaaaaccctggcccctagggcttggctttatcatcacaatcccaaaggcccaaaagggctgcctggctgttccccatcctgggcccctggctagaaaaaagggataagggggtgggctgggcatgaatggggtgnaaggggaaacatggagaaatatggccaaaaggccttgggaaggaaa

SEQ ID NO: 259300 - DNA, 442 bp, Homo Sapiens
ggtagcaatgacctgtccacttcaaacacagataaggcctgccatcttcattggttaaaggcacacgtgagactttcagtgggctttggtgagaaggaaggcagcccaggagtcaggtatgcaggcattgcattgtcagtgtctgctttcagagtttacacatttttttggtttcaagggtgaatctcctgctctgtgaatgctatcagaccccaaaggccaaccgtgggctgggtctatgtacgttcttccgaagcactgatgatcaaaattgaagacacaaaaaaaagtttgattggttgagattaactggtgtggtggttggtgtatgtatgttttatttttatgtctttgtatgtagttctacataatgcaaattgtgctttctgatggacaagacctcataactgtgattaatatcaataaaaaggggatgttgtgg

SEQ ID NO: 259301 - DNA, 1011 bp, Homo Sapiens
ccattttattccattgaacttctttgaatggcccacgaagatgactccatttgttatcttgtaaaacatcactttttggaaggtctttacattggttacgaggaaactgaaccataatcttgctgccactttcaggtccattacgaactgaaatagcatagtcaccacttggggaggccaccgtgatggcagatgcattaccaatgctctctataggtccaagtcccacatgattactgaagctcagtacttgccagcccataaccttggcgagttgctgaactgcatgtacctggtgctgtgacatctgagacagaagaaaatcctgtagctcctgctcctgataagacagtgtaattactcttccatctctatgtacaactcgaatctgctcaactccaatattcaattgcagttgaatggacttgcatatttgttcatagccttgtgatgctgacttaaaactttcacactagattcataaacatcatctagatatttgaccaatgagccttgtatctgaggatcctcaattcggcttgctaagctcgctcatactggtgtgcagcagctctactccttagaaaaatatcgctttgcttgtgttaattattttttccagaatgcccttcacctggactgtacatgaattaatttcatgcttatcaaaagcatgaggacccgaaagtctcattctcttgagcccaaaaggcgcactagccggatgagcaatcatgatgcaactcaagctctgcttatgaaactctctaatcagtagatgcaaattatgctctaggacataaaggtggtcctccggacattgcttctcagtagcaaatttttgggatttcttatcatttgaggaatggcacaaagaaatagataactgcaagctcggaaagggctgagagataatctggtttttcaccacaatgtgagggacttgtgatttaatttgaacagcttcccgagagagctgtgcaaaaatttctttacataagagaacattct

SEQ ID NO: 259302 - DNA, 665 bp, Homo Sapiens
  misc_feature (295)..(495): n is a, c, g, or t
  misc_feature (590)..(595): n is a, c, g, or t
  misc_feature (598)..(599): n is a, c, g, or t
  misc_feature (628)..(629): n is a, c, g, or t
ccaagttcccactggtgatgcctgtctgacacgttttggtatttagtaggaaatgaagtgtttcgaagcttcgagagaagcttcaaaattgtcacaattgctgaaaacagaatgaatcgtgaacattatctcaatattttgtataatagacaagaccacagtgttttggttccctgacctgtttttgtgtttatgttaggatctgaatcatgttctgggtaaggggacgaggagcgaacactgcactaagatttggtttgccaaatcagattctttggtcaagagtcagtttggnnnnnnnnnnnnnnnnnnnnnnnnnnnnnnnnnnnnnnnnnnnnnnnnnnnnnnnnnnnnnnnnnnnnnnnnnnnnnnnnnnnnnnnnnnnnnnnnnnnnnnnnnnnnnnnnnnnnnnnnnnnnnnnnnnnnnnnnnnnnnnnnnnnnnnnnnnnnnnnnnnnnnnnnnnnnnnnnnnnnnnnnnnnnnnnnnnnnnnnnnaggggggagggtttcagccgaagctgaagattcgcgcccactggcactcccaagcccttgggtggcccgaaaatggaaaactcctggtcctcccnnnnnnagnngggcgccagaaaagaagcacaacgaacannaaaaaacatggtttccggggccccgccctcttcccg

SEQ ID NO: 259303 - DNA, 735 bp, Homo Sapiens
  misc_feature (41)..(41): n is a, c, g, or t
  misc_feature (109)..(109): n is a, c, g, or t
  misc_feature (120)..(120): n is a, c, g, or t
  misc_feature (148)..(148): n is a, c, g, or t
  misc_feature (157)..(157): n is a, c, g, or t
gtaccaactaatattaaaattcttgagttgataaacatatngccatgtaaaattatgtcactttaaaaaagttattaaattttctttccatgttcaaaaaactggggtnaggggtagggncatgggaattccatttcagtgcaacaangcaacaagnaaactaatcaaagccttacaagaatgtccttgcagcaattaatcctttgttgtgcattgagtttcttgttgcgtttcttcatagctgtagtaaaaggactgcaaaggcagccagatgaagtgctagaacagcaggataggcaatttctagatgtttctcaggtgtcaacttttctcttgagctacaggcccagttttatcactaagtcttgctactttctgacttgcattatctccatggatggtgagaaatgggttggtggtagctgtgtgaagtgggggtgcctgtgtacctgcaagaaggttgtttatgggtatttgtgttggtccagggatctgcagctgctgaagttcaagttggtggtgctgctggtggtgatgttgcattaactgatacaaaaaagcttgatgttgttctggtgtgagctgttgagaatttaacaactgctgaaactgctgttgatgaataaatatttgtcgttgctggtcagaaagtaatcctagtcctgaggcactgttagtcagtgtagctggcattggatgtgttgcattaggtggtacggttgtgtgggtggagcg

SEQ ID NO: 259304 - DNA, 995 bp, Homo Sapiens
  misc_feature (296)..(309): n is a, c, g, or t
  misc_feature (977)..(977): n is a, c, g, or t
tggtacggtccggaattccgggatatcgtcgacccacgcgtccggtggcgattagcggactggagtctggtggcgattagcggactggagtctggggacatccgtggcaaagacaccagctcaactttagtgcttcccaactttatttagaatgacatggggtgggtgtctggtgtgtgtgttttccctacgcacctcccatagctattaacaactgaggaaggccagtgcagaatatttttggagaacgatttttatttttaaataactatatcattcctatggggggaaagccnnnnnnnnnnnnnnggctgagttattccctccctcccctcaataccctcagtactgactacttccctttcttttctcaggcctccccccaccgacttttgaggccaggttggccagatttagcaaaagcaaaacagagtgctgagttaaacgcaaatttcaggtaaacaaaagataattttctagcattaatatgccccacgcaatatttggaacacttatgtgaaaaatgatttgtttttctgaaattcacgtttctctctgagtcctgtaactgtccccgaggggattgagcagaagctcgggtatgagccctgaggttgactgccggttatttttctgtcctgggaacagcctgacccacctccctgtctccatgtagccagtggggggagggggagacacagaaccaaccacagccaggggcgtccccatggcgactgtggcccggcccctcctctcttgcctgactctcctctcttgcctgactctagacactaacttagttccaggttcggtgccctgttggtgctcctgtttccaatagcttaggtcccatggtgggggaggaacctcatgcagctatgcagcccccgccagctgccctcgaatcccgtccaggccagttccagattctaaactgatttttttcatgatattgtcaaaacagtgaggaaacattnaaaaaaagccctaaagca

SEQ ID NO: 259305 - DNA, 568 bp, Homo Sapiens
  misc_feature (26)..(26): n is a, c, g, or t
  misc_feature (40)..(40): n is a, c, g, or t
  misc_feature (46)..(46): n is a, c, g, or t
  misc_feature (91)..(91): n is a, c, g, or t
  misc_feature (111)..(111): n is a, c, g, or t
  misc_feature (178)..(178): n is a, c, g, or t
  misc_feature (190)..(190): n is a, c, g, or t
aatttcctcctaaacgtcccctcccnatcctcaactgggncaaaangaacaaccccgggaaaaaccctttttccaactttttccaaaaatnaaaactgcctatccttaaanaacaacaaaaaacataacttgtgggggctgatgccctcctcaccccagcacccccacatcttccccngaactgcaagangcttctcccccaacccttttcctctgcggaagggggcctgccctggaatcaggggtccagaacgcagagccagtgctttgatgccgaaggtgatggggtgagtctgaggtgtgcagaagcgatggggggcgggtggctccctggcacctgctggctcagtgcttggggcttgcaatgagaggtggaccaggcctgctgggtgaggagggacccagcaggtgtgaaaaggagtgaacccactgggaagagggccccgatctccatggtgtcatgccgaggctcccgcgcctatcctcacctaggtgactttatggaaaggcaggctgcatcccaggggttagggcacaaagccagccctgtggtgctcctgtgccgaat

SEQ ID NO: 259306 - DNA, 728 bp, Homo Sapiens
  misc_feature (273)..(273): n is a, c, g, or t
  misc_feature (417)..(456): n is a, c, g, or t
atgtgccattaaggtggaatcctatatggataggccaaacctatttcccaaactaaaaatgtgatagataaaagtgtgattaatcaaatgatatgatcagagtaaagaattctgccattttgatccttttactttgttttagccacctatagtgttaccaaccatctttatccttgtctgcagggataataatgaactaatgtagtgttttaagataatttaatgatactatctttccaaactttgttagattttaaatgtattaatgacccngagaccttaatgacaaatcactgctattagacaattgaagtgttcatttactttgtaattccaataatcatagttatggaattatggtaaggttttgcttttctgtcctaataaatatgtatattttttgagatggagttttgnnnnnnnnnnnnnnnnnnnnnnnnnnnnnnnnnnnnnnnntatacatatataaggagataaagtttcccattttccaatacagtttcacatttgaacagccctaattgatacaactttatggcagggttttagtgtgtgagtgggatccaaaacactcaatcctgtaaaagggtacagtcctattgtatgttagttaacacactgatgatgtgagcctgtgagatgagccaatcaccagttgttatgttcgaatctgctttgtgttgggacgctttaatgtaaggtttcactaaataaatgaattttcatat

SEQ ID NO: 259307 - DNA, 409 bp, Homo Sapiens
  misc_feature (11)..(11): n is a, c, g, or t
acttgggaagncctgaggcgggagaattgcctcaaacccgggaggcagaggttgcagtgaccccgggatcgtgcccacttcactcccagcccgggcaaaagagcaaaacgcccatctcaaaaaatatacatatataaggagataaagtttccccattttccaatacagtttcacatttgaacagccctaattgatacaactttatggcagggttttagtgtgtgagtgggatccaaaacactcaatcctgtaaaagggtacagtcctattgtatgttagttaacacactgatgatgtgagcctgtgagatgagccaatcaccagttgttatgttcgaatctgctttgtgttgggacgctttaatgtagggtttcactaaataaatgaattttcatatactgaactgaaa

SEQ ID NO: 259308 - DNA, 993 bp, Homo Sapiens
  misc_feature (70)..(128): n is a, c, g, or t
taggtagcgaggcctgggtggctgactcggcacgagggcgtggtggccatggcggccagcggggctgggnnnnnnnnnnnnnnnnnnnnnnnnnnnnnnnnnnnnnnnnnnnnnnnnnnnnnnnnnnntgatcacctgttccggcccatcagcgccgaggacgaggagcagcagcccaccgagatcgagtcgctatgcatgaactgttactgcaatggcatgacgcgcctcctgctcaccaagattcccttcttcagagaaataatagtgagctccttttcctgcgagcactgtggctggaacaacacggagatccagtcggcaggcaggatccaggaccagggagtgcgctacactttgtctgtcagggctctggaggacatgaacagagaagtggtgaagactgactctgctgccacaaggattcctgagctagattttgaaattcctgcctttagccagaaaggagctctgaccactgttgaaggattgatcacccgtgctatctctggcctggagcaggaccagcctgcacgaagggcaaacaaagatgctacagctgaaagaattgatgagttcattgtcaaactgaaggagctaaagcaagtagcctcccctttcactctgatcattgatgatccctcagggaacagttttgtggaaaacccacatgctcctcagaaagatgatgccctggtgatcacacactacaaccggacccgacagcaggaagagatgctgggggcttcaagaagaagcaccagcagagaagccagaagaggaagatctcagaaatgaagtgctccagttcagcacaaactgcccagaatgcaatgcccccgctcagaccaacatgaagctagtacaaatccctccacttttaaggaggttatcatcatgggctaccaactggcgagaactgtggggcatcggaaccaagaaggggaaatctgggaggaacaatagaaacccctgggcacccaggatcacccc

SEQ ID NO: 259309 - DNA, 1116 bp, Homo Sapiens
  misc_feature (489)..(606): n is a, c, g, or t
  misc_feature (738)..(746): n is a, c, g, or t
  misc_feature (875)..(887): n is a, c, g, or t
  misc_feature (969)..(977): n is a, c, g, or t
aattgaactcaaacccatcccccagtcccagataccagggccagcgtgtaggtgacccacaccagagccttcagcctcggtccttctcagcccgtcgggataggatccaggcatttcttttaaatctccagaggtagcagtaaacttttcagtattgctgttagcaagtgtgtgtttgcccaatagatacccattatactaatgtgccaagtaaatgttcattgcacatctgcttccactgtgttcccacgggtgccatgaagtgtgtgaggagcccctcatctggagggatgagtgctgcgttgactactgctatcaggattgtgttgtgtggaatattcatctacataaattttatatgcacagtaatttccctttttatatgtcaagtaactatttgtaaaagttatactcacaaattattataatgattactaatatattttttccatgtttcattgcctgaataaaaactgtttaccactgttnnnnnnnnnnnnnnnnnnnnnnnnnnnnnnnnnnnnnnnnnnnnnnnnnnnnnnnnnnnnnnnnnnnnnnnnnnnnnnnnnnnnnnnnnnnnnnnnnnnnnnnnnnnnnnnnnnnnnnttttggcgggccccccggccctcaaaaaacttttaaaaccctttttttggggggccgggccccaaaagggaacagaacatggctttaagggttcccccaaaaaccccggccaacacaagggggctggttctnnnnnnnnnaaaaaaagcccccgggcgcaccaccagagtttttaaaaaaaccccgaaggggggtttccgggacccattcccggggcctacaaacacgaggggcgccaggggggaggccgggaaatacaaaatatccgnnnnnnnnnnnnntggaccacatttttgcccggagagaacggggggcgccaccctccttttataccctatttttccgccgccacacgtgggagannnnnnnnntcctccaacacgggggcgtgtataataagcacccccttttacactctccccccagcgggggccaccctaaaaaccatgttgtggggcccccgtgttgtggcggcataaaaataattagtcgcgccccgcccggggcgcg

SEQ ID NO: 259310 - DNA, 1528 bp, Homo Sapiens
  misc_feature (18)..(18): n is a, c, g, or t
  misc_feature (49)..(49): n is a, c, g, or t
  misc_feature (128)..(128): n is a, c, g, or t
tgccaatggaaccatttnacttggccaccatttagtattaatggggtancttattggcaaaacaccacaacttgctaaacagcaaattactgaaaaagtttaactgcctaccttctgagattttaaanagaaaatgccctggatcctatcccgacggctgagaaggaccgaggctgaggctctggtgtggtcacctacacgctgccctgtatctggactggggatggtttgagttcaaatttgtacatgtccatctgaaaattctttataaatacagaattagcagttaatgatgtgaccaggaaattactgttttgagtatatgtcagataccactaaaaggcagagggggagaaagtgacatcttgacagttctaaattaaaggatcgatacagggaaggttcaggccacatctcagctctgagcctggcctcctccatacaagttaaagcattacacagaccaccacaggccagcattgcacacaacatctccatattagaactataaccagaatatatatttatataatagctgtaaccatattatagttaataaagtcattccttaggaatcttgtttgtccaaatctaactgcatgctaagaggcacagaaatgggattgcatttggacaaaaaactacaaaaaagtgcaatctttagtctccaggatgcaagctctggcactaggggatgggtcttccctggagaatgctgccgctgatagtctcttccagaggagatcctttgagaggagagtctgttacatcagtttctttactgttactctatggagactcaaggatttagtggtaagttgctttttaaaaataactggaatctggaggccagtcaaacctttttggacagatatctcctcgaaatacttctttattaaagtatttgaaggagatgacttcttagacctttggcttgacattctgggattcccagactatattgttctttcataagcaaataatctgttatcttttagattcttcagaataaatacatctttactttaaaatccctcgcttgaatcatgtaatctttcaaaacctagtttctatcttcctaacaacaggataaagtcagaaatgcaagtcagaaagcaagctcacaatcacatgaccacaaagagacaacagtcagagaccagttcatgagatggctaccaattataatgaaaaaccaagaggaagttaaaagggggctttcagaactttcacttccactaaaaaaggaatgtgcttgaaatcactttccaactcagtatacacagacttaaccaatgcttgctcttaaaaaaacccttttgagcttgagtaaccactgagctgccctttgttacctttatggaaaatgagtgcttcactccagctgcttttacccagcccaggaacatctgggggcagtttacactccctgtttataattagagtgaattcagggctatctaataaatatctaagtatttgtgtaagagttgtacaaagtatgggtaggttgaaagggtaactggct

SEQ ID NO: 259311 - DNA, 1899 bp, Homo Sapiens
ccataaacaccatctggcattgtgattgcagtaccagaactctccccagagggaactcatttagctatagaagaatccattttatttcacatatcacatgcttgtgcaggcatcagtgctaggaaccctaagaaacaacgcaatccacagatgaaagtctctctgcaccatttatatcttcatagataaatatcttagttctaatatgattggaatgtggatgcagaaataaaatgcagttttgctctttaagaattttatcaatgtaagacattgtattaaatttgtataaaatacacacaatcccctctactaagtttcatgatcacagtgccagagtgaagaaactctgcttgagttgaggaccagttagataggatattgaggatcactctttttcagctggatctctctgttcttgtgttttcaatcactagaccaaacccacgatgcccctgaaattctgggaatggtacaaggtcataactaatgcattccagatccaagttagggatttagctggtctataaattacagtttaagcacagatcaaagagatggctgccagcatatccttcaagggtaacctgagttccaagactttcccactgggctaaatggactccacttgttgcaaattataaatgcttgtcacagaatatgaaaaatatttaaatacattcatagatagtacctaataatatgttaacataaacataacgacacacatattatttttctaccccttggcaactgaaaatgaagttaccattcttaggccaaatttttagacaaagctttctaaaaccatctttataaagtaaattcagatatgcttacaataaaaagacataaaagattcatcctgagatgaattctgagtcaataactaaaaaccatttctaccagtgcatcactaccatgtaatccattctacgcaagctctacaaatattgagtcaaatcctgtctgtcagaaaatgaagacccaataagtttgccgaagtattcagtacaagaggccatttgtcttgcctttttctgacatgtgcatactataaaatcacaggtagccaacatttagtatcagtaaaaaacaactacgtttgttcacctgtttggcatagggagaaaacaatgtatctcatagcattaaatgatacagccttagacacatatgatgctcatatgttgcaaaagttcccaaatgttgagaagttctagtgaaaagtcatactattgtgcaaagatgaaaatttggagccaacgtctgtattcaaaataaccaaaatatattttaaagcaaaatatatcctgatactactatagattctaggaattgtcctaaaagagtaaagtgttgtttcctttctgaacatgaataacatcaaaggaagaacccagttcttaagacttaagtaggaaatttatagaaatttgatttataccagtagtaataacattcataaggaaaaactattaggtaacaattttctccaagaagaggatcagattacttaaaattgttggagaattctggttgtttgtgcaataatcatagtgatttacattgcttttcttctttcagagcaataagaaagttatttggggtagtacttgaaataattcatatacacagtcatttaacatagatcgtttctagtcgagtatgagcatacattcatgggaacaatctgtttcattcttcaaagtatgtttgtactttggaatgaaggagaaattctagggaaaaattaattcagaaatcttttgaaataagacagttcaaacctaggaccaggtaaccacattgcattgcctcccagtgtgatatgactgtgcttccaagtatgcatctaataaagttagttagtaggaaaatttgatgtctaaattttat

SEQ ID NO: 259312 - DNA, 1018 bp, Homo Sapiens
aacatacagaagccactgccaatgagctccgccgagtagcaccggggcagggctagcgcttaaaggagccgcgacccctttgcagaccagagggtgacccggatgatggcggccggcgcggccctagccctggccttgtggctactaatgccaccagtggaggtgggaggggcggggcccccgccaatccaggacggtgagttcacgttcctgttgccggcggggaggaagcagtgtttctaccagtccgcgccggccaacgcaagcctcgagaccgaataccaggtgatcggaggtgctggactggacgtggacttcacgctggagagccctcagggcgtgctgttggtcagcgagtcccgcaaggctgatggggtacacacggtggagccaacggaggccggggactacaagctgtgctttgacaactccttcagcaccatctccgagaagctggtgttctttgaactgatctttgacagcctccaggatgacgaggaggtcgaaggatgggcagaggctgtggagcccgaggagatgctggatgttaaaatggaggacatcaaggagtccattgagaccatgcggacccggctggagcgcagcatccagatgctcacgctactgcgggccttcgaggcacgtgaccgcaacctgcaagagggcaacttggagcgggtcaacttctggtcagctgtcaacgtggcggtgctgctgctggtggctgtgctgcaagtctgcacgctcaagcgcttcttccaggacaagcgcccggtgcccacgtagcccctgccatggaaggaaaaaccgggacaaaggagagggcaccagggtgtgtgcatatgaaaacttggggggtccctcccccaattttagttttcctgcccaaaacgggaagtggggcagtccagggccctggcggtcttgggccccattgagtcctcctttccggtcctccgcggggcaagggaaaacccctcctgggcttgggaaaaaaaggggaccggcttcacttggg

SEQ ID NO: 259313 - DNA, 1125 bp, Homo Sapiens
cagtggaaccagcactgtcattttgtgaagaaaatgatgatcctcagtccctgcctggcccctgggagcatcctatccagcaggagcgggacaagccagtacctctccctgcaccagaaatgacggtcaagcaagagagactggactttgaggaaacggaaaacaagggaatacatgaactggtggacatcagggagcccagtgcagagatcaaggtggaacctgcagaaccagagccagtcatttcaagagccgaaatagtagctggagttgttccagccacaagtatggagccaccagaactcaagagtcaggacttagatgaagaactgggaagtactgcagctggagagattgttgaagcagatgttgccattgggaaaggcgatgagactccacttacaaatgtgaagacagaagcatcccctgaaagcatgttgtctccatcacatggctcaaatcccattgaagatcctttagaggcagagactcagcacaagtttgaaatgtcagactcattgaaagaagaatcagggactatttttggaagccagataaaggatgccccaggtgaggatgaggaggaagatggtgtcagtgaagcggccagcctagaggagcctaaggaagaggatcaaggagaaggctacttgtcagaaatggataatgaacctcctgtgagcgagagtgatgatggcttcagcatacacaatgctacactgcagtcacacacactggcagactccatccccagcagccctgcttcttcacagttctctgtctgtagtgaggatcaggaagctattcaggcacagaaaatttggaagaaagccatcatgcttgtatggagaagctgcagctaatcataggtatgccaatgtcttcctgcagcctgttacagatgacatagcacctggctaccacagcattgtgcagaggcctatgggatttgtccactattaagaaaaacataagaaaatggactgatccgaaagcacagctgaattttcaccgtgacctttatgcctgatgttttcagaaatgctgtaaatgtaccataacctccaaaccatggatggtctattcacattgggcaatgggaaaaatgcacccgaagatggcctt

SEQ ID NO: 259314 - DNA, 874 bp, Homo Sapiens
agaggaaggcgctcggttacattggagaactggagtggtctggagttccacggtgtagtggaccagaggccacctctcctgggcttctcagtgtctcgccggcggggttcggcctgagctggattgacatagcccttggcggatttaaacaacctaaacattaagcagtacagctgcctcaaacctttgggattttcagaatgactgacactgccgaagctgttccaaagtttgaagagatgtttgctagtagattcacagaaaatgacaaggagtatcaggaatacctgaaacgccctcctgagtctcctccaattgttgaggaatggaatagcagagctggtgggaaccaaagaaacagaggcaatcggttgcaagacaacagacagttcagaggcagggacaacagatgggggtggccaagtgacaatcgatccaatcagtggcatggacgatcctggggtaacaactacccgcaacacagacaagaaccttactatccccagcaatatggacattatggttacaaccagcggcctccttacggttactactgatagaaatgttggcagcttttagtaaaagcatttactctgttaccatgagaaaagtttgggtgtcttctgttggtcatagttttacatctgattttacagaatggattattgattttttggaagttgagactttaaaaaaaatagatcttacttgcgaaatgcgatggttgctgggaatacctgaaactgtggattatattgcttgacttctacctcagaatcttctttgtttcatgacttaatagtgctttaagtttggtatattatttgacctctaggaattctttgttttacacagaaataaaaattttaataag

SEQ ID NO: 259315 - DNA, 1000 bp, Homo Sapiens
  misc_feature (143)..(178): n is a, c, g, or t
ggccgcttaattaatgaatcatagctcctatgctgaggaaacatattatgtatagattaatataaataaattactggattggctaaatgaaatgcatccagttcaatggaaaatgtgcattctattcagagccatactttagnnnnnnnnnnnnnnnnnnnnnnnnnnnnnnnnnnnnttcagagaaggttggtatatttgcagttggagcatcttggcttgaatgtctttatatatgactcagaagcctatcaaaagggctctgagcctcagacacaagatcaatgccttctttgtaagtgttccttacccaaaaatggctctgcaggagtgtccttgggcagccaggacacatagacagcctctgcaggaacacttggctctagaatttgggactgagggagatgcagcgagcccatcatgacgagtgcaaccagatgtggaagaagccaatgtgggcatgtcacgatctcatcagcatgccagtgtaggagaagcagaggctccggggtctccctgctgatctggaagatcttgtctgctgcttctgtacacctggtgctgtctgagtaagacaggtcttccagatatttggtagtgattaagtgaaacatatgttccaagaaaatgtttactatgccaggaagaaagcaatcgctggcctctcactggaacatgatgagagggacctttgtgatgacgggtccatcagtcagaagagggtacgatggctgaagtaaaattaagatgcctggtctccagttttctgccacacaacatgcttgtagaacagaaatttgggaacactgcataacaaatggtggatgtagatgtttcaaacaacatctaatctagttagacgtggcacctggccagagtaactacggttcactaaaactattctggattaggcttaatactgtctgcaggaccttttctctggaggggctggcatcaaccacatggcagccaggattctccatccgctggtaggatattt

SEQ ID NO: 259316 - DNA, 589 bp, Homo Sapiens
aacaaaatgcagcattgatatcagaaaatatttagtgcctaaacatacaaaagaaaaaccactaactttttctgtaggaattattttatggtttctactggtattttcatatttactttttgtagttgactgaggtctagcatttggtttaaatggaaaaaccggagctgagggatatggtactttaggttattatttccctacatctactgtatcagaaattactagtcaaggaacaaactttggaattacaattggtagagctattggttctatagctgtgggttgagcaattgcaaaacttacacataaatacgcagttattttagcgcttggattaatgctttttggaattatcgcaccttattctccaacatacgctggttttgttataatgagacttttactagctattggaggaacaacaatgattgttttagtacaacctattgtttctgcatacttcaataacggtcaaaaagcagttatttcacaatttacaccttggttttatccaattggtaccattattacattagcaccatttgcttttgattcttcagtatcaaaagcagttagtgcttactga

SEQ ID NO: 259317 - DNA, 881 bp, Homo Sapiens
  misc_feature (147)..(164): n is a, c, g, or t
gccaggggtgttatgaccgggttaacaggcctggttgccgctgtaaaaactcaaacacagtttgctgcaaagttcccactgtcccccctaggaactttgaaaaaccaacatagcatcattaatcaggaatattacagtaatgaggannnnnnnnnnnnnnnnnnaatacacatatgcaaccaactaaacagttataatcttggcactgttaatagaaaggtgggatagtctttgctgtttgcggtgaaatgctttttgtccatgtgccgttttaactgatatgcttgttagaactcagctaatggagctcaaagtatgagatacagaacttggtgacccatgtattgcataagctaaagcaacacagacactcctaggcaaagtttttgtttgtgaatagtacttgcaaaacttgtaaattagcagatgacttttttccattgttttctccagagagaatgtgctatatttttgtatatacaataatatttgcaactgtgaaaaacaagttgtgccatactacatggcacagacacaaaatattatactaatatgttgtacattcggaagaatgtgaatcaatcagtatgtttttagattgtattttgccttacagaaagcctttattgtaagactctgatttccctttggacttcatgtatattgtacagttacagtaaaattcaacctttattttctaattttttcaacatattgtttagtgtaaagaatatttattttgaaggttttattatttttataaaaaaagaatatttatttttaagagggcatcttaacaaatttttgccccccttttatgaaggaagggggataatttgccggcaaaaaggaggggggtaaccgaaagggatttggtcccc

SEQ ID NO: 259318 - DNA, 669 bp, Homo Sapiens
  misc_feature (71)..(79): n is a, c, g, or t
atatacatatataattctataaagctaatactgattaaacacagcacaaaaggattaattcacactactgnnnnnnnnncataataggaccctacttgcatatgtaaccacaggaattctacattaaaaaaaagctaaatgtcttcactgaagctttgcatctctctgtaaaaatgacgatttggttcagtgaagacactgagtgattcgatgtccatgactgcatgccaaggttgacccaggcccagggatacctgctcaataaggttatgcactggatctacatcctggtcggccagttcaccttggtcaaaatcaatgctttcttcggtgacttcaagcactttcagatcagagccccgaagacgagcaatggcaatgaggttgtgtgcccacaccgtgtaaccatgaattgccagaagagagagctttgtgcacctccatgctaataaaaccaacggatcttcatttcggttgtcactaagatctggaaaaccagatgtgtcaatcacatcattcattaaaataaaatgagtgaggaacttgtcatattgcctggatataagatcaaaatagcccctgaaacacaagtgatatagctatcaaaatgaatcctctctagtggtatactgggtttcagaatctttaacatatcttcactcttgatat

SEQ ID NO: 259319 - DNA, 652 bp, Homo Sapiens
ttttctaaaacatctctccttccaatcgatgagacaaatccagatttggaagagaaaatggaaagttcttttggttcaccatctaaacaagaaagtagtgagagtttgccaaaagaagcctttctggtcctctctgatgaagaggatatttcgggtgaaaaagatgagtctgaagttatatcgcaaaatgaaacgtgctctccagaagtagaaagtaatgaaaaggacaacagacctgaggaagaagagcaagtaatacatgaagatgatgaaagaccttctgagaaaaatgaattttctagacgaaaacgttctaaatcagaagacatggacaatgtacagtctaaacgtcgtcgatatatggaagaagaatatgaggcagaatttcaagtaaagattacagccaaaggagacattaaccagaaacttcaaaaggttatacagtggttgctggaagaaaaattgtgtgcgctgcagtgtgctgtatttgataagactttggcagaattgaaaacacgagtggaaaagattgaatgtaacaagaggcataaaacagttctcactgaactacaggccaagatagccaggttaaccaaacgctttgaagcagccaaagaagatcttaagaaaagacatgaacatccacccaacc

SEQ ID NO: 259320 - DNA, 1119 bp, Homo Sapiens
ttcttcatattctaaaaaaaggttcatgggctttaaaggttagggccaataaaaaaccctgtggccttttaggcattctttagttaaaaaaagctggaacaaaatccccaaaatttattccccattttcttgagaaaataaacttcataaaacaacagacagctgtcatgattactgagttttggctgatggcgaaataatttttatgtaagtatactgaataaacatacaaacaaatatccttaacaaaatactgtcagaccaacttgaatgtttttataacccactcctgaaaaaagtcctgataattattagatgtaaacgaccactataaattgatcatgcctggttactgggaattttttggtcaggtatgtttctgaagctgctatatagctggacttggctactttgcattaactcacacaacaaatgccttttataaggaaacagcagatctatcatgatgaactcaaaatcaaaacagttcagaggtatacaggaaacttgtcttaaaaatacttttaaattacatatgatataaccttagagaataagaactactattaccatggtctaaatcttaaactgttaatgcatgaattatctgtaagactaacaagttacttgttaatcatggcaaggccttgcaggggagggggcactctgaatgtacggcatagcaattattttccaggtaagtaaacacttctaagtgttattaaactatatttgaaaagttattttatgtaatatatacaacataccaaataagtcaaaaggaggaagcagaggaaggttttctggcatatatgatgcaaacatacaactgtccctcatcagtagtggttccatgtatgtccattttaacagggtaaaacatgaaaggttgataggagatcacaaatttcacttataaatagaaacaggattcaaaaactggaatttcaatgtcatttcttcccacattgcaactcactctaacaataataaacataaataaaaaccttatctcaaaaatgtttttacacccttaccttaaagtttaacataaattcttctaacaattgagaagaaaagcactcctctgtagcaattccataaaataattttcaatcc

SEQ ID NO: 259321 - DNA, 940 bp, Homo Sapiens
atgtttgggaaaatggggctagaagtaatgttacagtgaggaatacaaaccaaagattagagccaataagattacgatctacttccaatagtcgaagccgttcaccaattcagagacagagtggcactgtttatcataattcccaaagggaaagtagaccagtacagcaaaccactagaagatctgttaggaggagaggtagaactcgagtctttttagagcaagatagagaacgagaacgcagaggtactgcatataccccattctctaattcaaggcttgtgtcaagaataacagtagaagaaggagaagaatccagcagatcctcaactgctgtacgacgacatccaacaatcacactggaccttcaagtgagaaggatccgtcctggagaaaatagagatcgggatagtattgcaaatagaactcgatccagagtagggctagcagaaaatacagtcactattgaaagcaatagtgggggctttcgccgaaccatttctcgtttagagcggtcaggtattcgaacctatgttagtaccataacagttcctcttcgtaggatttctgagaatgagcttgttgagccatcatcagtggctcttcggtcaattttaaggcagatcatgactgggtttggagaactgagttctctaatggaggccgattctgagtcagaacttcaaagaaatggccagcatttaccagacatgcactcagaactgagtaacttaggtacagataacaacaggagccagcacagggaaggttcctctcaagacaggcaggcccaaggagacagcactgaaatgcatggtgaaaacgagaccacccagcctcatactcgaaacagtgacagtaggggtggcaggcagttgcgaaatccaaacaatttagttgaaactggaacactacccattcttcgccttgctcacttttt

SEQ ID NO: 259322 - DNA, 1274 bp, Homo Sapiens
  misc_feature (1134)..(1134): n is a, c, g, or t
cactacaagcccgccctttcctacgtctggtccagtcggtcttcctccggcccgggccctggcccagctagccggccatggaaggtaatggccccgctgctgtccactaccagccggccagccccccgcgggacgcctgcgtctacagcagctgctactgtgaagaaaatgtttggaagctctgtgaatacatcaaaaaccatgaccagtatcctttagaagaatgttatgctgtcttcatatctaatgagaggaagatgatacctatctggaaacaacaggcgagacctggagatggacctgtgatctgggctgacccccagaagcctcctttgttactagtttggagcagatccttgcagacgttttcctctgcattcacatgcatgcaaatgtacttctgaatgcgcacgattaccatgttgttttgcttcatgtttcaagtggaggacagagcttcatttatgatctcgatactgtcttgccatttccctgcctctttgacacttatgtagaagatgccattaagtctgatgatgacattcacccacagtttaggaggaaatttagagtgatctgtgcagattcatatttgaagaactttgcttctgaccgatctcacatgaaagactccagtgggaattggagagagcctccgccgccatatccctgcattgagactggagattccaaaatgaacctgaacgatttcatcagtatggatcccaaggtaggatggggcgccgtctacacactatccgaatttacacatcggtttggcagtaaaaactgctgaacttggcctcaagatgtggaactgtggagaaattctaggacatgaacaagctatcctttcatcgaggacagcaaacattatggtacagttggcttggaattatgtctttctcttttaatttgattgagtggaaatctgagtgagtacaaatataaatgaacaacataaaaacttttgttttgacatgtcaaattgaaacttgataaagtgcgtacttgctaagatattcctgtggctcatgcgttacaacacgaggacttaagccagtaatcgtttttgttcaaatagaggtggtggaggtagagccagcccctcatgcctgttcctggaagtttttnggtctcccccacctacccctggaaggttccttggaggggcagggccatggcccccttggtcctgggggcctggggcctggaaaaggggtaaatatggggggcctaattcccccaaaaggatttagccctttttggaacaa

SEQ ID NO: 259323 - DNA, 432 bp, Homo Sapiens
  misc_feature (100)..(100): n is a, c, g, or t
catgtcaaattgaaacttgataaagtgcgtacttgctaagatatccctgtggctcatgcgttacaacacgaggacttaacccagtaatcgtttttgttcnagatagaggtgtggaggtagagccagcccctcatgtctgttctggatgttttgtgtctctccagctacactgtaagttccttgaggggcaggccatggcccattgctctgtgaatctcaaatgcccataaaaggtgcccataaaatgttttcttgaacatttgaatgtgctgttgtctggaaaggggtaatattgtgagctgaatcagcaataagtattagtctttttggactatggtattgttaaaaagactgcagccctctcagacttgagcgttaattggcttatttatttatggctttaaataaaatcgatttaacgttaattaaaaa

SEQ ID NO: 259324 - DNA, 1316 bp, Homo Sapiens
  misc_feature (1083)..(1090): n is a, c, g, or t
  misc_feature (1092)..(1126): n is a, c, g, or t
  misc_feature (1128)..(1141): n is a, c, g, or t
  misc_feature (1144)..(1145): n is a, c, g, or t
  misc_feature (1147)..(1156): n is a, c, g, or t
  misc_feature (1158)..(1168): n is a, c, g, or t
tggaagaataatgatcacatattgcagtcctgcaaagacctccagtaccataatttggatctcttcaagggacttgcagattatgtggctgcaactttcgacatctggaagttcagaaaagttctttttatcctcattttatttgaaaaccttggctttcgacctgttggtttaatggacctgtttatgaagagaatagtagaggatcctgaatccctaaacatgaaaaacattctatctattcttcatacttactcttctctcaatcatgtctacaaatgccagaacaaagaacagttcgtggaagttatggctagtgctctgactggttatcttcacactatttcttctgaaaacttattggatgcagtatattcattttgcttgatgaattactttcccctgggctccttttaatcagcttctgcaaaaagacatcatcagtgagctgctgacatcagatgacatgaagaatgcttacaagctgcatactttggatacttgtctaaaacttgatgatactgtctatctgagggacatagccttgtcactcccacagctgccgcgggagctgccatcgtcacatacaaatgcaaaggtggcagaggtgctgagcagccttctgggaggtgaaggacacttctcaaaggatgtgcacttgccacacaattatcatattgattttgaaatcagaatggacactaacaggaatcaagtgctaccactttctgatgtggatacaacttctgctacagatattcaaagagtagctgtgctatgtgtttccagatctgcttattgtttgggttcaagccaccccagaggattccttgctatgaaaatgcggcatttgaatgcaatgggttttcatgtgatcttggtcaataactgggagatggacaaactagagatggaagatgcagtcacatttttgaagactaaaatctattcagtagaagctcttcctgttgctgctgtaaatgtgcaaagcacacaataaagtgaaaatcaaccttttcatattaggagacatgcatttgtaaaaattaataaagatgacaagtcagttgtcaatggaattgnnnnnnnncnnnnnnnnnnnnnnnnnnnnnnnnnnnnnnnnnnncnnnnnnnnnnnnnnttnncnnnnnnnnnncnnnnnnnnnnnaaaaacatgttcggccgcctccgcccctcaaaaagttttcaaaaacccattctttgggggcggcgggcccaaaaaggaaagggaacagggccaatagttgttccccaggaaaaccctgggccaggaccaagggttggggattcccccc

SEQ ID NO: 259325 - DNA, 770 bp, Homo Sapiens
  misc_feature (411)..(411): n is a, c, g, or t
  misc_feature (733)..(733): n is a, c, g, or t
aggtagatgcacctcctaattgtgtctcttacgcgaattagaataagcaaggacctctctcacatgtattttgccaccttgtgtttctttgttacttaacaatgtggctgtagtacttagcttgtaggcagagatgatgagcttgatggaaacatgaacctagaggagagctgtgtgttgcttgacattcctggttttgtgccctaattaatgtgttcttgatcttgatagatttgtttagtgaatgaccctaggccccagcacaagtacaacaaactttacacagtgggaatacttaaggcaatatggttgggagggagaaaaactcttatacaacaaccagcccattggacttcctgaaaaagatggttgctgcctccatcaaagatggagaggctgtgtggtttggcntgtgatgttgggaaaacacttcaatagcaagctgggcctcagtgacatgaatctgtgagtgcaggaaatttaaaatggaaagtcatttgtgggttgttgctgttggagtgtgctgttggtacaaatgactctgccgaggttcatcaaagatgaaggttgacctaagggcgctctttctttgcatctttagagtttgaggctcatagcagaacatcacatacttaacactctagcggagacatcaaattccacttctactgagtgaaactgtggcgtcctaaaagcatctctatgagaagcactttagaaaatatgctatgcngatgtgcatcgatgtgatgtatagatctaggcccgtc

SEQ ID NO: 259326 - DNA, 860 bp, Homo Sapiens
atccttcaatctgttggctgtgggatgatactaatatgaagaaaatatcccgggtagctcagatgttcactcagccactgcagaggtgtttccaacattggctcaattccatgaatcatcacttgattctttttttccccatcttcaggatcaatagcagaaaggacaaacttctttgaggagatctcctagggtgtgcaactgtccatctgcagccacaggacgaaacagcttctgaatgaaaggtctttcagtcgttgtctgatatattctaaaggggatataacgaaatccattttcttctgcaggatattccatgagtttccgattgatggcccaaaactggtcaaatctgtcattttgcaatcccatccagagttgcttgtgatcttttttctgcatttcattgattacttgacttttatgttttaaagcatcagcttctttcatacatgacataaaatgagcttcaattgcatccttagatggacagtgcagaaggtctttttctggaaaactcttaaaatgtactgtgatgttccaaggaagagctgaacttgatgcaagaagatcaaatagcaaaccaattggataatgcatagtatggttctgcttccctttcagttatctcatcctgatatagcgtgaaacaagttggaattcgtccaaaccacacatctcgaagcacatctttgtcatctgtcattcttccaggagttaaagcagtacatacaggttaaattcttatttcaaccaaagccaaacctactccaagctatggctcctccttccggctccccgcactggtggggacgcccagattccgcgctccggtggggcggcggggcaagctgcccccc

SEQ ID NO: 259327 - DNA, 837 bp, Homo Sapiens
actagacatcaaatctgagaagccaactgtggagtaatgtgtttttttctctgtggacaagagtgatcagaaaggtgcttgatcttgaacaattgatccatgatgaaaaaatgaccattagctctcccccagaagcgtctgtgtttgctgaatggagctgagattttgatccgctatcagactccagaaagatccaggagttccaagaacatggcaaagagtcaaaatcttaggacaaggaattaaaatgccagaatgcaaatgtccaacaggcctggtagctcacagctatcaacaccctagaattccacactgcctcactgcagttgctcaaggatgggtatgtttctgtctctgaaattcgggaaaaagccttaagtgccagagaaggtgcttccaagactgtctgcagaattcctttcctagggtctgtctctggtacccaaaagggcagagaaggaaccctaagattagcatagagccactcatctctcctcccctccccaccccttcttcccctgcttccattccccatggctctctcctctgactgtgaaacacttcctctccagcagtgttgggaaagttctggacctctactggatctagccataaatggtggtcttcagaaaaatggagattgtggctgccagcacccacaagacagcagcctcatgccatgcaggcagcaagccatcctgaacagcgttcctcccagagtctgtttcctcacctgctgttcactggtgagaggaaaagggacttgttctcccttgaccagttttctagttttcctgttcccaccctggtctttgcctgatgacagagaaactttct

SEQ ID NO: 259328 - DNA, 424 bp, Homo Sapiens
  misc_feature (34)..(34): n is a, c, g, or t
caggggaaagaaagggtggggaagggaggaaaanatgaagtggcctcctaaggcctaaaccttaagggtcccctcctctgccccctttggggtacccagaagacagacccctaggaaaggaattctgccagacagtccttggaagcaccttcctctggcacttaaggctttttcccgaatttcagagacagaaacatacccatccttgagcaactgcagtgaggcagtgtggaattctagggtgttgatagctgtgagctaccaggcctgttggacatttgcattctggcattttaattccttgtcctaagattttgactctttgccatgttcttggaactcctggatctttctggagtctgatagcggatcaaaatctcagctccattcagcaaacacagacgcttctgggggagagctaatg

SEQ ID NO: 259329 - DNA, 925 bp, Homo Sapiens
  misc_feature (507)..(519): n is a, c, g, or t
  misc_feature (523)..(532): n is a, c, g, or t
taaagttgaaatcatagaagatgcaaatgacctttcaaaatcaacacaatgtgttctgaaactttcgtgactaataccatgcatctgtgatcaatgaactatgtggttttgaatcggatgtagaccattagtactactacttgagctaaacttctgcatggttcataatttttaaagtgtgtagttaatatgcatgttatcgtcctttcttccattcttaacagtatgtgcccatttgcaaaacaaaaatgctaataatcagtaatagtcctataaaagatgttaactctgtttagtcattgactgatcttgctctaaccttaaaattttgtgattattgacctctgttgcatttattctaaagccccccaaaaattatctagccgtttcgaatatcaacattaccctggtgtattcactgctgtatgcattattgttctttgttgctgttttatgccttcatattagcaaatatgaaattctgtgaaaaaaaaccctttgatcttnnnnnnnnnnnnnccannnnnnnnnnttctgtagcaggaaacaaattgcttgttcttgagaactttcccatcaagaatttagtagaagcaggtatacttctatcattttgatgtttttgttaatgtttccaaacaatgtactttgaaatcagaatcacttcttatcgttttcatatacttctgatgctcttcatcacattagtgatcagaaatgaggtgtaattccccaacccctgcccgcaagagctaagtaggatcttactgtaagttgaagggagttttgccctaactcatggattgtgcaagaatgaactgctgttgggtttgactgactgtcgatggattgtggtgtggtgtatctgaaggctattgaatgcaacttacaatgcttaataaaaatctttattcttttagtataa

SEQ ID NO: 259330 - DNA, 804 bp, Homo Sapiens
  misc_feature (556)..(559): n is a, c, g, or t
  misc_feature (561)..(561): n is a, c, g, or t
  misc_feature (563)..(564): n is a, c, g, or t
  misc_feature (566)..(566): n is a, c, g, or t
  misc_feature (568)..(568): n is a, c, g, or t
  misc_feature (570)..(570): n is a, c, g, or t
gtgtgctagtggcagaaaagtaatgagagatttattttagaggaaaacatccacagaacttgatgacagggagtaggaatgagacgatgcgtgatgagctcagtgtgccacttacagaggaagttgaagacaattaattttcaaacctgggtgactaatggttaggtttttggaaatacggaatttatgctggttttagacacactggttggagatgacaaggggacatttaaggggaaatgttgagagagttgcagcgtaaagctggagctccagtgggccaggagcagaagagaaagatgctagctgctcacagaagtgggaactgaagcatctaaggcaagtcagatgttccggagaggaagacacctccattttaaagtgacagttacaccattgcacccagaaaccccagagaagtgaagtggttccgctcgaggtctcatggcaagttagagacacagccactccacctcactttccttgatgtgtgtggtccagtttgctttacattataacacagaaaccttctcaatgttcagatatacctgctttnnnntngnncncntnccatttcttgacagtcaaggcaggctgacgaaagacagaattttatttccttagtttattaaagatgacaatgaactgccaggctgcacaagcaccacagcaggtggaaacgcagttcagagcacgggcggcacacacggaacatctctactaagactcgcactccttttatgttagttcaacgaaagctctaaatccttggcagagaacgtcaaaaacagcctcatttaagtg

SEQ ID NO: 259331 - DNA, 335 bp, Homo Sapiens
tgtatggcccaggccaagagctgtcaaatgaaaaactttgtgctgaagcaggtttttagtatgtatatctttttgatggtatgaaaaatttatttaggcttgactgttttaaaacaccataatgaatgtataattaatctaggttaaagtattaaccctttgtcacaaaggaatggtaatgtgattggctgcctgttaccccatcgactattcccgtcacggtagtccttacctctgtcggcagctcaaagcctccacatttttatatttaattctcatgataaattacccaccataatcccatggaattaggtcttgttaaaatctattccggg

SEQ ID NO: 259332 - DNA, 872 bp, Homo Sapiens
  misc_feature (751)..(751): n is a, c, g, or t
  misc_feature (772)..(772): n is a, c, g, or t
  misc_feature (779)..(779): n is a, c, g, or t
  misc_feature (801)..(801): n is a, c, g, or t
  misc_feature (822)..(822): n is a, c, g, or t
  misc_feature (835)..(835): n is a, c, g, or t
  misc_feature (847)..(847): n is a, c, g, or t
  misc_feature (855)..(855): n is a, c, g, or t
aagaaaacggaaacagctgctcattcactcccacagcagacaaaaaagcctgaatcagaaggttatcttcaagaagagaagcagaaatgttacaacgatctcttggcaagtgcaaaaaaagatcttgaggttgaacgacaaaccataactcagctgagttttgaactgagtgaatttcgaagaaaatatgaagaaacccaaaaagaagttcacaatttaaatcagctgttgtattcacaaagaagggcagatgtgcaacatctggaagatgataggcataaaacagagaagatacaaaaactcagggaagagaatgatattgctaggggaaaacttgaagaagagaagaagagatccgaagagctcttatctcaggtccagtttctttacacatctctgctaaagcagcaagaagaacaaacaagggtagctctgttggaacaacagattgcaggcatgtactttagactttgaaaatgaaaaactcgaccgtcaacatgtgcagcatcaattgcttgtaattcttaaggagctccgaaaagcaagaaatcaaataacacagttggaatccttgaaacagcttcatgagtttgccatcacagagccattagtcactttccaaggagagactgaaaacagagaaaaagttgccgcctcaccaaaaagtcccactgctgcactcaatgaaagcctgggtgggaatgtcccaagtgcaatattacagtatccagccactgaggcattcgcgatnctgcttgtccatgtgggaatnactgttncaaagttaggcaaaattaagtnttttgtttttgatatttaaanaggtttcaatacntgttatttttcngtttaggntttgggggcattttttg

SEQ ID NO: 259333 - DNA, 2110 bp, Homo Sapiens
  misc_feature (1627)..(1627): n is a, c, g, or t
ccaacaaaagtcagatccgtacctggagcaactcccgaggggaagggaagcttttctccctagaactggttgacgaaagtggtgaaatccgagctacagctttcaatgagcaagtggacaagttctttcctcttattgaagtgaacaaggtgtattatttctcgaaaggcaccctgaagattgctaacaagcagttcacagctgttaaaaatgactacgagatgaccttcaataacgagacttccgtcatgccctgtgaggacgaccatcatttacctacggttcagtttgatttcacggggattgatgacctcgagaacaagtcgaaagactcacttgtagacatcatcgggatctgcaagagctatgaagacgccactaaaatcacagtgaggtctaacaacagagaagttgccaagaggaatatctacttgatggacacatccgggaaggtggtgactgctacactgtggggggaagatgctgataaatttgatggttctagacagcccgtgttggctatcaaaggagcccgagtctctgatttcggtggacggagcctctccgtgctgtcttcaagcactatcattgcgaatcctgacatcccagaggcctataagcttcgtggatggtttgacgcagaaggacaagccttagatggtgtttccatctctgatctaaagagcggcggagtcggagggagtaacaccaactggaaaaccttgtatgaggtcaaatccgagaacctgggccaaggcgacaagccggactactttagttctgtggccacagtggtgtatcttcgcaaagagaactgcatgtaccaagcctgcccgactcaggactgcaataagaaagtgattgatcaacagaatggattgtaccgctgtgagaagtgcgacaccgaatttcccaatttcaagtaccgcatgatcctgtcagtaaatattgcagattttcaagagaatcagtgggtgacttgtttccaggagtccgctgaagctatccttggacaaaatgctgcttatcttggggaattaaaagacaaggaatgaacaggcatttgaagaagttttccagaatgccaacttccgatctttcatattcagagtcagggtcaaagtggagacctacaacgacgagtctcgaattaaggccactgtgatggacgtgaagcccgtggactacagagagtatggccgaaggctggtcatgagcatcaggagaagtgcattgatgtgagaggagcagtgccaatcgggcagaagtttgcaaataggcagaatggaatcgatttcctcccacctccgtgtgacgatcccatgttagctacacagtgcagaggctcttgatggtggactaagcaatttcctccctcgtgcgcatctcagaacccatcggtaggcaaaggaaaatacgctcaggtggttgtggtgtagactgtgtcaggcctacggagtcagccagtggctagcgcaagaccagtcactccctctgccttcaggcttctgtcaatttcattatcatcaagcaggaattatgtcgtaagtcactgaccctaactgcagaccatgaagtaaattatgtaactaggtttttgcttctccagtggtgaccaccccccccncatccccgctcacaacttgggttcttctcagcggggcgagctgagaagcggtcatgagcacctggggattttagtaagtgtgtcttcctagaattcgaaggctctctctttctagaggtgctacatagttggtaatgcttggaatggcaatagggtagaatgattaatcaaaggcatatcttctatatctgaagagtatccttccttcagggtttaatagactgagtcagatgggtctgatattaatcaaaattgtctcttctgaggaccgctgataagcattgacttgccgtcccctaaggaaatccgagcggctacaaagcgtttctttacttttcacttcaattaaatgctgcgctcgcttggtgagtgcgtactttttctacctgtacacattcctgcatccatgtatcttgtcttttttgactcaacctctgttacatggaaaggcttctgcagccttttgtttcccctgcttcgttt

SEQ ID NO: 259334 - DNA, 488 bp, Homo Sapiens
  misc_feature (327)..(327): n is a, c, g, or t
  misc_feature (434)..(434): n is a, c, g, or t
  misc_feature (443)..(443): n is a, c, g, or t
  misc_feature (448)..(448): n is a, c, g, or t
  misc_feature (473)..(473): n is a, c, g, or t
gcgacaccgaatttcccaatttcaagtaccgcatgatcctgtcagtaaatattgcagattttcaagagaatcagtgggtgacttgtttccaggagtctgctgaagctatccttggacaaaatgctgcttatcttggggaattaaaagacaagaatgaacaggcatttgaagaagttttccagaatgccaacttccgatctttcatattcagagtcagggtcaaagtggagacctacaacgacgagtctcgaattaaggccactgtgatgggacgtgaagcccgtgggactacagaggagtatgggccgacgggggttcattgagccntcagggaggaagtggcatttggatgttgaggagggagccagttgcccaattccggggcaggaagtttttgccaaataggggcaggattgggattccgtttttccctncccaccctnccgtnttggacgttccccctgtttaggctnacaccattgccagga

SEQ ID NO: 259335 - DNA, 510 bp, Homo Sapiens
taagtaagagtatttggtggatgccttgggtctgaaagtccatgaaggacgcgattacctgcgataagcttcgtggagttggaaataaactatgatacggagatttccgaatggggtaacctaactgagcaaacctcagttgcattttgatgaatccatagtcaaattagcgagacacgttgcgaattgaaacatcttagtagcaacaggaaaagaaaataaataatgatttcgtcagtagtggcgagcgaaagcgaaagagcccaaacctgtaaaaaggggttgtaggacatcttacattgagttacaaaattttatgatagtagaagaagttggaaagcttcaacatagaaggtgatattcctgtatacgaaatcataaaatctcatagatgtatcctgagtaaggcggggcacgtgaaaccctgtctgaatctgccgggaccacccggtaaagctaaatactaatcagacaccgatagtgaactattaccgtgagggaaaggtgaaa

SEQ ID NO: 259336 - DNA, 634 bp, Homo Sapiens
ctaacagaggatcaaagcacagtgaaagagaatgttagacacggtgtgatgatggttaaaatcaatcagcttctgtccaaacgcaaggtgaagtacaaccgttaccatcatggtggcctttatggagacacgggagcctaattttgctgggtttcaactgagttacactgcacaaatatgagtctctgtgaaaatgtagtaacaggttgcacagaaagtccagtgtactttctcttctgtggaaaacacaatgattcctctcctggatttgttcagtggacctcccctccagtaaggggagaagtggttctgccatggagagagcagctgcaggacttggggaaggaggaagcagagctggggaagaacccagccagggggtggctctgtggctgctttccaatgaacccctcacgtgggagacatgtgggcttggcatgactagaaagctgggaaggtgcagggaaatgaagcccagatgaagaaaaggtccctaattttaagaccaaacaacaaaagtgagttctggttctggaaatcacctactcatgccactatacacataagttttaaacaattcacatgggacaataccaaagggcagagtgcagaaaagccattttgggtaagttcc

SEQ ID NO: 259337 - DNA, 757 bp, Homo Sapiens
  misc_feature (33)..(33): n is a, c, g, or t
aaatctcaaaaggtatttgtttgggtgcagaancaaatgcaccctccacatttggattttctctagaagaatctgtggccaaatctcttatccaatggaggtactgagtggctggatcagttaccatgcaagctcacgatgaatgagattgaatttggttctgtgtgcacactgggctctggggagggaggacacccctgtgtgttgctgctgccttccgtgctgtctactgtatccttcatgtgtctccaaatggtacacgccccatgggattacagaacacagctacagaattaggatctcatggtaacaatgaggaattaggttactgtagaactaaaatatgtttaatgaaattaaaatgcaatggaaaaaaaatcaggcaacagaacattctgatgaatttacaggactgattatatcccacggcactgaatgacaaacagttcttctccatacagtcgcaattagaggcatagaagtcatactgaatgctgaatagaagaacactgagaagagcaggttataaatgaaggttttcacataaaacagaaaaatagacaaaatcatcggtaagaagctagctttcgaaaacctccctaaaagtacacggcacggagaagtggggtactgggatgtcctggctgctttctgctttgggaactatccaagtggcacatcaccatgtccagcttaggtgtcttgtgaaaccttacttcctccacataaaaaggaaggaacggtttccaaagctaat

SEQ ID NO: 259338 - DNA, 566 bp, Homo Sapiens
caaatgcctctacccagatgggtggagctatggcgcctccaatgaaggatctacccaggtggctggaagaaaatcctgaatttgcagttgctccagactggactgatatagttaagcagtctggttttgttcctgagtcgatgtttgaccgccttctcactgggcctgtagtgcggggagagggagcgagcagaagaggaagaaggcccaaaagtgagatcgccagagcagccgcggccgccgctgctgtggcctccacgtcagggatcaaccctttgctggtgaacagcctgtttgctggaatggacctgacgagccttcagaatctccagaatctccagtcgctccagctggcaggcctcatgggcttccctccaggactggcaacagctgccaccgccggaggcgatgcgaagaaccctgctgctgtgctgcccctgatgctgccaggaatggcgggcctgcccaacgtgtttggcttgagcgggctgttgaataaccctctgtcagctgctactggaaacaccactactgcttctagtcaaggagaaccggaagacagcact

SEQ ID NO: 259339 - DNA, 890 bp, Homo Sapiens
  misc_feature (768)..(776): n is a, c, g, or t
gccctctgggcactgtggcagtgattggaattgccacaaaacgggcccccatgcagtgccaaggttatgtggcattgctgggcagtgatgaccagagctggggctggaatctggtggacaataatctactacataatggagaagtcaatggcagttttccacagtttaactactcaccaaaatatcagataggagaaagaattcgagtcgtgggggacatggaacacaccctttagcttttgaacgtggatatgagttcctgggggttgcttttagaggacttccaaaggtctgcttatacccagcagtttctgctgtatatggcaacacagaagtgactttggtttaccttggaaaacctttggacggatgacagtggctttcttgtgatgacagacagaatggaggagagatctgcttatgggaagtagaaccatgaagtgactgtcacacatgcatgtccaagaaacatcctgaaaacacatgaagtcgtaaactggagaagcagctctacagcagagattatcttcgtgtttcctctttctactgggccagaaaaatcctcagggttgcagttggttgagtgggcagttgacatatgcatgttgcacccgatgttgtctctaagttagcaatgtgttatttccagctttaaaggtgagattgtagagatgctgtcaaagggataaggaaatagcaagatttttaagtagtgtgtttgtgaagactgatccccattttacaactgcctgttctttctccagtccnnnnnnnnncagccagcttgactattagaaaagtatgaaactggttggggtttatttaatatttttaatatattgagaagcatggtctgcctgggactgcacttctctaaaagtgagatataa

SEQ ID NO: 259340 - DNA, 1341 bp, Homo Sapiens
gatggttctgcccaaagcgggagccagccagtgtctcccacgggtcccggccgaagccagtaggtgtctccctcaaaacttgttggcactgtccgcaagactggggtgcacaactccatggttgcctgtcagccccaggtccacagttcggcccagggagtcccgaagcctccggccaacggtatccatgactgtgctcactttggcctgtttaagctcatggatcctggtagtcaggatgcggccggcatgctgcagacccgtcagggcgatgtacatccggagaatctcattggttccctcgaagatgaggaggatgcgggtgtcacgcagtatgcgctcgtacggatagtcccttgtgtagcccaagcccccgaggatctgcagcgcctcactcacacactgccaggcggcctcggagctgaacacaataaccatggctgcctcgatggagcagtcgggaaagccaggttggtccagcatccctgctgtgaggtaggtcatactctccatgacgtaagccttctgagccatcagtgcaaatttctcctgaatcaatccaaattcactgagcctcttgttaaactgtttccttgtgcaggcgtacttcagcagtcatttcaatcaatctcttgaccagcccagccacgacgctgcccatggctgaaccggccgctgttgaggatgttcatggccaccttaaacccatctccgacctctccaaggatgttttccacaggtatcttggtgttttcaaaatggacttcacaagtgttggagccccgaatgcctaagtttatcttcgggtttcccattagtgactccaccaaagtctctttctactatgaatgctgtgattttgtctttcactgatccatcagaatcaacgacctcagtctttgcaaacacagtaaaaatattggccagtcctccattagtaatccagaccttggagccattgaggatgtagtgcttcttgtcttcacttagtgtggctctgctccggattgaggctgcatcgctcccactggctggctccgtgaggcagaaggctgcaatgtgctccccggacgccagtttaggcaagtatttggctttctgctcctcagtgccagccaagatgatccccttgaggccaatagcctggtgcgctgccagggtcacagtgatggacccatccatgctgatgatctcccctagtcgtgagtacatggtgttggagaagcccaggccaccatattcttctgggacttgcagcccaaaaagccctaggctcttcaatttctccaaagtttcatctgggattttcccttcctggtcaatttttcgggagtccacctc

SEQ ID NO: 259341 - DNA, 1105 bp, Homo Sapiens
  misc_feature (603)..(604): n is a, c, g, or t
aggataagcagattgaggacctgtggctgccttacttcaacgtgaccacagatatcaccgcctcagccatgcgagtccacaaagatggctccctgtggcggtacgtgcgcgccagcatgacgctgtcgggctacctgcccccgctgtgcgaccccaaggacgggcacctactcatggatggcggctacatcaacaatctgccagcggacatcgcccgcagcatgggtgccaaaacggtcatcgccattgacgtggggagccaggatgagacggacctcagcacctacggggacagcctgtccggctggtggctgctgtggaagcggctgaatccctgggctgacaaggtaaaggttccagacatggctgaaatccagtcccgcctggcctacgtgtcctgtgtgcggcagctagaggttgtcaagtccagctcctactgcgagtacctgcgcccgcccatcgactgcttcaagaccatggactttgggaagttcgaccagatctatgatgtgggctaccagtacgggaaggcggtgtttggaggctggagccgtggcaacgtcattgagaaaatgctcacagaccggcggtctacagaccttnnaatgagagccgccgtgcagacgtgcttgccttcccaagctctggcttcactgacttggcagagattgtgtcccggattgagccccccacgagctatgtctctgatggctgtgctgacggagaggagtcagattgtctgacagagtatgaggaggacgccggacccgactgctcgagggatgaaggggggtcccccgagggcgcaagccccagcactgcctccgagatggaggaggagaagtcgattctccggcaacgacgctgtctgccccaggagcgcccggctcagccacagatgcctgaggacctcgaacagggtcaccccctccctcccacccctggactgggctgggggtgggcccgtgggggtagctcactccccctcctgctgctatgcctgtgacccccgcggcccacacactggactgacctgccctgagcggggatgcagtgttgcactgatgacttgaccagcccctcccccaataaactcgcctcttgg

SEQ ID NO: 259342 - DNA, 818 bp, Homo Sapiens
gaagctttagaagtggaacgacaggaaaatgaacaaagaagattatttatacaaaaagaagaacaactgcagcagattctaaaaaggaagaataagcaggcttttttagatgagctggagagttctgatctccctgttgctctgcttttggctcagcataaagatagatctacccaattagaaatgcaacttgagaaacccaaacctgtaaaaccagtgacgttttccacaggcatcaaaatgggtcaacatatttcactggcacctattcacaagcttgaagaagctctgtatgaataccagccactgcagatagagacatatggaccacatgttcctgagcttgagatgctaggaagacttgggtatttaaaccatgtcagagctgcctcaccacaggaccttgctggaggctatacttcttctcttgcttgtcacagagcactacaggatgcattcagtgggcttttctggcagcccagttaaccatttataagatttggaccttggagctgaaccagggagctagcaaaagtaaagcagacttataaaattatagctatgtgcagctgcacaacacagtccttccactagcagctgtgttaaagtatttataaggagaaaatttcagaactaagttgagtaatataggggatatatatttgtgaaaaataatttttacttatatttttcagaggatttgacacgataagcctcatctgatggaagagaggaataaataattcacctatatgtgtttgaggttgtgacagacttataaaatctttttaaaaaataaagctataatttatacgaag

SEQ ID NO: 259343 - DNA, 829 bp, Homo Sapiens
  misc_feature (539)..(539): n is a, c, g, or t
  misc_feature (709)..(709): n is a, c, g, or t
  misc_feature (720)..(720): n is a, c, g, or t
  misc_feature (755)..(755): n is a, c, g, or t
  misc_feature (762)..(762): n is a, c, g, or t
  misc_feature (768)..(768): n is a, c, g, or t
ggggggaccgtctctgccaagcgcctgttggtaggaacctgcttggtcgcgtctgagggggcttgtaggtggctctggctgaaacaggcgcctgcgagagtctgtaggagggaaaccgccatggacgatcagggttgccctcggtgtaagaccaccaaatatcggaacccctccttgaagctgatggtgaatgtgtgcggacacactctctgtgaaagttgtgtagatttactgtttgtgagaggagctggaaactgccctgagtgtggtactccactcagaaagagcaacttcagggtacaactctttgaagatcccactgttgacaaggaggttgagatcaggaaaaaagtgctaaagatatacaataaaagggaagaagattttcctagtctaagagaatacaatgatttcttggaagaagtggaagaaattgttttcaactttgaccaacaatgtgggatttggacaacaccaaaaaggaaaatgaagatatacccaaaaggaaaacaaagatgttattcagaaaaataaattanagctgactcgagaacaggaagaactggaagaagctttagaagtggaacgacaggaaaatgaacaaagaagattatttatacaaaaagaagaacaactgcagcagattctaaaaaggaagaataagcaggctttttttagatgagctggaagagttctggatctccctggntgctctgcttnttggctcagcataaagatagatctacccaattaanaaatgcnaacttngagaaaccccaacccggtaaaaacccagtggaacgtttttccacagggccatcaaaaatgg

SEQ ID NO: 259344 - DNA, 436 bp, Homo Sapiens
  misc_feature (144)..(144): n is a, c, g, or t
acttatttccactatctcattgaactctcctggtatgtgatagtgttataatgaaaaattgcataccaggacacctaagtctattttgcaaccatacagcgttccaaaatttagcatttaaaatacagacagtccccgactttntggtggtttgatgtgggatttttggtggaaaagcagtatacattcagaatgcacctctaccttatgatggggctactcccctggtaaaccccattgtaatgtgcaaattacgggtttatcaggaggtgaccccatcggtaatggagaagtgctgggaggtaaatattagaaatggaagtatctaaatgagtaagaaacagcatgggagcataatttggccaaaatcaaacagaactaaagtagtcatgtcggtaagaatttgggactgcaggccagttacgatagctctcac

SEQ ID NO: 259345 - DNA, 954 bp, Homo Sapiens
  misc_feature (830)..(888): n is a, c, g, or t
cgtgccgctctgtttgccgaccgtccagtcccgcctaccagtgccgggcgctccccacccctcccccggctcccccggtgtccgccatggccaaagcctacgaccacctcttcaagttgctgctgatcggggactcgggggtgggcaagacttgtctgatcattcgctttgcagaggacaacttcaacaacacttacatctccaccatcggaattgatttcaagatccgcactgtggatatagaggggaagaagatcaaactacaagtctgggacacggctggccaagagcggttcaagacaataactactgcctactaccgtggagccatgggcattatcctagtatacgacatcacggatgagaaatctttcgagaatattcagaactggatgaaaagcatcaaggagaatgcctcggctggggtggagcgcctcttgctggggaacaaatgtgacatggaggccaagaggaaggtgcagaaggagcaggccgataagttggctcgagagcatggaatccgatttttcgaaactagtgctaaatccagtatgaatgtggatgaagcttttagttccctggcccgggacatcttgctcaagtcaggaggccggagatcaggaaacggcaacaagcctcccagtactgacctgaaaacttgtgacaagaagaacaccaacaagtgctccctgggctgaggaccctttcttgcctccccaccccggaagctgaaactgaaggagacaacggcagaaggagtgagcaggggagaaataacagaggggcttgggaggggcaccataggtagatgggtaaagagaatggaggannnnnnnnnnnnnnnnnnnnnnnnnnnnnnnnnnnnnnnnnnnnnnnnnnnnnnnnnnngaacaaagggagaaggaaatggaattgggacggaaagtgggaaagaaaggcaagggaaggggtagg

SEQ ID NO: 259346 - DNA, 843 bp, Homo Sapiens
  misc_feature (513)..(656): n is a, c, g, or t
  misc_feature (741)..(741): n is a, c, g, or t
tgggtggcgaattcggcacgagggagccatgggcattatcctagtatacgacatcacggatgagaaatctttcgagaatattcagaactggatgaaaagcatcaaggagaatgcctcggctggggtggagcgcctcttgctggggaacaaatgtgacatggaggccaagaggaaggtgcagaaggagcaggccgataagttggctcgagagcatggaatccgatttttcgaaactagtgctaaatccagtatgaatgtggatgaggcttttagttccctggcccgggacatcttgctcaagtcaggaggccggagatcaggaaacggcaacaagcctcccagtactgacctgaaaacttgtgacaagaagaacaccaacaagtgctccctgggctgaggaccctttcttgcctccccaccccggaagctgaacctgagggagacaacggcagagggagtgagcaggggagaaatagcagaggggcttggagggtcacataggtagatggtaannnnnnnnnnnnnnnnnnnnnnnnnnnnnnnnnnnnnnnnnnnnnnnnnnnnnnnnnnnnnnnnnnnnnnnnnnnnnnnnnnnnnnnnnnnnnnnnnnnnnnnnnnnnnnnnnnnnnnnnnnnnnnnnnnnnnnnnnnnnnnnntgcctcaggcttcagaccttacctgggttttcagggcaaacataaatggaaatacactgatttattctgttactagatcaaggtntttaggggtcctgcaaaaggctagctcggcactacactagggaatttgctcctgttctgtcacttgtcatggtctttcttggtattaaaggccaccatttgc

SEQ ID NO: 259347 - DNA, 556 bp, Homo Sapiens
  misc_feature (60)..(69): n is a, c, g, or t
  misc_feature (460)..(460): n is a, c, g, or t
  misc_feature (505)..(505): n is a, c, g, or t
  misc_feature (510)..(510): n is a, c, g, or t
  misc_feature (526)..(526): n is a, c, g, or t
gtattaaggacctttgtgaggctaggtacactgtccacacctctttggggaagttacgannnnnnnnnnccatcataattcagtctcttcttattctacagtgtgcactttatgcctctcgccttttgataatagttgttcagtgaaggaagtcagctgccagaatattaagaagggtctccctttatgtcagtacaactgttagggcggccttcccatttactttaggtttcaagaggattcaccggaagcacatgccccggtctagtcccatttgaaacagttctgctttactgagaccctaggccggtctccttgctgaccctagcgctgctgcctagggtgccatttcctttcctcctcagtcaaatacaggctgcacattttgtcacttaatgccagtacaatctgtgttactcctaaggacttttggggattttgatgagacctggcgaggggngtaagtacactgagttgtccagtgtatctggcaagtcatttgctncttgntttccacatcaccttngggggatattttcaggctgttgtttcccaa

SEQ ID NO: 259348 - DNA, 974 bp, Homo Sapiens
  misc_feature (820)..(820): n is a, c, g, or t
  misc_feature (824)..(824): n is a, c, g, or t
  misc_feature (828)..(828): n is a, c, g, or t
  misc_feature (831)..(832): n is a, c, g, or t
  misc_feature (835)..(835): n is a, c, g, or t
  misc_feature (863)..(863): n is a, c, g, or t
  misc_feature (870)..(870): n is a, c, g, or t
  misc_feature (878)..(878): n is a, c, g, or t
  misc_feature (895)..(896): n is a, c, g, or t
  misc_feature (899)..(899): n is a, c, g, or t
  misc_feature (929)..(929): n is a, c, g, or t
cgtgctcggcagcggttccagcagcacctgggagcaggagcagtgggcgctgcagcagcaacggcagcggctgtacagtgaggtggctgaggagagggagcggctgggccagcaggcagccaggcagcgggcagagctggaagagctgaggcagcagctggaggagaacagctctgcactgacccgagccctgagggctgagtttgagaagggcagggaggagcaggagcgccggcaccagatggagctgaataccctgaagcagcagctggagctggagaggcaggcgtgggaggccggccgcaccaggaaggaggaggcgtggctgctgaaccgggaacaggagctgagggaagaaatccggaaaggccgggacaaggagattgagctggtcattcaccggctggaggccgacatggcgctggccaaggaggagagtgagaaggctgccgagagccgcatcaagcgcttacgggacaagtacgaggccgagctctccgagctggagcagtcggagcggaagcttcaggagcggtgctcggagctgaagggccagcttggggaggccgagggcgagaatctgcgtctgcagggccttgtgcggcagaaggagcgggcgctggaggatgcgcaggcagtgaacgagcagctttctagcgagcgcagcaacctggcccaggtgatccgccaggagttcgaggaccggctggcagcctctgaggaggagacgcggcaggccaaggccgagctggccacgctgcaggccccgccagcagctggagctggaggaggtgcaccgggagggtgaagacagccctcntgangaanganngangccctgagcagccctcggacacaacatngagctgncggtgaancggggccgaccacctgnnagnagctgctggagcagcaccagaggcccacgnccaagtaccaagtggaccagggatgccgggaaacactgtccgaaa

SEQ ID NO: 259349 - DNA, 561 bp, Homo Sapiens; identical to SEQ ID NO: 165596

SEQ ID NO: 259350 - DNA, 871 bp, Homo Sapiens; identical to SEQ ID NO: 14978

SEQ ID NO: 259351 - DNA, 742 bp, Homo Sapiens
gggcttctgcgacggcgcggacctggagcttccgcgcggtggcttcactctcctgtaaaacgctagagcggcgagttgttacctgcgtcctctgacctgagagcgaaggggaaagcggcgagatgactgaccgctacaccatccatagccagctggagcacctgcagtccaagtacatcggcacgggccacgccgacaccaccaagtgggagtggctggtgaaccaacaccgcgactcgtactgctcctacatgggccacttcgaccttctcaactacttcgccattgcggagaatgagagcaaagcgcgagtccgcttcaacttgatggaaaagatgcttcagccttgtggaccgccagccgacaagcccgaggagaactgagactctgccttaccaccgcagtgcggggcacctctcccagcgtttctccggtttgccaatcctcttaagtattcctgtctccaaaggaccggctctccatggctcctgcgcctcgtgctttccgcgtacagaagtgcttgcccggggagtcccgcctgacctgccttcatgtggacccttagaacagcactgggagaccagcaggactcctgagaactgtgctggtggagaggtcctagagccggcgagcgtttgagaagagggcatggcgctggagtgagatgggatttggcgtctcgtttttggctaattgattgtcattggctttttccataaagtttagaaatcgttcaaaaaaa

SEQ ID NO: 259352 - DNA, 576 bp, Homo Sapiens
  misc_feature (36)..(36): n is a, c, g, or t
  misc_feature (74)..(74): n is a, c, g, or t
  misc_feature (84)..(84): n is a, c, g, or t
caagaaatcccttcctggtcctccccaaattcctgntcctaaaggttcccaacattgaaaggccaagttcaagnccgggaactncccccggggcaaagcaactttctgtaacgcggaaaaagcaacgaagccgccaggaacccaatggaaaacccgggtccctttggaaaacaggaaatacttaaagaggattggcaaaaccggaaaaaacgctgggaaaaggtgccccccactgcggtggtaaggcagagtctcagttctcctcgggcttgtcggctggcggtccacaaggctgaagcatcttttcccatcaagttgaaagcggactcgcgctttgctctcattctccgcaatggcgaagtagttgagaaggtcgaagtggcccatgtaggagcagtacgagtcgcggtgttggttcaccagccactcccacttggtggtgtcgcgtggcccgtgccgatgtacttggactgcaggtgctccagctggctatggatggtgtagcggtcagtcatctcgccgctttccccttcgctctcaggtcagaggacgcaggtaacaactcgtcgctctagc

SEQ ID NO: 259353 - DNA, 1037 bp, Homo Sapiens
  misc_feature (578)..(917): n is a, c, g, or t
tttggtgtcaagattcagttaaaaaatatcttccttcagacatctgctgactacaggaaattattgtcatagcccatgtgaaggtcataatgagactaagatgacgttttaaaactcctgaactctgtagggaaaagcaagtagaagctattattcttactcgctggtaacatactgtagatagctccaggactgagacccgaggcccggaggacacacttagtgttctccctatgtcacagtcctacaggccagcaaaagtgagtacaactgtcccagcatgtcagttacacatactggccctaaatgttcagcataatttaaaagggaaagaaaaaagttggcttttcagacaaaattttgtgtgaactgaaacaacggtcagaactaggcttctttgggtcccaaataatttaaactttacagctctcagatgttctggcagctcattctttgttcatttcacctattatacaagtgtttctgggtccaagccacagagcaaaatagacacaaataaatcaaataataaatgtttcatataaaggagaaaatgctaatggtctgttatctatacnnnnnnnnnnnnnnnnnnnnnnnnnnnnnnnnnnnnnnnnnnnnnnnnnnnnnnnnnnnnnnnnnnnnnnnnnnnnnnnnnnnnnnnnnnnnnnnnnnnnnnnnnnnnnnnnnnnnnnnnnnnnnnnnnnnnnnnnnnnnnnnnnnnnnnnnnnnnnnnnnnnnnnnnnnnnnnnnnnnnnnnnnnnnnnnnnnnnnnnnnnnnnnnnnnnnnnnnnnnnnnnnnnnnnnnnnnnnnnnnnnnnnnnnnnnnnnnnnnnnnnnnnnnnnnnnnnnnnnnnnnnnnnnnnnnnnnnnnnnnnnnnnnnnnnnnnnnnnnnnnnnnnnnnnnnnnnnnnnnnatctacactactgcactgtaggctctaagggaacttaaaaacagaaaaataatggagagaaggtgtttgtagaacacagacatgtcagcaaaggcactgagtatctactcctgagtgccc

SEQ ID NO: 259354 - DNA, 552 bp, Homo Sapiens
  misc_feature (71)..(203): n is a, c, g, or t
tcagagctagcaggttcagtctgtgtcacgaaccatttctctggttccctgcagacaggaaaggttgtccnnnnnnnnnnnnnnnnnnnnnnnnnnnnnnnnnnnnnnnnnnnnnnnnnnnnnnnnnnnnnnnnnnnnnnnnnnnnnnnnnnnnnnnnnnnnnnnnnnnnnnnnnnnnnnnnnnnnnnnnnnnnnnnnnnnnntaaggaatgaacctcttttgttggggaagggtggcattctgctgaccacagcactccaaccaaaagccaaaaaccaaagcaagacttactaacgcatatcaaataaattaaaggtacaaaatcgtgaatctcagttatcttaaatattccaatactatttacaaaattattcaaattctcacgccttccaactcaaaattagcaatctaaagtaatttccatatcctagatggaaaccctcatgctaaactgtctgattatgcatggttctaaatggtttcagtggcaaatacataacattgtactactgattaaactgaacttaaaagcatcaataccaccattgctg

SEQ ID NO: 259355 - DNA, 573 bp, Homo Sapiens
catcccttaaatccccggaaaccagtgaatgttaagtttaacatggcaaaaatgtgtccctgccagatgtgtttaaatattaaaaaaccttgaggagggaagattaatccatgtaattcatctggctgggccccaacctaatctcatgaagtccttagggacaacctttcctgtctgcagggaaccagagaaatggttcgtgacacagactgaacctgctagctctgaagatggaggagggggccaagagccaaggaatgtaggcagcctctacaagctggaagtggccttagtttacagtcagcaagaaagtggggaccttgccctgccaccgaaaggatgtggattctgccagcagcctgaaggagcaggagacagagtctcccctagaacctccaggaaggaaggcagcctgccagccttgattctagtccagtgagacccatagtcagacttccagcctacagaattgcaataaatttgtgttaagtcactaagtttgtggtaaattttacagcggcagtataaaactaatacagtggtgtgccttcctggttgacatttgaaatgcgt

SEQ ID NO: 259356 - DNA, 702 bp, Homo Sapiens
  misc_feature (129)..(176): n is a, c, g, or t
tgttataatgagaggatacctggcagtggaaagacacatgttgcaaaacttattcgagataaggaggtagaatttggaggacctgccccagagttctaagcctggatgattacttcatcactgaagtgnnnnnnnnnnnnnnnnnnnnnnnnnnnnnnnnnnnnnnnnnnnnnnnngtaatggaatatgaatatgaagctgagatggaggagacttaccgcaccagcatgttcaaaactttcaaaaagactctggatgatggcttttttcccttcatcatcctggatgccatcaatgacagagttaggcattttgaccagttttggagtgcagcaaaaaccaagggatttgaggtatatttggctgaaatgagtgcagataaccagacttgtggcaagagaaatattcatggaagaaagcttaaagaaataaataagatggctgatcactgggaaactgcacctcgtcacatgatgcgtctagatattcgttctttgctgcaagatgctgctattgaagaggtagagatggaagattttgatgcaaatatcgaagaacagaaagaagaaaagaaagatgcagaggaagaggaaagcgaactgggttacattccgaaaagcaaatgggagatggacacatctgaggcaaagctagacaagttggatggcttgaggactggtactaaaaggaaacgtgactggg

SEQ ID NO: 259357 - DNA, 862 bp, Homo Sapiens
gaggaagatgaagaagaagataaggctacccctagaagaagcaggtctagaagaagtagtattggtcttcgagtagcctttcagttccccaccaagaagctggccaacaaaccagataaaaacagttcttccgagcagttgttttctagcgcacgcttacagaatgagaaaaaaacaattcttgaaagaaagaaagactgtagacaggtgatacaaagggaagattctacctctgagtctgaggatgactctcgggatgagagccaggagagttcagatgctttgctgaaaaggaccatgaacatcaaggagaacaaagccatgcttgcccagttattggcggaattgaactcgatgccagatttcttcccagtacgaaccccaacctcagcttctaggaagaagacagtgaggcgggccttctcggagggacagatcacgcggcgtatgaacccaacccggagtgcgcggcctcctgagaagtttgctctagagaacttcactgtctcagccgctaaatttgcggaagcagttttacagcttccgaagaaggaagacaattggggggaaatgccgggagtacagacgacgtcaccgtatatcttcttttcggccagtggaggatatcaccgaagaggacttagaaaatgttgccataactgttcgagataaaatctatgataaagttctgggtaacacgtgccatcagtgtcgacaaaagacccatcgacaccaagacagtgtgtcggaacccagggtatgctgtgatgtgcgaaggacagttctgtggaccatgcctgcggaacgccctggggaggatgtcaaaacagcattgttgaaccggcatgggtggtgtcccccg

SEQ ID NO: 259358 - DNA, 737 bp, Homo Sapiens
  misc_feature (527)..(527): n is a, c, g, or t
attgtagtctctcaaagtgctctagaaatgtcagtggtttacatgaagtggccatgggtgtctggagcaccctgaaactgtatcaaagttgtacatatttccaaacatttttaaaatgaaaaggcactctcgtgttctcctcactctgtgcactttgctgttggtgtgacaaggcatttaaagatgtttctggcattttctttttatttgtaaggtggtggtaactatggttattggctagaaatcctgagttttcaactgtatatatctatagtgtgtaaaaagaacaaaacaaccgagacaaacccttgatgctccttgctcggcgttgaggctgtggggaagatgccttttgggagaggctgtagctcagggcgtgcactgtgaggctggacctgttgactctgcagggggcatccatttagcttcaggttgtcttgtttctgtatatagtgacatagcattctgctgccatcttagctgtggacaaaggggggtcagctggcatgagaatatttttttatttnaagtgcggtagtttttaaactgtttgtttttaaacaaactatagaactcttcattgtcagcaaagcaaagagtcactgcatcaatgaaagttcaagaacctcctgtacttaaacacgattcgcaacgttctgttattttttttgtatgtttagaatgctgaaatgtttttgaagttaaataaacagtattacatttttaaaagaaaaaaa

SEQ ID NO: 259359 - DNA, 953 bp, Homo Sapiens
ccattggggccgtaccatggcggagaagactcaaaagagtgtgaagattgctcctggagcagttgtatgtgtagaaagtgaaatcagaggagatgtaactatcggacctcggacagtgatccaccctaaagcaagaattattgcggaagccgggccaatagtgattggcgaagggaacctaatagaagaacaggcccttatcataaatgcttacccagataatatcactcctgacactgaagatccagaaccaaaacctatgatcattggcaccaataatgtgtttgaagttggctgttattcccaagccatgaagatgggagataataatgtcattgaatcaaaagcatatgtaggcagaaatgtaatattgacaagtggctgcatcattggggcttgttgcaacctaaatacatttgaagtcatccctgagaatacggtgatctatggtgcagactgccttcgtcgggtgcagactgagcgaccgcagccccagacactacagctggatttcttgatgaaaatcttgccaaattaccaccacctaaagaagactatgaaaggaagctcaactccagtaaagaactaagaacagtgtataacatgaagataacattttgtctttgaccactgtcttttgaatgggcccacagtgtttatgtactcttaacaactcacagaataatacatgttcactttattttgtaaaattgggttgagaggaaactaatggagtttcattgtaactgtcctttgtaatttatataaatgtattattttcctatatccttggttcttttctgataatttacagatttagcttttcttttgttatataaactgctagccacaaattttagttatgtaaaaggctacccttgacaagaaaagacatactgtcatgtatttatattctagcatagactaaactgaataaaaatgctgataacagg

SEQ ID NO: 259360 - DNA, 340 bp, Homo Sapiens
aattttaagttccaggatccatgtgcaggatatgcaggtttgttacatagggaaacgtgtgcctcggtggtttgctgcacctatcaacacatcacctcggtattaagtccagcatgtattagctatttttcctcatgttctcccaccccccgccacagcccctgttaaattaatttcttattctccttaatattccatacacattcagattccttctcccctacaaaaatatttgctattttgtccttgctatttctcatacttagatcattcatacactatatttattttttccataaactatttttaaaaccttttaaaagcggggcgggcaaccaac

SEQ ID NO: 259361 - DNA, 737 bp, Homo Sapiens
agaaggtggactgcaggttgttcagcgcctgcctcatgtctccctgggccgtgaagatgatggcttctaggccgtcatcagtgtagggtaccctctccttctcgataacattcatcagcctggtgaggatctgggcgtcggtcagctttgtgtaccggaggactgcacagcgggactgaatgggctcgatgatcttatccgaagcattacaagcaagggcgaagcgagtggttttagagtagatttccatggttctcctcaaggcttgctgggctccgtcggtcatgctgtctgcttcatccagaatgatgatcttatgtcggcctttgggaagagtgactttttgttgagcaaacattttaattttattcctcacaacgtcaatgcccctgtcatttgaagcattgagttccaacatggcatctttgagtgctgggcccagcagggcccgggccaagcacagaatgcttgtggtcttgccggttcctggagggcccgcaatgatgatgttgggcacatttccttcccttgcaaagacctctagcctgctcacggtgtcttcattcccgacaatttcattcagctttactggcctatatttttcaacccacggcagttcgtagtggccggcgctgccgggggccttgctgaaggcaggggcagggtcagagtcctgggcctccacctcgcccgcgccaccacagacggcctccacctccattctcgcgcctcctctt

SEQ ID NO: 259362 - DNA, 1183 bp, Homo Sapiens
attacctgtcctggctccggaacaagattctgcacaatgacccagaagtggagaagaagcagggctggaccaccgtgggggacatggagggctgcgggcactaccgtgttgtgaaatacgagcggattaagttcctggtcatcgccctcaagagctccgtggaggtgtatgcctgggcccccaaaccctaccacaaattcatggccttcaagtcctttgccgacctcccccaccgccctctgctggtcgacctgacagtagaggaggggcagcggctcaaggtcatctatggctccagtgctggcttccatgctgtggatgtcgactcggggaacagctatgacatctacatccctgtgcacatccagagccagatcacgccccatgccatcatcttcctccccaacaccgacggcatggagatgctgctgtgctacgaggacgagggtgtctacgtcaacacgtacgggcgcatcattaaggatgtggtgctgcagtggggggagatgcctacttctgtggcctacatctgctccaaccagataatgggctggggtgagaaagccattgagatccgctctgtggagacgggccacctcgacggggtcttcatgcacaaacgagctcagaggctcaagttcctgtgtgagcggaatgacaaggtgttttttgcctcagtccgctctgggggcagcagccaagtttacttcatgactctgaaccgtaactgcatcatgaactggtgacggggccctgggctggggctgtcccacactgggacccagctctccccctgcagccaggcttcccgggccgcccctctttcccctccctgggcttttgcttttactggtttgatttcactggagcctgctgggaacgtgacctctgacccctgatgctttcgtgatcacgtgaccatcctcttccccaacatgtcctcttcccaaaactgtgcctgtccccagcttctggggagggacacagcttccccttcccaggaaattgagtgggcctagcccctccccccttttctccatttgagaaggaaagtgccttggggctttgaacccccttaccccactgctgcttgaactggggcaagggccctggaaccccctttaatttgcaccttcacggggaacccggcgtccccccccttggaatggaaccaagaacgcct

SEQ ID NO: 259363 - DNA, 1111 bp, Homo Sapiens
  misc_feature (355)..(364): n is a, c, g, or t
cctgattacaaaagcaaaacctcattttttggtctttgaagaccatggagtatgacttctaagagcaaacattaacatcagatttgtatgtctcactacaaaaagaacccatcactgatgtaagacctactcatgatactgaagtagattttttaaattaaaaaataaaagtagtcatttaaaatggaggaattgtagatgagtatggaaaaatccattcacaaagttcactatttgcattttctaaaagaattttatgtaataaaatagaaaactaatgatttatagagatgtgcataaactcaagagaggaatatggaagggaaaacctgtgttatattcccatttaaatttnnnnnnnnnngataaacacttgaaatctgtgtttcacatattagaaaaaaataaattcaaatgattctaattaccattagcttgttaatgtctccatctctaagatgctgccaagatagcacacaactttacctctgaatatgcaactaacttcagggtaaaaagacacacagtcctcactcgggaccgaacacgttccacagagaaatcagaaggaaattattgcaaatgcataaccccatctgtccagccaaggaaatgttctgagacaaatgcagacagacaggggaatggagtgaatacaaagaatgattacaggagcgtcgactgtgagacctcatgaagacagaatgtcacaaactgtcaccacaggacaagcatacaagccatgccactgacacagtgcctttcagattaattcactagtgtaggcggagagcaacattgtctttgcagctggggaagagcacacggtatttaaacttagtaggaggcaaccagcactactggtggagtggctttcctggtgcagcaggtcccgagggctccgtggagacgtcttcttccggagtcccgttctcttggaagatagcagcagcagcaaaggtgcaatgtcctctctagactttactcatctatgttctctttctttgcactgtaaatattctgcaccgtttcatagacaaactccagatcttctggataccggatctccagctctgcgtttgggatgtagtgagtgccagtaaactctgag

SEQ ID NO: 259364 - DNA, 514 bp, Homo Sapiens
  misc_feature (224)..(224): n is a, c, g, or t
cctacaggagcctttcactttacagtggcaaggggctggttctggagaactggctgatgctctgaatttcttcatataccccacatttgactttggcttacactgtacaattggagatgttgctacaggtccctgagatgcaatcagattaagcgtagcaagcattgccaatgggaaagtcaaaataatttattttttttccctttccccctaccccatccccnagccaagaatttcttttcaagatatcgtcatcattcttaaacaacattcttaacccccagctggggtccccattttaatagatgtcattgcttcaagtctaacggcgccgggaggcctgtttgagggaaaacattagtttgaaaaatccccgttcccttcatccactgcccttgttctccacgtgggagtgtgcttgtggcccctcagaaagatagtctgctggctcctaggggttggggtgggggacacacctttttctcaggaagaggtgatggcaatgtaaaacatc

SEQ ID NO: 259365 - DNA, 1366 bp, Homo Sapiens
cggcacgaggcgccctccacatccaggtctttgtgctcctcgcttgcctgttccttttccacgcattttccaggataactgtgactccaggcccgcaatggatgccctgcaactagcaaattcggcttttgccgttgatctgttcaaacaactatgtgaaaaggagccactgggcaatgtcctcttctctccaatctgtctctccacctctctgtcacttgctcaagtgggtgctaaaggtgacactgcaaatgaaattggacaggttcttcattttgaaaatgtcaaagatgtaccctttggatttcaaacagtaacatcggatgtaaacaaacttagttccttttactcactgaaactaatcaagcggctctacgtagacaaatctctgaatctttctacagagttcatcagctctacgaagagaccctatgcaaaggaattggaaactgttgacttcaaagataaattggaagaaacgaaaggtcagatcaacaactcaattaaggatctcacagatggccactttgagaacattttagctgacaacagtgtgaacgaccagaccaaaatccttgtggttaatgctgcctactttgttggcaagtggatgaagaaatttcctgaatcagaaacaaaagaatgtcctttcagagtcaacaagacagacaccaaaccagtgcagatgatgaacatggaggccacgttctgtatgggaaacattgacagtatcaattgtaagatcatagagcttccttttcaaaataagcatctcagcatgttcatcctactacccaaggatgtggaggatgagtccacaggcttggagaagattgaaaaacaactcaactcagagtcactgtcacagtggactaatcccagcaccatggccaatgccaaggtcaaactctccattccaaaatttaaggtggaaaagatgattgatcccaaggcttgtctggaaaatctagggctgaaacatatcttcagtgaagacacatctgatttctctggaatgtcagagaccaagggagtggccctatcaaatgttatccacaaagtgtgcttagaaataactgaagatggtggggattccatagaggtgccaggagcacggatcctgcagcacaaggatgaattgaatgctgaccatccctttatttacatcatcaggcacaacaaaactcgaaacatcattttctttggcaaattctgttctccttaagtggcatagcccatgttaagtcctccctgacttttctgtggatgccgatttctgtaaactctgcatccagagattcattttctagatacaataaattgctaatgttgctggatcaagaagccgccagtacttgtcatatgt

SEQ ID NO: 259366 - DNA, 1776 bp, Homo Sapiens
  misc_feature (249)..(271): n is a, c, g, or t
  misc_feature (318)..(337): n is a, c, g, or t
  misc_feature (1607)..(1607): n is a, c, g, or t
acttaagatgagtcaaaagacactttcctctgttccattccccatctcagggactcctgaatattcagcctctccaggctggtgtcttctagtttcccccactgggaatgctggctgggagagccatgactaccagacttttcctcaggctccttggcatgttagtctgaattgttcttgagcactgtactactgacccaacaactgtgactagctggccacgccattcagggctggtgtggcatttannnnnnnnnnnnnnnnnnnnnnnttttcctgtttgcccagcagtgcattgtgggttccaagagtgggtannnnnnnnnnnnnnnnnnnncacagggagacctggcaggcacctctttgagagtagctgtggtcagagctgtttggtaagtgcattatgttgaatgaggtccaggaacccagagccacccagcagacaccactgtggcttgccagctgccaagatggagaagcatgtgcccctgtagagcgtctccccagaaccagaccccgagccactcgcttcctctgtgctgtgacaacattggtgccaggggagatggtgtttttcaaagggacctactgtagccactttaatttacaattaagagccttagtttgacttaacacttttgtaggcttttcattgtgtatttttgtgtatgtgtgcatatagcagctactctgtagcagaggtgggtagagacacttaatagtatcatgtcgcatgcagatgtcacatcggcctctgcaaaaactgtactgtcttgtttctgcattagacttaagtagtcatgtgaatatactgctatgtcacttttaatattacgagttttatacttggaaaatggtacttgcttcttttaaatctctgtcttctctaacctcccccttcccatttcaatgctcccttcctaatttcagcaataatctcaaaaagcaattaaatagttaaatgaccctaattgtaattactgtggatggttgcattcatttgattacttgggcacacacgagatgacaaatggggcagtggccatgcttgaatgggctcctggtgagagattgccccctggtggtgaaacaatcgtgtgtgcccactgataccaagaccaatgaaagagacacagttaagcagcaatccatctcatttccaggcacttcaataggtcgctgattggtccttgcaccagcagtggtagtcgtacctatttcagagaggtctgaaattcaggttcttagttttgccagggacaggccctatcttatattttttttccatcttcatcatccacttctgcttacagtttgctgcttacaataacttaatgatggattgagttatctgggtggtctctagccatctgggcagtgtggttctgtctaaccaaagggcattggcctcaaaccctgcatttggtttaggggctaacagagctcctcagataatcttcacacacatgtaactgctggagatcttattctattatgaataagaaacgagaagtttttccaaagtgttagtcaggatctgaaggctgtcattcagataacccagcttttccttttggcttttagcccattcagactttgccagagtncagccaaggattgcttttttgctacagttttctgccaaatggcctagttcctgagtaccctggaaaccagagagaaagaggatccaggatgtacttggatgaggaggcctggcttatcatagaaagtcgtggtctgggggtgccttattggctgcttccctaacagctg

SEQ ID NO: 259367 - DNA, 414 bp, Homo Sapiens
ttccccacaagtcagtactggagaataagaatgagaactccaattaaagaacaatgcttccctcaccccagtaatgttatccacattttccctaccttcacattagaataaagacatcctcccaacttgtcatctcctatctccaatctgttcataggagatatatcttttgatcttttattataagggtagaatatagattaagatcatcaaaatccaatttcacatgtggcactaggaaaatggaatgctataaaattaatccccatcacccaagtagggatgctggtgcttttatactgagtctttactgccaataagtgatgctgcctccaaaggaacagctctacagaaagtttttgggttagtgtttccctagcttatttctgcaatggagaaagacaatttcatacc

SEQ ID NO: 259368 - DNA, 874 bp, Homo Sapiens
gggtacggtccggagtgttcgggatatcgtcgacccacgcgtccgaaaaaaaattacaatgaagatgccctgttttgtctctactgtgtactctgatcgtatctttccaaagtgcagactcttgtgaagttttcttaaattgttcactttaaagaaaatgacgtaccaacaatgatttggcttttatattactgtaagatgttataatgttaatgtggatgtagtgcttttactttacagattgattggaataagattattgcatatgaatttacccacaggactctgaatcatgttacccactcccctcacaatgttgtccacttagtgagttgcattgatctatccgtaccaaatgatgttgaataattacatatctttcttgactatactgatttcttattttggtcactattactaaatctctgttaatattctctcttttaactgaaaagggatgggatagaagggtttgcaatgccatattattggtggagggctgttttaacatctttgaagtatggcttgctgaatatctttaccaaacatcttgaatatatattctagtgtccacaagatttagcaaaaagataaagcttgggtggaatatcattttaaaatgttcatgttctgttctatattttcttcacctactctccaaatattgtaatgcaaaaagtctcagtaatgatttggtagtattaattttgtggtcattgtttctcttcgataaatttattttcattaaatacttattagagggttttgaaatgtttttcaaatatgtgaaatgtgaaactgctgtcttttatattaaagtaattaaagaaaaacgtacgcgtgggttcgacgatatcccggtaattccggaccg

SEQ ID NO: 259369 - DNA, 634 bp, Homo Sapiens
  misc_feature (515)..(515): n is a, c, g, or t
  misc_feature (555)..(555): n is a, c, g, or t
  misc_feature (561)..(561): n is a, c, g, or t
  misc_feature (573)..(573): n is a, c, g, or t
  misc_feature (579)..(579): n is a, c, g, or t
  misc_feature (588)..(588): n is a, c, g, or t
  misc_feature (597)..(597): n is a, c, g, or t
gactttcaaaggtaatggtaacttccttaagctggatggtaggtccactagtgtttgctgcatagttataccttttatcttaaatacattttgtatctattgtaacaaccactttaaagacaaccgtgctgtaaggcagtagctaaaaacagaaaatagtccatcgggaagggtaagatggctttctgctgagcacagggctagaagtgacagcccagggggccttccaactatatgccagggtgttagatgagtagagaggagaccacccaggaagtctggacaaggggtctggcatgagctctggagaagatatatttgaggaacatggggtatgctagtttgttgtcctgaattgctgtagagaagataatttaaattgcatcttagaagacgaccctgagggtggaatttcaacttagggcaattgttttagtttgtttcttattggtttaaatggatacttgaagctgggataatttataaggaaaagagatttatatgacttacagttnctggcaggctgttacaagaaacatgggccacccagcatcntgcttncttccccccgcntgcttnccacttccntgggttggnaagggttgaaggggggagccccggattgttgccagag

SEQ ID NO: 259370 - DNA, 825 bp, Homo Sapiens
  misc_feature (183)..(183): n is a, c, g, or t
  misc_feature (568)..(568): n is a, c, g, or t
  misc_feature (664)..(664): n is a, c, g, or t
cggcacgaggccccttgtcacatagagagtttgtcatggggcctctggctgtgcccttcacataacagaatgacttgccatctgcctgcaccaaacccagggatgtggaagacatctccccacaactgccactgctcaccaggacaagctgcccttcctgtctccacctctcagtccccctanaatggatggctggggagaggtggaggctgacagctgagacgtagtgtcagatatgatctaggagggcggatcaccgggatccgggaccatacaagtaacatggtttccatggcaactgcttgctcgtttgaattaagacagcagtcagttgtcattgccatgacaaggcctctatctccaggcacaatgtccctgctgtctcctaatccaatggacttgctctcaccccagggatgaaacacccagaaactcacttctcagtcacttccacagccgatgactcagaagagccaaacccagaatggggcctctcttttccccatcacagactcccctgacaacctttcctggcgtaactagaggagtcccagtgcaggataggccntaaacgttttgttaaataaaacaggtgcatgaaaggagcctaaggccattgttgatatccactctcttctttccacttccttctcatctttttctnccatgttttatgcttctcggattccctcttctgccctgcaccagaccagccccagccctttattcctctccattttcaatccttccagcctctgtccctgaactgccactggcaacccatggggacctcagggaccaggagactgcttggacttcatctgg

SEQ ID NO: 259371 - DNA, 404 bp, Homo Sapiens
  misc_feature (17)..(17): n is a, c, g, or t
  misc_feature (125)..(125): n is a, c, g, or t
gggaaaatgaactgaanaaatgaatttcctgggtgtttccatcccctggggtgaagagcaaagtcccattggaattaggaagacaaccagggaacattgtcccctggagaatagaggccttgtcnatggcaatgacaactgactgctgtcttaattcaaacgaagcaagcagttgcccatggaaaccatgttacttgtatggtcccggatcccggtgatccgccctcctagatcatatctgacactacgtctcagctgtcagcctccacctctccccagccatccattctagggggactgagaggtggagacaggaagggcagcttgtcctggtgagcagtggcagttgtggggagatgtcttccacatccctgggtttggtgcaggcagatggcaagttattc

SEQ ID NO: 259372 - DNA, 842 bp, Homo Sapiens
  misc_feature (728)..(728): n is a, c, g, or t
  misc_feature (733)..(733): n is a, c, g, or t
  misc_feature (757)..(757): n is a, c, g, or t
gggggggcaggaagggaggcggccgccgtgccattcttaaaggcgcccgagtgtaggcgacaggccgctgacggccggaaggaaaatgagtgagtctttggttgtttgtgatgttgccgaagattagtggaaaagctgagaaagtttcgttttcgcaaagaagcgaacaacgctgctattataatgaagattgacaaggataaacgcctggtggtactggatgaggagcttgagggcatttcaccagatgaacttaaagatgaactacctgaacgacaacctcgcttcattgtgtatagttataaatatcaacatgatgatggaagagtttcatatcctctgtgctttattttctccagtcctgttggatgtaagcctgaacaacagatgatgtatgctggaagtaagaataagctagtccagacagctgaactaaccaaggtatttgaaataagaaataccgaagacctaactgaagaatggttacgtgagaaacttggattttttcactaatgtgaacttctgtgtttctaaagtatttatgtattaacctgaccatactggaatcagacataaatacttatttatgcctaaaaatgcactgttacttacagtttgtttcctgcagtaaagaaaaattcttcatttgtgcaaaatttgaacaaagaagaaatcatcttcatagtaatggaaactttgtaaagtgtttccctaatattggtaaatgnttagntgggactactttttcttccaaggnactttttttgcactccttgtggacttaatttcctcataaccttaatggggtccgggaaattttgtttacttattttaacaggacc

SEQ ID NO: 259373 - DNA, 478 bp, Homo Sapiens
  misc_feature (57)..(57): n is a, c, g, or t
  misc_feature (69)..(69): n is a, c, g, or t
aatgaggccgaagactctgagtcagtgtagcctgagcgctcgctgaccccagcgtgncagttggaaggnatagtactctcaactgaggtccactgtcctgagtcagagctcccagccctcgaatctctcggcgtaccagtgagtcaaagaaggccatcatccgggggtcttcctggaccgactggttggcgtagtcatgcgacaggccactcccactgttcagcacaaggctgatgtactcttcatgggtatagaggcagcgggaatcgtcctcaatccgaccgtcgaggtctccagtacatcctggctgcttgtatgggctccagatcttgataatcttttctacaccagaagagcagatcatgtaggtgtggggattaaatcggacttggttaacaatagatcgatgccctttcagcaccatgaaggctccgttgaccaccctaccaatgccacctgcttctggatctgcaggaat

SEQ ID NO: 259374 - DNA, 997 bp, Homo Sapiens
  misc_feature (932)..(932): n is a, c, g, or t
  misc_feature (971)..(971): n is a, c, g, or t
gccgccgctccaccgcccccccagcccatggtgtcacctcggccccggacaacaggcccgccttgggctccaccgcccctccagtccacaatgtcacctcggcctcaggctctgcatcaggctcagcttctactctggtgcacaacggcacctctgccagggctaccacaaccccagccagcaagagcactccattctcaattcccagccaccactctgatactcctaccacccttgccagccatagcaccaagactgatgccagtagcactcaccatagcacggtacctcctctcacctcctccaatcacagcacttctccccagttgtctactggggtctctttctttttcctgtcttttcacatttcaaacctccagtttaattcctctctggaagatcccagcaccgactactaccaagagctgcagagagacatttctgaaatgtttttgcagatttataaacaagggggttttctgggcctctccaatattaagttcaggccaggatctgtggtggtacaattgactctggccttccgagaaggtaccatcaatgtccacgacgtggagacacagttcaatcagtataaaacggaagcagcctctcgatataacctgacgatctcagacgtcagcgtgagtgatgtgccatttcctttctctgcccagtctggggctggggtgccaggctggggcatcgcgctgctggtgctggtctgtgttctggttgcgctggccattgtctatctcattgccttggctgtctgtcagtgccgccgaaagaactacgggcagctggacatctttccagcccgggatacctaccatcctatgagcgagtaccccacctaccacacccatgggcgctatgtgccccctagcagtaccgatcgtagcccctatgagaaggttttcttgcaggtaatnggtgggcagcagctttttttacaaaaaacccaggcagtnggcagccatttttgtccaatttttag

SEQ ID NO: 259375 - DNA, 737 bp, Homo Sapiens
aactgaagcggaagaaatagtgaagagaaactcgggcatctgtgtttgatcatgggaagatactctcactaactgaaccctctctggctggactgttaaaagcaacgagaggccccggcacacctggaagctggccgcgaattcggcctctgggcctgtgtgtctgtgagctcaacctggctaaaggcagagtcactcccaaatgggtctctttagaacttgatggctgggcactgccatctctagaattgccacgagtctctctcttcctgcccagtccagggccctcctttcctataagttcatattttgctttgagccagctttttagtctcattcccacacatgtggaagccacgttgcctctcgaccgcctgaggcccttaagtacatcgctttctggtggtgcccaggaggctgctgctgggccgctgggtctctctttgtggacttgtacctggagcaggaggaactccagtccgtcccggcatccatggcagcccgcggttaggtgcgccagggtttgctgatgttgtcttgtgctgttccactcttggctccagcagacccactgtcccagaaaagcctgatcctgtagtttatgtagaatgccacatctgcgtcctcaagacctgtttcatccatttgggaaaagatgttgggaaaggccactttgctcgcaggggtgaggggaaggatagagaatctatttttaataaataacattctagaaagat

SEQ ID NO: 259376 - DNA, 2907 bp, Homo Sapiens
  misc_feature (751)..(751): n is a, c, g, or t
  misc_feature (1536)..(1549): n is a, c, g, or t
  misc_feature (2542)..(2542): n is a, c, g, or t
tctgagcacactgtcattcagcttatattgccaggacgggatatggactgaatgtacttcatggcattgcagaataaatggtcctatagatatttgattttcttttccttctgtacgtttctggatgtaactccattgcagaaccacagcattttacaacaactgtgactcgatgcagcccgaccgtggcctttgtggaatttccctccagcccccagctgaagaatgatgtgtcggaagaaaaagaccagaaggaaaccaggaaaatgaaatgagtggaaaggtggagttggtgctgtcacaaaaggtggtaaagccaaaatctccagaacccgaagcaacgctgacatttccatttctggacaaaatgcctgaagccaaccaactacatttgccaaatctcaattctcaagtggattctccaagcagtgagaagtcacctgttacgacaccttttaagttctgggcatgggacccagaagaggagcgcaggcgacaggaaaaatggcaacaggaacaggaacgtttgctccaggagagataccagaaggagcaggacaagctgaaagaagagtgggaaaaggcccaaaaggaagtggaagaggaagaacgcagatactatgaggaggagcgtaagataattgaagacactgtggttccatttactggttcttcaagttccgctgaccagctgtctacctcttcctccatgactgaaggcagtgtggacaatgaataagatagacctggngaaactggtcaagatgaaaaacaagacagaagatggaagaaatcatttccagggagatggacagtgacttattttgctgaagactagggaaagtgatcgactggaggagaagggcagcctaactgaaggggccttggctcattctgggaaccctgtatcaaaaggagtccatgaagaccatcagctggataccgaggctggggccccacactgtggaacaaacccacagcttgctcaggatccatcccagaatcagcagacatcaaatccaacgcacagttcagaagatgtgaagccaaaaaccctcccgctggataaaagcattaaccatcagatcgagtctcccagtgaaatggcggaagtctataagtggaaagaagctgtgctcttcctgtgggcttcctttgggtaaaggagccgcaatgatcatcgagaccctcaatctctattttcacatccagtgtttcaggtgtggaatttgtaaaggccagcttggagatgcagtgagtgggacggatgttaggattcgaaatggtctcctgaactgtaatgattgctacatgcgatccagaagtgccgggcagcctacaacattgtgacacggctttcaagcttccggatcactcaccatttctttactgagagtgtcccctggcaactgcttaacaaaatcccaagctcaggggcttctcagcatttacctaatttctgaaaggctcttctgaaaggtggtatctgttctttcgtagcacagtgtttatgtttttcctgtttattgttttggnnnnnnnnnnnnnngcatttgcacagtatacacaaaagaatatggggttgtaatgatcctgaatagctcaaaaaaggttttagcatggtcaaacaggcttatggtttaaaatgtgttattctcttctttgggaattagctaaatgatgcaataaacctgttttgttttagaatgtctaggaattaaacactttatgtttacagaattgagctgcagaaagtgcaagacatgccaatttgagacacacggtcttctaagactgaaggataaatttaatgcatttcagaaactaaacatcacagcaagctctatctctgagctataatttgtttttaatgcaaagacactagtttgataatatatactgtaatcctgaaacatttgtgttacttacctttggaggtagaaattataccaataaattattgcaccgttagtattagattctgtgtaccctgggaagttatgtcattaatataggctggttcatcaaataaagcaaaaccttgcaatatcagctagatttacactccgggacgttgcccaaaggtaggaagaaagcagagggaaatatttcagtcatcatttccaaagtcattatcaaaatctgtgagggaagtttaatcttccaaagagtcaatgtcagacatcaggcctctgttggcctgcttctctcgaggcactagattaggagtcttcaataagagacttaacatgaggtatatggaagatgaggcaccgagataagttcatcattaggtgtgagcactgctcacccttgctggcaagttctccttaagggcctgaagcacaggtgtccaaagaaaagcgttaagtccatcttaatagaatctatgtggtatatgatgtggtcagcccctggtctgtgatcagcaagaacctacagcacagattatgccctgcccacttcaatgaatacctactctcctccattctccatcactttttttgctatcaagaactccggaccttgcccatggagaagnttagagaggactcttgtggagagctggtttattttctgcctggccgacaagttcagctggcccagaagaggtcaggtattaaaaggcttccttgtgactccagctggttttggttttggtgtatcactgggaatgggctattatctgcgtaaccaagcaatagctggtgcaattgtgagggccatgacacctaagatgtggcttaaaggcgataagttcgtgacgagaatccggctatggatggggggttggaacatggttggggtgttagatccctggggccattatggggttgccccattaacgcaaacgggatggtaggccttctgtggtaaaatccgtgggggtaaacagccgagggtcgt

SEQ ID NO: 259377 - DNA, 916 bp, Homo Sapiens
  misc_feature (705)..(713): n is a, c, g, or t
gataacaaactagaaactgaaacagggtcgggatgccgatgccggcttggagttagagatgagtcaccgctgagagcagctgcagtagctgagcagtggcagcagagaggcagacgtgagctgagggcgcagaggcaggcagcatctctgagggtccccaaggaacatggctgggagccgtgaggtggtggccatggactgcgagatggtggggctggggccccaccgggagagtggcctggctcgttgcagcctcgtgaacgtccacggtgctgtgctgtacgacaagttcatccggcctgagggagagatcaccgattacagaacccgggtcagcggggtcacccctcagcacatggtgggggccacaccatttgccgtggccaggctagagatcctgcagctcctgaaaggcaagctggtggtgggtcatgacctgaagcacgacttccaggcactgaaagaggacatgagcggctacacaatctacgacacgtccactgacaggctgttgtggcgtgaaggccaagctgggaccactgcaagcgtgtctccctgcgggtgctgaatgaaccccttcctgcacaagagcctccaaaaaagccctgcttggaaaaaggcttcggtgggaagatgcgaggggcaaccgatggaagcttcttatcaattctcccaaaaaaatccgaaaccccgcctaagggctannnnnnnnntggggttgggccaaactgagagccccccttccacccccttcccgccggggaataaaaaggcttttccggctttttggggaaaagaaacctacctttgctttttgggaaaaaacccttctttacttataaaaaaggggccccaaaatttttccccgaagcgcgggagcttctgacaccccgaacgcggcccccagctagagccc

SEQ ID NO: 259378 - DNA, 443 bp, Homo Sapiens
  misc_feature (58)..(58): n is a, c, g, or t
  misc_feature (72)..(72): n is a, c, g, or t
  misc_feature (390)..(390): n is a, c, g, or t
ttgttacaggcaaaattctggtatggcgtgaatgccatggggtcattctgaatatatntccccctgtaattntatcattacacgatgtttgcaatacgtgctttgttttttaatttgaaagcaaactttcctactgttgaaagacattttttgacaacttgacccttcctagtattgagttctaagttgaggactgcatcttctcgttttttacagtatagagaacaaaatgacattagtttgaaaaatacatatcacttggtattgctgtcttggttgcagtggtgatacagaattggtttcattaattcctacatggttgagaatcactgatcaagaaagtggggggaagaaaaaacaaacgttaaaacctcaatcctcagtaggganggtagattacattaggtgaaattataggtaatctatgtatgtgctaatggggt

SEQ ID NO: 259379 - DNA, 437 bp, Homo Sapiens
ctagccccttgtcccacagacttctggatggtataaacctagtggcaatgtagcaaccataggctagaaccaaacccaagatttgggtcagtgccctgttaagggttttaggattggtaaggacaccacagctaaatctgacatgtaaaaggatacccttcccctgtcccactacgggtggaggctaaggacctcctcagatcccacagattgcctggtgacattgggcacagggctggatggtgtgctgtttgagaggacagcatgctcaggagatttcagtgggaatgatctctaggctgatgtgtatttggggaagtgggggtggggaagaggtaggtgcctgctgcctcaaaccaccttgtgtaaaatctgcaatacggcttcttccatgtacctgtgcctgaactgtctgcaataaagaagaatttgtaaaa

SEQ ID NO: 259380 - DNA, 447 bp, Homo Sapiens
  misc_feature (347)..(347): n is a, c, g, or t
  misc_feature (400)..(400): n is a, c, g, or t
ccgctccaccaccgccgctgctatatagtttaggtttctgaggtttgtgagcctgtcctgctttgcattcttcaaaaccattcctgatagagtagccgagggagagtcttggggccaagaagggcacagggtgggtcaggcgtgtgcactgtggaacagagctgagaccccggccccccttggactggcacagggtcctacagagttcagaggaggcctgagatttcgaatgggcagtgaatggcctcttctgccagccacaggaaggatgctccttgatcacggcatcccccggcggtagtacagggtgagcttgcaggagggtctgcaagtgcagaaagcagctnggggccaaagaggtgttaggttcaaaggcttgcgaaggagaattaggctactnggaaaaccaaacccaacagatttcacgtcccaaaattccacattttt

SEQ ID NO: 259381 - DNA, 642 bp, Homo Sapiens
  misc_feature (97)..(219): n is a, c, g, or t
gaggcagaatgcagtttgggagggtagatctgcgaatgtccaactcagcctgtagagaaggtgcagtccagccttccttatccagatgaagaaaggnnnnnnnnnnnnnnnnnnnnnnnnnnnnnnnnnnnnnnnnnnnnnnnnnnnnnnnnnnnnnnnnnnnnnnnnnnnnnnnnnnnnnnnnnnnnnnnnnnnnnnnnnnnnnnnnnnnnnnnnnnntgggttggcggaggctggggggccccgagtctcttccaggatcaagctgaggaaggcgggggtggttcccttccggctgtggcccctgggcactggcattcatatggtcccggatgctgatggcctgtttgagcagaccctccacgctgcggaagtagacgctgctgtccaccaggttcttcacggcgctgcaggcgtactccacagtgtagatggctccctggctctgctcctcccaacgctgcatgtctgccttgtgctgggccagctcggggagggagcgacgcacatgctcctgcagccggtacagggccacggatggctcgttggccaggacgtagacgctctcagtgaacttgtccgtgactttcttccccttgagctgcatctccggctcctccatagcgaccgcctcgtccgaat

SEQ ID NO: 259382 - DNA, 1274 bp, Homo Sapiens
gttatagaccgctaacacctgtcactggccactggtttcccggagttagcggcaacgaccttgcagcctggacactagccaggcgctccctcttctcacagcggcccacgtctccttgcttgggagcccatcgtcctggctccggtgtcttcgctgggtctcggggaagcagaggactgttcattcctgtggcgaaaagccggagtcggccctagacacccacgactcgcagggtccatggttccggaggccgtgagaccggccgcggctgaaaggtaccagggcccatgatgccggagcccgtgtgctcagccctcttgcagacggtaaagaaaccaagtggaagagtgtttcctcctctggccgtaaagcagctgtccccgccctactccggaccgccccaaagactccatgggatggacctgagtcagccgaatcctagccccttcccttgggcctgctgtggtgctcgacatcagtgacagacggaagcagcagaccatcaaggctacgggaggcccggggcgcttgcgaagatgaagtttggctgcctctccttccggcagccttatgctggctttgtcttaaatggaatcaagactgtggagacgcgctggcgtcctctgctgagcagccagcggaactgtaccatcgccgtccacattgctcacagggactgggaaggcgatgcctgtcgggagctgctggtggagagactcgggatgactcctgctcagattcaggccttgctcaggaaaggggaaaagtttggtcgaggagtgatagcgggactcgttgacattggggaaactttgcaatgccccgaagacttaactcccgatgaggttgtggaactagaaaatcaagctgtactgaccaacctgaagcagaagtacctgactgtgatttcaaaccccaggtggttactggagcccatacctaggaaaggaggcaaggatgtattccaggtagacatcccagagcacctgatccctttggggcatgaagtgtgacaagtgtgggctcctgaaaggaatgttccagagaaaccagctaaatcatgacaccttcaatttgccatcatgacgcagacctgtatacattaggttaaatctgaatttccttgtgtgatgcctccttaggcacacaggcaatgtctcaagtactttgaccttaggggtagaaggcaaagctgccaggtaaatgtcatcagcattgctgctaattttggtcctgctagtttctggattgtacaaataaatgtgttgtagatg

SEQ ID NO: 259383 - DNA, 812 bp, Homo Sapiens
  misc_feature (553)..(601): n is a, c, g, or t
  misc_feature (616)..(619): n is a, c, g, or t
  misc_feature (683)..(699): n is a, c, g, or t
ggtgccccgaagacttaactcccgatgaggttgtggaactagaaaatcaagctgcactgaccaacctgaagcagaagtacctgactgtgatttcaaaccccaggtggttactggagcccatacctaggaaaggaggcaaggatgtattccaggtagacatcccagagcacctgatccctttggggcatgaagtgtgacaagtgtgggctccctgaaaggaatgttcccagagaaacccagctaaatcatggcacccttcaatttgcccatcgtgacgcagacctgtataaattaggttaaagatgaatttccactgctttggagagtcccacccactaagcactgtgcatgtaaacaggttcctttgctcagatgaaggaagtagggggtggggctttccttgtgtgatgcctccttaggcacacaggcaatgtctcaagtactttgaccttagggtagaaggcaaagctgccagtaaatgtctcagcattgctgctaattttggtcctgctaggttctggattgtacaaataaatgtgttgtagatgacaannnnnnnnnnnnnnnnnnnnnnnnnnnnnnnnnnnnnnnnnnnnnnnnnaccactaaaaaaacnnnnccctgggggggcccgcccttgggcccctccgaaaaaagtttttttagaaaccatttctcttttnnnnnnnnnnnnnnnnnccccctataaagggaaaaaggggagaaaagtgggggctcatagaggttgtgggtttccccccaagagagagaaacccggcgggggccactaggaacacaaagagggggctctg

SEQ ID NO: 259384 - DNA, 669 bp, Homo Sapiens
gacaaagcctgcggggatgttcttgtaactgcagagctgattctgaggggcaaggatggctccaaccttcccattcttccccctcaaagggcgccaaatctatacatggtcccccaggggatcaggcctgtggtccagctcactgccattgagattctagcttggggcttaagaaatatgaaaaacttccagatggcttctatcacatcccccagtcttgttgtggagtgtggaggagaaagggtggaatcggtggtgatcaaaaaccttaagaagacacccaactttccaagttctgttctcttcatgaaagtgttcttgcccaaggaggaattgtacatgcccccactggtgatcaaggtcatcgaccacaggcagtttgggcggaagcctgtcgtcggccagtgcaccatcgagcgcctggaccgctttcgctgtgacccttatgcagggaaagaggacatcgtcccacagctcaaagcctcccttctgtctgccccaccatgccgggacatcgttatcgaaatggaagacaccaaaccattactggcttctaagctgacagaaaaggaggacgaaatcgtggactggtggagtaaatcttatgcttcctcaggggaacatgagaaatgcggacagtatattcagaaaggctattccaagctcgag

SEQ ID NO: 259385 - DNA, 1222 bp, Homo Sapiens
  misc_feature (340)..(375): n is a, c, g, or t
  misc_feature (455)..(464): n is a, c, g, or t
tattacaaattaaaaacatgaaaattacaccaaaaagatggaactacttttgtagcacaactcagaacttctgttcgtaacaccggactagagaagaggtcgcttttggctgaatctaatgaccttagaagggaaaggccattgctgggcaggatctggtggcaacgcacacggaagtcctagaactctatgaagcctacctcaggccctgcgggtgcgtctggagttccaaggcatttggggaaccaaagcaatttcagctaacagtgaccagtttttagaatggagcttatgatcagaggaccataaaccctcatccaccctagagctcaatgccagnnnnnnnnnnnnnnnnnnnnnnnnnnnnnnnnnnnngctttttgtgctatatcagaatgctggcaggtagacaattcagtaacctgtgccactttctaaacatctgtaagaccacnnnnnnnnnntgggttttacagaatacgaagacccaacacagtccttagaggatcattcaacctttcctacatgccaagctgtgtgattggaaaatagaagagccatagctcttgcaagattagaggaaaagcaagtatttgtcaagagccaaagaaatgtgttcaaataatggagtttcctctgtgtcgcacacagcttttccttcccgtaggtactaagagttctttggtggttagagagatggcctggagctcagggcaggagatgacgctgaagagttacatctactcaggattaccacctgtggttcctaatttcagcattcaactctaattgttcagcctgactaattacaggcaatcagctgcttatatggtcactggttgtcagctcctactgattattccttttccttttctacctactcattaaccccattccatggaaaaacaggtgcttacaggaaaggatagggaggaaaaagaaatgtaaatgaatctattgtttggtaggaaagttgattcactgattatctatggatttcaatgatctgtgctttactcttgctactgtggataaccaaaggtcactgttaacgtatcttttgcttaaaaatgttaatatgcttattatgctttaaaatctagctatttaagggcatgaatggtttaaagcaaatttttacatcatgtcattatggccctgaaaaaaggagattctgccaatggaaagggttttgtttagccccagttaagatttcaatcta

SEQ ID NO: 259386 - DNA, 557 bp, Homo Sapiens
  misc_feature (492)..(492): n is a, c, g, or t
  misc_feature (494)..(494): n is a, c, g, or t
  misc_feature (528)..(528): n is a, c, g, or t
gaagacatttccacctggacacctgaccatgtgcctgccctgagcagcgaggcccaccaggcatctctgttgtgggcagcagggccaggtcctggtctgtggaccctcggcagttggcaggctccctctgcagtggggtctgggcctcggccccaccatgtcgagcctcggcggtggctcccaggatgccggcggcagtagcagcagcagcaccaatggcagcggtggcagtggcagcagtggcccaaaggcaggagcagcagacaagagtgcagtggtggctgccgccgcaccagcctcagtggcagatgacacaccaccccccgagcgtcggaacaagagcggtatcatcagtgagcccctcaacaagagcctgcgccgctcccgcccgctctccccactactcttcttttggcagcagtggtggtagtggcggtggcagcatgatgggcggagagtctgcttgacaaggccactgcggctgcagcttgncncttccctgttggccaatggggattgacctgggcnggcggcattgggcggttgggacaaaaggc

SEQ ID NO: 259387 - DNA, 972 bp, Homo Sapiens
  misc_feature (57)..(57): n is a, c, g, or t
cttttgtgcaccccaggaggtcattgtagatatcaataatatagtgccctaagtgcnactttattgcccaagtctagattgatacttttttcagataaaccagctttttatgtaaagagtaagggaaaaagttaaatctttaattctgacctgccataaatacccaaagatataaactgtcttccaccacccccctcataactaagacatccttcctgagtcactcttaatcatgaaacttgattttctcaattggccagtcttctgatctttagtatctctttagttcagtaatttttacctacctacttgatttattttcctttaaaaggtgaaatgacatttaaagaaaaacaaacacccatcattcctcagtcccaacacagcagttcttttcactcttgcttgtaactttcaggccttacccacatgtgttcctatagagttgcatgtagctaaaattatagtgtgctgcctaactttgtgctaataacgaaggacacacattatcattgcctcacagtggatggcacctgaccccatttttccaaggattctattttccagtgaatttttgtcaccgagttaatttcccaagtctgatagcatgaatgcttatttgtgctgtgaaaagcagagcagcctgactcagctttcccattttccataggataatatgtgccaaaaaaggtttattttcttggtaaaatcaggattgtagaattgtgctatttttaatttttaaaatttttggttagagcttatagacattacttttatgattattttgcgtgctaaataagttaaagggtatgttttgaactatagcactaattaatgtgtgtgatcctagtatgttgatagctttgattttgtgagtggtttactagtcatttattatgattcccatgaactctgatatgattcattgtggttttaactcaggttgaataaaagcatccatttctttta

SEQ ID NO: 259388 - DNA, 696 bp, Homo Sapiens
gtgtttaatttcaaagcagtgatgaattgctcttttgaaattactctaagtaatccatgtgttagaatacagatgaacctccgtttgatttcacagccttcagcacaggcaactgttactgagtctgcacgaacttagataatgaggtgcagggttatttgcatttaaattgcaatccagcacacgtgtgagaaagaagaggcactagtctaaaaggctgcattgccgggagagatgagacaggcagaggagggtggggtaaagagcgatttaacatctatttaggttaatgttcactttacaaaggtgatgggggatattttgttaggtgatagcagatgcttttcatttttaaacatagaattaaaattggatttgcttctctttaatacttcaacatattgaatttccctaggaaagtgactagctataatgaaaattcaagcgaaaagggaaaaagattgtaaatgcagatgaaataacttcatttttaagtacaaataatagtaggattggtgtatgtaggtttaaaattatagtgatgactagtcgaacttaatatacaatcagttcttgcaaatactttacacttagctgccattacacaacaaattggaattttccagctgttcaactatcatggactctgtacaggatagatgtgtataatggaaaatatgtactgcttctttcttt

SEQ ID NO: 259389 - DNA, 595 bp, Homo Sapiens
cactctcatctctattaattataaaaccgagctttccatacggacctgttaaatatgattgtaattgtctatactcagatggacctaattcttcaaaatttttagcatcaaaaacaacttgtcttgttttatagtcctccaatactcgtttccaaaaatcagatttgccaccattggtgcctataatatctcgtctctgaactgcgttaccatttggatgggacttgatgtctgttaggtgggatgcaaatactattcttagtgcgtctaaacaccattgttcaaattcagtggcaccttcatttcctatcggtatctgatctagatgagtagttatttgacctattgttttatttctaatggctgaattatctgaaataatattaatatcatattcgtcatttatctcctctgcttcctctggagcaagtgcattacgatttagattcaaaccaagccagtaacatggatgaattaataatttctcattactttcaaaacctttatctggagttcgcccgtcatggcaaaatgaataggatgaggtgtttttatcacgaataccaacaaatcctacactatacaaactttggag

SEQ ID NO: 259390 - DNA, 1317 bp, Homo Sapiens
gcatgagccaccgtgcccggcctatagaaatcaatctttctgactcttctcacttttatctccccatgcccaaggtttgcctgttccataacactcactcccttcccccttgctaatcagaagccatctcctctcagtgtctgatctctgctcttcatacatgattacagtcatggggtagagagtgcttgctaaattatgcagttaatcctatggtgctttaattttcaggccttcaaaaaacacttgtacagtgatgtgcagatttttaaacagttgaacttccttgtactacagtttttgtattgacagccaaatttgtctttcattcttcaggattgtggaataaagtgatttttacaggggcttccaggcaaagtttttcctttccatctaaggcttgtaggaaccctaggcttatatagctgcttacatgagaaatgcaaaatctgtattcaccatgactttagtaacaaaggcaaagttttttagtagtgccaaggcaagaggaacaatcttggtggtagtactaagttttgtcaatattgtggtttcctgattgtattgttggctttctctctgagcattgaggtatactagaagtagagcttctcaaacataatatcattacctcataagcattaacaaatcaggcccaaagagcgtaagtcctagaaatttgttttaaagcagccctagtcatggtgctggtgctaccgccttgttttaggagcctgcctcctgtcagtatgaaaccctcacctgaaaaatgccagcctggacaccaaacactgagccccttcaacaggcacattatttccccctgagatccataagggaatttagtttctactattgtagagttctgaaaagaggtaaaatagtagtcctttggtcatcctatttttgctttcaattttgatatttcagactgtaaaaggccttgggggatgatagtacatgtggtagcagtaatttttttgaagcaactgcactgacattcatttgagttttctctcattatcagattctgttccaaacaagtattctgtagatccaaatggattaccagtgtgctacagacttcttattatagaacagcattctattctacatcaaaaatagtttgtgtaagttagttttggttaccatctaaaatatttttaaatgttctttacataaaaatttatgttgtgttttaaaatccttaggggctttatctatttttctaagtcagttaactgtacttctaaaaaaagtattttgtatctacttttgtaacttcgtcagaataaaatatattgaaagcaaaaaaaa

SEQ ID NO: 259391 - DNA, 1370 bp, Homo Sapiens
  misc_feature (378)..(427): n is a, c, g, or t
  misc_feature (1123)..(1195): n is a, c, g, or t
ggctgggtggcgaattcggcacgaggccttcatccccggcctgtctcctgagcccccgcgcatcctagaccctttctcctccaggagacggatctctctccgacctgccacagatcccctattcaagaccacccaccttctggtaccagatcgcgcccatctaggttatttccgtgggatactgagacacccccggtccaagcctcccctccaccactgcgcccttctccctgaggacctcagctttccctcgaggccctcctaccttttgccgggagacccccagcccctgcaggggcggggcctccccaccacaccagccctgttcgcgctctcggcagtgccggggggcgccgcctcccccatgccgccctccgnnnnnnnnnnnnnnnnnnnnnnnnnnnnnnnnnnnnnnnnnnnnnnnnnnacgcctggccggccggccgcgggactatccacctgcaagactatcgacatggagctggtgaagcggaagcgcatcgaggccatccgcggccagatcctgtccaagctgcggctcgccagccccccgagccagggggaggtgccgcccggcccgctgcccgaggccgtgctcgccctgtacaacagcacccgcgaccgggtggccggggagagtgcagaaccggagcccgagcctgaggccgactactacgccaaggaggtcacccgcgtgctaatggtggaaacccacaacgaaatctatgacaagttcaagcagagtacacacagcatatatatgttcttcaacacatcagagctccgagaagcggtacctgaaccccgtgttgctctcccggggcaaagctgcgtcctgctgaaggctcaaggtaaaaagtggagcagcaccgtggaagctggtacccaaaattccggcaaccaattccctggcgataaccctcaacaacccggcttggttgggaccccaggggaaatcgcgcccaaagggggttaaccttttttgagtggcccccggaaatttgggccggcaatggggttgaaaccccggggaggggggaaaaatgaagggggttttccccccttatagggccccccctggttcccctgtgggaaaaaaagggggaataaacacccctgggcnnnnnnnnnnnnnnnnnnnnnnnnnnnnnnnnnnnnnnnnnnnnnnnnnnnnnnnnnnnnnnnnnnnnnnnnnatttttttgggggtggaaaacccggggctttttttctcggggtgtttcacgaggggcacaccccccctctggggagaagaggcgcccccccaatttcttgggaagaaaattcccccgcgggacaccccgcgaaaaacccctggggagaaacacaaacataatttgtgtgtgtgcg

SEQ ID NO: 259392 - DNA, 1001 bp, Homo Sapiens
  misc_feature (582)..(616): n is a, c, g, or t
ggggtccgccacccaccccgggtgggtgtagggggctttccccccgggacattgggtggcctggacttttctggtggccaggtctcccccgttgggctcccccctggtttaccttggagcccctcaacccaagaggcaagtttttgcccgggggggagccaaaccccggggttccaggttcccccttttcgggggccttcggaaggtgttggaaagaacaaaaaatatggccggggggtactccgccttgaaccttgtccataggatttcggtggggggtttccccccattaggcccggggggggccctccttggagtagtagtcggcctcaggctcgggctccggttttgcactctccccggcccacccggtcgcgggtgctgttgtacagggcgagcacggcctcgggcagcgggccgggcggcacctccccctggctcggggggctggcgagccgcagcttggacaggatctggccgcggatggcctcgatgcgcttccgcttcaccagctccatgtcgatagtcttgcaggtggatagtcccgcggccggccggccaggcgtcagcaccagtagccannnnnnnnnnnnnnnnnnnnnnnnnnnnnnnnnnncggagggcggcatgggggaggcggcgccccccggcactgccgagagcgcgaacagggctggtgtggtggggaggccccgcccctgcaggggctgggggtctcccggcaaaaggtaggagggcctcgagggaaagctgaggtcctcagggagaagggcgcagtggtggaggggaggcttggaccgggggtgtctcagtatcccacggaaataacctagatgggcgcgatctggtaccagaaggtgggtggtcttgaataggggatctgtggcaggtcggagagagatccgtctcctggaggagaaagggtctaggatgcgcgggggctcaggagacaggccggggatgaaggcctcgtgccgaattcgccacccaggcctcgctcc

SEQ ID NO: 259393 - DNA, 667 bp, Homo Sapiens
actagattgccttatttcacacagattctggtaaagacagtcttgagaaatgccaattatgatgtagactgccattttaataaaaataaaatatatctatattttctggagctattttcctaactggtgttcctgaaggtttaaaacctgctgaaacagcaattgggaggcccattttactggccagtatataattccattagtaagagaggctagcaaagaataatcatatcaatttcttaatcagctgcagccatgctgaatttgaactggcaaactctgatttgtcagttgttagttgtgatcttcatatcactaaaatgaacagataccattctaataactttacatagatatagtcctagaagacattgttcctgcccgtggtcacagtaacaaaaaagtggtgcaaaatccagttactttataaatactgataatttgcagcattaaggaacaggacattaaaaaaaataaatttccccataggacacctatgactaggaagtcgtcttttcctaagagaagccaaagttttaattattcagttcacaactattgtactgggttacttagtctaagaaagaaaaggtgctctacagagatttcccacacacacaaagaatcagcattaatttagcataatctctatcattcacagatctgg

SEQ ID NO: 259394 - DNA, 788 bp, Homo Sapiens; identical to SEQ ID NO: 5052
  misc_feature (701)..(725): n is a, c, g, or t

SEQ ID NO: 259395 - DNA, 825 bp, Homo Sapiens
gggtattctttgtacattgtcagatatctttcaaagtataaattaggaataaaaatgtccacatgatatgtgtacaaattctttttaagattgtcatcttgtacagcaaaatattatgttggtatattacttccttattaatttgcaaatgattggattaaaaaagctcactgtattccttactaacctgttgtgtgaaacataacattggcagtcgaggagtcagaactcggattcccagcctcactccctctgtgtgtgttgaccacgtctctgctgtgaataggatttcatgcagtggtctgttatggggctttgcagcgtggggggctgcagaagattctcagacattcttatccttctggagtctcaacccatcaggttcagaccagtaagaaccaggctgggtcaggctcttaatttcactatggtgggggacaaaatgaacactggcttttgttcactttgcccctgagagatctagtcctgtcctgtgatggcttccacaaaccctgttggaagtttgggttattcctataactgtatgtgttgagtggccgtgaggctatggacctagcctggaatttagatgtctagctattttttaatcttgttggtaaatgctcagaggtctgtgctacctctgtgaggtatatactaaaatgaatgtaaaataaggatcgtattccctgctttaaggaactggtagtcttgtttgggtgatgagacaaagttcttgagacatttaaactgtatttaccagtgtgaaaaatgtcatttatggagattaattcattatggaaataaaacattgcctaagccctt

SEQ ID NO: 259396 - DNA, 1179 bp, Homo Sapiens
ctacccacaaccatatacgtgtctacaagccactgttcctctgccctcctattcctttcctctatctctattgctcgtagaccccccccttttttactcttcttccttgtctctttaacaagtatggaatgtctcaaatgttccactatgatgtttattcaattctgaaacccaatacccagtagcagcatctcgtaaaccgatcctgaatgaaagtcatccaaccccaactcaccagctcgttttccgcttttctgtacgctcgctgacgcagggcttgaagagctccagcggcgacgccccaggactgaggagtccctcagatctttaacaaaagaactccgcgtgcaggcttcaggaccaaccccagccaaagccgctggcatgagacaggtgcatgatcggattctgggtcagcccgcaggcctcccggctcctgggctcagcggggcaggcttcagcgttaacctggcgctgtgcaccccagaacccgcgttggtccagcaggcgtgggcctccccccagggctgggtggcgtctgatgcttcgcagggagggcgctaggcttcgagtcacacggcacgggcttacacagagggatggtttcgcatcgttctaagcggcacacagctaagcgtatttggggacaaatgcaaattgtttcccaggccataaataacttttaaaaatttgattttcttagtgtttccaaagactcaattctcaatgaacctccaattacccacaggctgcccagtccacgcttctccccacccccttcagctaagggcacccgcagtcctaggaccacccccagctccacccaaggcaaatgtagggtggggggttctgtgggcctggggcgtgctgttttcaggacaggactgggcagcgtctggacatgaggacctgcgggttttgggggggactttgtccctgagcccagcctgcaaggctgtcggcaaatcacagaccaactccaggatacagctttgctcctccagagccaaaatacataggatgtggctgagaccactgcagactccccataggacaagatcaccaagacccacccccagaaccctcgctagcacgaagcccagccagtcgggtccgggtgattcctgctatgaaggtgggaaagaggacacagtctgtcgccagcattcccacttccag

SEQ ID NO: 259397 - DNA, 938 bp, Homo Sapiens
ttcgaggtaggagtcgactcctgtgaggtatggtgctgggtgcagatgcagtgtggctctggatagcaccttatggacagttgtgtccccaaggaaggatgagaatagctactgaagtcctaaagagcaagcctaactcaagccattggcacacaggcattagacagaaagctggaagttgaaatggtggagtccaacttgcctggaccagcttaatggttctgctcctggtaacgtttttatccatggatgacttgcttgggtatggagagtcggcttgactacactgtgtggagcaagttttaaagaagcaaaggactcagaattcatgattgaagaaatgcaggttagtttaaactttgaaggaaatttttaaggtggcaaaaggttttggtggcatatacaccttaatctgtagatgggagtgattagctgtttaaaagttaaaatgtgactgagaaggaaattgagtagggcaaattttaaatgggtattatttttcatattcaaacaggcagacctgttatcctaaactaggtgagtcagcttttggtacatgtgatgattttcagtgtaaccaatgatgtaatgattctgccaaatgaaatataatgatatcactgtaaaaccgttccattttgattctgaggttactctactaacaagcatcacacatttgtattttgccctgattaatatgttggcttcgctttcagggtttttaatgaccacaacaagcaagcatgcagcttactgcttgaaagggtcttgcctcacccaagctagagtgcagtggcctttgaagcttactacagcctcaaacttctgggctcaagtgatcctcagcctcccagtggtctttgtagactgcctgatggagtctcatggcacaagaagattaaaacagtgtctccaattttaataaatttttgcaatcc

SEQ ID NO: 259398 - DNA, 832 bp, Homo Sapiens
  misc_feature (73)..(74): n is a, c, g, or t
  misc_feature (110)..(110): n is a, c, g, or t
  misc_feature (119)..(119): n is a, c, g, or t
  misc_feature (167)..(171): n is a, c, g, or t
  misc_feature (176)..(176): n is a, c, g, or t
  misc_feature (180)..(183): n is a, c, g, or t
  misc_feature (186)..(186): n is a, c, g, or t
  misc_feature (188)..(188): n is a, c, g, or t
attgtggtgagggaatcccaagcgcctctagttccatggcccagggattctccttagggaaaccagctaatgnncccatgttcccctttccctactggggcccggcgcgncccaaccgnaatgtcttagaaaggcttctggagggccgagggcggccgaccatgttnnnnnttttntttnnnnttntntttttttgaattgcaaaaatttattaaaattggagacactgttttaatcttcttgtgccatgagactccatcaggcagtctacaaagaccactgggaggctgaggatcacttgagcccagaagtttgaggctgtagtaagcttcaaaggccactgcactctagcttgggtgaggcaagaccctttcaagcagtaagctgcatgcttgcttgttgtggtcattaaaaaccctagtttaggataacaggtctgcctgcatttcttcaatcatgaattctgagtcctttgcttctttaaaacttgctccacacagtgtagtcaagccgactctccatacctttaaaaggtatgacaggaactgtcttcatgtccttacccaagcaagtcatccatggataaaaacgttaccaggagcagaaccattaagctggtccaggcaagttggactccaccatttcaacttccagctttctgtctaatgcctgtgtgccaatggcttgagttaggcttgctctttaggacttcagtagctattctcatccttccttggggacacaactgtccataaggtgctatccagagccacactgcatctgcacccagcaccatacctcacaggagtcgactcctacctcgaaaaagcca

SEQ ID NO: 259399 - DNA, 610 bp, Homo Sapiens
cttttcgaggtaggagtcgactcctgtgaggtatggtgctgggtgcagatgcagtgtggctctggatagcaccttatggacagttgtgtccccaaggaaggatgagaatagctactgaagtcctaaagagcaagcctaactcaagccattggcacacaggcattagacagaaagctggaagttgaaatggtggagtccaacttgcctggaccagcttaatggttctgctcctggtaacgtttttatccatggatgacttgcttgggtaaggacatgaagacagttcctgtcataccttttaaaggtatggagagtcggcttgactacactgtgtggagcaagttttaaagaagcaaaggactcagaattcatgattgaagaaatgcagggtttttaatgaccacaacaagcaagcatgcagcttactgcttgaaagggtcttgcctcacccaagctagagtgcagtggcctttgaagcttactacagcctcaaacttctgggctcaagtgatcctcagcctcccagtggtctttgtagactgcctgatggagtctcatggcacaagaagattaaaacagtgtctccaattttaataaatttttgcaatcc

SEQ ID NO: 259400 - DNA, 606 bp, Homo Sapiens
ttttttggattgcaaaaatttattaaaattggagacactgttttaatcttcttgtgccatgagactccatcaggcagtctacaaagaccactgggaggctgaggatcacttgagcccagaagtttgaggctgtagtaagcttcaaaggccactgcactctagcttgggtgaggcaagaccctttcaagcagtaagctgcatgcttgcttgttgtggtcattaaaaaccctagtttaggataacaggtctgcctgcatttcttcaatcatgaattctgagtcctttgcttctttaaaacttgctccacacagtgtagtcaagccgactctccatacccaagcaagtcatccatggataaaaacgttaccaggagcagaaccattaagctggtccaggcaagttggactccaccatttcaacttccagctttctgtctaatgcctgtgtgccaatggcttgagttaggcttgctctttaggacttcagtagctattctcatccttccttggggacacaactgtccataaggtgctatccagagccacactgcatctgcacccagcaccatacctcacaggagtcgactcctacctcgaaaaaaagccc

SEQ ID NO: 259401 - DNA, 946 bp, Homo Sapiens
gaaggatcaagttgtagagagaaaaagaaaacaagagatatacattgtgatatattagggacactttcacagtcctgtcctctggatcacagacactgcacagaccttagggaatggcaggttcaagttccacttcttggtggggatgagaagggagagagagctagagggacaaagagaatgagaagacatggatgatctgggagagtctcactttggaatcagaattggaatcacattctgtttatcaagccataatgtaaggacagaataatacaatattaagtccaaatccaacctcctgtcagtggagcagttatgttttatactctacagattttacaaataatgaggctgttccttgaaaatgtgttgttgctgtgtcctggaggagacatgagttccgagatgacccaatctgcctttgaatctggaggaaataggcagaaacaaaatgactgtagaacttattctctgtaggccaaatttcatttcagccacttctgcaggatccctactgccaacctggaatggagacttttatctacttctctctctctgaagatgtcaaatcgtggtttagatcaaatatatttcaagctataaaagcaggaggttatctgtgcagggggctggcatcatgtatttaggggcaagtaataatggaatgctactaagatactccatattcttccccgaatcacacagacagtttctgacaggcgcaactcctccattttcctcccgcaggtgagaaccctgtggagatgagtcagtgccatgactgagaaggaaccgacccctagttgagagcaccttgcagttccccgagaactttctgattcacagtctcattttgacagcatgaaatgtcctcttgaagcatagcttttttaatatctttttccttctactcctccctctgactctaagattctctcttctg

SEQ ID NO: 259402 - DNA, 1034 bp, Homo Sapiens
  misc_feature (677)..(677): n is a, c, g, or t
cttcattcaacagatatttatttgagcacgtaccatggaggagatttctgcattcctgattaacctaaggacatgtgtgttttcatttcattcccttttagttcttcctccatgggtctgacttgaactctctccacacaaaccttccaagaagcatcctccccaaggagtatgggggcacggctggggagctggacactgccacctggaacgcggtactgctggcttcagaagacgattttgtgaaagagttctgccaacctgttcctgcctgtgacagcatcctgggccagacgctgctgcccgagggcctgacctcagatgcacagtgtgacgactccttgcgagctgtgaagtcacagctgtactcctgctactagcccgtcccccagggtcaccatctttaattcttttccttcttttctttggagaggcacaaggagaatttaagggtccatggattcagtcttgctccttgtaattaaactgcaggatggaggaacagcctgagatatgagcatgagcccattttggggtaagcctttggttactttaattactccatggaagacatggaaaatgtccccactgattcttaaacatttggaatcccagtctgcaactattaatctggaggctatatctattttgttttgctttttggttggggggtgggntgatctggttcttacacatcttggaagcaagaacaatcaggaccaaagtcactttgatcccactttttccaggagaaaaaccacctgtttggccagttgagaactacttgtatggaaataatttggccaaaccttcagtgtgaccaaatgtgagaactggggagttttgtgttttttcacagggaccccctaagtataggacctctgctggctcatcagggaaacttaactgggggatgaaaggcccccagcctgttggcccccggggttttgggaaaggccccttaaacttgaattctggtaaagcttccgggaacataagccaagcacttttggtggggccaaatggtggaaaac

SEQ ID NO: 259403 - DNA, 960 bp, Homo Sapiens
gctgggtggcgaattcggcacgaggggtcggttctgcgtgcgctgccggacgaggctcccgccgccgattgacccgcgctccgcccgtagtcgggccgggaccttggtagctaatgtccgaagaaagtgactctctgagaaccagcccttctgtggcctcactctctgaaaatgagctgccaccaccacctgagcctccgggctatgtgtgctcactgacagaagacctggtcaccaaagcccgggaagagctgcaggaaaagccggaatggagacttcgagatgtgcaggcccttcgtgacatggtgcggaaggagtaccccaacctgagcacatccctcgacgatgccttcctgctgcgcttcctccgagcccgcaagtttgattacgaccgggccctgcagctcctcgtcaactaccacagctgtagaagaagctggcccgaagtcttcaataacttgaagccatcagccttaaaagatgtccttgcttccgggttcctcaccgtgctgccccacactgaccccaggggctgccatgtcgtctgcatccgcccagacagatggataccaagcaactatccaattactgaaaacatccgagccatatacttgaccttaaaaaaactcattcaggtctgaagaaaacccaggatgggtttcccccattcggataaaaccagtccatgtggtgaatgaacctcgaatatttaaaggcatttttgccatcataaaaccattttctaaaggagaaaatagcaaacagattcttcctccatgggtctgacttgaactctctcacacaaaccttccaagaaagatcctccccaagagtatgggggcacggctggggagctggacactgccacctggaacgcggtactgctggcttcaaaagaccattttgtgaaagaggtctgccaacctggtcctgccctgggacagcatccctgggccaaat

SEQ ID NO: 259404 - DNA, 837 bp, Homo Sapiens
  misc_feature (613)..(613): n is a, c, g, or t
  misc_feature (687)..(687): n is a, c, g, or t
  misc_feature (731)..(763): n is a, c, g, or t
gaagtctagaagacctgctggacaaattctaaaagagctagtagtctgtaacacttattcttgcatcttattaattttctatgatattttttccttcttcgtagggacttgggacaatctggctttgctgctttctaactgctaggcacctctctctaaccctcattgtcagagggaattggaggatatccacagtctgttcctgttctgatattctgagcagagaaaaggcactaacggttcctcttagctatttaattatcagaagcaagtaatctttccccagataatattttgccctagaagaagccgtgatttagctcttttattgtgcttacttggtccaaatacatctgtggggtgttttgtcatttcttaatgaatgaatcatagttataaccaggggccaagctgcccaagaggctcttcagagatcatggatgctctctttctggaagctgtggcctgatggagcagccccattccaggggtcccatctgtccggagttgtgtatgtcaagtccggctcagtctttatttccaacacttagccgtggtcctgtgcagtcaagctctcagctaagtgtttagggctgtcttgtcagaaatggtntatacgtggggcaaaagaagatctgacagctcctatataccttatcttactgaattcttaaactttgaaccagntcttccacttactgacttgttaccactgctgactttctgaaaannnnnnnnnnnnnnnnnnnnnnnnnnnnnnnnnccagtaggggattagaatggttagtcctacttagtaagaaaaatattggatttttaatcattcatagggctggt

SEQ ID NO: 259405 - DNA, 1345 bp, Homo Sapiens
  misc_feature (754)..(769): n is a, c, g, or t
  misc_feature (1197)..(1197): n is a, c, g, or t
  misc_feature (1300)..(1300): n is a, c, g, or t
  misc_feature (1313)..(1313): n is a, c, g, or t
  misc_feature (1319)..(1319): n is a, c, g, or t
  misc_feature (1333)..(1333): n is a, c, g, or t
gcgggcgaaggaaggcaggtgggaagggacagtcggccgcagaccgcgctgggttgccgctgccgctgccgccatcgtgccagcccctcgggtctccgtgaggccgggtgacgctccagaatgggagacaagccaatttgggagcagattggatccagcttcattcaacattactaccagttatttgataatgatagaacccaactaggcgcaatttacattgacgcgtcatgccttacgtgggaaggacaacagttccaggggaaagctgccattgtggagaagttgtctagccttccgttccagaaaattcagcacagcatcaccgcgcaggaccatcagcccactccagatagctgcatcatcagcatggttgtgggccagcttaaggcggatgaagaccccatcatggggttccaccagatgttcctattaaagaacatcaacgatgcttgggtttgcaccaatgacatgttcaggctcgccctgcacaactttggctgacctcctctcagctaggcactcacgctgtttcctcctccctcctcttcccaatactattcccactcctccagatgctccaaatatcatgcacaaatgagcagggccgcggtgggagtgggcgcagtgcgctgctgccactgaggtgttgtgcatgatgtttggatgctagactagttgcatctgacgggagaagtttgtgttgtaccagcgcatgccttggaaagacttaagtaatgcaaaaggttgtccnnnnnnnnnnnnnnnnaatctactgacaagttgctctagtaacccaaagaagtgaaggagaaagcagctgcctcaccgcccagacattgatttgttcagatgtttcaatgcctcatgatacaataaaaccacaaaaattttcttaacagtttaaattgttttaattagtttactagttggctgggcatcagaagctacccagacccgttgtctctctcatgtttcaccctcccacttctgccccaactctgaatacctgttgcagggagaaactgctggaagcggcactcccaggctaggcctctcaggaaggccgtgtaggggcagttctctcccactccacaggggcgactgggtctttgggaaagcagggcagggaaggagcttcaggtctgggcctggaagctttcttcttcactggaaggcctgttggcagttcagttnctggattaccttcctggtggactttcttgcttctggggtagggtttcagggggccctagttaggcagggaggaggatggatcctggaattcctgtttggaagntgggaggagggcnttgggnaaattgggttcatncacgtttcaggg

SEQ ID NO: 259406 - DNA, 910 bp, Homo Sapiens
  misc_feature (607)..(670): n is a, c, g, or t
ggtaaggtacctctcaacattaccaaaatcatttctttagagggaaggaataatcattcaaatgaactttaaaaaagcaaatttcatgcactgattaaaataggattattttaaatacaaaaggcattttatatgaattataaactgaagagcttaaagatagttacaaaatacaaaagttcaacctcttacaataagctaaacgcaatgtcatttttaaaaagaaggacttagggtgtcgttttcacatatgacaatgttgcatttatgatgcagtttcaagtaccaaaacgttgaattgatgatgcagttttcatatatcgagatgttcgctcgtgcagtactgttggttaaatgacaatttatgtggattttgcatgtaatacacagtgagacacagtaattttatctaaattacagtgcagtttagttaatctattaatactgactcagtgtctgcctttaaatataaatgatatgttgaaaacttaaggaagcaaatgctacatatatgcaatataaaatagtaatgtgatgctgatgctgttaaccaaagggcagaataaataagcaaaatgccaaaaggggtcttaattgaaatgaaaannnnnnnnnnnnnnnnnnnnnnnnnnnnnnnnnnnnnnnnnnnnnnnnnnnnnnnnnnnnnnnntagaagacaattttcataacttgataaattatagttttgtttgttagaaaagttgctcttaaaagatgtaaatagatgacaaacgatgtaaataattttgtaagaggcttcaaaatgtttatacgtggaaacacacctacatgaaaagcagaaatcggttgctgttttgcttctttttccctcttatttttgtattgtggtcatttcctatgcaaataatggagcaaacagctgtatagt

SEQ ID NO: 259407 - DNA, 1316 bp, Homo Sapiens
  misc_feature (97)..(155): n is a, c, g, or t
  misc_feature (440)..(449): n is a, c, g, or t
  misc_feature (620)..(671): n is a, c, g, or t
  misc_feature (806)..(869): n is a, c, g, or t
  misc_feature (1090)..(1090): n is a, c, g, or t
  misc_feature (1138)..(1138): n is a, c, g, or t
  misc_feature (1182)..(1182): n is a, c, g, or t
atataaaatagtaatgtgatgctgatgctgttaaccaaagggcagaataaataagcaaaatgccaaaaggggtcttaattgaaatgaaaatttaatnnnnnnnnnnnnnnnnnnnnnnnnnnnnnnnnnnnnnnnnnnnnnnnnnnnnnnnnnnnagaagacaattttcataacttgataaattatagttttgtttgttagaaaagttgctcttaaaagatgtaaatagatgacaaacgatgtaaataattttgtaagaggcttcaaaatgtttatacgtggaaacacacctacatgaaaagcagaaatcggttgctgttttgcttctttttccctcttatttttgtattgtggtcatttcctatgcaaataatggagcaaacagctgtatagttgtagaattttttgagagaatgagatgtttatatattaacgacaannnnnnnnnnggaaaataaaaagtgcctaccagaacccacccctactatttcagaaccaaaccgccccgaaccgaccctgctcctaactctacaccacacttcttacctcccatcccccgaccataactgtcaacatctcccgacaccaccgtatccgacgcccgttgacaatcgctccannnnnnnnnnnnnnnnnnnnnnnnnnnnnnnnnnnnnnnnnnnnnnnnnnnnttccacttattcgccacatcctccgctgccgctctgtacactcctttccctacctacctccttatcccatcattttcgatccgcccctcgcgccttctctcgctatatcgccctgctatgtctacacttctccgnnnnnnnnnnnnnnnnnnnnnnnnnnnnnnnnnnnnnnnnnnnnnnnnnnnnnnnnnnnnnnnncacctcttctcacactttcgcctacctatgcacaccctcctccgccctatctatttccttcccttccactcccttttctactctatttcacccctcaccacgaatcttccctcccaattaccttgccctttaccgcttctcattagatacgggcacatgtgtgcatctctcccgcctttatcccacccgtctattccactaccctacgcacttataacatnctcacaacgctcgcgattagtactccccccacctctcaattcatctcncactggctacaacagtgcattctgcttcttgtttccaccccatntatcgtgcactatattcgtctgatacacacttccacacatcaccctgatttcgtactctgcgctgccacctctttcactcgctacacctcacgcactcccctcaattttccccacatgccgcgcgacccaccaa

SEQ ID NO: 259408 - DNA, 1245 bp, Homo Sapiens
  misc_feature (460)..(460): n is a, c, g, or t
  misc_feature (761)..(881): n is a, c, g, or t
  misc_feature (891)..(904): n is a, c, g, or t
  misc_feature (1009)..(1060): n is a, c, g, or t
aattcaggtgccactgaaagccagatttatagtattccatctttaatatgtgggactaacagcagtgtagattgttaccttaatattttttgctgggaccatctacctgccttatactacacttaggaaaaagtattacatatggtttattttgaaacttcaagtattattgccttaatgtctcttaaccctgttacacgctgcttgtagacatgttaatatagtaatacctttatgatatattgagtttaaggactactctttttctgttttatcatgtatgcattattttgtatatgtacagggcaagtaggtatataatttgataaagttgcaattgaaatattattaacagaagatgtaagaaatttctgcatggtctaaatctttgtgtactttatttgtaaattatttgccctggagttttaggaaaatagtttctgaattttaaaccttgccnggattccatgccagcccagctttgccaggttatccagagatcaaagattgtaataataattttgtaaattgtaagcaaaaagttatttttatattatatacagtctaattgttcatcctaattgttcctgttttcatctagtcagagattcagtaagtgccttggaacaatattgaattctcttagcttgtgtgtgtttctttaatatttgaactcaagtgggattagaagactatcaaaatacatgtatgtttcaggatatttgacctgtcattaaaaaaaacaaacagttttacagtgnnnnnnnnnnnnnnnnnnnnnnnnnnnnnnnnnnnnnnnnnnnnnnnnnnnnnnnnnnnnnnnnnnnnnnnnnnnnnnnnnnnnnnnnnnnnnnnnnnnnnnnnnnnnnnnnnnnnnnnnnccttgggggnnnnnnnnnnnnnnaaaaaattttttaaacctttttttgggggccgggccccaaaaggaaaagaaaaaggggcaaaattttttccaaggaaaaccgggacaagaaaaggggtgggattnnnnnnnnnnnnnnnnnnnnnnnnnnnnnnnnnnnnnnnnnnnnnnnnnnnngggggttctgggggctttttgggatctttccacgggggcccaagggagctcaattttaaattaccccccgcccgggaatttttgggggaacgggtggaatttattaaactttccgcccaatgggaacccctcccaaaggggttgtggaacctgaattccccgggggatccaccccttggcccctt

SEQ ID NO: 259409 - DNA, 513 bp, Homo Sapiens
gactagttctagatcgcttccagctatatcttttccctttccttcttaattcaggaggaaagggaaaagatatagctggaagcgagtggaagagatgctgagggctggggctgcacagacgtgctcagcagggctacaggtgctcaagccctattggggatgggtggggagtggggcagcggcgtttgccaccttaagaattggggccaaagccactgatgtttatttgacagtgacactgcactgggtacttaaagaaattatttcccgttgtaattataattactgcttattaaggaaaatatgggaattttagaaagaatcaagtttgccacccaaatgctaccactgttaatcttttggtgttaaatgttccccctagacatttctgtgcatagatttttggtgtgtttacatagtcgttattctgtatatacaattttatgtcccttttgtacttaacgtataaacattttttccatgttacagtcttaaacagaattttatggctgc

SEQ ID NO: 259410 - DNA, 569 bp, Homo Sapiens
cctcaaggtctgggagaccgtctctactcgcttctgaactgctgctgcctgggtccgcgtcaatgttgataaaaacacaatgctttcctgtggatctccagcagactctccgaagagattggataaaccggcctctttaagccactcttcttccaattctccctcatcaggctctttgacaacaaccacctcttgatcttcttggctgttttcactagatttcttgatgttttctagttctatccaatagtcttccatagatagttcatccaaagaatcctgggaaattgatcgatcaaatggaggcttctccataactttgatggtggtgctttcctggttcatagtgtactggccatatctgcgactcgaggtggcttcctcccctgcctttgcatggctgttcccgacggcctggtccttgccgctggggtggtaggctgttagtaccactccctgggaactggagagccagctcatggtgagagaagggacatactttctgcgatcctgacacagagaaggggaaagaagttcctgtctcgcctggcaactcgctcattagcatt

SEQ ID NO: 259411 - DNA, 1864 bp, Homo Sapiens
  misc_feature (1835)..(1835): n is a, c, g, or t
ttagatggcttctttctgattatgtcaaagttagtaacatatcagcagacgacatgctgtataccgagacagatttggaagaaagcatggacaaaattgaaactatcaactttcatgaagttaaggaagttgcgggaatcaagttttggtgttaccatgcaggtcacgtcctaggagccgccatgttcatgattgagatcgcaggcgtgaagcttttgtacactggtgatttctcaagacaagaagataggcacttaatggcagctgaaattcctaatattaagcctgatattcttatcattgaatctacttatgggacccatatccatgagaaacgtgaagagcgagaagcaagattctgtaacactgtccacgatattgtaaacagaggaggcaggggtctcattcctgtctttgctcttggaagggctcaggagctgctcttgattctagatgagtactggcagaatcacccagaactacatgacattccaatatactatgcatcatctttggccaagaagtgtatggcagtgtaccagacatatgtaaatgccatgaatgacaaaatccgcaaacagatcaacatcaataatccctttgttttcaaacacattagtaacctcaagagcatggatcattttgatgacattggtcccagtgttgtaatggcctccccaggcatgatgcaaagtggcttatccagagaattatttgaaagctggtgtactgataagaggaatggtgtcattatagcgggatactgtgtagaagggacacttgccaagcacatcatgtctgaacctgaagaaatcactactatgtctggacagaagttaccactgaaaatgtctgttgattacatttctttctcagctcacacggattaccagcaaaccagtgaatttattcgtgctttgaaaccgcctcatgtgattttagtccacggagaacagaatgaaatggccagattgaaagcagcactgattcgagaatatgaagataacgatgaagttcacatagaggttcataatcctcggaatacagaagcagtgaccttaaacttcagaggagaaaaactagccaaggttatggggatttttagcagacaaaaaaccagaacaaggccagcgggtctcaggaatacttgttaaaagaaactttaattatcacatactttctccttgcgacctgtccaattatactgacctggccatgagcacggtgaagcagacccaagccattccatatactggtccctttaatttgctctgttaccagctgcagaaattgacaggtgatgtggaagaattagaaattcaagaaaaacctgctctgaaagtgttcaaaaatattactgtaatacaagaaccaggcatggtggtattagaatggctggcaaacccttctaatgatatgtatgcagatacagtaacaactgtgatattggaagttcagtcaaatcccaaaataagaaaaggtgcagtacagaaggtttctaaaaaattagaaatgcacgtttacagcaagaggttggagatcatgctccaggacatatttggagaagactgtgtaagtgtaaaggatgactctattcttagcgtcacagtggacgggaaaactgccaaccttaacttggagacacggactgtagaatgtgaagagggaagtgaagacgatgaatccctccgagaaatggtggagctggctgcacagagactgtacgaggccctgacgccagttcactgagactgtgcctgtatatgaactttgaaaaaatacttgactctacttttgttacctaaaataaaatgcattcgtttctctgggaaacncccaagagcccccaaaacaaaaaatatgt

SEQ ID NO: 259412 - DNA, 485 bp, Homo Sapiens
  misc_feature (19)..(19): n is a, c, g, or t
  misc_feature (26)..(26): n is a, c, g, or t
  misc_feature (54)..(54): n is a, c, g, or t
aaccaggacccccaaaccncctgccngtaaaacgtgcaattccaaattttttanaaaaccctcctgtaactgccaccttttccttaatttggggatttgaactgaaacttcccaataaccacagttgttaactgtatcctgccatacatatcattagaagggtttgcccagcccattcctaatacccaccatgccctggttcttgtattacagtaatatttttgaacactttcagagcaggtttttcttgaatttctaattcttccacatcacctgtcaatttctgcagctggtaacagagcaaattaaagggaccagtatatggaatggcttgggtctgcttcaccgtgctcatggccaggtcagtataattggacaggtcgcaaggagaaagtatgtgataattaaagtttcttttaacaagtattcctgagacccgctggccttgttctggttttttgtctgctaaaaatcccataaccttg

SEQ ID NO: 259413 - DNA, 680 bp, Homo Sapiens
  misc_feature (640)..(640): n is a, c, g, or t
gggccagtgccaaggggcaccaagaacctgctcaggaagccttttgatggcaagatcaccaatccagatggtattgctccctcaggatggctctgggcctgcccctaagggcctgtggcctatggaatatgtcctccaggctttgcttagctgagctcctcttctgtaaggaaacccagtcatccctgaatcttgccacagagatccgggattcaggagctctcagtttcttagggatggactatggcccagtcccccatctaagtggtgctttgcaaatgtcttggaggagtataggacagaggaccaaaatacacagcaggtagtgttagctctctgctaggagctcaaagcaacacaacttgtatcaaaatcacaactggcagagaagctggtggatccaatcctttcttcatctgttgttatttagaactcacctctcacactctgttctttagtgtccttacctttatcttaccacacacatgggtgtttctattatccttggaagcacagacctcgggcatccccttattgcctgatggggccaacaccaacagttacggagtgcttggaggaagggggcaagttttcacaggaaatgggccagataggggctttcctacagtggcaggcaagngtagggccaaggcagaaagattgttgagggtaacacgttg

SEQ ID NO: 259414 - DNA, 585 bp, Homo Sapiens
  misc_feature (431)..(432): n is a, c, g, or t
  misc_feature (525)..(525): n is a, c, g, or t
  misc_feature (538)..(538): n is a, c, g, or t
ttgtatcaatctgcttcggatcttgaacaagctgacaaagtggaagcattcaaggacaatgatgctggtggtgttcaagtcatcccccatcttgaatcgggccctaaaggtgaaacaagccatgatgcagctctatgtgctgaatctgctcaaggtacacaccaaatacttggggcggcagtggcgaaagagcaacatgaagaccatgtctgccatctaccagaaggtgcggcatcggctgaacgacgactgggcatacggcaatgatcttgatgcccagccttgggacttccaggcagaggagtgtgcccttcgtgccaacattgaacgcttcaacgcccggcgctatgaccgggcccacagcaaccctgacttcctgccagtggacaactgcctgcagagtgtcctgggccaacgggtggacctccctnnaggactttcagatgaactatgacctctggttagaaagggaggtcttctccaagcccatttcctggggaagagctgctgcagttgaggctgttngttagggggattnaaatgggagagaaaagatgatttgaaaggtacctgtggggattgttc

SEQ ID NO: 259415 - DNA, 789 bp, Homo Sapiens
  misc_feature (434)..(458): n is a, c, g, or t
  misc_feature (666)..(678): n is a, c, g, or t
gaagaaagtaagatcctgactctgaagcttcaaagtgacactgtggaaatctgaaacgaggggatgtcatgaaggcagcttttctttttctgaggaaaaaataggcatgggctacaggactatttaaaatgtctcatttacagtataaaactcaaaggtagatgtaatttttacacctatgagtatttgtccaatttctgtctcttcctcaccattgggtatctattctttatatgtaaataagataaggtcatctgatagccttattcagtcttcatcattttcatcattgttcctatgtagattattggacatttattgtagcactacataactgattataaaaatctgtaaatgaattagcactttcatattgaaacaagcctgctagcctatgtataaaatagcaaaatgtttgctgtttataaaaagannnnnnnnnnnnnnnnnnnnnnnnnatttcaagttattaatttaaaaatgaactagcaattttgtacctggtgactttgtggtgcactcacctctgatagtgacttgaattcggtatgtaaaaaggggttagtggtatttcattgctgctaaaaatgacaactccctctgtgtcctgtttttcttaaagctgtcagtgtacaagtgggtatttgaataccagaccttactgtnnnnnnnnnnnnnggtggtatctagagcatgtaaattggatataaagttctgctcttaaagagttgatctaagagtatggctaaacatctatatatgcaatctattaaaagaacttaattcggc

SEQ ID NO: 259416 - DNA, 832 bp, Homo Sapiens
  misc_feature (821)..(821): n is a, c, g, or t
aggacagataatgagagactgaatcatttatgaaggctttggccaaagagcagctagtgcccactacatggatcccagcagggccaaattctcaacttgttggcttaacaaaagaatgaaaaagctcaaacagaaaacatactggacaaggttggtccagaacatgcaatcttaaatggctatggaataaatttattctgagcaatatctcagtctcacactcactaaattctagggtagttctattgaagatgtttaccatggtttagcgcactgagccctgcacccttccccaggctgccagggaagcagagaggtacaaacattcttaatgccccagtcagcctgttctccctatggggtccctggattacctgcagggacctgggggaaattggctccctgtcttcagctgagagtctggaatctgaaccctagatggaatctactgaagaatgctcaagaatgatggataccaagctgaagtgaagtctaggggagaagagaaggcctgaacaaaagagctggggccttccaaagaggtgtatgagaggtgaggttagtagtgccaggctttcctatcttttccttctagtttgctagaaacaagtacaactttagggtgtggggggaaggcaggtagacatgaagaaatggaaatacagttcattctgctagacattttaaactggtttggcttgagaaaaatagaaagtctgtgcctgagaaccttcttttcctctcccttatttaagtacaatagcagctataatctgtgcagttcagctccaaaaaacagggctcctggaagatggctttcnctgtgccgaat

SEQ ID NO: 259417 - DNA, 1093 bp, Homo Sapiens
gcagtcctgcatctggatcaagcagtttggttagagaaatttaaacctttaaatcacaaaacagcttattttcaattgtcatagctgacactgaatctatgactaatggtgtaagcaatgtggatattggaatgtctctgagtttttatattaataaatttactagctaaataagtgatgtaatcatctgttgatgtctgagatgaagagtgagtaaaaaccacataaaagtcttccataaaactaaacttatcttggaattctttgtaaaaataatttctgtgagatggaactttggaaagtttttcctgtaatttcttgaaatcaaatttaacagtgcatggtagtctgaccattctgcattctcctttctgtataaaaaacatcactatttcaaggccagagagccccctttacatggcttgttaagaattcttcaaaatccagcatgattcaagatactgatggattttgggtatttcaagagaattcctctggtggctaaaatgctttgaagatcatttgtgcagcagtcactcaagatgaaagactccctagttaattgtccagtgagattacagttcctgtgacagtggcagaagaagtccagcaaggagttagcagcagcctagttggcttttgttgcattctcaatgaaagcagaaactaatgaatagcactcaaagtaatcaagttcctgctttcttgtcaaaaattgaagatgtactgctccagctactttggggcttaacactttctccaattaagaagagatgttgagagcttctaggaacccatcatccaagactgcggcactaaaaaaacacacctgagattttgctctacgaagttattttctattaaattcactgcctttttcacatcagagtgaataatgacaaaacattgtagcttagtcgttttgcactcttcattctgattttgcagcaacttgcattcctttcaacggctcataagttaaatttctcaatgaagtaatcacaacagaactatctccttggacagtttggagtttcctgggcgtggtggcgggtgcctgcctcgtgccgaattcgccacccaggcctcgcta

SEQ ID NO: 259418 - DNA, 877 bp, Homo Sapiens
  misc_feature (405)..(559): n is a, c, g, or t
ccagttgcaaaatagtgtatagaaaaagctctggtttagaaactgccatagcaattgtctaagtctactaatggtttctggcatcaccaatgataaccacagtgctgaactttgaaccaactgaaaaaggggaatgttcaataaagcctcctttttcttccagtttcagtgcccagtagtttaaaacattctattatgtttaattacattttgaaaaattgtcgttctttcatgaacaaataaaagtaccttgcagccgtcactattgcccattcttgtgggaagcaatcgcaagcttttcatcccgactgaactaaacagtctgatttttctcaaagtcactcagcaaattgcggtaattcaggtttaggcaagaagttctttagttttactttttatatatannnnnnnnnnnnnnnnnnnnnnnnnnnnnnnnnnnnnnnnnnnnnnnnnnnnnnnnnnnnnnnnnnnnnnnnnnnnnnnnnnnnnnnnnnnnnnnnnnnnnnnnnnnnnnnnnnnnnnnnnnnnnnnnnnnnnnnnnnnnnnnnnnnnnnnnnnnagaaggaactcacctcttacacatactcaagatatggagctgtggcatgaatctgaatggaagggaaggaaaattaactcacttctttaggagtctgatgccacccagttcccctgttcttcatgccccatttctgatatctacttctagaattcactccagctgaattcttctcttttcctgtgccaccaccaaaggtgcaaacatttctaaaagatcttggtggctttagtggaaaccatttggtttttacatttttcacctatgatatgaatgatgagtctgcatgatttttatcttaaataaatctgacccagg

SEQ ID NO: 259419 - DNA, 1317 bp, Homo Sapiens
  misc_feature (1259)..(1259): n is a, c, g, or t
  misc_feature (1290)..(1290): n is a, c, g, or t
gacgtgcggaggctctcactttccgtcatggcgctgaaggtagcgaccgtcgccggcagcgccgagaaggcggtgctcgggccagcccttctctgccgtccctgggaggttctaggcgcccacgaggtcccctcgaggaacatcttttcagaacaaacaattcctccgtccgctaagtatggcgggcggcacacggtgaccatgatcccaggggatggcatcgggccagagctcatgctgcatgtcaagtccgtcttcaggcacgcatgtgtaccagtggactttgaagaggtgcacgtgagttccaatgctgatgaagaggacattcgcaatgccatcatggccatccgccggaaccgcgtggccctgaagggcaacatcgaaaccaaccataacctgccaccgtcgcacaaatctcgaaacaacatccttcgcaccagcctggacctctatgccaacgtcatccactgtaagagccttccaggcgtggtgacccggcacaaggacatagacatcctcattgtccgggagaacacagagggcgagtacagcagcctggagcatgagagtgtggcgggagtggtggagagcctgaagatcatcaccaaggccaaagtccctgcgcattgccgagtatgccttcaagctggcgcaggagagcgggcgcaagaaagtgacggccgtgcacaaggccaacatcatgaaactgggcgatgggcttttcctccagtgctgcagggaggtggcagcccgctaccctcagatcaccttcgagaacatgattgtggataacaccaccatgcagctggtgtcccggccccagcagtttgatgtcatggtgatgcccaatctctatggcaacatcgtcaacaatgtctgcgcgggactggtcgggggcccaggccttgtggctggggcaaactatggccatgtgtacgcggtgtttgaaacagctacgaggaacaccggcaagagtatcgccaataagaacatcgccaaccccacggccaccctgctggccagctgcatgatgctggaccacctcaagctgcactcctatgccacctccatccgtaaggctgtcctggcatccatggacaatgagaatatgcacactccggacatcgggggccagggcacaacatctgaagccatccaggacgtcatccgccacattccgcgtcatcaacggccgggccgtggaggcctaggctggccctaggaccttcttggtttgctccttggattccccttcccantccagcaccccagccagcctggtacgcagancccagaataaagcaccttctccctatt

SEQ ID NO: 259420 - DNA, 348 bp, Homo Sapiens
  misc_feature (80)..(80): n is a, c, g, or t
ggccaccctgctggccagctgcatgatgctgggaccacctcaagctgaactcctatgccacctcccatccgtaaggctgnccctggcatccatggacaatgagaatggccctggtgtgtgccgagcctgcctgtgtcctacagatgcacactccggacatcgggggccagggcacaacatctgaagccatccaggacgtcatccgccacatccgcgtcattcaaggccgggccgtggaggcctaggctggccctaggaccttcttggtttgctccttggattccccttcccactccagcaccccagccagcctggtacgcagatcccagaataaagcaccttctccct

SEQ ID NO: 259421 - DNA, 710 bp, Homo Sapiens
caggagagaaaggagagtttatttcacacaggttttcattaaaaaggtgaggtcagatcacctggaggttattcactagcgctctaccccaaatcattcttttaggaaaaataagccccaaacatcatattattgtagactagtctgtttttatttacaatttaagatataaattagtaaagaattcgtgttaaacaaccaacaaagattgtataaccagcaatgttcaaataaaaaccaggcagaatttatttacaaaaagtttagattccattgcaatacaacttgcataaattactagaagctttatatcattataaaaataaatatcaaatttgtttccacttctgaagtactcaagttcttccatcacgttttatttctactgtgtacatcttttacaaataaactttacagtaaatcctatcacacctatagaatatataccgtggcaatgaagtgatcaattcaagatatcctgagaaaaacagattgttttcaaaagtcacacatacatcggggaaactatactatgccaacaaattcacatatgtccaacaatagtctgttccaattgttagagtctgtgggctgacagtgctgtgtggatccttctcttttacagtggcacaagatgtggtctggatttagacatctgtttgttgtatctgtaaatttatgagcttgggaagagagaatggcctgctgac

SEQ ID NO: 259422 - DNA, 1113 bp, Homo Sapiens
aactggataatgacgcagtttttcactctgacctccatcatgcttgcctgatttaaaagccctcagtttgcagtccagggactgttcaggcttgtcctcagctgagaggacacaggctagagggactgtgcagaaccaggctgggagaagggctgggaaaactgggagtggagggtggatcctcatggagcaggagagtagctcatggctccaggagcctgaggccatgcagttgatggtgagctgacatcaattctaagactcatcctaattgaggggtgttaaaaagtgtgctgcttagaatgaccaaatatagttattgtaaaaaatgatatttatgaactttttattttagaaaacatgaattttattgctccctgtattatttgtttgatactaggattcatgctaaactttttaagaatgtattggatatcaagaagcattccttacattagtagcaataaatattagaataaatatgaaattgaactattttcagaaaaagggcagtatattaagagcagggactgttctctagttatcgaggaaaactggactttgtttgtgtttttggtggaggaagaagtttaagatactttagtcttaaattgaggtttgccaaatgagaagttcaaaaacttgggctttctaatcagaatttccaggaggaggaaagtgtgtgctgaatattttaaacatttcccactgatcatacaaagtctgatttttaaatttacacttataatgcctttgtattaaaattatttttaacatgtgcttttccaaattaaaaatgaagtagagtataccaaatgcataaactttcattagctaaggaactcatgtctgaattttgttgtagttttgaatgttgtgctctttcatacagaacgggaaacataatcctcaggtatcccagcatctcttgttgaattgaagattattcattgctttggcctcacaaagttttgatttcaactatcataagtgaaaatatcttcctttaatgttctaagtagtgataatattactagaatgaaagaataaaaagaaattgttcttttaaaatatgtgtaacttctaaaaataaaacttaaaatttatatgtaa

SEQ ID NO: 259423 - DNA, 888 bp, Homo Sapiens
ggggttacacgaggtctgagagacagaggcagcgtgtttgagctgctggtgcggtggtcagcgcgatgcccaaggccaagggcaaaacccggaggcagaagtttggttacagtgtcaaccgaaagcgtctgaaccggaatgctcgacggaaggcagcgccgcggatcgaatgctcccacatccgacatgcctgggaccacgctaaatcggtacggcagaacctggccgagatggggttggctgtggaccccaacagggcggtgcccctccgtaagagaaaggtgaaggccatggaggtggacatagaggagaggcctaaagagcttgtacggaagccctatgtgctgaatgacctggaggcagaagccagccttccagaaaagaaaggaaatactctgtctcgggacctcattgactatgtacgctacatggtagagaaccacggggaggactataaggccatggcccgtgatgagaagaattactatcaagataccccaaaacagattcggagtaagatcaacgtctataaacgcttttacccagcagagtggcaagacttcctcgattctttgcagaagaggaagatggaggtggagtgactggtttacatcacagctgccccaggctgaggcgtcccccggaccagtgaagctggagccagggtgtaaggcaaggaggtgctgtgtggctccagaggagctggccaggtcccatggaatcagaaggttacacacacacgtgcacactccccgctctggggaaggaactgttctcagaggctccaatttatattcatctgggggttcacggaaaagccagaacctgctgttttcagggtgggtgatgtaaatatagtgtgtacataataaagcaaatatattttaa

SEQ ID NO: 259424 - DNA, 740 bp, Homo Sapiens
  misc_feature (682)..(682): n is a, c, g, or t
gggacacgaggtctgagagacagaggcagcgtgtttgagctgctggtgcggtggtcagcgcgatgcccaaggccaagggcaaaacccggaggcagaagtttggttacagtgtcaaccgaaagcgtctgaaccggaatgctcgacggaaggcagcgccgcggatcgaatgctcccacatccgacatgcctgggaccacgctaaatcggtacggcagaacctggccgagatggggttggctgtggaccccaacagggcggtgcccctccgtaagagaaaggtgaaggccatggaggtggacatagaggagaggcctaaagagcttgtacggaagccctatgtgctgaatgacctggaggcagaagccagccttccagaaaagaaaggaaatactctgtctcgggacctcattgactatgtacgctacatggtagagaaccacggggaggactataagcagagtggcaagacttcctcgattctttgcagaagaggaagatggaggtggagtgactggtttacatcacagctgccccaggctgaggcgtcccccggaccagtgaagctggagccagggtgtaaggcaaggaggtgctgtgtggctccagaagagctggccaggtcccatggaatcaggaagttacacacacatgtgcacactccccgctctggggaagggactgntctcagaggctccaatttatattcatctgggggttcacgggaaaaccagaacctgctg

SEQ ID NO: 259425 - DNA, 709 bp, Homo Sapiens
  misc_feature (585)..(585): n is a, c, g, or t
  misc_feature (693)..(693): n is a, c, g, or t
cccaaccctgcgactagcaaggctcgcagcaagagcacagccctcaactacttgtgccagagtttctcttggaccactccaactcccactgagcccttttgctgctgggctggcaggaaactttccccactccctaagggcaatgtctgggttaggtgctaagtgctgaagagaacttggtcagttctctcaactttgctttgggcaagaatctggtcacctgatgggatccatggtacaggctactgctaaacttggcacagtatcaagtatagtacctccaaggaccagggctgggaagtctttagtgctaacatcccctttagagttcacacatcttgcccttccatgaatgacccctcagtctggcctccccagcctcaaggtccactcaggcacaagagccacagtaccctagatagtgtcacatgacaccgttgtcatccaaggataatacagaccaactaggctacatctgtgatgagcagctagcaaagccgctggtcttctcctaggactaagtccagggtgccttccacaatctcatgggtctttcaggtccctggggtacttttctcaaaggcncattttccaaaaggaattacatggcctttcacattcacaacctgttactgtggagttccattctaggagggtcacttgaaaggccctgttaaagagagggacatgggntacggggacccggggc

SEQ ID NO: 259426 - DNA, 922 bp, Homo Sapiens
  misc_feature (544)..(544): n is a, c, g, or t
  misc_feature (678)..(689): n is a, c, g, or t
gcgggccgggcggtgcgcactgcgggcgcatccctgccccggcgccgtccgtgcccgcgggacctgacagccgggtcagagggcgaagctgtgctcaggcccgggctggacgcagagccagagctgtccccagaggagcagagggtcctggaaaggaagctgaaaaaggaacggaagaaagaggagaggcagcgtctgcgggaggcaggccttgtggcccagcacccgcctgccaggcgctcgggggccgaactggccctggactacctctgcagatgggcccaaaagcacaagaactggaggtttcagaagacgaggcagacgtggctcctgctgcacatgtatgacagtgacaaggttcccgatgagcacttctccaccctgctggcctacctggaggggctgcagggccgggcccgagagctgacggtgcagaaggcggaagccctgatgcgggagctggatgaggagggctctgatccccccctgccggggagggcccagcgcatccgacaggtgctgcagctgctctcctagtgggttncagcgcggggccggggccgctgcccagtgcagggctgcctcagaccacacagggtgcagctcctcccggcggtggggggccgaggttcacccagcagggcagccggctgagcaaggggctttcagcttcctccnnnnnnnnnnnncccggggatcccccagcacccagagccctcgcaaggggcccccttcccttcctcccagacccctcctttgggccgggggacgggctggtgaaaagtggatgggcagggtttcaatggccctttccgccgccaaaaacgctgggaatgcctcctggaaatcccccccggggaccccctgggcccttgggaaggggaacccttccccggccccccaggaaatcctggcttttgag

SEQ ID NO: 259427 - DNA, 1357 bp, Homo Sapiens
  misc_feature (853)..(853): n is a, c, g, or t
tgggtggcgattccggcacgagggtgggcgcaggtgggcgcaggatggcaaaacagaagagaaaagttcctgaagtgacagagaaaaagaacaaaaagctgaagaaggcgtcagcagaggggccactgctgggccctgaggctgcaccaagtggcgaaggagccggctccaagggcgaagctgtgctcaggcccgggctggacgcagagccagagctgtccccagaggagcagagggtcctggaaaggaagctgaaaaaggaacggaagaaagaggagaggcagcgtctgcgggaggcaggccttgtggcccagcacccgcctgccaggcgctcgggggccgaactggccctggactacctctgcagatgggcccaaaagcacaagaactggaggtttcagaagacgaggcagacgtggctcctgctgcacatgtatgacagtgacaaggttcccgatgagcacttctccaccctgctggcctacctggaggggctgcagggccgggcccgagagctgacggtgcagaaggcggaagccctgatgcgggagctggatgaggagggctctgatccccccctgccggggagggcccagcgcatccgacaggtgctgcagctgctctcctagtgggttcagcgcggggcggggccgctgcccagtgcagggctgcctcagaccacacagggtgcagctcctccggcggtgggggccgggttcaccagcagggcagcggctgagcaagggctttcaagctcctccggtggtgggggccgggatcaccaagcaccaagagcctcgcaagggcccctttccctcctccaagaccctccttggccggttgaccgcggtgnacaagtgatggcaggttcagtgccttcagcgcagaacgtggaatgctctggaatcacccggacccctggcttggagggaccctccagccccaggaatctgctttggagggaaatgtctatttttctaccgggaatattttagagattggggcatgctggctcctcccgcagtgcaaacctgaccttccggctgattccgatccccctgcgtggccgattcctggtcccctgcctgcgtccatcgaggggcctggcttgtggcctgttttcctttgaccccacacagcgtcatcgcggttatggggagccctggtgggacttgtggagtcggatcaccgtacctgtgcaaaacgctctgtgggtgatttgaaataaaccgacaagagagcggggtctggccgggaaacaaaccacaacaaacaagaacaacggaacacagacagcagcgagaaaaaagagcgcccagaaacagccacgcttcgctcccggagacacacgggcatg

SEQ ID NO: 259428 - DNA, 2612 bp, Homo Sapiens
  misc_feature (511)..(511): n is a, c, g, or t
  misc_feature (535)..(543): n is a, c, g, or t
  misc_feature (885)..(897): n is a, c, g, or t
  misc_feature (923)..(1179): n is a, c, g, or t
  misc_feature (1713)..(1757): n is a, c, g, or t
  misc_feature (1760)..(1769): n is a, c, g, or t
  misc_feature (1772)..(1774): n is a, c, g, or t
  misc_feature (1777)..(1797): n is a, c, g, or t
  misc_feature (1801)..(1803): n is a, c, g, or t
  misc_feature (1805)..(1808): n is a, c, g, or t
  misc_feature (1810)..(1810): n is a, c, g, or t
  misc_feature (1817)..(1817): n is a, c, g, or t
  misc_feature (1820)..(1918): n is a, c, g, or t
  misc_feature (1935)..(1935): n is a, c, g, or t
  misc_feature (1953)..(1953): n is a, c, g, or t
  misc_feature (2010)..(2011): n is a, c, g, or t
  misc_feature (2036)..(2036): n is a, c, g, or t
  misc_feature (2078)..(2080): n is a, c, g, or t
  misc_feature (2116)..(2117): n is a, c, g, or t
  misc_feature (2182)..(2182): n is a, c, g, or t
  misc_feature (2267)..(2267): n is a, c, g, or t
  misc_feature (2295)..(2295): n is a, c, g, or t
  misc_feature (2325)..(2325): n is a, c, g, or t
  misc_feature (2405)..(2405): n is a, c, g, or t
  misc_feature (2431)..(2431): n is a, c, g, or t
ggcaaagggaaattcgctcctggctttgatgctgagctgattgtgaagaatatgttcaccaaccaggaccggaatggagatgggaaggtcacagccgaggaatttaaactcaaagaccaggaagccaaacacgatgaactctaaacctggcatgaaccagatggtgccagggagtacgtgacaccaagccacctgtgtggcaagacgtgcagtgagggtgcaagggtctctcagaagttgcatcattagccagtagtaggtgggtcacatagtacctggtgtacacatcggggtgggttgatatatggggtgagaagtttgggctgatcgccagtgatagtaaacaagatctgtgcagagggccttagcatgggatgtgtccagtattgaaaaggctgcactgccaaccatgatttgtgagccttctgggaaattttgttattaaaggaatatatagtgtcagacggaagttataatcatcttggaggaaccataagaaaaggtgtccagngtatctatataaagagggttaaannnnnnnnnaacttgctggttaaaacattttagaaatattctagagatgggcaggagagtcaaagggcttgcttgccccagcagagttcccagcagacagccatggctcttcccagcagcctgtgcaaattctgatgatggccccacccccgcacacgcacacgcacatcatgcttttccagctcatcacaccccgccccactatgggcctaccattaatagtgtataacttggaggttaaaagagccttttggacagaaaactgggccaggaaaaggcatctcagaccacaaatagagaatttgattcctcatttgccacataagtcatctgcttagcttttcctttccnnnnnnnnnnnnnctggaggcagagtctccctttgtcannnnnnnnnnnnnnnnnnnnnnnnnnnnnnnnnnnnnnnnnnnnnnnnnnnnnnnnnnnnnnnnnnnnnnnnnnnnnnnnnnnnnnnnnnnnnnnnnnnnnnnnnnnnnnnnnnnnnnnnnnnnnnnnnnnnnnnnnnnnnnnnnnnnnnnnnnnnnnnnnnnnnnnnnnnnnnnnnnnnnnnnnnnnnnnnnnnnnnnnnnnnnnnnnnnnnnnnnnnnnnnnnnnnnnnnnnnnnnnnnnnnnnnnnnnnnnnnntgactcaccatgcccagccacttagttttttcttattcccacctttctatcccatagaacactcttttttatcttccctgaaccatattgatgagataaatagggctgggggctgggccccgctggtcactcaacagagtatttcccttggccgagatggaagttttgtcccaatagatgagctgctgagtatcaacaaggtgacatttttctgctgcccatttgtgtcctggagacggtggtaccctgaaggcagaggccagctgccgcaagacagcaatgacagtccacctgccgacctgattcctgcatcatggaataaccacatggctaccttctatcctctgttcccaaatggtggtggcacttatcctgaagtcgtcaatgatttccctttgaaactactttattttactaatttaaactattttgtactgatgtagccctgaggtagttcatgaaaatgctgtgcactcattccatggaataaatgttggaaagctgatcttttctgatataaaatgttgaatgatnnnnnnnnnnnnnnnnnnnnnnnnnnnnnnnnnnnnnnnnnnnnnaannnnnnnnnnaannnaannnnnnnnnnnnnnnnnnnnnaaannnannnnanaaacccnaannnnnnnnnnnnnnnnnnnnnnnnnnnnnnnnnnnnnnnnnnnnnnnnnnnnnnnnnnnnnnnnnnnnnnnnnnnnnnnnnnnnnnnnnnnnnnnnnnnaacaactcaaatagggngcacaccacacggaagcnccccaagggaactgcgcgccgccccgccaggcgcacgcggaaaacccacaaagcaannaagaggagaccgctcgtggggggcnaccagcaaaccagtctacccaacccggcccctccttggagannntgtgtataaaagcaccattaacggggaggcccgtanntgagaggaggaccgcccttggagccgcgcccgcttttattccgccagttccccggcgcccccgcntcgttgattgcaaaagcagtcgcgacagacggacgtcatggcgagcgtcacgtttctcgtcaaaccgcccagcgccggtgcacgncttcccgaatcggaatacaccgttccgnacatgccaagagagtaccaggccggcggancccgatgaagctgatagatccccaaatgcggctccgccgcgcaccgctagtcttgtggtcgcaccaccctattggtagtnctcacaacacacacacccgcgcgccnccatacacatgtggtttggtgtcggtagagggaggaggtgacatcataaaacaattattgtctcacaacatagacaagagtagtcgggtcacatagtgaggattttggctactgaacaacatgccccacgtcgagatactgaaatattctgcgttcgatgggtagcggagcgactgcgact

SEQ ID NO: 259429 - DNA, 668 bp, Homo Sapiens
ggaccacaggcaccgcaggataaccattcctcagaactcctcgtactgctctagtgcttggaggtccgtgtattacctcagctattccaaccgcaccaaccacgggagccacgtgtctacgtctgacagataaagatgctgagtttagagtctgcaaggcttgacaaccacagatcagggacaggagctgaggtctcctgacctggagcccagggccacccggagctgcaagaaacctgcactcacaactgcctcctattttaaaatgctgagtcgatcccacaggtggcaaaccagttctgggcttcaatttacaagcagtcagaaaagctgggttgaaatcgccactgtccttctatgtggctgatgaggaaggatgacggtgcccaccgctccatctctccagctgaccccaagctggcactcacgggtgggcaggctcagacaggcccagctccaccaagtgcacttgaagccggaatgcaagacatccgatggtatacttactcgaacccgtccttttcacaacagccgcgggatccgctttctttggctgactgctcagagtcttcccttttcctgtgaccccattagacgccacggggggctttttacccttgagctgttgaaataaacatataagaacattaaaaataaacacaaagccc

SEQ ID NO: 259430 - DNA, 570 bp, Homo Sapiens
  misc_feature (164)..(164): n is a, c, g, or t
  misc_feature (173)..(173): n is a, c, g, or t
tggagactgataggttgatcagaaactcaccctaaatctgaacgggtgccgctataatttgtgacatctggcaagatttccctttatgtatatatttaaacaatccgcttggacacgaacaaagccacacttctaactgcttctggcgaactgatttaattttnaattttttncaataaagatattcttagatactgaaagaaatagttaatgagtttgcatttgtgcttgagaaaatttggctcaagtccatttggctgtagtgtcaacgatgtttccagtagtgtttagatttggtgtcttcaaaggtagttgattaaaaccaagtgtgtctttaatatcttgtatcagaataactttgtatgttaccaacttaaattgctagaataagggtaaattggatacacaactgctgatttttaatttagaactttgacctaatttgggttttcaaaaccattttggctacttgtattctttatgctgttgtttatttcaataaaaaattcacacctaaatgtatacttactaaaattgtgtttacaattcgtttttcacaaaatttcctgc

SEQ ID NO: 259431 - DNA, 1015 bp, Homo Sapiens
tgcagactaagaatttatgagaaaatatatgtattcggtagtgcaggcatttattaacaattcttaaaagttttacctgattcagattcacgacttttatttatattctatatttttgaatttcagagtaaaatttgttaacaattttaaaagccaggtaacacctaccagtccagttagcatgatttgctttcagaagtgagctgggttttccaaagtggtataatgtgtgtactgtatattttaacaaagtaatatttttgtattgcatttttctattaaaaaattaacagttaatgtttcagtcaatgtattatctgtagcatttcacaaataatgtttgctttgaaccaaaatgctcagtgcctatcaacatttggactcaagcatcaacaccaaattattcctcccttctcgtataaatagagtgactatccacaggagaaaagtgtgtgctttagtattagaggagataggcagagaagtcttgcttagttccttcgtgcagcttcttgcccctgttgacgtggaatgctgtgtctgctttagcacgcacgctccgaatgactcctggtgctaggccatgctggctgctgtcactgagcgggactcaggccaagaggcgtgacctcgggccagcctgtctgttgtgcagacgcctcctctgcagaacgcatcagtttctattctgcagttgcagagccagccccgcgtgagaacgtgcataatgagtgcacaccatcatgtcaaggtgcatacttagtgagcgccatcctgctgaacgtgtatttcagtgtttcacttacgggacggataacaagaaaaaaatcctaacacaggcagtcaccagaaataaatgtctcagcactttacagatgactaaaaatgttaattttatgacttagccaaatatgttctaggttgcatatatcccccatgtgaaagtgatttcttcccaagcttctcaaactgttagctgctgtctgacttcatcaataaagtatttttattttaa

SEQ ID NO: 259432 - DNA, 1198 bp, Homo Sapiens
  misc_feature (306)..(352): n is a, c, g, or t
aggtagcgaggcctgggtggcgcctcgccccgccgggagtcgcgggccaacatgggccaggaagaggagctgctgaggatcgccaaaaagctggagaagatggtggccaggaagaacacggaaggggccctggaccttctgaagaagctgcacagctgccagatgtccatccagctactacagacaaccaggattggagttgctgttaatggggtccgcaagcactgctcagacaaggaggtggtgtccttggccaaagtccttatcaaaaactggaagcggctgctagactcccctggacccccnnnnnnnnnnnnnnnnnnnnnnnnnnnnnnnnnnnnnnnnnnnnnnnaagggcttgagtgttcagactggaagccagaagcaggcctttctccaccaaggaaaaaacgagaagaccccaaaaccaggagagactctgtggactccaagtcttctgcctcctcctctccaaaaagaccatcggtggaaagatcaaacagcagcaaatcaaaagcggagagccccaaaacacctagcagccccttgacccccacgtttgcctcttccatgtgtctcctggccccctgctatctcacaggggactctgtccgggacaagtgtgtggagatgctgtcagcagccctgaaggcggacgatgattacaaggactatggagtcaactgtgacaagatggcatcagaaatcgaagatcatatctaccaagagctcaagagcacggacatgaagtaccggaaccgcgtgcgcagccgcataagcaacctcaaggaccccaggaaccccggcctgcggcggaacgtgctcagtggggccatctccgcagggcttatagccaagatgacggcagaggaaatggccagtgatgaactgagggagttgaggaatgccatgacccaggaggccatccgtgagcaccagatggccaagactggcggcaccaccactgacctcttccagtgcagcaaatgcaagaagaagaactgcacctataaccaggtgcagacacgcagtgctgatgagcccatgactacctttgtcttatgcaatgaatgtggcaatcgctggaagttctgctgatggaacagccagccatgaacaaggtgaggaagaagaaagaggaagcgctgaattatctgaactggagaagcaataaaaattaaagtgaaggaaaatactg

SEQ ID NO: 259433 - DNA, 808 bp, Homo Sapiens
ctaaggcgctgcagtttctttattttttctttttatagagatggggtctcgccgtgttgcctgggctggactcaaacttctggggttaagcgattctcccacctcagcctcccagagtttgcagattacagccataagccaccgtgcccagccctctgcagtttctaaaagaggttcatcaatacaaattctcagcatcattctccaattaggctcccccattaaccaattgtttctaatgaccgattattaatttgcaagagaattcttcctctaactcataccatcccactcagacagagttcagtattttccttcactttaatttttattgcttctccagttcaagataattcagcgcttcctcttttcttcttcctcaccttgttcatggctggctgttccatcagcagaactacaaaaccagaaaggcaacaaaatttgaaaaggtttcctcggcaatcctcccaaggaggctgtgggggaatatgaaaaaagaaggtggtgtctggagccacacagacccagagtcccaaagccccagctctgccattattagctgtgtgatcttgaacaaatcactcacctgtaaaatgagctcataaagcttgtgaatgtgagaatgatatcaggtaataaatgaatggcaattcggtgccaggaatgtgctgagctctcaatttatggtcaagaacatcactgggatggctactaatcacttggttagacttttggtctcccacatggcaacggagaccaactgaaaatgtgttcagaagtctgtagttgttacctctagtggatcctg

SEQ ID NO: 259434 - DNA, 746 bp, Homo Sapiens
atcggctattgtgagaatccctgtgcaagtcagctaggaagcccctgccaccagtttagtgccaaccaaatgaccagatgggacagctatcaaaaatgaaagtgaatttatattaagatctgaacttcctcttggggtcttgcatttcagctactagaggtctataattccttatccaacattccacaatctgaaaagctctgcgaacgaagtgtttttgtaagttggtggcatacgcatttggcagcaaattttgaccccttatgggctacttagtctttatgtatccattttgtctgaatattctacattttgttgcagcatattaaggtgttgatttatagggtgctgccccagatctgatccatgaagttctataacatacagtgtatgtaaaatattatcttttgaaaatccccaaaattcagaattttaataaacacctgcctgccagggcttaacataaggacttctggacctatagtagcctgagcatgtgcccaagtttcactggagccagggcagtttcgtgggtcccatgcactacactttcttcagtctttcagggaagcgagaatgtctggaacattctctatcccaaagaaggaaagcatagtgctgggaagaagagattccaaatcttccttataggaattttctttgtggaagactgtatttctgccaactaccccggacaatttgacaaataatgaataaatatttttcctctaacgtgattccttttc

SEQ ID NO: 259435 - DNA, 1553 bp, Homo Sapiens
ggcctgggtggcgaattcggcacgagggtcatcaacacatttacccagacggcccattctggccgctgtgccttctggggcaacgtggaggtgggcagggacgtgacggtgccggagctgcgggaggcctaccacgctgtggtgctgagctacggggcagaggaccatcgggccctggaaattcctggtgaggagctgccaggtgtgtgctccgcccgggccttcgtgggctggtacaacgggcttcctgagaaccaggagctggagccagacctgagctgtgacacagccgtgattctggggcaggggaacgtggctctggacgtggcccgcatcctactgaccccacctgagcacctggagagaacggacatcacgaaggcagccctgggtgtactgaggcagagtcgagtgaagacagtgtggctagtgggccggcgtggacccctgcaagtggccttcaccattaaggagcttcgggagatgattcagttaccgggagcccggcccattttggatcctgtggatttcttgggtctccaggacaagatcaaggaggtcccccgcccgaggaagcggctgacggaactgctgcttcgaacggccacagagaagccagggccggcggaagctgcccgccaggcatcggcctcccgtgcctggggcctccgctttttccgaagcccccagcaggtgctgccctcaccagatgggcggcgggcagcaggtgtccgcctagcagtcactagactggagggtggtcgatgaggccaccccgtgcagtgcccaccgggagacatggaagacctcccttgtgggctggtgctcagcagcattgggtataagagccgccctgtcgacccaagcgtgccctttgactccaagcttggggtcatccccaatgtggagggccgggttatggatgtgccaggcctctactgcagcggctgggtgaagagaggacctacaggtgtcatagccacaaccatgactgacagcttcctcaccggccagatgctgctgcaggacctgaaggctgggttgctcccctctggccccaggcctggctacgcagccatccaggccctgctcagcagccgaggggtccggccagtctctttctcagactgggagaagctggatgcccgaggaggtggcccggggccagggcacggggaagcccagggagaagctggtggatcctcaggagatgctgcgcctcctgggccactgagcccagccccagccccggcccccagcagggaaaggatgagtgttgggaggggaagggctgggtccgtctgagtgggactttgcacctctgctgatcccggccggccctggcttggaggcttggctgctcttccagcgtctctcctccctcctggggaaggtcgcccttgcgcgcaaggttttagctttcagcaactgaggtaaccttagggacaggtggaggtgtgggccgatttaaccccttacccatctctttactgctggactgtggagggtcaccaggttgggaacatgctggaaataaaacagctgcaaccaag

SEQ ID NO: 259436 - DNA, 1164 bp, Homo Sapiens
  misc_feature (863)..(872): n is a, c, g, or t
  misc_feature (1093)..(1118): n is a, c, g, or t
ctgcggagcagtagctaggaacagatccacttgcaggttgctgttcccagccatggcttcgcgctgctggcgctggtggggctggtcggcgtggcctcggacccggctgcctcccgccgggagcaccccgagcttctgccaccatttctccacacaggagaagaccccccagatctgtgtggtgggcagtggcccagctggcttctacacggcccaacacctgctaaagcacccccaggcccacgtggacatctacgagaaacagcctgtgccctttggcctggtgcgctttggtgtggcgcctgatcaccccgaggtgaagaatgtcatcaacacatttacccagacggcccattctggccgctgtgccttctggggcaacgtggaggtgggcagggacgtgacggtgccggagctgcgggaggcctaccacgctgtggtgctgagctacggggcagaggaccatcgggccctggaaattcctggtgaggagctgccaggtgtgtgctccgcccgggccttcgtgggctggtacaacgggcttcctgagaaccaggagctggagccagacctgagctgtgacacagccgtgattctggggcaggggaacgtggctctggacgtggcccgcatcctactgaccccacctgagcacctggagagaacggacatcacgaaggcagccctgggtgtactgaggcagagtcgagtgaagacagtgtggctagtgggccggcgtggacccatgcaaggtggcctacaccattaaaggagcatcgggacaatgatacaagtaccggggagccaggcccatatgggatcctgtggaatactgaggtctccaggacaagatcaaagaggtnnnnnnnnnngagaagcggctgacggaaatgctgcttcgaacggccacagaagaagccagggccggcggaagctgccccgccaggatcggcctcccgtgcccgggggcctcccgttttttcccaaagccccccaccaggtggctggccctcaccagaatgggccgggggggcaacaagggggtccccgcctagccagtcccttaaaactggaagggggggtccaatgaagnnnnnnnnnnnnnnnnnnnnnnnnnngggagagaccttgggaaaaaaaccctccccctctgtgggggggcct

SEQ ID NO: 259437 - DNA, 793 bp, Homo Sapiens
ggtaattaagcaagaggttcttttctaaaagtggtatctgttatccacaatgtattttagttattcccacaagtcaggggtccagataaaatgagggttatcagctaactgatatgctatcattgaggttcatcaatgaatttgtacatttctagttccctttggtgaagggaaaaatgatgattttgcaagacctagattttggcttggtttcttgcctccttttttggcagccttcatcttctcatctcccaaaccccctgagcccgtagggttttcatagtggacaaagaacttgtggtcttttaaaactgggactgatacttttttgagagagtatcgtgtcgaaagtgtgatgttctaccactttaccaataactaattttaaatacacattgtcctctcgatttttggaccaaacagacgctcacagtggaggcttatcaagggttgcattggggaagaagcctctccctctctgtcagcaccagctggtaaaggtgactgtacagatgtgcattttccttttggtataaatggtccacagcactaactggtaaggcttattgtacagtatattgtcagtattcttctggttcagcataccttatagttcatatataacctgtattaattgtatagattgtgcattaaaagctgttaccaagttgtcagaacataagagcgaaaacaaggtcatatgtaatattttgtttgtaagtatcctttgtatcatagcaaaggaaatgtttaaaaaaatcaactgtaataaagtaattttagtactttaaaa

SEQ ID NO: 259438 - DNA, 445 bp, Homo Sapiens
  misc_feature (16)..(16): n is a, c, g, or t
  misc_feature (42)..(42): n is a, c, g, or t
  misc_feature (63)..(63): n is a, c, g, or t
tccaccctttaacccngctggtgcctgaacagagcgggaagnggcttccttccccccaatgcnaaccccttgaataagccctcccactgtgagcgtctgtttggtcccaaaaatcgagaggacaatgtgtatttcaaaattagttattggtaaagtggtagaacatcacactttcgacacgatactctctcaaaaaagtatcagtcccagttttaaaagaccacaagttctttgtccactatgaaaaactacgggctcagggggtttgggagatgagaagatgaaggctgccaaaaaaggaggcaagaaaccaagccaaaatctaggtcttgcaaaatcatcatttttcccttcaccaaagggaactagaaatgtacaaattcattgatgaacctcaatgatagcatatcagttagctgataaccctcattttatctggacccct

SEQ ID NO: 259439 - DNA, 439 bp, Homo Sapiens
  misc_feature (260)..(260): n is a, c, g, or t
  misc_feature (418)..(418): n is a, c, g, or t
aggggtccagataaaatgagggttatcagctaactgatatgctatcattgaggttcatcaatgaatttgtacatttctagttccctttggtgaagggaaaaatgatgattttgcaagacctagattttggcttggtttcttgcctccttttttggcagccttcatcttctcatctcccaaaccccctgagcccgtaggtttttcatagtgggacaaagaacttgtgggtcttttaaaactggggacttgatacttttttngaggagagtatccgtgttcgaaagtgttgatgtttctacccactttacccaattaacttaatttttaaaatacacattgtccctctccgattttgggggacccaaacaggacggttcacagtggggagggcttatccaggggtttgcattgggggggnaggaggccctttccctttttt

SEQ ID NO: 259440 - DNA, 1817 bp, Homo Sapiens
aggtagcgaggcctgggtggcgaattcggcacgaggctctttgacttcggcaacctacagcctggccacagcgtcttggtacacatggctgcagggggtgtgggtatggctgccgtgcagctgtgccgtacagtggagaatgtgacagtgttcggaacggcctcggccagcaagcacgaggcactgaaggagaatggggtcacacatcccatcgactatcacacgactgactacgtggatgagatcaagaagatttcccctaaaggagtggacattgtcatggaccctctgggtgggtcagatactgccaagggctacaacctcctgaaacccatgggcaaagtcgtcacctatggaatggccaacctgctgacgggccccaaacggaacctgatggccctggcccggacatggtggaatcagttcagcgtgacagccctgcagctgctgcaggccaaccgggctgtgtgtggcttccacctgggctacctggatggtgaggtggagctggtcagtggtgtggtggcccgcctcctggctctgtacaaccagggccacatcaagccccacattgactcagtctggcccttcgagaaggtggctgatgccatgaaacagatgcaggagaagaagaatgtgggcaaggtcctcctggttccagggccagagaaggagaactagggcaagtggctgtgagaccctagagaccagcgaaagggaagaagtggggaagctacgttctgttggccaccagacttgcatttcagcctctgtcataatgctctgccctccctcccccgaagttctctgtggtgatgaccgctctcccctgcccctccccgcttcctgacctctgaagaggttgggaagtgaccatttggatgtctgggccctgccaaggcgacagggagggtcagagggaggccggctgcttcctgcccccaccctttccccgggcctgctgtgctgcttttgtgccaaggttagccagtcccccctgttgtgttccatgtgctttcacctctgcctcatctttcctcccgtccctgccccgccacctccccaaagaattgaaacgtcagctcaggatatggggccaatctctgtgagtccagcatgtacctgtctctccctagtgtcccttcagcctgggctgaccagtgcccgcctctgggcttgaccagttcccaatctcgtcctctgtccccaacttcttaagcacaattgggcttcttccatctccaggttttctgccattcttaaccaaggctgcctcttccaacagggcgggaatcagacctactcccctaggtcacaactctgggaaggatacagagcccccacccttcactgagttctctggatttgttctcagtgccttagcaacgaaaacctgtgcttgtgtgtgtgtggcggccggggaagggaaagatcctgtttcccacctcctttctcctcccctgtactccccagtgcctttccttgttctggtgggaactgggggttttctctcccttccccagtccaacaaaaactggccaaaaaatcctgggtaatgtgcccatttgggtggggcaagcccccaagccctccctggggggaggcaggggccaaaaaacaggtggcccctccatcctggggcctgtggccatggtccccgtctcctatgggggagttgaaggaaaaaaggccggggaaaacttccccccaacccctggcaaaataaagggggggaaatttactaagcccagaaagctctggaaaagcaaaagcctggtctggcttttcctggaaccgcggaaccaaaccctaaaatc

SEQ ID NO: 259441 - DNA, 2580 bp, Homo Sapiens
ggcctgggtggcgaattcggcacgaggccgcctcgccgccactgctgcgctgcctagtgctcaccggctttggaggctacgacaaggtgaagctgcagagccggccggcagcgcccccggcccctgggcccggccagctgacgctgcgtctgcgggcctgcgggctcaacttcgcagacctcatggctaggcaggggctgtacgaccgtctcccgccgctgcctgtcactccgggcatggagggcgcgggtgttgtgatcgcagtgggcgagggagtcagcgaccgcaaggcaggagaccgggtgatggtgttgaaccggtcagggatgtggcaggaagaggtgactgtgccctcggtccagaccttcctgattcctgaggccatgacctttgaggaagctgctgccttgctcgtcaattacattacagcctacatggtcctctttgacttcggcaacctacagcctggccacagcgtcttggtacacatggctgcagggggtgtgggtatggctgccgtgcagctgtgccgtacagtggagaatgtgacagtgttcggaacggcctcggccagcaagcacgaggcactgaaggagaatggggtcacacatcccatcgactatcacacgactgactacgtggatgagatcaagaagatttcccctaaaggagtggacattgtcatggaccctctgggtgggtcagatactgccaagggctacaacctcctgaaacccatgggcaaagtcgtcacctatggaatggccaacctgctgacgggccccaaacggaacctgatggccctggcccggacatggtggaatcagttcagcgtgacagctctgcagctgctgcaggccaaccgggctgtgtgtggcttccacctgggctacctggatggtgaggtggagctggtcagtggtgtggtggcccgcctcctggctctgtacaaccagggccacatcaagccccacattgactcagtctggcccttcgagaaggtggctgatgccatgaaacagatgcaggagaagaagaatgtgggcaaggtcctcctggttccagggccagagaaggagaactagggcaagtggctgtgagaccctagagaccagcgaagggagaagttgggaagctacgttctgttggccaccagacttgcatttcagcctctgtcataatgctctgccctccctcccccgaagttctctgtggtgatgaccgctctcccctgcccctccccgcttcctgacctctgaagaggttgggaagtgaccatttggatgtctgggccctgccaaggcgacagggagggtcagagggaggccggctgcttcctgcccccaccctttccccgggcctgctgtgctgcttttgtgccaaggttagccagtcccccctgttgtgttccatgtgctttcacctctgcctcatctttcctcccgtccctgccccgccacctccccaaagaattgaaacgtcagctcaggatatggggccaatctctgtgagtccagcatgtacctgtctctccctagtgtcccttcagcctgggctgaccagtgcccgcctctgggcttgaccagttcccaatctcgtcctctgtccccaacttcttaagcacaattgggcttcttccatctccaggttttctgccattcttaaccaaggctgcctcttccaacagggcgggaatcagacctactcccctaggtcacaactctgggaaggatacagagcccccacccttcactgagttctctggatttgttctcagtgccttagcaacgaaaacctgtgcttgtgtgtgtgtggcggcggggagggaggatcctgtttcccacctccttctcctcccctgtactccccagtgccttccttgttctggtggagactgggggtttctctcctccccagtcccacaacactgccaaaaatctgtgtatgtgccattgggtggggcagccccaagcctcctggggaggcaagggcaaaaacaggtgccctcatcgtggtctgtgccatgtcccgtctctatggtggttgaggagaaaggcggggaagcttcctcagccttgcagatatgtgtggcatttactagccagagctctgaaaggcagtgctgtctgtttcttgtactgggaccaaagtaaaaatccaagcacattccccttgcagttaggggaggccctactgccttctcaaagcagagaggcagcttatcaaactcagcccaaaactctgtttacatgggtggggagatggagcagggaagtacagagtgggatggtcaggacctgggccattgcaaccaaaatggggacttcctgggtagggaggtcactccctctactcactgagctaggattagggagggttattgccccaaccattgcaatgggaggtggagggacaggctcagcctcctcattgtctaaatgaggcctaaatgtgtgaagtgcgatttctgcttttgtgtaccccaccaccccattaccacagctgcctttgtgtgtttgtgtcaataaaaagccaaaccctgaagaacccccaacccagaacaaaagaaccccacatgtc

SEQ ID NO: 259442 - DNA, 881 bp, Homo Sapiens
  misc_feature (652)..(652): n is a, c, g, or t
caggtagcaaagtgacgccgagggcctgagtgctccagtagccaccgcatctggagaaccagcggttaccatggaggggatcagtatatacacttcagataactacaccgaggaaatgggctcaggggactatgactccatgaaggaaccctgtttccgtgaagaaaatgctaatttcaataaaatcttcctgcccaccatctactccatcatcttcttaactggcattgtgggcaatggattggtcatcctggtcatgggttaccagaagaaactgagaagcatgacggacaagtacaggctgcacctgtcagtggccgacctcctctttgtcatcacgcttcccttctgggcagttgatgccgtggcaaactggtactttgggaacttcctatgcaaggcagtccatgtcatctacacagtcaacctctacagcagtgtcctcatcctggccttcatcagtctggaccgctacctggccatcgtccacgccaccaacagtcagaggccaaggaagctgttggctgaaaaggtggtctatgttggcgtctggatccctgccctcctgctgactattcccgacttcatctttgccaacgtcagtgaggcagatgacagatatatctgtgaccgcttctaccccaatgacttngtggggtggttgtgttccagttttcaacacatcatggttgggccttatcctgcctgggattgtcatcctgtccctgctattgcattatcatctccaagctgtcacactccaagggcccaccagaagcgcaaggcccctcaagaccacagtcatcctcatccctggcttttcttcgccctgttgcctgcctttactaccattgggaatccaagcatcgacctcccttcct

SEQ ID NO: 259443 - DNA, 594 bp, Homo Sapiens
  misc_feature (238)..(238): n is a, c, g, or t
tgctgaagtaccggaggagacacaggaagcactcgccgcagcacacgaccacgctgtcgctcagcacactggccacacccaagcgcagcggcaacaacaacggctcagagcccagtgacattatcatcccgctaaggactgcggacagcgtcttctgccctcactacgagaaggtcagcggggactacgggcacccggtgtacatcgtccaggagatgcccccgcagagcccggcganacatttactacaaggtctgagagggaccctggtggtacctgtgctttcccagaggacacctaatgtcccgatgcctcccttgagggtttgagagcccgcgtgctggagaattgactgaagcacagcaccgggggagagggacactcctcctcggaagagcccgtcgcgctggacagcttacctagtcttgtaggcattcggccttggtgaacacacacgctcccgggaagctgggaagactgtgcagaagacgcccattcggactgctgtgccgcgtcccacgtctcctcctcgaagccatgtgctgcggtcactcaggcctctgcagaagccaagggaagacagtggtttgtgga

SEQ ID NO: 259444 - DNA, 1004 bp, Homo Sapiens
ttttcaaaagtcaaaacaaaaactcctaagcactctcctattaaagaggaaccctgtggttccttatctgaaactgtttgtaaacgtgaattgaggagccaagaaaccccagaaaagccccggtcttcagtggacaccccaccaagactctccactccccaaaagggacccagcacccatcccaaggagaaagccttctcaagtgagatagaagatttgccgtacctttccaccacagaaatgtatttgtgtcgttggcaccagcctcccccatcaccgttaccattacgggaatcctctccaaagaaggaggagactgtagcaagtaaggcatagagaacacttgctcttataccctagtggtggcggtcaagctaacaagtgtgaaaatgcctttggcatttttaaaaaagtgcaatcaataaagcagagttctgtcaagaatgagtaagttaacagccagagacagacactgtgcaggcattgcaaatagatggaattacagcaaaatgtgctcaatgtatttgcctgcttacaacactgggagatgtgtttgccagtaagttgctcatcacaagagcaccagacttgggggtgtaatctccggcaacttgcatgccctctgaaagaagggttttctgtgctgtgaaatgcatagaactatactttgccatgcacgactgttcctgcaattgatattgtgtgaaatctgggagggtggtctttgggtgttctcaggggccaatggtaatttttgggttggggagccagcttggggtggggaattttcacctgggcctccgctctttaactatataaacatttatctgtatatctatgtccctgtctggggggcaggaggaatctgccaaagaccaacagtcttactttatcttactatacttcacaaaggttctaaaatgtgaagagtttacttggattgcagtagcccattggttgttcatatatttaaataaaatggtctacaaactatttttcaaaca

SEQ ID NO: 259445 - DNA, 907 bp, Homo Sapiens
gggagagtgtaatatggcgaagacctacgattacctgttcaagctgctgctgatcggggactcgggggtggggaagacctgtgtcctgttccgcttctccgaggacgccttcaactccacttttatctccaccataggaattgactttaaaattaggaccatagagctcgatggcaagagaattaaactgcagatatgggacacagccggtcaggaacggtttcggacgatcacaacggcctactacaggggtgcaatgggcatcatgctggtctacgacatcaccaacgagaagtccttcgacaacatccggaactggattcgcaacattgaggagcacgcctctgcagacgtcgaaaagatgatactcgggaacaagtgtgatgtgaatgacaagagacaagtttccaaggaacggggagaaaagctggccctcgactatggaatcaagttcatggagaccagcgcgaaggccaacatcaatgtggaaaatgcatttttcactctcgccagagatatcaaagcaaaaatggacaaaaaattggaaggcaacagcccccaggggagcaaccagggagtcaaaatcacaccggaccagcagaagaggagcagctttttccgatgtgttcttctgtgaggaacaccgccttactctgagcctcgctcagcccagctgactgtgcctgttctgagtgagcccctcactcagccggggcctcccaactccaacgccccgcccacgccgcggccaccgggcccacggccaccagaatgcaattgagaaatcgtttattttagtaactgtctgatctttttcaactttgggagatggaataaagttaaaaatttgctattttttcctgtaaaccatctgctgaacggggcccacccccacacgtttgtaata

SEQ ID NO: 259446 - DNA, 661 bp, Homo Sapiens
  misc_feature (331)..(331): n is a, c, g, or t
  misc_feature (592)..(592): n is a, c, g, or t
  misc_feature (611)..(611): n is a, c, g, or t
gaaatataccctcctatgtacccatctgtcttagtgtttgcgtctggggtgtgttatcaaacagagcatggtctacatcccactgtgtcaaccagaagagccaagtgttatctcaattggcccagtgtttctccaggctggggactgttaagggctctaagggaatgtagacagagtctccctgttattctgacttcctgcttgatgagctttcagttcctgtttttgctattgtttcctaaatttgacctacatattacatgggtgtagtgtgttgaggcttttcaaagaagggtcctagtgagcctaagtttccatccttctggtaccncattgatcaaactgaccctttcctattcctcataagcgtttcctaccccaaagttgtgtgtggacaggagtgtatagcaaagaggaaatccctttcaacagagtcagcctgctaactgatttcctataagcacactggattaagggcagcccacagtggtttctactgtatgtatgaaccgaatggaggaatgttttcaaagattgatttggtgtggattgcaattgtaatggaaggcataacttgggatcccgggctgtnacttgctcttttgtttccnacccccctgacatgtatgtgtgctttaataaagctttctcacctccaaat

SEQ ID NO: 259447 - DNA, 1387 bp, Homo Sapiens
gggtcctcctcctcctcttctcgccattgcagttggacccagcagcccggagcgcaccgcgtggcttttgggggcagaccccggcgggctgtggcaggagggcggcggcggcggctgcggccgaagaaggggacgccgacaagagttgaagtattgataacaccaaggaactctatcacaatttgaaaagataagcaaaagtttgatttccagacactacagaagaagtaaaaatgcgtccaatgcgaatttttgtgaatgatgaccgccatgtgatggcaaagcattcttccgtttatccaacacaagaggagctggaggcagtccagaacatggtgtcccacacggagcgggcgctcaaagctgtgtccgactggatagacgagcaggaaaagggtagcagcgagcaggcagagtccgataacatggatgtgcccccagaggacgacagtaaagaaggggctggggaacagaagacggagcacatgaccagaaccctgcggggagtgatgcgggtgggcctggtggcaaagggcctcctactcaagggggacttggatctggagctggtgctgctgtgtaaggagaagcccacaaccgccctcctggacaaggtggccgacaacctggccatccagcttgctgctgtaacagaagacaagtacgaaatactgcaatctgtcgacgatgctgcgattgtgataaaaaacacaaaagagcctccattgtccctgaccatccacctgacatcccctgttgtcagagaagaaatggagaaagtattagctggagaaacgctatcagtcaacgaccccccggacgttctggacaggcagaaatgccttgctgccttggcgtccctccgacacgccaagtggttccaggccagagccaacgggctgaagtcttgtgtcattgtgatccgggtcttgagggacctgtgcactcgcgtgcccacctggggtcccctccgaggctggcctctcgagctcctgtgtgagaaatccattggcacggccaacagaccgatgggtgctggcgaggccctgcggagagtgctggagtgcctggcgtcgggcatcgtgatgccagatggttctggcatttatgacccttgtgaaaaagaagccactgatgctattgggcatctagacagacagcaacgggaagatatcacacagagtgcgcagcacgcactgcggctcgctgccttcggccagctccataaagtcctaggcatggaccctctgccttccaagatgcccaagaaaccaaagaatgaaaacccagtggactacaccgttcagatcccaccaagcaccacctatgccattacgcccatgaaacgcccaatggaggaggacggggaggagaagtcgcccagcaa

SEQ ID NO: 259448 - DNA, 2265 bp, Homo Sapiens
  misc_feature (1498)..(1588): n is a, c, g, or t
  misc_feature (1594)..(1926): n is a, c, g, or t
  misc_feature (1946)..(2008): n is a, c, g, or t
  misc_feature (2010)..(2131): n is a, c, g, or t
gaaatgtagcacagttgcttagtacaggcttctcacttcctacagacctgaattcaaatttggatagtctgagttcttaaattcccaaagaacacactgttatttcttgtgtatatttcaacataaatcatgttgttaccaatttgtttggaaggccctggttgagaagagttttagttaataaggtcatatatacatatattaatataaaccaatgtctactgttttgctccagctagtgcttacagtttcattcgagccctgagtatgtgccctgctgttactctctttggtagttgaacgttgaattcaagtcttttgttttaagaagtactaagcaaacaagcaataaaaaggggaatggggtgtgctagtgtttgaatatgctctcttgttgctctaattctgtgcctctgtgcattaatatttggatgcatgcaatgccagcatggaaattggtcttcacatatactgcagtttaccagaaacattcacaaaccaataaatgtaacagacattccaattgttaatgggcatatatgtgaaaaacagtgtagaaaataggctaatataagaaaatggttaagtcctaaataacttcaagtgtggttatataatggacactgtcaatgttcataacttaaaccatgggtacctggtcaaacataatgcttgggcaaacattaacaattgagctaaatcgtctcaagttcttttattcatataaatcaaagtttaaaggaatgggggagattaacatttcctgttttatgtattgtgaaattgtttgacacaaccttgacagtatcctttaatggcatgaggttaattgtactgttaaccaactttctatgttctggaactagtattatagtgaaaacatatacagtaagttgatcgtttacaacctataaagcaggtgacatctgtgtatgtgagctgtttataagttgtattagcttagctcttgtgaacagtgtgcgcaaagtaagccatgaggagagcgatataaccacctttaaaggacctaaaatgtgctttaaaagcacaggagtggcatcacacgaaaactcactaacgacaggacttacgccagccttatggtgtgtggccacaagtcaccgctgaaacatacaacgaaaatggaccaagggcaggcccgacaagaagcgatcaaacaccagaaaacagggaacggctaagacaaccaaacaaggcacgcgcaacacagtccacaagccagaccaacagcgcatatacaaaggaaccatacgacaacactgacacgagacgcgcgcacgccactgcactaagcagaacaaagcgcgcaacaacgatgaccaccgacagcacgagaaccaacgaaggaatacatagcagacagccccaattaaacgaggacgacgaccccagcaatcggttcaactagcacatgtatcgatcgtgacattagagttgtctgtctgaatgagagtagagagaggagagaaaagtgaannnnnnnnnnnnnnnnnnnnnnnnnnnnnnnnnnnnnnnnnnnnnnnnnnnnnnnnnnnnnnnnnnnnnnnnnnnnnnnnnnnnnnnnnnnccgacnnnnnnnnnnnnnnnnnnnnnnnnnnnnnnnnnnnnnnnnnnnnnnnnnnnnnnnnnnnnnnnnnnnnnnnnnnnnnnnnnnnnnnnnnnnnnnnnnnnnnnnnnnnnnnnnnnnnnnnnnnnnnnnnnnnnnnnnnnnnnnnnnnnnnnnnnnnnnnnnnnnnnnnnnnnnnnnnnnnnnnnnnnnnnnnnnnnnnnnnnnnnnnnnnnnnnnnnnnnnnnnnnnnnnnnnnnnnnnnnnnnnnnnnnnnnnnnnnnnnnnnnnnnnnnnnnnnnnnnnnnnnnnnnnnnnnnnnnnnnnnnnnnnnnnnnnnnnnnnnnnnnnnnnnnnnngacgacgcgacaagaatgannnnnnnnnnnnnnnnnnnnnnnnnnnnnnnnnnnnnnnnnnnnnnnnnnnnnnnnnnnnnnngnnnnnnnnnnnnnnnnnnnnnnnnnnnnnnnnnnnnnnnnnnnnnnnnnnnnnnnnnnnnnnnnnnnnnnnnnnnnnnnnnnnnnnnnnnnnnnnnnnnnnnnnnnnnnnnnnnnnnnnnnncacgactgagacgtgcgacacagagagcagagcaacagcgcacacaacagagaacacgagaagaagaagaaacagacgacacagaggcggacaaaagagagaagaaaaagcgcagacgaacaggcacgaaacgg

SEQ ID NO: 259449 - DNA, 902 bp, Homo Sapiens
ataattttcttcatccagcctcacaaagaggagagatttcttttccctgtgtatccacttatatgtctctgtggcgctgtggctctctctgcacttcagcacagttttctgtacttccagaaatgttaccactttgtgtttcaacgatatcgcctggagcactatactgtgacatcgaattggctggcattaggaactgtcttcctgtttgggctcttgtcattttctcgctctgtggcactgttcagaggatatcacgggccccttgatttgtatccagaattttaccgaattgctacagacccaaccatccacactgtcccagaaggcagacctgtgaatgtctgtgtgggaaaagagtggtatcgatttcccagcagcttccttcttcctgacaattggcagcttcagttcattccatcagagttcagaggtcagttaccaaaaccttttgcagaaggacctctggccacccggattgttcctactgacatgaatgaccagaatctagaagagccatccagatatattgatatcagtaaatgccattatttagtggatttggacaccatgagagaaacaccccgggagccaaaatattcatccaataaagaagaatggatcagcttggcctatagaccattccttgatgcttctagatcttcaaagctgctgcgggcattctatgtccccttcatgtcagatcagtatacagtgtacgtaaactacaccatcctcaaaccccggaaagcaaagcaaatcaggaagaaaagtggaggttagcaacacacctgtggccccaaaggacaaccatcttgttaactattgattccagtgacttgactccctgcaagtcatcgcctgtaacatttgtaataaaggtcttctgacatgaatactgg

SEQ ID NO: 259450 - DNA, 223 bp, Homo Sapiens
cctcccagagtgctgggattacagctgtgagccaccgcacccggccgcattcttctaaatcacagtacatctggttcccagtgcccaggctctcagggcagagggtccagtgtgatcactttgcatggcctctctcccctcctgagcttgtgccagagccccagggctgacctggagaaggaaaatggcagagggtgaagatggggtgtctggtttggggacc

SEQ ID NO: 259451 - DNA, 720 bp, Homo Sapiens
  misc_feature (72)..(90): n is a, c, g, or t
cctgcacgccgggacgccacctccgccagccgcctccacccgccccacaccacaatcgctggttttcggcannnnnnnnnnnnnnnnnnnaagaaacgtcaaagttgtgcccaacactgtggatcagcaaacacgatagaggagaccagtcagtacttcttggagggggcaggaggagagaggaaaagggagggcgagaatgaccacacaacacagccttggaccatgagcagaagcgtccgtgggaactccactggggtggatgggctgcctgcacagcccctggagagggggccaggcacaccctcagaggagctgcaagcccgtggcctggcctgctacatgccctgcttccacgtggctgccacgctgacacacccacattcaccaaacccacccgcgccctgggacgcagccacgccaggaggaggacacggccgccgagagcaaggcacaacctcgagttcttggggcgcagagaacttaggagagaagcacggaggagcccccggcagagcacccgcccccgggccccagccttccacctgtgctagcagcctggggcctccactctggccggaggaaggaccgcaggcagacagcctgggcctctaacagcttttgtccggagctagacttcgtgtcctttcagttggtaaatggttttctatagaatcaataatatttctttctttaaatatatatttgttaaagttaaaa

SEQ ID NO: 259452 - DNA, 1016 bp, Homo Sapiens
agcggcccgagcgggaagcgccgggcgagcccactgtgcggccgtcgtgggggaagcgaaggttcctgattccacctacctcctaagtgaaggcttccgtccctggagaggaggcggcgctctgtatcggccttcgtcctccgcgggtgtgctagcgttgggacggtcctttgttgccgcgaggggtaggagtgggcgtggcggagccagctccgttcggaacactcccgggccgacccgactcgctcatcctgcaggagctgcggcgccaagatgagtggagaggagaacccagccagcaagcccacgccggtgcaggacgtacagggcgacgggcgctggatgtccctgcaccatcggttcgtggctgacagcaaagataaggaacccgaagtcgtcttcatcggggactccttggtccagctcatgcaccagtgcgagatctggcgcgagctcttctctcctctgcatgcacttaactttggcattggtggtgacggcacacagcatgtactgtggcggctggagaatggggagctggaacacatccggcccaagattgtggtggtctgggtgggcaccaacaaccacggacacacagcagagcaggtgactggtggcatcaaggccattgtgcaactggtgaatgagcgacagccccaggcccgggttgtggtgctgggcctgcttccgcgaggccaacatcccaacccacttcgggagaagaaccgacaggtgaacgagctggtacgggcggcactggctggccaccctcgggcccacttcctagatgccgaccctggctttgtgcactcagatggcaccatcagccatcatgacatgtatgattacctgcatctgagccgcctgggctacacacctgtttgccgggctctgcactccctgcttctgcgtctgctggcccaagaccagggccaaggtgctcccctgctggagcccgcaccctaagcatcctggctgcctttcccacaacattaaaactctcccttccgcaa

SEQ ID NO: 259453 - DNA, 465 bp, Homo Sapiens
ctgaggaaggagagtttaatgttgtgggaaggcagcaggatgttagggtgcgggctccagcaggggagcaccttggccctggtcttgggcagcagacgcagaagcagggagtgcagacccggcaaacaggtgtgtagcccaggcgctcagatgcaggtaatcatacatgtcatgatggctgatggtgccatctgagtgcacaaagccagggtcggcatctaggaagtgggcccgagggtggccagccagtgccgcccgtaccagctcgttcacctgtcggttcttctcccgaagtgggttgggatgttggcctcgcggaacgaggccagcaccacaacccgggcctggagctgtcgctcattcaccagttgcacaatggccttgaatgcaccagtcacctgctctgctgtgtgtccgtggttgttggtgccaccccagacacacaatcttgggccggatgtgttc

SEQ ID NO: 259454 - DNA, 622 bp, Homo Sapiens
  misc_feature (108)..(108): n is a, c, g, or t
attcaccattacaggtaagaaaaacgcattttagggaagcagtgaattctccacttggaatcaatctactgattgataattaaattatttcactgtgaaccagaaggntagtatttagaaagcaaaatatttagaagtgaaagaggggggaaaaaagaatgatctacaatgtaatataaattaacctaatttaaattagattttaatttaacctactttgacagttttttaaaacaaggaagatcctaaggacttgcaactatggcaatcctcaaaatgggaccaaaaattgtcctggaatggtcaggtggtcatccatctaaagatccatccagctactatttaataattcttcataaggacacttcatctactctggttgactgtcattttcaacatcataatttacataaggtaggcttcctttattaaattcgtattctgtatttcagatatttctcaattttagaaaaacaatgcacagtgtgttaagagcatattttcaacttcattcaatgcattacctaaatactgcatattagctcatgcggtattgtgtaatactgcaaagaccgtacttacgtaaatgttggttaaagttaccaattatacaaagctccac

SEQ ID NO: 259455 - DNA, 915 bp, Homo Sapiens
  misc_feature (28)..(28): n is a, c, g, or t
gggagggagaaaggggatgaccagcccntttgccaatcccattccttcccgggaacccctgggccccagcacaggcattcctctgcccactagccaaagtcaggggatgtgaaagaaactgtgtggaatccaaggcccttatctatttcttcttccgttctgggagcagcgtgggcaaaaccatttcccccgaggcttggtggtcagccccacacaggcaaaatggaaccactcaatggaaaaatcagggttgtcacagccaatcatctctccataggagacctggtgacaaaggcaataggtgggttcgttgggatccacaggcatatccaacacatcagaggggtggacactgccaaaggtcactgagggcatcccatactcaggacttgtgcgcacgagctttaacttcttctgggcagtcttgggggcttcttcatccgagtttttccctttggaacgagcacgagcagctttcttctccttttgagtccggcctttctttttgcctttgctggaagagctgtcatagtcacttgactcaatctgtttctccttgagatcagcctcaaaacgggccaggtctgtgtccagccgccgaatgtgtttgtccaccatctcataggtctgcatggcaagctgcaccttgtcgtcaccaaattccttgcacttgccataggcttcctggatctgtttgagaagggccaatttttcctcggagctcaggctgcgggcactactcatatactcagtggccaacttgtcaatttcagccttcaggtcctctgttctttggtctaggtccctcatgagctgaaagtttctctgtaattcaaagggaaggttttcaatactgtccagataatgttccaaatacatccccgcagccatctcgaagcaaaacaaagcaacttc

SEQ ID NO: 259456 - DNA, 428 bp, Homo Sapiens
  misc_feature (341)..(341): n is a, c, g, or t
  misc_feature (394)..(394): n is a, c, g, or t
actcaaaaggagaagaaagctgctcgtgctcgttccaaagggaaaaactcggatgaagaagcccccaagactgcccagaagaagttaaagctcgtgcgcacaagtcctgagtatgggatgccctcagtgacctttggcagtgtccacccctctgatgtgttgggatatgcctgtgggatcccaacggaacccacctattgcctttgttcaccagggtctcctatgggaggaggatgattgggctgtggacaaccctggattgtttccatttgagtgggtttccatttttgcctgtgtggggggctggacaaccaaggcctcgggggggaaatgggtttttngcccacggtggttccccaaggaacgggaaggaaggaaataggataagggggcnttgggatttccaacaacagttttttttcccacat

SEQ ID NO: 259457 - DNA, 897 bp, Homo Sapiens
ggcacgagggtgtacgccccaagttgggacgccggcatagtatggaaaatatggaacttatgaagttaacaccagaaaaggtacagaactggaacagtgaaattcttgctaagcaaaaacctcttattgccaaaccttctgcaaagctactctttgtcaacagactgaaggggaaaaaatacaaaaccgaattcctccactaaagttctccaagatgccagtaattctattgaccaccgaattccaaattctcagaggaaaatcagtgcagatactattggagatgaaggggttctttgacttattaagccgatttcaaagcaataggatggatgatcagagatgttgcttacaagaaaagaactgccatacagcttcaacaacaacttcttccactccccctaaaatgatgctaaaaacatcatctgttcctgtggtatcccccaacacggatgagtttttagatcttcttgccagctcacagagtcgccgtctggatgaccagagggctagtttcagtaatttgccagggcttcgtctaacacaaaacagccagtcggtacttagccacctgatgactaatgacaacaaagaggctgatgaagatttctttgacatccttgtaaaatgtcaaggatccagattagatgatcaaagatgtgctccaccacctgctaccacaaagggtccgacagtaccagatgaagactttttcagccttattttacggtcccagggaaagagaatggatgaacagagagttcttttacaaagagatcaaaacagagacactgactttgggctaaaggactttttgcaaataatgctttgttggagtttaaaaattcaaggaaaaaatcggcagaccattagttactatggatttattttttttcc

SEQ ID NO: 259458 - DNA, 529 bp, Homo Sapiens
gggtttatggtaattgtaacctttcaaatgagttacgtgaaaagagcatctcacttttaatacacccagatattttcttcaagtctttgtgcattttagcaggacttaattttcttaatttattctttcctttcaattatagtgacatagagtagttggccttataagtagatcccatttagcccctgaacataataccatctgcagtattataaaagtcatttagaaggtcagggggataatctagaggcaggattttggacattgtgaaggaaatgtgctccttctcagctcacttcaataactattttctgagactgaagttttttagacaagaataagaaaactttgctttcttcagttatcacatgtgaaagcttttgctttttgttaggaaaaggtgtggatgactctactgcgtggatggttacatttgctttccgtgaaatgctcagaaaatgtcaggacattccttttccaattgtgtgtcagtgcgtattgtaataaaactactgatttaaattaaaaa

SEQ ID NO: 259459 - DNA, 1537 bp, Homo Sapiens
  misc_feature (195)..(228): n is a, c, g, or t
gaagtgtccagcagttgcttgaaatgctttgccgaatctgactccagtaagaatgtgggaaaaccccctgtgtgttctgcaagcagggctcttgcaccagcggtctcctcagggtggacctgcttacagagcaagccacgcctctttccgaggtgaaggtgggaccattccttgggaaaggattcacagtaaggnnnnnnnnnnnnnnnnnnnnnnnnnnnnnnnnnnaaaaaaaggatttcacagtgagaaagttttggttagtgcataccgtggaagggcgccagggtctttgtggattgcatgttgacattgaccgtgagattcggcttcaaaccaatactgcctttggaatatgacagaatcaatagcccagagagcttagtcaaagacgatatcacggtctaccttaaccaaggcactttcttaagcagaaaatattgttgaggttacctttgctgctaaagatccaatcttctaacgccacaacagcatagcaaatcctaggataattcacctcctcatttgacaaatcagagctgtaattcactttaacaaattacgcatttctatcacgttcactaacagcttatgataagtctgtgtagtcttccttttctccagttctgttacccaatttagattagtaaagcgtacacaactggaaagactgctgtaataacacagccttgttatttttaagtcctattttgatattaatttctgattagttagtaaataacacctggattctatggaggacctcggtcttcatccaagtggcctgagtatttcactggcaggttgtgaatttttcttttcctctttggggatccaaatgatgatgtgcaatttcatgttttaacttgggaaactgaaagtgttcccatatagcttcaaaaacaaaaacaaatgtgttatccgacggatacttttatggttactaactagtactttcctaattgggaaagtagtgcttaagtttgcaaattaagttggggagggcaataataaaatgagggcccataacagaaccagtgtgtgtataacgaaaaccatgtataaaatgggcctatcacccttgtcagagatataaattaccacatttgccttcccttcatcagctaacacttatcacttatactaccaataacttgttaaatcaggatttggcttcatacactgaattttcagtattttatctcaagtagatatagacactaaccttgatagtgatacgttagagggttcctattcttccattgtacgataatgtctttaatatgaaatgctacattatttataattggtagagttattgtatctttttatagttgtaagtacacagaggtggtatatttaaacttctgtaatatactgtatttagaaatggaaatatatatagtgttaggtttcacttcttttaaggtttacccctgtggtgtggtttaaaaatctataggcctgggaattccgatcctagctgcagattgcatcccacaatgcgagaatgataaaataaaattggatatttgag

SEQ ID NO: 259460 - DNA, 534 bp, Homo Sapiens
  misc_feature (155)..(167): n is a, c, g, or t
gtgaaatacagattgctatataatgtctgaaaaaacctgatactacttcaagagtttctgctcagaagaaaatgagagttatcataataggaagctgtggcggtccatgccaactgtgctgtgtcacatacagcgatgagagtggctttcatacnnnnnnnnnnnnnaagttaacaccctcctttacccccagcagtatctcaggttatagaatcagagatgcagcagtgacaaatggcattttaacttgtaaaatcgtgtgatgatgcttatcattttgaaatagaagaataaaaacctggtcccgtttcaccagacatgaatttcaagtggagtcgtcgttctctgagagtgagtgtcttgacattttcacccaggccctcctgtcatcacatcaccggctgtcactggcgggtggccgtaaacgtcctgcgttgctatattaagatctctgcagttcaggcttcaaaaccagttcagtgtatccgggcgacgggtagtggtggtgcatgcctgtctgtgtgccccgctggc

SEQ ID NO: 259461 - DNA, 1184 bp, Homo Sapiens
  misc_feature (820)..(829): n is a, c, g, or t
tcagacggcgccgtctcccgcgaaagtcctgagaggagcccagccttttccgcctgccgcccccggatgggatggttgaggccggggccacgccccctctgcccccctgcgagggcatcctgggctttctcccaccgctttccgagcccgcttgcacctcggcgatccccgactcccttctttatggcgtcgctcctgtgctgtgggccgaagctggccgcctgcggcatcgtcctcagcgcctggggagtgatcatgttgataatgctcggaatatttttcaatgtccattccgctgtgttgattgaggacgttcccttcacggagaaagattttgagaatggcccccagaacatatacaacctttacgagcaagtcagctacaactgtttcatcgctgcaggcctttacctcctcctcggaggcttctctttctgccaagttcggctcaataagcgcaaggaatacatggtgcgctagggccccggcgcgtttccccgctccagcccctcctctatttaaagactccctgcaccgtgtcacccaggtcgcgtcccacccttgccggcgccctctgtgggactgggtttcccgggcgagagactgaatcccttctcccatctctggcatccggcccccgtggagagggctgaggctggggggctgttccgtctctccacccttcgctgtgtcccgtatctcaataaagagaatctgctctctttcaaaaacagaaagaaacaacacctgctgtggtacaatgaatcccggccattttgggcctaacgattacgcaaccctcccagggctcttttggtcnnnnnnnnnnaaaaagagggtagggaaggggcccctgggcataaccggttttcttggacccctcttttttttggatcaaggggggtaaaaatctgtccgggccctcccgttaaaggggcccccacttaaatttctaaaagagcccggggtaaccgggcctttaaagagactccgggtgggaccccgccgggaaattttacgcccctccttttaggagcggggttttttattttggaggacaaaaaggggatttttcccgaagagacagtcttgttttctggggcgaaaatattgggtgggcgtgggggacacgaaaagagagtaccggtattacaggagaggggttttttcttcgcgccccaaca

SEQ ID NO: 259462 - DNA, 958 bp, Homo Sapiens
aggtagcgaggcctgggtggcgaattcggcacgaggcctcctcggagcatttcgagaagctgcacgagatcttccgcggcctccatgaagacctacaaggggtgcccgagcggctgctggggacggcggggaccgaagaaaagaagaaattgatcagggattttgatgaaaagcaacaggaagcaaatgaaacgctggcagagatggaggaggagctacgttatgcacccctgtctttccgaaaccccatgatgtctaagcttcgaaactaccggaaggaccttgctaaactccatcgggaggtgagaagcacacctttgacagccacacctggaggccgaggagacatgaaatatggcatatatgctgtagagaatgagcatatgaatcggctacagtctcaaagggcaatgcttctgcagggcactgaaagcctgaaccgggccacccaaagtattgaacgttctcatcggattgccacagagactgaccagattggctcagaaatcatagaagagctgggggaacaacgagaccagttagaacgtaccaagagtagactggtaaacacaagtgaaaacttgagcaaaagtcggaagattctccgttcaatgtccagaaaagtgacaaccaacaagctgctgctttccattatcatcttactggagctcgccatcctgggaggcctggtttactacaaattctttcgcagccattgaacttctatagggaagggtttgtggaccagaactttgaccttgtgaatgcatgatgttagggatgtggatagaataagcatattgctgctgtgggctgacagttcaaggatgcactgtatagccaggctgtgggaggagggaggaaagatgaaaaaccacttaaatgtgaaggaacaacagcaacaagaccagtatgatataccaaggtaataaatgctgtttatgacttctttaaattt

SEQ ID NO: 259463 - DNA, 803 bp, Homo Sapiens
gttcgcccattgagccgagagatcacaatgagccaagcatatcagaacatgtgtgctggaatgtttaaaaccatggtagcatttgacatggacggcaaagtacgtaaaccgaagtttgagcttgatagtgaacaagttcggtatgaacacaggtttgctccattcaacagtgtgatgaccccgccgccagtgcactacttacagttcaaggaaatgtctgacctcaataaatatagccctcctcctcagtctcctgaactgtatgtggcagctagtaagcactttcaacaggcaaaaatgatattggaaaatattcctaacccggaccatgaggttaatagaattttaaaggttgccaaacccaactttgtggttatgaagttattggcaggaggacacaaaaaggaatctaaagttcctcctgaatttgatttctctgctcataaatattttcctgttgtgaaacttgtttgagagagactgggaaggtggccataaaggggcagagtcttctttcagacccaactcttagagggcacatcaccaggctccacatcacgggaagtgagatggatttcttgggtaacaactcattataaggaatacttttagtttgacagccttatatgacatgaatgaaaactgctgttttaaagtggtttattatgttccatggaagaaactggtcttattgaatgcattgatgaacgttatatggttttattacagatttaatcacaaatcattttttatgaatgattgagtgaaaatagtgtttataaaggttaataaatttcttgaca

SEQ ID NO: 259464 - DNA, 1172 bp, Homo Sapiens
agacaagactcagaaaccgttttattaaactggaacacaaaatgcgtgttataataatgtcaagcctttatcagaaatcagtacataagtgaggatacacagccaaaatgagccatcaacaaaagcagtataaattttaaataagtttcagatttctatactcaatatgctaaagaaaataaaaccgaaagagtagtttcaatttcacaattcacagttgattggttttaatcccatgacacgtttgtcattctgcagccccagaacatagacttccaaagcagtgactggcactccgacccaacagcatacacagatcttaagcctctgtatgacatttagagaaaattttaataaacaaccctaattacacacagtttgggctgacattttttagctatatcctttatcaaagatagttctagtgaaatagcaaaagcagttttaaaagtttgccatgccattcaataaagggttctaaagcctcccttggttttacattttattctctaatttaaaacaataactgcattaaaatgcaaccttaatggtgaaagcaaaatcggttttgcttctgaatctagagcatatttccaaggagaagcaacttattgtcccagcagatatatggaatgctttaaagcaggatctgacatactccagtaaggcatttcaaagcagacacatcatacccaaactaaatcattatggtcagtcaaggataccacaggtgaacaccaagtaacgcagagttaacgtgaaattcttacaaatgacacacgatttacaaaaccccagaaaggtactcaggtaccaaaagagggcaaaacaatgaccagccactccaaaagagttttgttcctatacatgccatatttgcagagtagaaacaaactgccctatttgcgctttgccctaggataatatcactcattctgacatgtggagttactcttccttaaaaaaatatatcatgtagagaatacacaaataataataaatgatatagaacatttattattttcactagtgagggggtcacttaagcacttacaaagacttataaatgaatcatgaaggtcatcaaaatgcaaaaacatccaataaatgttgcattattagtattcaacagtgcagcaagatttttagcaactgcgtcgggcttaatttgg

SEQ ID NO: 259465 - DNA, 450 bp, Homo Sapiens
ctggccgtcaacgccaacgtgggggacgccgcggttcaagagttggctcggaactgcccagaactccaccaccttgacctcaccggctgcctccgcgtcggaagcgacggtgtcaggacattggccgagtactgccccgtgctgcgttcgctgcgggtgcggcactgccaccatgtggcggagtccagcctgagccgcttgcggaagcgcggcgtggacatcgacgtggagccgccgctgcaccaggccctggtgctgctgcaggatatggcgggcttcgcaccttttgtcaacctgcaggtctgacccgcctgccaatcggagcacagctggactgtgtggctggggcctgacactgagctgtagggaaactgaactgtgaggacctctggtgagaggccagtgccctgccccaccctggagcttcaaataaagagctttttaccccca

SEQ ID NO: 259466 - DNA, 678 bp, Homo Sapiens
  misc_feature (506)..(506): n is a, c, g, or t
  misc_feature (641)..(641): n is a, c, g, or t
cgtcgcgcagggtcggggactgcgcggcggtgccaggccgggcgtgggcgagagcacgaacgggctgcctgcgggctgagagcgtcgagctgtcaccatgggtgatcacgcttggagcttcctaaaggacttcctggccgggggcgtcgccgctgccgtctccaagaccgcggtcgcccccatcgagagggtcaaactgctgctgcaggtccagcatgccagcaaacagatcagtgctgagaagcagtacaaagggatcattgattgtgtggtgagaatccctaaggagcaggggcttcctctccttctggaggggtaacctggccaacgtgatccgttacttccccacccaagctctcaacttcgccttcaaggacaagtacaagcagctcttcttagggggtgtggatcggcataagcagttctggcgctactttgctggtaacctggcgtccggtggggccgctggggccacctccctttgctttgtctacccgctggacttntgctaggaccaggttggctgctgatgtgggcaagggcggccgcacagcgtgaagttccatggtctgggcgactgtatcatcaagatcttcaagtctgatggcctgagggggctctaccagggtttcaacggactntgtccaaggcatcattatctatagagctgcctacttc

SEQ ID NO: 259467 - DNA, 756 bp, Homo Sapiens
  misc_feature (610)..(610): n is a, c, g, or t
cacgccgcttcccagtctctgtgcgaggcgtgaagcgcggacctttcaacaagggctttattaattctcacgctgcggccctggaaagcgatggaggtggcggctaattgctccctacgggtgaagagacctctgttggatccccgcttcgagggttacaagctctctcttgagccgctgccttgttaccagctggagcttgacgcagctgtggcagaggtaaaacttcgagatgatcaatatacactggaacacatgcatgcttttggaatgtataattacctgcactgtgattcatggtatcaagacagtgtctactatattgatacccttggaagaattatgaatttaacagtaatgctggacactgccttaggaaaaccacgagaggtgtttcgacttcctacagatttgacagcatgtgacaaccgtctttgtgcatctatccatttctcatcttctacctgggttaccttgtcagatggaactggaagattgtatgtcattggaacaggtgaacgtggaaatagcgcttctgaaaaatgggagattatgtttaatgaagaacttggggatccttttattataattcacagtatctcactgctanatgctgaagaacattctatagctaccctacttcttcgaatagagaaagaggaattggatatgaaagggagtggtttctatggttctctggagtgggtcactatcagtaagaaaaatccagataataaaaaaatatgcaaattatta

SEQ ID NO: 259468 - DNA, 837 bp, Homo Sapiens
cctgagcagaaatactgaaagaccctgagacctggatgatgtctttgagccaccaaaccaagcagccttgtagccactcctcctttggactgtttcttttgtgagagactaaacttatttttaagccagttgatttaggatgctctattactaataactgaagacattctaattggtacagactgaaacctttataggagttatgcagttcagaagtggactttaggtaagtcatttattttaagctgttgatatagagatttattttctgtaaattttgacgtaaatagtttgagcattagaaatcaacttgaaacaataaaatgtatgcttccttgaactgtcatatcgttgacctgcaaaattcacctttggaacgtgacacaatgttaggcatacctccttttttctaatacatggaatacattttggtggaggtaatttatgtgattcatataccactgctacagtgttagctgacaacatatagtatgaggtaaggatctaattctgtttcctctcacatgattacttgatagctaagcatctgattggtttactgctttaccactgagctgaaatgccgtgttttccatttattaaaatcacacatggctcctgtttttgtcactcagcactttttctccatattcttcaagacgattgtgagtatggtacgtaacaggaattacatctggtaagttgtatagttttgtgtaggaactctatattcatagcatatttgtggaaatgatacctatggaggtttctcacactggtgtgtcattatacattaattgtacaatatgcattttcagtaaaatatttgaaaactgt

SEQ ID NO: 259469 - DNA, 862 bp, Homo Sapiens
  misc_feature (707)..(771): n is a, c, g, or t
agactcacctcatcgatactgcctggtaatccaaagctagaactctcaggaccccaaactccacctcttggattggccctggctgctgccacacacatatccaagagctcagggccagttctggtgggcagcagagacctgctctgccaagttgtccagcagcagagtggccctggcctgggcatcacaagccagtgatgctcctgggaagaccaggtggcaggtcgcagttgggtaccttccattcccaccacacagactctgggcctccccgcaaaatggctccagaattagagtaattatgagatggtgggaaccagagcaactcaggtgcatgatacaaggagaggttgtcatctgggtagggcagagaggagggcttgctcatctgaacaggggtgtatttcattccaggccctcagtctttggcaatggccaccctggtgttggcatattggccccactgtaacttttgggggcttcccggtctagccacaccctcggatggaaagacttgactgcataaagatgtcagttctccctgagttgattgacaggcttaatggtcaccctaaaaacacccacatatgcttttcgatggaaccaggtaagttgacgctaaagttcttatggaaaaatacacacgcaatagctaggaaaacacagggaaagaagagttctgagcagggcctagtcttagccaatannnnnnnnnnnnnnnnnnnnnnnnnnnnnnnnnnnnnnnnnnnnnnnnnnnnnnnnnnnnnnnnncagttaggtggctctttccaagactctggggaaaaaagtagtaaaaagctaaatgcaatcaatcagcaattgaaagctaagtgagagagcc

SEQ ID NO: 259470 - DNA, 897 bp, Homo Sapiens
tagctttgcaaccctgatagagtaaataaattttatgggtgggtgccaaatactgctgtgaatctatttgtatagtatccatgaatgaatttatggaaatagatatttgtgcagctcaatttatgcagagattaaatgacatcataatactggatgaaaacttgcatagaattctgattaaatagtgggtctgtttcacatgtgcagtttgaagtatttaaataaccactcctttcacagtttattttcttctcaagcgttttcaagatctagcatgtggattttaaaagatttgccctcattaacaagaataacatttaaaggagattgtttcaaaatatttttgcaaattgagataaggacagaaagattgagaaacattgtatattttgcaaaaacaagatgtttgtagctgtttcagagagagtacggtatatttatggtaattttatccactagcaaatcttgatttagtttgatagtgtgtggaattttattttgaaggataagaccatggggaaaattgtggtaaagactgtttgtacccttcatgaaataattctgaagttgccatcagttttactaatcttctgtgaaatgcatagatatgcgcatgttcaactttttattgtggtcttataattaaatgtaaaattgaaaattcatttgctgtttcaaagtgtgatatctttcacaatagcctttttatagtcagtaattcagaataatcaaggtcatatggataaaatgcattttttatttcctattttctttaggggagtgcctacaaaatggtttggccaccttaaaattttccaaggttttcctggttttaaaaaaagttaaacctggaactttatagaaattggtttttcccaatttggcccagtggaattg

SEQ ID NO: 259471 - DNA, 260 bp, Homo Sapiens
  misc_feature (227)..(227): n is a, c, g, or t
acatgttgggttatagtctagagaacaggtaagcaatctgctcaaggtcagaaacaaaatatctttaatcactgaggtctccattcttcatttagatcttttaacaggactttgcttgatatatgttaagaaatatgcctaaaatcacttctgttcagaagtgaatcagttactattagaactgacattttcattaagcaaagtctgtgttaagtgcacctatgaantactgcggaaatttacttccaaatggccatcaa

SEQ ID NO: 259472 - DNA, 701 bp, Homo Sapiens
  misc_feature (325)..(336): n is a, c, g, or t
  misc_feature (639)..(657): n is a, c, g, or t
gatactcaagatctttactgatttaactataacagcaaccattgatgagaatttaattttttccttaatttccaaacatctgctggtttggaagaatagttaaaatacaaaaacaactgatcatggaatcacacaggactgcctcaaggactgcgtggtaccctctgctatccatccacacacagtgaaatggatgggagggatgagggaacaacacatcatgggagacaaagggaagaccaaggaaagtgctggcagtctccgcttttccattcagaatggatggaactgggccgttagtggcactaagacagggcagggctannnnnnnnnnnnaaataaaatattttaaagatgcataaaatggacaccttagcacgtgagtgtcctttgggctcttcaagacaccttctttaaggtttacccctggagtagcagagggtctcctcacccaggtggaaagagatgggctccatctgcagatgaaggaaaggcactggcgcacagcactcagcaatgtagatacaggcaccaggtaggagcaggatggcttacccagcaacctgcctcttagctccctgctagtgttcttccctcctccccagtttccagttaaaagtacccttggcctgggctttnnnnnnnnnnnnnnnnnnngattaagctggagagaaaggggatacacttgggcaagaatggat

SEQ ID NO: 259473 - DNA, 479 bp, Homo Sapiens
ggggcaccagtccacaaactgaatgctgcgcttggtcttgatggcggcaatggcagcgttgacatccttgggcaccacatctccacggtacagcaggcagcaggccatgtacttgccgtgcccggggatcacactttaccatctggttggcaggctcaaagcaggcattggtgatctctgccaccgacagctgctcgtggtatgccttttctgcagagatgactggtgcataggtggccagggggaagtggatgcgagggtagggcacccaggttggtctggaactctgtcaggtccacattgagggccccgtcaaagcgcagagaagctgtgatggaggagacaatttggctaatgaggcgattgaggttggtgtaggttgggcgctcgatgtctaggttgcggcggcagatgtcatagattgcttcgttgtccaccatgaaggcacagtctgagtgctccagggtggtgtgggtggt

SEQ ID NO: 259474 - DNA, 1074 bp, Homo Sapiens
acggcagagcctttaaccatggtgcaaatctcattctgcgctggacagttcacactggtgagaaatcctttggatgtaatgaatatggaaaagctttcagtcccacctcacgacccactgaagatcagataatgcatgctggggaaaagccctataaatgtcaagaatgtggaaacgccttcagtggaaagtcaacccttattcaacatcaggtaactcacactggtcagaaaccatgtcattgcagtgtgtatgggaaagccttcagccagagttcacagctcacaccacctcagcagactcgtgttggagagaaacctgctttaaatgatggctctaaaagatactttattcatatcaagaagattttccaagaaagacatttttaatgtgataaatgcagaagacagtttagcaactgttcacttgacattagaagataagatggcataatgaaagatatataaggtctaaatattactggcaaagtaaaataaatagttcagatgactactaaagtcaaagtcattaaatctggaagtaaacacgagaattcattctgggaaatcaggctgtctgtgtaaaggttactgctgtgctcaggagttgaaccgtgtggtgctgtatccggatactcatgacgaatggatggagggcgtgaaaagtgagcccagctggtgctctgggtctaccctacctgacatccttccagtcttatcctttgtttcctatccaggcccaggcttgtggctgagaacatccactttcagtcccatatacctgcctccaagtgtggtacagagaacttgggcctgctgggggcgcttagccttactctctcccaccacctctcccaccaaccccccagatgaactgcaggtagacgtttcttccttgcttggagccccagtttttgcatttcattttcattaaaatgaaaggtggtttggttttggttctaaggagctctacagtttaacagagagagggaccttaggggccaagaaagcaggggcctaccaagtatctccacttttgaaaattgtaattactgataaaaaattttttaaaggc

SEQ ID NO: 259475 - DNA, 704 bp, Homo Sapiens
ctaaacagagatgtagcctcgggacagcgtgtggttctagcctgttcagccctgaagaaaacgtacagagacatattaacacaaggaaaagatggtgtagctctgaagtgtgaggagtcgggaaaggaagcaaagcaggctgagatgcagctcctggtggtccatctgagcgggtcgtttgaggtcatctctggacgcttactcaaaagagagggacattttatgccccctgaattattgcagtcccagtttgagactctggagcccccagcagctccagaaaactttatccaaataagtgtggacaaaaatgtttcagagataattgctacaattatggaaaccctaaaaatgaaatgacaatgattttgtatcagtggtccaaacagaactaagcataaatcattgtgccatcccaaacctcgttccagccgccttgcccatactagattctaaatgtttctaaaggcaaaccccaatgtgtcaagacagacttgtttaggtgtaattttaggaattatactggttcatcaggaagcagagggggagttttaaaagtcaagcttaaattgaagtttaaattcatctataaccaaatcaaatgatcagaggaaattctgtaatcaatgctggaaatcgttacattgtttagaacattcttgctcatgcctgtatttgcacaaataaatgaaacttcgctgtca

SEQ ID NO: 259476 - DNA, 776 bp, Homo Sapiens
  misc_feature (503)..(512): n is a, c, g, or t
ggggacgcttccggcgtagaaaaatggcagccgccgctccggactcacgtgtgagtgaggaagaaaacctgaaaaaaaccccaaagaagaagatgaaaatggtaactggagccgtagcgtcggtgctggaagacgaggccacagacacttctgatagtgaaggaagctgtggatcggaaaaggaccacttttattctgatgatgacgcaatacaagctgacagtgagggtgatgctgagccctgtgacaaagaaaatgaaaatgatggagaatcaagtgttgggactaatatgggctgggcacatgctatggctaaagtcctcaacaagaaaactcctgaaaggaaacctactattctggccaaaaataagaacctggaaaaggaaaaagaaaagttaaatcgcccggctccttgcgccgacccgggaccccaccgtgtccggccgccctccggcctcccgaacaagcttttcccaaacccctttccttttggccgcgcgcgnnnnnnnnnnaggtttaagcggaaacatggggcccatagccgttgtcttccctaaagggacaaaccttcgcggcctttggaccaagtgcgcctgccggacttccccccacgcaacacaaaaccaccccgcccccggggcggtcctaacaccggaagcggcgccccggcaaacgcaaattccgccaaagtgggacgccctcctctgtagtggttttcctcacccggcgttactgcccactccgccccatacggtgacgcccgccatcgcctcgaa

SEQ ID NO: 259477 - DNA, 1015 bp, Homo Sapiens
gccaggggaaccagtttggatatccgggacccaaaaggggccaagggaaaggtcctgggggcctgaaagtggggaacaaggggcaccaaaaaaagccaagtgggggcaggtggtgctggccaaaggtcagaggctgatgcaacaggccctctttctcccccagggcccaggctcctgtccagcctgggcactgcccagagtgatggcattggtccggatgctgttctgtctctgcttggacaccttcgcaaagatttctttcaggacagtctcaaaggctagctcaacattggtagagtccagggctgaggtctccaggaagagcagtccattgttttcagcgaacattcgggcctcctcagtgggcacttcccgggcctggctgaggtcacttttgttacccacgagcatgacgacgatcgtggcttcagcatggtcatagagctccttcagccatcgctccaccacagcataggtctggtgcttggttaggtcaaacaccaggagggcccccactgcaccacgatagtacgccgaggtgatggctcggtaccgctccaggccagctgtgtcccagatctgagccttgacagcagcggtgcccaacatcacagtgcgggtggagaactcaaccccgatggtggtgcggctgtcgtggctgaactcattgcgcgtgaatcgggagagtagattggtcttccccacacctgattcgccgatcagcaccaccttgaagacaaagttataatcttcctcagttccattccccatcttggctccgcatggagggtgcaggtgtcttcggggacagaggcgacaaatctgtgtgttggctcaatgccctcaaccctcagctctcaaaagatctggtcctgcccctcctctcattgggggtaaggggacttctgcagccagagggattgggggccaactcaaggttaggcagggcctagggaggatcagctctggcaggtgggggtgctgtaaggaagcagagaggacggaagctgagccc

SEQ ID NO: 259478 - DNA, 927 bp, Homo Sapiens
  misc_feature (788)..(798): n is a, c, g, or t
aagtgacaactgcagccgcacgtgggctcggcgcgatggaggaggagatgcatactgacgccaaaatccgtgctgaaaatggaacagggtccagccctcggggtcctggctgcagcctccggcactttgcctgcgaacagaacctgctgtcgcggccagatggctctgcttccttcctgcaaggtgacacctctgtcctggcgggtgtgtacgggccggccgaggtgaaggtcagcaaagagattttcaacaaggccacactcgaagtgatcctgaggccgaagattgggctgcctggtgttgcagagaagagccgggagcggctgatcaggaacacgtgcgaggcggtggtgctgggcacgttgcacccccgcacctccatcaccgtggtgctgcaggttgtcagcgatgccggctctctcctggcctgttgtctgaatgccgcctgcatggcattggtggatgcaggtgtgcccatgcgggctctcttctgtggggtcgcctgcgccctggactctgatgggaccctcgtgctggatcctacatccaagcaagaaaaggaggcccgggcagtcctgacctttgccctggacagcgtggaacggaagctgctgatgtccagcaccaaggggctctactcagacactgagctccagcagtgcctggctgcgccccaggccgcttcccaacacttcttccggttctaccggggatcgccgcacaagagttactccaccatctgaggcacgctggggcaagggggccgctcccattgttccccctacttnnnnnnnnnnnaccatgtatgcccttatcccgccccatccttgcctccctgaccccctggggtttcctccaaacttctccgccctgctcactcgcccggctctcccctgtggggtaaccccccgcgcccccattcccacc

SEQ ID NO: 259479 - DNA, 1187 bp, Homo Sapiens
gcaaggcttgcatagaagaggtaaacacgttgactcctgagtttaggggtttggcttagagattggtggatgaggcagggccagggggtcccgttggtgccatctgctgttgtgtgttgaaagccacttgcttctctgggcctgacatcccctcccctttcatcttccatgtttgaggattgtgtcacggtgggagagaaactcaaaacttcctggagagaaatggaggtgtcatcctggtccccccgggcctgtttctcttatccttcacgaggaaaggaagaaaccaaaatcccaacccaagccatcgcatgggcactgtccgaagcctgttctgcctcccagatgaataaatatataaaacaaagctctggcaggcaatgctttggtcttctctgtctttgaaataaaacaaggccggcgaggtctcaggaagggttctgggcagggacgggactccaggcagatgttcacgccacgtcatcctccagactgaccatctgtctcgaggggtagctgtagccgtcctggttgtggcaaatgtggacctcatcctctgtggtcttctgatagacggggttgtcaaagttgatgctgttgatgttcttaagccgccagttcttccatagaaggaagacccccaggcaaaggaagacgaggagcacgatggggaggacaatggacagagccctcacgctactgggcttcttctcatttcctctgccagcaacgtcgcccagagcttggtgagacattgtcactatctccaccgtggtgagcccaggggtggccccaggcagccgggaggtgtcgggaacaggtcgggtggttgtgtgctgtgtccttacggctgtggagctgacctttagcctgacggtggatgtctcctgggtggccactgcagcctcaaccctctgtgaaggcagctccctcatgtccccgggccagcagcatgccagtccgggcaggcgcaggtaaacttgggcgagtgggggttgatctgcggggcagggaggcacagataactggcagccgccattgctcagggtggtcctctcacaccagttcactcctcttggctgggtgaggttgtggaagagaaccatatcctctggggacagtaggttttcagccaacaagttgacatcggaacctgtgaggcggttggcactgaaaatggcttcgtt

SEQ ID NO: 259480 - DNA, 653 bp, Homo Sapiens
cggcacgagggctctccattatgctgtgtatagtgacagcacctcactggcagaaaaactgctttcccatggtgcacatattgaagcactggacaagtgtaaaacaacacatgaaagaaaatattccctggaaataggctttatcttaaaactcaaacaaaactaaagcaacttacaataaagggacatgttgctgttgctgctaattttctgaaaaactgatgtatcatctctcagtggcaaggcttaagaggacaataataccccacttttattcgctataatttgcaagaaagagaaaatggtggaatttttattgaaaaagaaagcaagtgcacaatgccgttgataggctgagacggtcagctctcatacttgctgtatactatgactcaccaggtattgtcaatatccttcttaagcaaaatattatcttcgctcaagacatgtgtggacgagatgcagaagattacgctatttctcatcatttgacaaaaattcaacaacaaattttggaacataaaaagaagacacttaaaaaggagaaatcagattgtgggaagttccgatgaatctgcagtcagcattttccatgaactgcatgtggattcattgcctgcatcggatgacaaagacttgagtgttgctactaa

SEQ ID NO: 259481 - DNA, 541 bp, Homo Sapiens
gaaaaaagaaagtgaagtctttaattttcttaaataatcctcatatgtactatccacattgtggaaaaactgaaatacgcagtctggacactgcactgagattccggcatactggcacagacacagctatgtcgcatcttacagactacaacagacaacaggcttaactgcaagaggtttacagacaaaactttacatagatgtgctagaagaattccaaactgctgtcaaagagagtataggaatcggtctgaagagaactccgcccagtcccttctgtttggtcactgcagctgcactctgtatgcacctattagcaacttaaccttggcagagggtgcttctgtcaaccttatgaagagtttattgggacctgcaacagggctgaatgagtaaacaaaatgactgtccagaaaaacaggaagctgaaatttatcattcagaactacagcttgtacactacacggtccacagagccgagcaataacttctttacccaaaaagtttgcatggaagataaacagcaggatgccagagcctt

SEQ ID NO: 259482 - DNA, 509 bp, Homo Sapiens
tttggaattgtttttgtgtcttctgggataagggggaagaggaagattatatcttgtgttttgggcatgtcacactagaaatagttcctttaaggtgatgatttttccctccaacagattaatgctgaactgttgtttcggccaactgctctttcaactccaagcttttcttctcctaaggaaagtgttccaagaagacatctttcagaaggaacaaattcttatgcgacaagacttctaaataatcatcaagttccacctcagtctggaacctgagagccaacaggtccagtggctaagattggttttccatttggggaatattaaacagagcttttacttgacacttctgtgacagtgatgcaattcgggatcattgtaggttccattgtgaattgtaggttccatgaatgtgaaaatcttcaggacaaattgtcttgcttttattgtctaaacttaggctaaaccctacttctgccacctgttaaattcgttaaaaagtattaatt

SEQ ID NO: 259483 - DNA, 815 bp, Homo Sapiens
  misc_feature (27)..(27): n is a, c, g, or t
tgatgtccacctatttggcttaatagnacaatatgcctggaggaccaaccgtctgtgcagactgtggcagaatttaagtgatgggtatgactagaacggtagcctacctggataggctgaacccctcagtgatagtcccattacctccattacaagagagtctcaagcccaccatgcacacaatttaaaacaaggtccaaacctcagaagagggcaggctgacaaggctaaaagcctctaggtggtcttgttccaggaataagccaactaaaacttctccaatgaaggccaagttgtagaggtgataggtggagaagctataataatctgaagatagagagtccatttttccaaaacacacattcagtgtctgtcctcccattcactcaacctaactttccccaagttatagaacttgaaatcagtaatccacaaagcaaagaagcaggctataggattaacacaggtggcataattaaaataaaagaggggagggagattttaaaacaatctgccagagaaaaatgacaaatgatttggctttgtagctccttctggcttgagcagttaggagcctgagggctgaggcagcaggggcagcaggacctaaagatgacaagcaggcagagctcatctgggccaggtcactttcaagagctggggctgcaacacagaacatcaccactggccctgagagcacatttagctgtttttttgcaggaaccaagggattgagacagtggcagaaccctcactggagaaaaaggaagatgacagaaagccacactgacaaagaaaaattgcaaatacacagg

SEQ ID NO: 259484 - DNA, 812 bp, Homo Sapiens
  misc_feature (368)..(408): n is a, c, g, or t
  misc_feature (719)..(719): n is a, c, g, or t
  misc_feature (796)..(796): n is a, c, g, or t
gggtgataactgagaaaggggcaggtgttaccatatacttgaattgacctagatgcagtacagagcaccactggattttaaaacaaccaatttttatggctccaaaaataatgtaaaaattctagggaaaaaattacagataatccactactcagagatcacaactcttaaccttagagttgctccttttagctttatttttcttctgcaaatgtctgtgtatttatttacattttcttttatagactcgggtcattatatatataaacataaaaatatagtttcggatcctattttagcactaattatatcttccgagacactcaaattttttccctttgttaaactagtgatacatccttatttannnnnnnnnnnnnnnnnnnnnnnnnnnnnnnnnnnnnnnnncatgatgctaccatccaatatgactcttggcagccctttccacatactaattataaccgaagcttaccctattctgatccttactttcaatctatctgcaatacgggggcagatagccttctggcatattgttatccacgagagcctcatttctgacacccttccacccctcagcaattttttgaagtttggagtgaccctgacatccttcagcttttagcactctctccttaccttctgagctgttcttcactctgtggccagagtctgtcttgcctttggtgggtagggcactggagtgcctaaggatnaatgaactgtctctgtctttttatccacctggttttcccttttgccaccctggcagtggtagattggtaaaaccggnagggaaagttctgttc

SEQ ID NO: 259485 - DNA, 1326 bp, Homo Sapiens
gggaggaaccggaacccgcggttataaagtaaaggaacccgagatctgcgcaggggttccctttgccgatttctctcacctcacctttcaaacctaaactcgagcctactgttcaccggcctagcattgctctcgccatggctctcagcgatgctgacgtgcaaaagcagataaagcatatgatggctttcattgaacaagaagccaatgagaaagcagaagaaatagatgcaaaggcagaagaagagttcaacatagagaaaggtcggcttgtgcaaacccaaagactaaagattatggaatattatgagaagaaagagaaacagattgagcagcagaagaaaattcagatgtccaatttgatgaatcaagcgagactcaaagtcctcagagcaagagatgaccttatcacagacctactaaatgaagcaaaacagagactcagcaaggtggtaaaagatacaaccaggtaccaagtgctgctggatggactggttctccagggtttgtaccagttgctggagccccgaatgattgttcgttgcaggaaacaagatttccctctggtaaaggctgcagtgcagaaggcaattcctatgtacaaaattgccaccaaaaacgatgttgatgtccaaattgaccaggagtcctacctgcctgaagacatagctggtggagttgagatctataatggagatcgtaaaataaaggtttccaacaccctggaaagccggctggatctcatagcccagcagatgatgccagaagtccggggagccttgtttggtgcaaatgccaacaggaagtttttggactaagccttcaggaggtggagctcgtcgtcagctctcctgctgtgatgtggaagcttctgatatttgaagaaacacgaatgtctctgtagcttcctcttcactgccccagtattgctctgtatttatcagcgatgcccctctgtcactcatgccttgcctaattgttcacaatggtggaaagcttcatgtaatatgatcaggacccacctccagttcttctgaaagtgtgacagtgtccagccggttctgcagcactaggggagggggcagatggtggttgcatgggcttcctgggtctccactctccgtctggcctaaaggtgatgtatttggtgtttggccctgcagtccccactcttgaggcttaaggcgcatgtggcacaccactccttccagcagtagtcgctttactgttacctgtttaggcctagaagttttccctcatctgtaaatgtgatttaaaatctaagccatgaatatgctttatttattaaaagagttatgcggaaaa

SEQ ID NO: 259486 - DNA, 1698 bp, Homo Sapiens
  misc_feature (45)..(45): n is a, c, g, or t
aggctggaccggtccggattcccgggatggcctctgcatagtgcnaacattctgctgctcttaaagaccctcatccctcccgtgggagccccctttggacactctatgaccctggaccctcgggggacctgaacttgatgcgatgggaggctgtgcaggctcgcggcggcgcttttcggattccgagggggaggagaccgtcccggagccccggctccctctgttggaccatcagggcgcgcattggaagaacgcggtgggcttctggctgctgggcctttgcaacaacttctcttatgtggtgatgctgagtgccgcccacgacatccttagccacaagaggacatcgggaaaccagagccatgtggacccaggcccaacgccgatcccccacaacagctcatcacgatttgactgcaactctgtctctacggctgctgtgctcctggcggacatcctccccacactcgtcatcaaattgttggctcctcttggccttcacctgctgccctacagcccccgggttctcgtcagtgggatttgtgctgctggaagcttcgtcctggttgccttttctcattctgtggggaccagcctgtgtggtgtggtcttcgctagcatctcatcaggcccttggggaggtcaccttcctctccctcactgccttctaccccagggccgtgattctcctggtggtcctcagggactgggggagctgggctgctgggggccctgtcctacctgggcctcacccaggccggcctctcccctcagcagaccctgctgtccatgctgggtatccctgccctgctgctggccagctatttcttgttgctcacatctcctgaggcccaggaccctggaggggaagaagaagcagagagcgcagcccggcagcccctcataagaaccgaggccccggagtcgaagccaggctccagctccagcctctcccttcgggaaaggtggacagtgttcaagggtctgctgtggtacattgttcccttggtcgtagtttactttgccgagtatttcattaaccagggactttttgaactcctctttttctggaacacttccctgagtcacgctcagcaataccgctggtaccagatgctgtaccaggctggcgtctttgcctcccgctcttctctccgctgctgtcgcatccgtttcacctgggccctggccctgctgcagtgcctcaacctggtgttcctgctggcagacgtgtggttcggctttctgccaagcatctacctcgtcttcctgatcattctgtatgaggggctcctgggaggcgcagcctacgtgaacaccttccacaacatcgccctggagaccagtgatgagcaccgggagtttgcaatggcggccacctgcatctctgacacactggggatctccctgtcggggctcctggctttgcctctgcatgacttcctctgccagctctcctgatactcgggatcctcaggacgcaggtcacattcacctgtggggcagagggacaggtcagacacccaggcccaccccagagaccctccatgaactgtgctcccagccttcccggcaggtctgggagtagggaagggctgaagccttgttctccttgcaggggggccagccattgtctcccacttggggagtttcttcctgcatcatgccttctgaataaatgccgattttatccatgga

SEQ ID NO: 259487 - DNA, 1495 bp, Homo Sapiens
  misc_feature (26)..(26): n is a, c, g, or t
  misc_feature (31)..(31): n is a, c, g, or t
  misc_feature (52)..(52): n is a, c, g, or t
  misc_feature (62)..(62): n is a, c, g, or t
  misc_feature (102)..(102): n is a, c, g, or t
  misc_feature (145)..(145): n is a, c, g, or t
  misc_feature (1428)..(1448): n is a, c, g, or t
gccgcatcaatgttgtggggatttcncggcnccttttcatggcccttctaantgggataccngtaaaatggctagggggaggcatggttttgcttcccaganttataaaatacctggaaagggaattaatctcattcctataccnggaaaacccaaatattctttctagagaaccagcagaaccaaagtagaacatctactacggctgtctccccagcctcaatctgacttcaagaataactttacatctgccattgtcatgaacccccagcttcctccagagaagccagggcacccatgcttctacacggcccatggaagcaaggttgccacttgtacccaaacctgtagagagtgagggtttcttatctcccctcccctaggagcaggaattgcaaatagcatcattgtattaatatgattggtaaatgtttgaacaacttggaaataaagttctcaagttcctaccagtaatatgagtctgtgtgtgaggagagaaatggggtgggggaaatgcctctcatttcccatacttctttaaatttgggggaagtaagagtagaggggatatatacggatatgttgtgtggataggtgagaatggaacccaatatatgccccccaaaagcataaacagagccttggctggctggctaccaatgtaagacacaaaagctatttaattaatcatttatggcagagaaaagaggaatcctggacccatcttgtaaagaaagagaaataggttcaactattctttttttctcaagcgaataccaatgttctacgtgaagataccacctcatctctgtttagaaaatgcacaaatatcaatgctgaaaaccctcacatggaagttacaaaatatgcaagaattagtcattgtttctcagattactcacacttaacctgagatgctaattatcctctgctcctccaggtctcctgagcagatttacatcctaatttccaatgaaagtcaaaaggctacaaggaagggaaggagggagaatgcaaaaggggaaatcagtgttggaattgaggaacgttataaaggtctgaaaaatgactggtggagattaaagaaagtggcaagaactgaggagtctcaaatagactgtaaaccctggaaggggtctgtgcttcacacccgggggcctagcacaaaccgaagacacagtaaatgctacttgagtagcagaggtgaagaaaatacattgttagagacttcatggttgaaactctaatacccaaggagtcattctacctccactgcccctaacagcctaaaatggctttgaaaggtcttggcaaagaagctgcctctggtttttctgtagttgtcatcatggccacactgatttctggggctttcaaagcagaggaaaatgctgtcgaagggaatgatgactccagaatattaagagnnnnnnnnnnnnnnnnnnnnncggacgcgtgggtcgacgatatcccgtaattccggaccggtagctca

SEQ ID NO: 259488 - DNA, 458 bp, Homo Sapiens
  misc_feature (18)..(18): n is a, c, g, or t
  misc_feature (26)..(26): n is a, c, g, or t
accttccaaggaaataanctttaacnacctgccccattgtccatgaaaccccccagccttccctcagagaaacccccgggcacccatgccttcctacacggcccatggaaagccaggttgccccacttgtacccccaaaccctgtagagagtgagggtttccttatctcccccctccccctaggagcaggaattgcaaatagcatcattgtattaatatgattggtaaatgtttgaacaacttggaaataaagttcctcaagttccctacccagtaatatgagtctgtgtgtgaggagagaaatggggtgggggaaatgcctctcatttcccatacttctttaaatttgggggaagtaagagtagaggggatatatacggatatgttgtgtggataggtgagaatggaacccaatatatgccccccaaaagcataaacagagccttggctggctggct

SEQ ID NO: 259489 - DNA, 982 bp, Homo Sapiens
  misc_feature (881)..(881): n is a, c, g, or t
ggggggggaagaggcgtggcggcgctgtgcgcgtgcacaaaagagagctgaggggcgggggcgctgcggcacagctggtttgagcaactgaactggaaacaagatgcaggaccccaacgcagacactgaatggaatgacatcttacgcaaaaagggtatcttaccccccaaggaaagtctgaaagaattggaagaggaggcagaagaggagcagcgcatcctccagcagtcagtggtgaaaacatatgaagatatgactttggaagagctggaggatcatgaagacgagtttaatgaggaggatgaacgtgctattgaaatgtacagacggcggagactggctgagtggaaagcaactaaactgaagaataaatttggagaagttttggagatctcagggaaggattatgttcaagaagttaccaaagctggcgagggcttgtgggtcatcttgcacctttacaaacaaggaattcccctctgtgccctgataaatcagcacctcagtggacttgccaggaagtttcctgatgtcaaatttatcaaagccatttcaacaacctgcatacccaattatcctgataggaatctgcccacgatatttgtttacctggaaggagatatcaaggctcagtttattggtcctctggtgtttggcggcatgaacctgacaagagatgagttggaatggaaactgtctgaatctggagcaattatgacagacctggaggaaaaccctaagaagccgattgaagacgtgttgctgtcctcagtgcggcgctctgtcctcatgaagagggacagcgattccgagggtgactgaggctacagcttctatcacatgccgaactttcttgtgacaaattgtctggattttttanaaaaggaaaaagcaagaatgaatccttgtggtttttagttttgtataaattatgtttcaaatctttacattttggaaataatcattgctggagattctgtt

SEQ ID NO: 259490 - DNA, 968 bp, Homo Sapiens
  misc_feature (463)..(491): n is a, c, g, or t
  misc_feature (553)..(611): n is a, c, g, or t
ggcggtaccggtccggaattcccgggatatcgtcgacccacgcgtccgtatgaattagggcttggagttggtaaaaacattcctgactatccttcttaaccacgtggctgatgtggggtaggtatgaggggaaggaagtggagtagcctaatgaaaaggggttctagttgagctctgtagataaatgccttgtttcagtgtggttggagacctggtgtcagataaaagaaactccatccgcacagacagatgcaaacagctcctctagttctgcagagctagttgagaactcaacattaatcattttaaaaagtactgtccttgaaatagatttgctgtgggaagaagggcagtgagtgtgggagaaaggagccgtgagcgtggggaaccccacagagcccaaaggactttttcagtattcgaaataaacaaaacaaaaacccatgaaaaaacccaacccagnnnnnnnnnnnnnnnnnnnnnnnnnnnnngagcacaaacacacacaacacacgaccacaaaagacgacgaagcaaccagaagaacatacannnnnnnnnnnnnnnnnnnnnnnnnnnnnnnnnnnnnnnnnnnnnnnnnnnnnnnnnnnacgacaccgcaaagagaaagaaaacagcacagcaacaccaccatatacagaacacaagcgaaacgaaaaagagaaggagggagcgagaaacagacgtacggaagcagagccaccagtgatatcaggagaaaatcaagcgtacgaacggaacgaccacacgacgctgctgggccgactgatggtactcgacctcatctgagcatgcaatgcgataaatcaccgcgaacatgagcgaggcagaaaaaggaaagcagaaaaggagcagaaagaaggagaacggaaagaggggcgacgcagaggagagcgggaagggaccgaggaaaggaaggagaaacagcagaacaagagagacagagg

SEQ ID NO: 259491 - DNA, 983 bp, Homo Sapiens
  misc_feature (618)..(618): n is a, c, g, or t
  misc_feature (627)..(627): n is a, c, g, or t
tgaaagtaaacaagggcaacattatcttaggtttgtctctgaaaacattcaggacgcatcactgagtagtgcacagttttagtctgtgagcacgcttcagtgaaattatatcaccactgaccacaaaatcttcaaatcccagagttgaagaaaacacttttagtcagttactaatggagaaaaaataaatataatttggttgcaacctcgtaagttgcttcctgttctataatttaaaataactatcttaaattagtagtttaatgagtgagcaatttagcacctgatactgctgagaaattaatgactctgcactgcattaaatttaaaaaatgagctttaataaaattacagtaaattttaaatatgatttcctacttattcatggattctagaagcttattttatgatggtaatcttcagtttaggtcttggtgaaataatttcaagccttagccattggcatttggtcagtatgtgtatgtagtgtactatgaatgtgactcagccatatactacaactgagacaaggcaatcaccaaggtcacatacctagtacaaccccatctccaggccacccatttaccaagtttgtggccctcatgtaagaggtgaccnaagatgcancctgcaccaagagcaccaagaggattgtctcaatccttaagagaaagaagaaggtaagggctggggatgaggggtgcacttaaaccagaaatgagacatggccctctgtggctaggatcctaacttcagattgctaatttatcccattttacttaggcccaaaatgacaggctgaatacttttattggaaatgaaacattccagagttagacatgtttactctggacagtcaaggacagcgatgtgtagggaaagtttggttcatgcaaaaatgaatgaaattttaatacacttaaagttacttctcactctgaaaataataccaaagtagagtcaataaatattaattcttccag

SEQ ID NO: 259492 - DNA, 1387 bp, Homo Sapiens
  misc_feature (1211)..(1211): n is a, c, g, or t
agttcagtgggcggaagaggtggctccggatgctgcggcgcccgctggccgggctggctgcggccgccctgggccgggccccaccggacggcatgtcgggccccaggcctgtggtgctgagcgggccttcgggagctgggaagagcaccctgctgaagaggctgctccaggagcacagcggcatctttggcttcagcgtgtcccataccacgaggaacccgaggcccggcgaggagaacggcaaagattactactttgtaaccagggaggtgatgcagcgtgacatagcagccggcgacttcatcgagcatgccgagttctcggggaacctgtatggcacgagcaaggtggcggtgcaggccgtgcaggccatgaaccgcatctgtgtgctggacgtggacctgcagggtgtgcggaacatcaaggccaccgatctgcggcccatctacatctctgtgcagccgccttcactgcacgtgctggagcagcggctgcggcagcgcaacactgaaaccgaggagagcctggtgaagcggctggctgctgcccaggccgacatggagagcagcaaggagcccggcctgtttgatgtggtcatcattaacgacagcctggaccaggcctacgcagagctgaaggaggcgctctctgaggaaatcaagaaagctcaaaggaccggcgcctgaggcttgctgtctgttctcggcaccccgggcccatacaggaccagggcagcagcattgagccacccccttggcaggcgatacggcagctctgtgcccttggccagcatgtggagtggaggagatgctgcccctgtggttggaacatcctggggtgacccccgaccagcctcgctgggctgtcccctgtccctatctctcactctggacccagggctgacatcctaataaaataactgttggattagaaactccaaacaaacgcgaacgagatcgcggcccagcgaggcaacactcgaggcatctttggtccggtgcttgacaaaaaggcattgaaccgcccacagggatcatgctagtctccgaaacccaggttatctttgaacaaacaggtaaaaaagcgggggcgaaccccgaatgggagcggcgcggtgcacctaccaaggaacgccgacgcgccggcgcggcttgcagggagtggcccgccagcgaccctacaagatgcaccgcccctccaaaacaaccggncgctgcattcatccgcgtccggggaaaggcccacgatgcgcccatcgtcgaccagttagaaaaactacacgcgcgctaatacacaagaagacaagctccctctcgtaaaatcgactcaccgcttctctgtcacactgccccggcgtaaccgtccggctatgctcgcacccgggaca

SEQ ID NO: 259493 - DNA, 889 bp, Homo Sapiens
gaacgcagtcagaatgattttattgaaatgttttagtacagtgttagaggatcttaaaatcttacattttaaaccaatacaagcactgcaaatgatatactcctgaatctagttgatgtagtatctaaaaagaaaagtgatcatatgagtatctataagttgactaatgtaatttaagttggaggctaaacaaacaactttggtatattcatatttctctggctcctgtttttggccagataaatgccaggtccacccccattcagtagaattggacaggaccaatgtatttggtggtctcacttaagtttccacgccaggagcagcaagaaatgtacaaattttgggattaagctgctcccaagacagtcttcatcacctttgtgaactggaaacaccaaatagtcaaggtctgaatttccattgtgtgtggctaagtccagtcgcattggttcataaatgtattctgaaggattttaaaatacaaaggtggggctaaataatgatagaaaccatcagttcttaattcagagaatgacaatgcaggttcctatatcctttttaaaaatctgagatcattattttaaaactagctctatacattcttaggctttaaatttaatcttagctgaaatgattacctttaagtcagttggctttaggccttggcgattgctcaatataattttggaattttaggatgcagcatttcaggtaagtgacagttatgttttagaagaggtcatttaaaaaatgatccagaaatacactgctctgatatgtctaatgtataccccccaaaatgtgtcagtgtccatattaagctaaataaaatttggtccaaattaagcacagtaaccaagatggtttatttgaaactgagttatcc

SEQ ID NO: 259494 - DNA, 866 bp, Homo Sapiens; identical to SEQ ID NO: 178129

SEQ ID NO: 259495 - DNA, 1344 bp, Homo Sapiens
gggtggcgaattcggcacgaggaaaaacagatcaaaactatgaaaagatgatgtttaaagaagctttgaaaacagggttttttgagtttcaggccgcaaaagataagtaccgtgaattggctgtggaagggatgcacagagaacttgtgttccggtttattgaagttcagacacttctcctcgctccattctgtccacatttgtgtgagcacatctggacactcctgggaaagcctgactcaattatgaatgcttcatggcctgtggcaggtcctgttaatgaagttttaatacactcctcacagtatcttatggaagtaacacatgaccttagactacgactcaagaactatatgatgccagctaaagggaagaagaccgacaaacaacccctgcagaagccctcacattgcaccatctatgtggcaaagaactatccaccttggcaacataccaccctgtctgttctacgtaaacactttgaggccaataacggaaaactgcctgacaacaaagtcattgctagtgaactaggcagtatgccagaactgaagaaatacatgaagaaagtcatgccatttgttgccatgattaaggaaaatctggagaagatggggcctcgtattctggatttgcaattagaatttgatgaaaaggctgtgcttatggagaatatagtctatctgactaattcgcttgagctagaacacatagaagtcaagtttgcctccgaagcagaagataaaatcagggaagactgctgtcctgggaaaccacttaatgtttttagaatagaacctggtgtgtccgtttctctggtgaatccccagccatccaatggccacttctcaaccaaaattgaaatcaggcaaggagataactgtgattccataatcaggcgtttaatgaaaatgaatcgaggaattaaagacctttccaaagtgaaactgatgagatttgatgatccactgttggggcctcgacgagttcctgtcctgggaaaggagtacaccgagaagacccccatttctgagcatgctgttttcaatgtggacctcatgagcaagaaaattcatctgactgagaatgggataagggtggatattggcgatacaataatctatctggttcattaaactcatgcacattggagatttatcctggtttcttaagaatactactactctgattgtgtctactgattggctatcagaaccttaggctggacctaaatagattgatttcatttctaaccatccaattctgcatgtattcataattctatcaagtcatctttgattcctggacctaataaattttttttccctttctttgggtgtctaa

SEQ ID NO: 259496 - DNA, 941 bp, Homo Sapiens
  misc_feature (207)..(208): n is a, c, g, or t
  misc_feature (326)..(381): n is a, c, g, or t
  misc_feature (452)..(564): n is a, c, g, or t
cccaccctttttcatttcccaacattttttggctattatgatcgctatgtgttacttcaaataatttccagtgaatccacacttgatgttgcaaagcctaagtttgctgcagaaatacaatttcctacacttcatacctaaaggagattcagagctatcgctcaaaaccaaaagtcttggtttttaaatgtgcttagacaaaaaaanntcaggaaaggtaccctaatcgttcaacagcaatcatctttggggaatgggcattttggtaggtaaagtgtggtggacgtccttattattatttttgagacagtgtcttgctctgtctnnnnnnnnnnnnnnnnnnnnnnnnnnnnnnnnnnnnnnnnnnnnnnnnnnnnnnnngttcaggtgattctcatctcagcctcccaagtagtgtgaactaggggcatgtgccaccacgcctggctaannnnnnnnnnnnnnnnnnnnnnnnnnnnnnnnnnnnnnnnnnnnnnnnnnnnnnnnnnnnnnnnnnnnnnnnnnnnnnnnnnnnnnnnnnnnnnnnnnnnnnnnnnnnnnnnnatgagccaccatgcccggccccttattttactttatcctcctgattatttgaatttgttacactaagcatgtattttataatccaaaaataattaagatttaaaacaatgtatttgacctactaaaaagcaaattatataaatcagttgaataataatgttgttaaagaggctgtttagcactaatttgaccaaatctatagtcaaagtttgattctacttgaattttttggaaatttgctgttgtattacttattctttgccttgttctctgtgaagtcctttcctaaaaaagaaacttatacaatttagttcacaaaactttgttgacctctttctctgtagaaatgaaaactaaatatatataattgagaaata

SEQ ID NO: 259497 - DNA, 1315 bp, Homo Sapiens
cctagagaaacagcgcaacagaattggctgtaggaccatagtctattgggggattggtaggaaccgttaccagctggaaattcctgagaatttcaccactcgcaatttgccagaagaatacgagttgaaatctaccaagaagggctgtaaacgatactggaccaaaactattgaaaagaagttggctaatctcataaatgctgaagaacggagggatgtatcattgaaggactgcatgcggcgactgttctataactttgataaaaattacaaggactggcagtctgctgtagagtgtatcgcagtgttggatgttttactgtgcctggctaactatagtcgagggggtgatggtcctatgtgtcgcccagtaattctgttgccggaagataccccccccttcttagagcttaaaggatcacgccatccttgcattacgaagactttttttggagatgattttattcctaatgacattctaataggctgtgaggaagaggagcaggaaaatggcaaagcctattgtgtgcttgttactggaccaaatatggggggcaagtctacgcttatgagacaggctggcttattagctgtaatggcccagatgggttgttacgtccctgctgaagtgtgcaggctcacaccaattgatagagtgtttactagacttggtgcctcagacagaataatgtcaggtgaaagtacattttttgttgaattaagtgaaactgccagcatactcatgcatgcaacagcacattctctggtgcttgtggatgaattaggaagaggtactgcaacatttgatgggacggcaatagcaaatgcagttgttaaagaacttgctgagactataaaatgtcgtacattattttcaactcactaccattcattagtagaagattattctcaaaatgttgctgtgcgcctaggacatatggcatgcatggtagaaaatgaatgtgaagaccccagccaggagactattacgttcctctataaattcattaagggagcttgtcctaaaagctatggctttaatgcagcaaggcttggtaatttcccagaggaagttattcaaaagggacatagaaaagcaagagaatttgagaagatgaatcagtccctacgattatttcgggaagtttgcctggctagtgaaaggtcaactgtagatgctgaagctgtccataaattgctgactttgattaaggaattatagactgactacattggaagctttgagttgacttttgacaaagggggtaaattcagacaacattatgatttaataaactttatttttttaaaatgg

SEQ ID NO: 259498 - DNA, 1187 bp, Homo Sapiens
  misc_feature (51)..(69): n is a, c, g, or t
  misc_feature (1133)..(1133): n is a, c, g, or t
  misc_feature (1152)..(1152): n is a, c, g, or t
gtgtggagatgtgttgccaacgccctctagaggagcaaaggaagccccctnnnnnnnnnnnnnnnnnnntttgtcctatggattaaaggcgcccaccgggaaagggaaaggggcagaaaggggtagaggtgtgttttcattgtaagaatttttggggagaggtgcgctttcccagaaaagcattcagccaatggtttttgcaaggtgcaaggggcagggggactttttcccgggtgccgggtccgtggccatttttggtttctttgccatttcagggtgggcagggtaaattttctttggtcatcggcttcatcccaccttgtggccatatcaaccacagtcccttttctataacatggggcaggttcattatatgagtggatggtggattcagaaaacaaaatctcatttttgtttggtgcaagagttgcctgtaatctccccttgggcttgtactgggtgttagtccagattgttgtataagtgcccagaaaactgtattataaagattattgatgtgacaatctgcttgtcgccagctgaggtagtcctttaaagtctggttgctgggatacaccacgactcttccgtcaaagcctgggggatacagaaggggctggtcctcaaagtaatcccgccaataaaacacatagctggaggcaaactgggaggccacgtgagtcatgaacttactggctcttcttttaaaccaattggttttccgcttgaacacaaagctgtactcatcactctgtccatacgcgatcacaatatcctctagttcttccatcacagtctgcgcacatttggtcatcagctggagagcacggctgtcattgggttttgcaaagttgtgcttctcagcaaaccgatggaaattccggccgtccagccgcactaccacccagcagtgtgccaggcaggtgtcgtcagcctcgaagtccctcacgtactcgaacttgctttttgccatggtcgcccccaatctcaggtaccgtctcagagtgatggaaatggtggccaaggaatcgtgaaccttaactttacaggcgccccacattctacacgcggaaaggaaagggccagatagccccgccccggaagtgttctcttcgtggctactctagccgtanggcggtcatagtctctctnggctctccctggagttcttaaacctccagggaaaa

SEQ ID NO: 259499 - DNA, 765 bp, Homo Sapiens
gggagagttttcagattgctcttgggaaccatgccgaaagtagtgtctcggtcagtagtctgctctgacactcgggaccgggaggaatatgacgacggcgagaagcccctccatgtttactactgtttgtgcggccagatggtcctagtgctggactgccagttagagaaattgcccatgaggccccgggaccggtcccgtgtgattgatgctgccaaacatgcccataagttttgtaacacagaagatgaggagactatgtatctgcggagacctgaaggcattgaacgacagtacaggaagaaatgtgcaaagtgtggactgccgctcttctaccaatcccagccaaagaatgctcctgttaccttcattgtggatggagcagtagtcaagtttggccagggttttgggaaaacgaacatatatactcagaaacaagagcctcctaagaaggtgatgatgaccaaacggaccaaagacatgggcaagttcagttctgtcaccgtgtctaccattgatgaagaggaagaggagattgaggctagggaagttgctgactcatatgcacagaatgccaaagtgattgaaaaacagctggagccgcaaggcatgagcaagaggcgactgcaagagctggctgaattggaagccaagaaagcgaaaatgaaggggaccttgattgacaaccagttcaaataaccaggccctttttctaagcccttagactagaggcaagccatttaaattcgggagggcaaagtattt

SEQ ID NO: 259500 - DNA, 881 bp, Homo Sapiens
gaaggccggggaacaactctaatccttttggggcaggagggagggtttttttagggttgcggggagggaactgcaagtgcctgaggaccagagtggcctctagccccgaattgaacacttttaaacctaaagagccttattattattagctcgagaaataccacatgccagtcttcccaggaaggtgacctgcctgaccatgaagcaacaaaagagcataggcagacttaaagttggatagacctgggttcaaatcatagttcagctttcaataactgtatgtatgattttggctaaaggatttgactttctctcaactgcagttttcttaatctttgaaatgcaaataatgtttatctcagaagactatttctaggattaactgagagattaaaggaacagcagcacttaggctcaaaatcgcccctacaaagcagtagttgtttcttaattgctaagtaatctgtttgcactctaggaaaagtaaatggagaggtaaaagaaaggcattggggacaaatgaaagagatgatgtagatttttcggatgggtgggtatattttattttccagtttattttcatatttctttactgtgttatttctggaaactttaatgttttaaacctcttttataaaattcaatgacgactactagaattctattcttttcaaaagttaacttatctccaaagtggctgaaaatattgtttaccattacatgattatgaaatgactgtgaagaatataaaattaaacttagtgacttaattagtcactgccttgctaactttgctgtaatttttttaaacgtcttgtttttaatatagcaaactatctcaatactggctggattaggttaaataaagaatttttatgttc

SEQ ID NO: 259501 - DNA, 611 bp, Homo Sapiens
gggacggggctgcactccaaccgtctgcacctgctcttcccccacccctgtgggacctcatcttcacgtgccatgtgtgctgaaggcccagggcccagcagggggcagtggcacctgttgacggaaaaggccgaggtgcttaccagtggaccttctggcccgcccctcccctgtcacttgtcgggcatccagggccccgacctgtgcctagccgccagggtgacagaaggcagaactgaagcggggtctgggccacgggccaggccactgccttttgtcctcagtgaccatacattcctgctctcggacttgaactctactgtaactgttttcttgaaatgaagctgtacaggacgattcactgccatgccagtcaggcgggcttgccatgttctgtgaatctcgagtgagcggtgccacccgcccccatacctccgccaccggccgctgtcggggatgccacagcctgccacggtcgcagccagacgtgagcttggcattgaagttgcaaagcggcccctggccgggctcgccgtcgctgtccagggccgtgtccggtgctgtggctgtaaagctgtaggaccctttttaataaatagagaattattaat

SEQ ID NO: 259502 - DNA, 991 bp, Homo Sapiens
cggtccagggcgcccaacagcccagcctctaccagatccgcaccaacggcagcgccctctgcacccggtgcatccagatcaacaccgactccagcctcctcaactccgagttctgcttcatcctcaaggttccctttgagagtgaggacaaccagggcatcgtgtatgcctgggtgggccgggcatcagaccctgacgaagccaagttggcagaagacatcctgaacaccatgtttgacacctcctacagcaagcaggttatcaacgaaggtgaggagcctgagaacttcttctgggtgggcattggggcacagaagccctatgatgacgatgccgagtacatgaaacacacacgtctcttccggtgctccaacgagaagggctactttgcagtgactgagaaatgctccgacttttgccaagatgacctggcagatgatgacatcatgttgctagacaatggccaagaggtctacatgtgggtggggacccagactagccaggtggagatcaagctgagcctgaaggcctgccaggtatatatccagcacatgcggtccaaggaacatgagcggccgcgccggctgcgcctggtccgcaagggcaatgagcagcacgcctttacccgctgcttccatgcctggagcgccttctgcaaggccctggcctaagacaggctgccacagccccaggcttggtgaggaagaggaaggggcctcatccactgtctgctagcaaagaatgtactcaggtgacaccacctgctccagccacgtccagtgccacagtccccagtagcctcaagcagcaccaatggggatgaccctgacaggtgccctcaggggtctgggaaatccaactctctccacagtgtgagtgcacgtgtgaagccccctcactcttccgctagggataaagcagatgtggatgccctttaagagatattaaatgcttttattttcaatattaaaaatcagtatttttaatatta

SEQ ID NO: 259503 - DNA, 1196 bp, Homo Sapiens
gtatcagccaccgtgcctggcctaataattggaacattttcatcatgaaaatgtcatcagctttgccaaaagaaacaaccaattgacttgtttggcgtttgttttccattttcatgtcaattttatgtatacagttagaatacccaaggagaccactaaaatcagttaaacaagtagggtatatacaaagaaagatgaaacccgaaagtacataaaaaggatttaaatccgattttagatgtacctagtgtgtatttcttatctctagacaagttcatgtttattgtttaatttatgcccaagtgaagttgtaaacttatggttcaactctgacacagaatttgtcacttgtctgaggtcagtggcaggtttctctgctgtcaagcactctgtgtcacccaccagattagtataactattaattcagactgtactcctatgtttaagataatttttacaagagctggctgaagcagcacattagtaacctgacaagatttctttttcccttttcagggggaaagggtcaccttaaaaataaattattttcagggactttgggaatctaatgataaatattacacataatctatgaatagcttaatcctttatatattccttaaaataggaattcctcgacatcactcctggccacactttccttgcctgtgttgttgctatgtgtatttgaaagtaatatctgcattccttttaagatgttctgtaagtcatatttgtcagttatacagagtagtcttccttttccccacgttcagtgtaatctcactgaacagtaataatagcaatagctaacaacatctgcacagcaccttacagtttgcaaagaacgttcacacattctcatttgagttttgcatagtgaacctgttacgagatgtctcttgacgtcgatgctaaaagtgttagaatctttacatcactagagtcattgaatatgctgtagtattgaatagtgccctgactagggggaggatttggatgtgctgcatttcaaagccgtgtataatcatcaacaatggggggcttgagtcctttagctacttgaatccgatttacttctgttaagtgatgcttttctaaccgttttctggatggattttgtattcactatattgtagcttgtaatttgtataaatgtaccatctgatgtcattaaaaaaagtgtttgtagtgct

SEQ ID NO: 259504 - DNA, 1030 bp, Homo Sapiens
aaggtagcgaggcctgggtggcgaattcggcacgaggatggcggcggtggtcgcactctccttgaggcgccggttgccggccacaacccttggcggagcctgcctgcaggcctcccgaggagcccagacagctgcagccacagctccccgtatcaagaaatttgccatctatcgatgggacccagacaaggctggagacaaacctcatatgcagacttatgaagttgaccttaataaatgtggccccatggtattggatgctttaatcaagattaagaatgaagttgactctactttgaccttccgaagatcatgcagagaaggcatctgtggctcttgtgcaatgaacatcaatggaggcaacactctagcttgcacccgaaggattgacaccaacctcaataaggtctcaaaaatctaccctcttccacacatgtatgtgataaaggatcttgttcccgatttgagcaacttctatgcacagtacaaatccattgagccttatttgaagaagaaggatgaatctcaggaaggcaagcagcagtatctgcagtccatagaagagcgtgagaaactggacgggctctacgagtgcattctctgtgcctgctgtagcaccagctgccccagctactggtggaacggagacaaatatctggggcctgcagttcttatgcaggcctatcgctggatgattgactccagagatgacttcacagaggagcgcctggccaagctgcaggacccattctctctataccgctgccacaccatcatgaactgcacaaggacctgtcctaagggtctgaatccagggaaagctattgcagagatcaagaaaatgatggcaacctataaggagaagaaagcttcagtttaactgtttccatgctaaacatgatttataaccagctcagagctgaacataatttatatctaatttgagttcctttaaagatcttggttttccatgaatacagcatgtataataaaaattttaagaaataaatgttattctactttatgacca

SEQ ID NO: 259505 - DNA, 821 bp, Homo Sapiens
  misc_feature (39)..(40): n is a, c, g, or t
  misc_feature (49)..(49): n is a, c, g, or t
  misc_feature (53)..(53): n is a, c, g, or t
  misc_feature (59)..(59): n is a, c, g, or t
  misc_feature (100)..(100): n is a, c, g, or t
  misc_feature (403)..(523): n is a, c, g, or t
  misc_feature (534)..(545): n is a, c, g, or t
  misc_feature (603)..(725): n is a, c, g, or t
  misc_feature (765)..(779): n is a, c, g, or t
agacagaagagagccccttagccccaaccccctatggtnntgagggacntganttgcantccaccttgccttggacactgaacccagctgaggaaggagntcaccccaagattgtgggttttcccctttcagtttcagttatcatttgttattgattcttttctcttttttcaagggtctgaatccagggaaagctattgcagagatcaagaaaatgatggcaacctataaggagaagaaagcttcagtttaactgtttccatgctaaacatgatttataaccagctcagagctgaacataatttatatctaatttgagttcctttaaagatcttggttttccatgaatacagcatgtataataaaaattttaagaaataaatgttattctactttattaacnnnnnnnnnnnnnnnnnnnnnnnnnnnnnnnnnnnnnnnnnnnnnnnnnnnnnnnnnnnnnnnnnnnnnnnnnnnnnnnnnnnnnnnnnnnnnnnnnnnnnnnnnnnnnnnnnnnnnnnnnttttggggccnnnnnnnnnnnnaaaaaatttttaaaaacctttttttggggccggggccccaaaaggaaaggaaaagggnnnnnnnnnnnnnnnnnnnnnnnnnnnnnnnnnnnnnnnnnnnnnnnnnnnnnnnnnnnnnnnnnnnnnnnnnnnnnnnnnnnnnnnnnnnnnnnnnnnnnnnnnnnnnnnnnnnnnnnnnnntctttcaaagagggccccagggggtttcaatttaaattannnnnnnnnnnnnnnttctcgggaaagggggggaatttctaaaaacttcggccccca

SEQ ID NO: 259506 - DNA, 530 bp, Homo Sapiens
  misc_feature (163)..(246): n is a, c, g, or t
gaacatactttttttccaaataaattactcatccttaaagtttactccactttgacaaaagatacgcccttctccctgcacataaagcaggttgtagaacgtggcattcttgggcaagtaggtagactttacccagtctctttccttttttgctgatgtgtgnnnnnnnnnnnnnnnnnnnnnnnnnnnnnnnnnnnnnnnnnnnnnnnnnnnnnnnnnnnnnnnnnnnnnnnnnnnnnnnnnnnnttgaggcatttgtttggaaaaaatcgttgagatgcccaagaacctgggataattctttactttttttgaaataaaggaaaggaaattcagactcttacattgttctctgtaactcttcaattctaaaatgttttgttttttaaaccatgttctgatggggaagttgatttgtaagtgtggacagcttggacattgctgctgagctgtggttagagatgatgcctccattcctagagggctaataacagcatttagcatattgtttacacatatatttttatgtc

SEQ ID NO: 259507 - DNA, 676 bp, Homo Sapiens
  misc_feature (380)..(390): n is a, c, g, or t
agaatggaaagaaactcacgatgaaattgaacctggtttttgtatatttatcaaacttgtgctgagaatagtgtctgattatacgacttttaagcaaagttgggtgtaattaggtgaaaacagcccaggtcttcctcgggagcacagaggggctaggggctggtccttctcgtttgctctagtcttgctttgctgtctggtgtagctcctctgctgctcccatctgcactaattgacccaaaacgtgggtatttcctgctacacaaaagccaaaaggtttcatgtagattttagttcactaaagggtgcccacaaaatagagattaattttaacttaaattttaagcttgaagattaggtactatctgtgaagttacacnnnnnnnnnnnaaaggtagagatgtgtgtgtgtgtaggtattaaagatgtgttgttggtttccaaaaaggaacactggaaaataaattttgaatgtttatgttctcagaatcaggttgacagtcccttgctgacatggctttgctttgtgtaaatacagtggatctcaatcttcggggtgtgatgaatagcgaatcatctcaaatccttgagcactcagtctagtgaagatgttgtcattatgtacaatacataactagtttaattaactatgtgatgttaactattattaataaat

SEQ ID NO: 259508 - DNA, 1038 bp, Homo Sapiens
aaagaagtctcagttcagtgaacacaaaacttatttaaagatgctttatatgtagaaattgtttcaaatcatactctaacccttagtgagggcaaagtgtagttggtagaagaaattgctaaataactatctaatgtgctatgtttatcaaatcgtgtactaaaatggaaagctagttttgagaaattattcagaagccttgttattttaaaaatgaaatatttcaaagactgaatattttcaaagaaaatgaataattcattgcccttgtgatttagaagattataacagctgtatttcatatttgcctccttatatatatcaaagaccaaggtatttccttctgcttcaaaagaacaaaattgggaaagaaaactcacttgagtcttgatcaaacaagtgtcttttacttaagaagaaacttggtaatcattgtggcacccacagcaagcagttgccttaccagtgaaaaaggtgcactgaggtaacatctaaaacagagatgtggttcttaatgtttaacagaacagttctaatcctgccacgtgttatcattatagattttatagttgcctttctaactacttagcacagtttgagaatacgttaattgctatttactatttaaaaagttttactgaaatcagtccataacattaagatgagccctaatatgtaagattttcctctggaatggatgtgagaaatgtaaattttataacagcagtatttatcctggtttaattctaatacgatgtcatgttaatttcatgttgtgattaataaaagcattttttcttcacccaaaatggcaagccgtccccaaaaaacccccccttgtcgggcccgcctcggccctcaagaaagttttctaacacctctcgttctggccccgggggccccagtaaggctaaggggaaacagtggccccttaaccttgtttcccctagggaaaatcccctgtgcctcttgcacctaaattggtttgtgggaatttcctcacccccaactacctaataaaacgcccccccgcgcgcg

SEQ ID NO: 259509 - DNA, 922 bp, Homo Sapiens
  misc_feature (709)..(716): n is a, c, g, or t
  misc_feature (718)..(718): n is a, c, g, or t
  misc_feature (724)..(727): n is a, c, g, or t
  misc_feature (735)..(737): n is a, c, g, or t
  misc_feature (777)..(777): n is a, c, g, or t
  misc_feature (838)..(838): n is a, c, g, or t
  misc_feature (876)..(877): n is a, c, g, or t
gggatggaaagtaaatggtagctcggaagggtcaaaagagtccgcggtttcgccgcgtgagttgctttttgcggctggggaggtctacgcttctagagcttgagccagcggggcgaccctgcagtggcaggactcggcaccgcgccctccaccgccggttggtggcctgcgtgacagtttcctcccgtcgacatcgaaaggaagccggacgtgggcgggcagagagcttcatcgcagtaggaatggcagccccatctatgaaggaaagacaggtctgctggggggcccgggatgagtactggaagtgtttagatgagaacttagaggatgcttctcaatgcaagaagttaagaagctctttcgaatcaagttgtccccaacagtggataaaatattttgataaaagaagagactacttaaaattcaaagaaaaatttgaagcaggacaatttgagccttcagaaacaactgcaaaatcctaggctgttcataaagattgaaagtattctttctggacattgaaaaagctccactgactatggaacagtaatagtttgaatcatagtgaacatcaatacttgttccctatatacgacacttgataattaagatgatcaagaaccagaagatctgtgaagaaatgaaataaaatggtatttagtaagaaatctctattttaagaaaaaaagtaaaacctgttataaacacnnnnnnnnanaaaaannnngaaaaaannnaaccctgtccggcccgccctcggcccctcgagaaagcttntcatagacccattcgttttggccgcggcgggccccagttagggtaaaagtgaaacatgggntccatagcctgtttttccctagggaagaatcccttggnnccactggacctaagtgggctttgggaatttcctccacccaaatat

SEQ ID NO: 259510 - DNA, 844 bp, Homo Sapiens
gaagaatataaatgatggtgtggatgtcagggtgagggaggagacaaaaccacgatgacccctagctttgtggcctgaactgtgggtggctgaggggatcgttaattgaatggggcagactgaggcttgtgaggaagatcagagtctggttcttgacatgagatgcccttcagacatctcttcactcaggtccaactagggatacagaaacactgaatatttcaacagcagaaattgaatggggggattgatagcgctggcgagggaagcagctggaaagagacagatggcaccctgagacagcccagaggtgaataggacccccaggctgcagggataaagctcagtggtggtgttacctcaccggggaccagggtcacacagcaaagctggatacaacagaggcgtgttgtgggggagcctcagaggggacaaaacctctgcctgagatcccaccccaggtggcaatgggggccactgaggttggggatgaaaatgccggtaccgtcagtgcacagccctgttccagacagtgctgcctggaagatttctgggctctcctgaggcgccaccccgcacctgagccacctccttggactcctgtcctctaccccttgaggacctccctcccttctaccctagctgtcttcttgaacttgggactctcctttcccaagacttccatcactagctcctggagggactggactttgcatcttcccttcgcgtggagcctcagtgtgagaggccctagccaatgcgtgcatgtcagaggtggtggggaccacatcagaagaagaggggggtgatgaaattaacaaataaaaagtatggggaaaaaaaa

SEQ ID NO: 259511 - DNA, 619 bp, Homo Sapiens
acccattcccattattgcagcattatcatcagtcactgactgctaatgctttttatgcttcttttttcctgggatgtgtgaacctggcaacttttcttcctgttcttctatgttcttagcaaacccacatcaagggtgtctgttcgtgtttgaaactcatcagcatcagaaagagctaacatgttggcagtatctagaaaaccatcaacatgatcatgggacagttcatttcgctttgcagctgatgccaccatagtgagtgagtactctgctctgttcatctgagcagtcactttgcttttgcaaagcagttgtggattacttctgggatgtcagtgtcccaaatggcaatgagatttctcatcacatccagaatatgccacataatgtactgagcattttcagctcggtacattataatttttggtaatttattgtctcagcctagtggctgcacacagccatgctgctggcaggtaaaaaaggctactcacttgttttaacgtccaatgaatgtgtgcagtacatttaccagtaacagaacatttacattctagcaagctatttttctaattgcagaagccattcctaaaacaacctgacggacatcactgcatta

SEQ ID NO: 259512 - DNA, 684 bp, Homo Sapiens
attggtacaagcagatacagtataaactcacaaacacagatttgaaaataatgcacatatggtgttcaaatttgaacctttctcatggatttttgtggtgtgggccaatatggtgtttacattatataattcctgctgtggcaagtaaagcacacttttttttctcctaaaatgtttttccctgtgtatcctattatggatactggttttgttaattatgattctttattttctctcctttttttaggatatagcagtaatgctattactgaaatgaatttcctttttctgaaatgtaatcattgatgcttgaatgatagaattttagtactgtaaacaggctttagtcattaatgtgagagacttagaaaaaatgcttagagtggactattaaatgtgcctaaatgaattttgcagtaactggtattcttgggttttcctacttaatacacagtaattcagaacttgtattctattatgagtttagcagtcttttggagtgaccagcaactttgatgtttgcactaagattttatttggaatgcaagagaggttgaaagaggattcagtagtacacatacaactaatttatttgaactatatgttgaagacatctaccagtttctccaaatgccttttttaaaactcatcacagaagattggtgaaaatgctgagtatgacac

SEQ ID NO: 259513 - DNA, 854 bp, Homo Sapiens
agaagaagccatttactgagctgtattaaagttaaaacttccttgaataaaagatgaaataactgtatttccatcttaagacaacatgtagaattattgtcttcatatattttaaaataataattagtccatcaaattttgggctgtgatttaatgttagaattcagcaaagcccctataaaaagaaatagtctaaaaatattcttaaaaagcacaaatttaggcttcaagtgtggacttttttctaattgtctgttgagcaataattacctcacataaatgttgtaatatacaaaaaaggaacattgtgaagctatgaaatgcccactacttaaataaaagattacagaaaattgtttttcaattcattttacataggcagaatctggtagatgagtgactagtacctgtaggagtcgtgagttggcatagggaactgtccactgcccctcatataacagaattatagctgagacctgagtgaagagaccatagactccccagggttagcttgtttcaaatgtgtagtgtttaacacaggacctatatttgcttctcccaaattctaattgcattattgttttaatatatgataccatggtgccaactacatatcaaaccatggtacagtcaaaccaattatcactgatttgaggaacataaaaaacatacttactaaatcgatttgactatatatataggcttacagaaatctgtcatttgctaacaattcttgagctatgacctgggaattgcttacttctaagcactgtgcaccaggcatataaactttgaagctttcaatgaagcatttagctcaggaaattacttgtataaaaatatcaattttcttt

SEQ ID NO: 259514 - DNA, 1326 bp, Homo Sapiens
tttcccgtcggccggccctcaaacgctacgagcgcctcagctacaacttcctgcaggtgtgcaaccagctggaggcgctggtgggcctggcggccaacgtgggaccctatggctccggagacagtgcacccctcaatgaggcgatagctgtgctccagcatcacgacgccgtcagcggcacctcccgccagcacgtggccaacgactacgcgcgccagcttgcggcaggctgggggccttgcgaggttcttctgagcaacgcgctggcgcggctcagaggcttcaaagatcacttcaccttttgccaacagctaaacatcagcatctgcccgctcagccagacggcggcgcgcttccaggtcatcgtttataatcccctggggcggaaggtgaattggatggtacggctgccggtcagcgaaggcgttttcgttgtgaaggaccccaatggcaggacagtgcccagcgatgtggtaatatttcccagctcagacagccaggcgcaccctccggagctgctgttctcagcctcactgcccgccctgggcttcagcacctattcagtagcccaggtgcctcgctggaagccccaggcccgcgcaccacagcccatccccagaagatcctggtcccctgctttaaccatcgaaaatgagcacatccgggcaacgtttgatcctgacacagggctgttgatggagattatgaacatgaatcagcaactcctgctgcctgttcgccagaccttcttctggtacaacgccagtataggtgacaacgaaagtgaccaggcctcaggtgcctacatcttcagacccaaccaacagaaaccgctgcctgtgagccgctgggctcagatccacctggtgaagacacccttggtgcaggaggtgcaccagaacttctcagcttggtgttcccaggtggttcgcctgtacccaggacagcggcacctggagctagagtggtcggtggggccgatacctgtgggcgacacctgggggaaggaggtcatcagccgttttgacacaccgctggagacaaagggacgcttctacacagacagcaatggccgggagatcctggagaggaggcgggattatcgacccacctggaaactgaaccagacggagcccgtggcaggaaactactatccagtcaacacccggatttacatcacggatggaaacatgcacctgactgtgctgactgaccgctcccagtggggcagcagcctgagagatggctcgctggagctcatggtgcaccgaaggctgctgaaggacgatggacgcggagtatcggagccactaatggagaacgggt

SEQ ID NO: 259515 - DNA, 1354 bp, Homo Sapiens
  misc_feature (712)..(740): n is a, c, g, or t
  misc_feature (1043)..(1068): n is a, c, g, or t
agaactaagctatcagtatagatatagctatccttggagcttatgtttcagacaagaattatttactaaaataaataataaacaagataatgcattatacaatttgggcatttctcgtttctcaagtgtatgcatcatggtaaatataaactaaccacaagataggtagattgattcatttcattttaatctccttgtgtaattcagtacctccataattgttctaatcttcttcccactgtttacaaattaccagttaattaactcgtgaaagaaaaattcacatatcagaataaaaataaatgtatactcactttataaaaatcaccactgatgtctttccttaatactagcagtggaaatgtaagtggcttactctacaaattttggtgctggcaaatacataggcaaactgttgggagctgctctagttacattcctcccttcttattccctttttctcttcctcactttattgcataacatattcctgtacccaaagcattctaccacagttctatttgactcccacttgtaataactcctttaaaaaattccatgtttaaccatatgaccctgcttgcttactcatattctccctccctctccccttcctttctctctcttccagaagtcatttgcctggtttgaaatattttgtagggattgcttattatattattttagctgatgaacctcaggacaacgtctnnnnnnnnnnnnnnnnnnnnnnnnnnnnnaaatctcagctgttgaagagtgggcttggaatcagacttctgtgtccagtaaaaaactcctgcactgaagtcattgtgacttgagtagttacagactgattccagtgaacttgatctaatttcttttgatctaatgaatgtgtctgcttaccttgtttccttttaattgataagctccaagtagttgctaattttttgacaactttaaatgagtttcattcacttcttttacttaatgttttaagtatagtaccaataatttcattaacctgttctcaagtggtttagctaccattctgccannnnnnnnnnnnnnnnnnnnnnnnnngcttgagcacactgatcaaccactgaactgccttcttccattgtcctgcaatgatataagggttacatttttgtgtatatggctttcatagttgggatttcagagcactgataccagatattttcagtttgttctctgggggaatttcatttgcatctatgtttttagctatctgtgataacttgttaaatattaaaaagatattttgcttctattggaacatttgtatactcgcaactatatttctgtaaacagctgcagtcaaaaataaaacactgaaagtttt

SEQ ID NO: 259516 - DNA, 1023 bp, Homo Sapiens
  misc_feature (685)..(720): n is a, c, g, or t
  misc_feature (740)..(770): n is a, c, g, or t
tatgagaaagacccggtcttgtacatgtaccaactcttagatgattacaaagaaggcgaccttcgcattatgcctgattccaatgattcacctccagcagaaagggaaccaggagaagttgtggacagcctggtaggcaaacaagtggaatatgccaaagaagatggctcgaaaaggactggcatggtcattcatcaagtagaagccaagccctccgtctatttcatcaagtttgatgatgatttccatatttatgtctacgatttggtgaaaacatcctagatgtcatcacaaactctgccaaatttgtggaactatgaaatgtattatttgtagacataaagacttgattgctttccagtttaatgaaagcttaaatgtccctgcgaacccacaatctctgccagcagaactggttttgttctgaatagtacagattgatgtgaacacaaagcattttgtgtaaggagaacccctttcttttaacacagaagtctgtctatttcgaggggagttacaggcaagtttggtaaaagttaagctagtatcatagtcatttaaaattgtaactagatcttaaccattttccccctcaccctaactctcttattctgccgccacaatgcaagcatagtttgatgttttcgttattgccttttttgagatgtatgtatctgtatctacnnnnnnnnnnnnnnnnnnnnnnnnnnnnnnnnnnnncacacagatacaagtgtacnnnnnnnnnnnnnnnnnnnnnnnnnnnnnnntggcagtctttgtggatcaggatgggggtgacataatttccttgagtttaacaggagtgctttacccaagtcagtcatggcatatgatatcactgctctttatttaaacagtaaacttcgggcacaggaaccatatgggaacattcagcttgtctaaaaactaccagatcacaagttcagagaaccttttcaatctggagcccttaaaccataagtccaactatgacactcatccgtgaacagtcaatgaccc

SEQ ID NO: 259517 - DNA, 460 bp, Homo Sapiens
gcgatgctaaacatgtttcatacaatgaaactaaatatatcagatatgagaggggttgggattcacgtgaatcagttggtcccaactaatctgaacccttccacatgtcccagtcgcccatcagttcagtcaagccactttcctagtgggtcatactctgtccgtgatgtcttccaagttcagaaagctaagaaatccaccgaagaggagcacaaagaagtatttcgggctgctgtggatctggaaatatcatctgcttctagaacttgcactttcttgccaccttttcctgcacatctgccgaccagtcctgatactaacaaggctgagtcttcagggaaatggaatggtctacatactcctgtcagtgtgcagtcgagacttaacctgagtatagaggtcccgtcaccttcccagctggatcagtctgttttaaaagcacttccacctgatctccggg

SEQ ID NO: 259518 - DNA, 807 bp, Homo Sapiens
gttaccattctgatgttggagtgaaaaaacctgagtgcgaagttacaggattgggacgcagcagcatactgacctagagattcagcatatcgggtcaaaagataaccaatggtatcatgctggatatgcttagcatcgaggctggagtaaagatccaccactggttcaaatgcacccagcatacagtagattcgaacaagcagcaatttgaactgagcattggaagggctatgggttaatccctcttccagcaaagtcagggcctgccacacagtggtctcatcacctgtttccctccatacatcaataagcgcatggacagcaaggagacagtaatagtcagaaaattgcaattctgttttcaaacaggttttcccaaattccagtccatgctggtaccttaacatcaattctctgaccacactcaatttctgatttttatccatggtgtggtacaagccaagtaacctcgtcagctgcaccacacacaaatgttgctgcagagctctgatgtcagcaggcagtgccagcttatcctctgttggtgtcgacaaaggaacaactccaagtaactgattaataaattttgtacactgtgtagcaggtaagaggtcaacaaacaccttaaggtctgtaaaacaacaaggtttatcgccaaactttttaaaatactggaacattaattcttctggatcacccagtttgtactcatcgttacaaccttgacttcgtaaacgcctaatcagctccaatttagctagatgtggtcctcggagatggcgagaacttttagattcttccgttatc

SEQ ID NO: 259519 - DNA, 959 bp, Homo Sapiens
gggatcccgtggagtggccggcgacaagatggcagcagcgtgtcggagcgtgaagggcctggtggcggtaataaccggaggagcctcgggcctgggcctggccacggcggagcgacttgtggggcagggagcctctgctgtgcttctggacctgcccaactcgggtggggaggcccaagccaagaagttaggaaacaactgcgttttcgccccagccgacgtgacctctgagaaggatgtgcaaacagctctggctctagcaaaaggaaagtttggccgtgtggatgtagctgtcaactgtgcaggcatcgcggtggctagcaagacgtacaacttaaagaagggccagacccataccttggaagacttccagcgagttcttgatgtgaatctcatgggcaccttcaatgtgatccgcctggtggctggtgagatgggccagaatgaaccagaccagggaggccaacgtggggtcatcatcaacactgccagtgtggctgccttcgagggtcaggttggacaagctgcatactctgcttccaaggggggaatagtgggcatgacactgcccattgctcgggatctggctcccataggtatccgggtgatgaccattgccccaggtctgtttggcaccccactgctgaccagcctcccagagaaagtgtgcaacttcttggccagccaagtgcccttccctagccgactgggtgaccctgctgagtatgctcacctcgtacaggccatcatcgagaacccattcctcaatggagaggtcatccggctggatggggccattcgtatgcagccttgaagggagaaggcagagaaaacacacgctcctctgcccttcctttccctggggtactactctccagcttgggaggaagcccagtagccattttgtaactgcctaccagtcgccctctgtgcctaataaagtctctttttctcaaaaa

SEQ ID NO: 259520 - DNA, 1191 bp, Homo Sapiens
gtacggtccggaatccttgggatatcgtcgacccacgcgtcgcccacgcgtcgccacgcgtccggacagacttgatatccggttttatatgtatgaactacttaaagctctggattactgccacagcaagggaatcatgcacagggatgtgaaacctcacaatgtcatgatagatcaccaacagaaaaagctgcgactgatagatggggtctggcagaattctatcatcctgctcaggagtacaatgttcgtgtagcctcaaggtacttcaagggaccagagctcctcgtggactatcagatgtatgattatagcttggacatgtggagttgggctgtatgttagcaagcatgatctttcgaagggaaccattcttccatggacaggacaactatgaccagcttgttcgcattgccaaggttctgggtacagaagaactgtatgggtatctgaagaagtatcacatagacctagatccacacttcaacgatatcctgggacaacattcacggaaacgctgggaaaactttatccatagtgagaacagacaccttgtcagccctgaggccctagatcttctggacaaacttctgcgatacgaccatcaacagagactgactgccaaagaggccatggagcacccatacttctaccctgtggtgaaggagcagtcccagccttgtgcagacaatgctgtgctttccagtggtctcacggcagcacgatggaagactggaaagcgacgggtctgttgcggttctcccacttttccataagcagaacaagaaccaaatcaaacgtcttaacgcgtatagagagatcacgttccgtgagcagacacaaaacggtggcaggtttggcgagcacgaactagaccaagcgaagggcagcccaccaccgtatatcaaacctcacttccgaatgtaaaaggctcacttccctttggcttcctgttgacttcttcccgacccagaaagcatggggaatgtgaagggtatgcagaatgttgttggttactgttgctccccgagcccctcaaactcgtcccgtggccgcctgtttttccagcaaaccacgctaactagctgaccacagactccacagtggggggacgggcgcagtatgtggcatggcggcagttacatattattattttaaaagtatatattattgaataaaaggttttaaaag

SEQ ID NO: 259521 - DNA, 667 bp, Homo Sapiens
  misc_feature (29)..(29): n is a, c, g, or t
tggctgccccctgaaaccccttccccccnaagctggcccttccccctaactttgggaagccctcctatttcctagaaacaggaaaaacgcctaggcctaaaatatatgtccctaatggtcctccttcccatcggtgtgaaaggaaagaaaatgggccccaatgttgttgccaaggattaggaaggtccctgccttgcccacccagtgggtttagaaatccatctttacggccccccagagaagctggtgatcaggttcccagacatcagcaatcctgtttcctgaggagcttgtgggggctctctctggggatgatctgggtcctagacaaagagccacaactgatgggggtcactgggattgcagggggccatagctggctttttgtcctgggatgtcaggcaggtaccagatcctgagttcctgatgagctgatcctgggccaattcccattcctcgtccttggggacctggctattcttgccagtgaagtgacagctcccaaggcccagagcacccttgctgacatgtagacacagctgctttgcgatgttgtggcgaaggtccctctgagttgtgtactcaaagtactggttgccgccaaggccgtggcaggagtacatgatgaggggcttccccccgcggttgttctcacccaccccccggc

SEQ ID NO: 259522 - DNA, 680 bp, Homo Sapiens
aaagtctaacaactttgtgtttatttttgctttaatcttgtcatgggtaaatttttagctgttcatttttatacaacaccacaggatcagagatagcatgaacacattagtctctacaaggctaattctacccgagcacccatcaaagcgacccaaatgacacgccatgcatcttgagtgaccgtgcactgccatatactctgagctctactacaggtaatgttacaccaaattgacattgtaactgtgtttcaaatgtctcttagagacaaatacagatcagtaggtataataacctctgaagacttccaagagtaatgaggtttcgccaagccttgttgtatttatcatggatggttttcaggaaataacttacgagaaagcctgattgattttacagtcattttgacctgtgatttatttattaagtacaatttgaagattcctaaaataaagtattgccaataaattatagatcctgtatctctttataaacaaataatcccttgtgatttttaaagttgcaagaaaatgctgatggaaaaattttcatgatgttgaaataggtataaataaaagcttatacaaagccactgtctcaacatcagcaggataagagagaagaacttctgagacattatactgttccccaaaaaaacactactttttttccttcccct

SEQ ID NO: 259523 - DNA, 394 bp, Homo Sapiens
acctgtaaaatccaattaggccttccccccgtaaggtatttccccctgaaaaccccacccctgataaataccaatcaaggccttggccgaaaccctcattacctccttggaagtccttcagaggttattataccctactgatctgtatttgtctctaagagacatttgaaacacagttacaatgtcaatttggtgtaacattacctgtagtagagctcagagtatatggcagtgcacggtcactcaagatgcatggcgtgtcatttgggtcgctttgatgggtgctcgggtagaattagccttgtagagactaatgtgttcatgctatctctgatcctgtggtgttgtataaaaatgaacagctaaaaatttacccatgacaagattaaagcaa

SEQ ID NO: 259524 - DNA, 1005 bp, Homo Sapiens
tgagaacccatttgtgcagctgctgagtggggtcgtgtggctgattcgtaatggaagcatctacatcaacgagagccaagccacagagtgtgacgagacacaggagacaggttcctttagcaaatttgtgaatgtgatatcagccaggacggccattggccacgaccggaaagggcagctggtgctctttcatgcagacggccaaacggagcagcgtggcatcaacctgtgggaaatggcggagttcctgctgaaacaggacgtggtcaacgccatcaacctggatgggggtggctctgccacctttgtgctcaacgggaccttggccagttacccgtcagatcactggcaggcgtgatggtgcacaccttacggttacagctgctcaggaggctcgggtggaaggatcgcaatacctcatctcaaaaatagatagacgccatcttgtagccaggacaacatgtggcgctgtcccggctgtgatgagctggactgtggcccctctaactgcagccagcacggactgtgcacggagaccggctgccgctgtgatgccggatggaccgggtccaactgcagtgaagagtgtccccttggctggcatgggccgggctgccagaggccttgtcaagtgtgagcaccattgtccctgtgaccccaagactggcaactgcagcgtctccagagtaaagcagtgtctccagccacctgaagccaccctgagggcgggagaactctcctttttcaccaggaccgcctggctagccctcaccctggcgctggccttcctcctgctgatcagcattgcagcaaacctgtccttgctcctgtccagagcagagaggaaccggcgcctgcattggggacctatgcataccacccgctgcaggagcatgaacgggggagcctctggccgcagagaaggagcagccaggtggcgcccaaaacccttcaggactggaagctcaagctgcccggtggtggaacgtcgagaaggcttgttcc

SEQ ID NO: 259525 - DNA, 893 bp, Homo Sapiens
ggggcgtccgggtgacgtctcccgagggcgtcggcagggtcggcggcgtcggcagcagtgtcgacggcagcggcggcggcgggtgggaaatggcggagtatctggcctccatcttcggcaccgagaaagacaaagtcaactgttcattttatttcaaaattggagcatgtcgtcatggagacaggtgctctcggttgcacaataaaccgacgtttagccagaccattgccctcttgaacatttaccgtaaccctcaaaactcttcccagtctgctgacggtttgcgctgtgccgtgagcgatgtggagatgcaggaacactatgatgagttttttgaggaggtttttacagaaatggaggagaagtatggggaagtagaggagatgaacgtctgtgacaacctgggagaccacctggtggggaacgtgtacgtcaagtttcgccgtgaggaagatgcggaaaaggctgtgattgacttgaataaccgttggtttaatggacagccgatccacgccgagctgtcacccgtgacggacttcagagaagcctgctgccgtcagtatgagatgggagaatgcacacgaggcggcttctgcaacttcatgcatttgaagcccatttccagagagctgcggcgggagctgtatggccgccgtcgcaagaagcatagatcaagatcccgatcccgggagcgtcgttctcggtctagagaccgtggtcgtggcggtggcggtggcggtggtggaggtggcggcggacgggagcgtgacaggaggcggtcgagagatcgtgaaagatctgggcgattctgagccatgccatttttaccttatgtctgctagaaagtgttgtagttgattgaccaaaccagttcataaggggaatttttttta

SEQ ID NO: 259526 - DNA, 1718 bp, Homo Sapiens
gggaattccatgtgtggatgctggattgatttcaccactggtgcagctgctaaatagcaaagaccaggaagtgctgcttcaaacgggcagggctctaggaaacatatgttacgatagccatgagggcagaagtgcagttgaccaagcaggtggtgcacagattgtaattgaccatttaaggtcactgtgcagtataacagatcccgccaatgagaagctcttgactgtcttttgtggcatgctgatgaactatagcaatgagaatgattcgcttcaagctcagcttatcaatatgggtgttattcctaccttagtgaaattactgggcatccactgccaaaatgcagctcttacagaaatgtgtcttgttgcatttggtaatttagcagaacttgagtcaagtaaagaacagtttgccagtacaaacattgctgaagagctagtaaaactcttcaagaaacaaatagaacatgataagagagaaatgatttttgaagttcttgctccattggcagaaaatgatgctattaaactacagctggttgaagcaggcctagtagagtgtctactagagattgttcagcaaaaagtggatagtgacaaagaagatgatattactgagctcaaaactggttcagatctcatggttttattacttcttggagatgaatccatgcagaagttatttgaaggaggaaaaggtagtgtatttcaaagggtactctcttggatcccatcaaataaccaccagctacagcttgctggagcattggcaattgcaaattttgccagaaatgatgcaaattgtattcatatggtagacaatgggattgtagaaaaacttatggatttactggacagacatgtagaagatggaaatgtaacagtacagcatgcagcactaagtgccctcagaaacctggccattccagttataaataaagcaaagatgttatcagctggggtcacagaggcagttttgaaatttcttaaatctgaaatgcctcctgttcagttcaaacttctgggaacattaagaatgttaatagatgcacaagcagaagctgctgaacaattgggaaagaatgttaagttagtggagcgtttggtggaatggtgtgaagccaaagatcatgctggtgtgatgggggagtcaaacagactgctgtctgcccttatacgacacagtaaatcaaaagatgtaattaaaaccattgtgcagagtggtggcatcaagcatctagttaccatggcaactagtgaacatgtaataatgcagaatgaagctcttgttgctttggcattaatagcagctttagaattgggcactgctgagaaagatctagaaagtgctaaacttgtacagattttacatagactgctagcagatgagagaagtgctcctgaaatcaaatataattccatggtcctgatatgtgctcttatgggatctgaatgtctacacaaggaagtacaggatttggcttttctagatgtcgtatccaaacttcgcagtcatgagaacaaaagtgttgcccagcaggcctctctcacagagcagagacttactgtggaaagctgagaactgcccgatacacggcatcatcccatctctaatttcccctctgtcctccatccagcggcttcttccgcttcattctctaccataccacttgtgcatgcatgtgatgttctaataccaattgaagaaccgctgt

SEQ ID NO: 259527 - DNA, 373 bp, Homo Sapiens
  misc_feature (14)..(14): n is a, c, g, or t
tcctatgtaaaaanctggtaacaagtttaagccactttccaagatctttcctccagcagtgccccaatcctaaagctggctattaaatgcccaaagcaacaagagcttcattctgcattattacatgttcactagttgccatggtaactagatgcttgatgccaccactctgcacaatggttttaattacatcttttgatttactgtgtcgtataagggcagacagcagtctgtttgactcccccatcacaccagcatgatctttggcttcacaccattccaccaaacgctccactaacttaacattctttcccaattgttcagcagcttctgcttgtgcatctattaacattcttaatgttcccagaagttt

SEQ ID NO: 259528 - DNA, 465 bp, Homo Sapiens
  misc_feature (386)..(386): n is a, c, g, or t
  misc_feature (397)..(397): n is a, c, g, or t
  misc_feature (430)..(430): n is a, c, g, or t
  misc_feature (439)..(439): n is a, c, g, or t
  misc_feature (452)..(452): n is a, c, g, or t
aaacttctgggaacattaagaatgttaatagatgcacaagcagaagctgctgaacaattgggaaagaatgttaagttagtggagcgtttggtggaatggtgtgaagccaaagatcatgctggtgtgatgggggagtcaaacagactgctgtctgcccttatacgacacagtaaatcaaaagatgtaattaaaaccattgtgcagagtggtgggcatcaagcatctagttaccatgggcaactagtgaacatgttaataatggcaggaatgaaggctctttgtttgctttgggcatttaataggcagcttttaggaattgggggcacttgctggaggaaaggtccttagggaaagtggctaaaactttgttaacaggttttttacantaggacttgcntaggccggatggaggaggaagttgctccccggnaattccaanttttattttcccnggggtccccggat

SEQ ID NO: 259529 - DNA, 1411 bp, Homo Sapiens
ctgcgtgctgcagtagcgcctggtggcggtggcagtttgcccgcgggtgtgtgaagggagacagtgtggaggccacagggtactcgccacgatgagcagcaccttagctaagatcgcggagatagaagcagagatggctcggactcaaaagaacaaggccacagcacaccacttagggctgcttaaggctcgtcttgctaagcttcgtcgagaactcattactccaaagggtggtggtggtggaggtccaggagaaggttttgatgtggccaagacaggtgatgctcgaattggatttgttggttttccatctgtggggaagtcaacactgcttagtaacctggcaggggtatattctgaggtggcagcctatgaattcactactctgaccactgtgcctggtgtcatcagatacaaaggtgccaagatccagctcctggatctcccaggtatcattgaaggtgccaaggatgggaaaggtagaggtcgtcaagtcattgcagtggcccgaacctgtaacttgatcttgattgttctggatgtcctgaaacctttgggacataagaagataattgaaaatgagctggaaggctttggcattcgcttgaacagcaaaccccccaacattggctttaagaagaaggacaagggaggcattaatctcacagccacttgcccccagagtgagctggatgctgaaactgtgaagagcattctggctgaatacaagattcataatgccgatgtgactctacgtagtgatgctacagctgatgacctcattgatgtggtggaaggaaacagagtttatatcccctgtatctatgtgttaaataagattgaccaaatctccattgaggaattggatatcatctataaggtgcctcactgtgtacccatctctgcccatcaccgctggaattttgatgacctattggaaaagatctgggactatctgaaactagtgagaatttacaccaaacccaaaggccagttaccagattacacatccccagtggtgcttccttactccaggaccacagtggaggatttctgcatgaagattcacaaaaatcttatcaaagaatttaaatatgctctggtctggggtctctctgtgaaacacaatcctcagaaagtgggtaaagaccatacgttggaggatgaggatgtcattcaaattgtgaagaagtgaaacctttcccttttcccatctgccggacgaaccacaacagcgttccccatgatcaagcaccctaccccagttctttctggttttggcagtcactggatcaggatccaggggagggagatggaggcacccaaactggaacttcatttgtcttaccttggtgtcaccttgtatgtcgaactgcataaaagatctggtaggctggtcagctacatgcta

SEQ ID NO: 259530 - DNA, 1140 bp, Homo Sapiens
ggaaccaatgaattcatcaaagctgaaatatgtttcatttggaacaaatttcatgcatctctcattaagtttgcttatgagaggtcgcaatttggaaaatttgtccactggatccaaatttgcattgtcagcaacatgcaaattagaaaatatagtttcaaaccggtcacgtctcatggcagcactaaccagtacattatgcacatctgttctttgttcccaaaacatacgccttctaggaactgagacataaccactcagaaaaataattcccagaaaacatttgaattcagagctagtcaagccaagatgtacacctttactgcaagcatataagttggagtacttgacaatgagttcaatgacctcgtcatcaagaaaaagttcaagaattcctgtggggagttctccattaccggtgaacacaatcgtttggtggtgctgtaactctacctgctaacgggttctacagttaggtcggcttttttccattccgcaaagaatttttgtcattttcctcctccttgatggtggaggttgctgcacagtaaacgtagatggaacttcatcaggagagtcatctttaggtgcgtatgagggatcatctgagtcagactcagcatcagagccatcttgaataagatacgcagctgtgtgcaacaaagaacctggcagattatttattgttccaccttcttcatctcctgattcctcatcagaaacaggtgctgtagcattttcaggtggttgtatcactatagcacttgcttctatgctgtcatctgtctctaaaaggtcagttatttcatgtaaacttagtgttcgaggcatcttgggacttaaccgctgcttataataatcttcatctccatcatctcggtatcttcccactttccgacctcctcctcctccttctcctacagaagcagcttcagcttcttccccagaacttgggaaaaagtcatcatcaatctcctgcactggcactttcttctgccgtttcccgcccttgggcagaggcttcagctcatagtcagtaccatctccagacaggtccgcctctgccccctccacctcgtcatcttcccgacgcgtgggtcgacgatatcccgaaattccggaccggtacaagcctgcttt

SEQ ID NO: 259531 - DNA, 1062 bp, Homo Sapiens
  misc_feature (887)..(902): n is a, c, g, or t
agatggcattaaagttaaaggattcagggctctctccaagcatagtccagttaatagagttgaaaaataaaagtataggcccttggttggggagatcctggtttcccctttctcagcccatgaaaggagctgtttgcttattaagtagaaccaagcttctggaaggaagagaaaagtgtggcagagggtgtgtctgttgtgtataggcagtatgctaacaggagacttgagggtaagaaatctagaggctgactttggttctgtttttaggtctttttcatttaactttgacctaagttccttaatttaggaaatgatagctttccacttgacagtctttgaagtctcttccaattttaatatccagatttagagtatgaacatagcttttcttcctgattccagagtttcctgcagacttgtggtcttactgaaggccctcttgaaactgatttgtgatgtagcaagggatccaaaccttacacctgagtctgttaagagcgccctgctacaggaggccacagactgcctgattctcctggaccgctgttctcaaggacgggtaaaggtaaggcagactgaaacttggtttcagttgggcctcattatccttatgtaattcccatgattgattataatttactatgtatgtgcctgaccaagtctggaaatgaacatggagggttttagatctccatatgagccctctagcctcaaaagagcttgatcttttttcttattcatcttttaaagctattcagaaccatttagaactaaaggcaggaggatcagcacatgtcactggggctaaggacgagacagtatgggcaaaagcattatgatcaaaagtttgtaaaatttaagttctgttctagtcttctgaattnnnnnnnnnnnnnnnntaatgggctataagctcccaggaataataacataaatagagcatttcagatgtttccagttttttagggacaaccatcttttaggtagatgtttttccctattcttaatttatctacatggaaattcttcctttggtttcatattccacaaaagttaact

SEQ ID NO: 259532 - DNA, 919 bp, Homo Sapiens
  misc_feature (38)..(38): n is a, c, g, or t
  misc_feature (49)..(49): n is a, c, g, or t
  misc_feature (67)..(67): n is a, c, g, or t
  misc_feature (83)..(83): n is a, c, g, or t
  misc_feature (152)..(152): n is a, c, g, or t
aagggccattaaaaagttaaaagggaattccaagggcncctctcccaanccatagttccagttaaanagaagttgaaaaaaantaaaagtaataaggccccttggttggggaagaaacccggtttccccccttcctcagccccatgaaaggnagctgttgcctaacagtagaacccaagccttctggaaggaagagagcagtgtggccagagggtgtgtctgtgtgtataggcagtatgccaaacaggagacttgagggtaagaaatctagaggctgtctttggttcctgtttttaggtcctttttcatttaactttgacctaagttccttaatttaggaaatgatagctttccacttgacagtctttgaagtctcttccaattttaatatccagatttagagtatgaacatagcttttcttcctgattccagagtttcctgcagacttgtggtcttactgaaggccctcttgaaactgatttgtgatgtagcaagggatccaaaccttacacctgagtctgttaagagcgccctgctacaggaggccacagactgcctgattctcctggaccgctgttctcaaggacgggtaaagggtcccctggccaaaattccccaaagctgtgaagacagaaaagtggtgaactatatcagaaaagtgcagcaggtttctgaaggcgcaccctacaatggaacttaagacttgtattactttcccaagaggaaaggattttcttcccatcccaatttgtatgaatggagttatttaagaaaaaaagatatttttacacgaaactttgtaagtgaaagctgctttttccttccttctttccttttacctccataagaatagggaaagtagaacaagaaaaaattgaactccttccatttctaaataaagtttgggagaaaaaagga

SEQ ID NO: 259533 - DNA, 630 bp, Homo Sapiens
ctcctctattagtaaactctgtgtcaatttttaaggtgaaaaatacagcagaaatacctctgatgtgttctaaaacctaagtatttctctatttggactttaatttgcaatggaagaggacatattgtaacctgtaccagtccaacaggcagatgtagccactgccacctttggttgacacacactgtggggcactagatatgaacaggtaaaactgtaaattttcattttatgactttgtgtgtttgatattttatgttaatgcatcatggtattaacactctttttccttacagttttgtctcatactaagaattgttttagtgttttcatttaaaatatgttgccaatatgttgaaaatgctgtactgatgcatatataacattttacattgagtttaaattgggttaagcacaaataaaaccactttagtttacatattttaaatttcagagttagagactacaaagcaggaaaacacctttaaaaagaaaggcaaagcataaacatctaaaaacttgtattttatgaaatttctcatgagtcttccttttgaaactgtatttgagtaaaggaagagggatctgaatgtttctacagactggctgcataatatattgctttcccat

SEQ ID NO: 259534 - DNA, 762 bp, Homo Sapiens
agttaacaatgtttacttcaattctgacattccattttatacatatatacctactgtatatctctctcaaatgtcagctagaagcaactttttcagttttctatctaatgaaaacggatatattctgaatgtttttgttacctgaaatttatttttgagtaggttgaaaggaccaagatacttgagtgattaaaggactgtaagtgttctgcttatatgcaggagttacatgattttaaaagtcataataggggaagtagttttatcatctgattactcctattaacctaaaaagtatttctaacataacagattgagcagtggttttgttacacttaggcaagaatttattttcccattaaaatttgaaaaatacacttttctttgcttctacccttgcagtttcccttagttcccctaatttccaagtgatctgaactaaaattaatattacacttactaagaaactatttttgttaattatactgagcaaagtttgctccaaatgaaaagtcattacgaactatgtatagtacccaagaaaaggtcaaattgagtcagaagactgtaagtaccacttttggcgctccagagataaaccttgtacacactgcagtagaacagtgagtagaaaatatgagctataaatagatattatttttagttttgatagctctgtgttgaaatacttttttaatgcagataaaaattatcaggaaattaaccttatggcacagaccaaatacttagtgcatggctgag

SEQ ID NO: 259535 - DNA, 770 bp, Homo Sapiens
  misc_feature (659)..(674): n is a, c, g, or t
  misc_feature (725)..(725): n is a, c, g, or t
  misc_feature (735)..(735): n is a, c, g, or t
  misc_feature (750)..(750): n is a, c, g, or t
tcccttttcttggggtatggctgtctcagcacaatactcaacataactgcagaactgatgtggctcaggcaccctggttttaattccttgaggatctggcaattggcttacgcaaaaggtcaccatttgaggtcctgccttactaattatgtgctgcccaacaactaaatttgtaatttgtttttctctagtttgagcagggtctgaattttttcatttatttccttttttgccagcagacagacttgagtctgtaaagacaagcaaatacactgacagaagtttaccatagtttctaaaatgtaaaaaagaaaacccccaaaagactcaagaaaattagaccacaaattttgcattgttcattgtagcactattggtaataaaataacaaatgtttgtgcatttttatgtgaagatccttctcgtatttcatttggaaagatgagcaagaggtctgcttccttcattttacttccccttctgtttttgaaaggcagtttcgccaagcttaatgcaagaatatctgactgtttagaagaaagatattgccacaatctctggatggttttccagggttgtgttattactgagcttcatctttccagaatgagcaaaacactgtccagtctttgttacgattttgtaataaatgtgtacannnnnnnnnnnnnnnnggacatcacatgaataaaggtatgtatgtacgaatgtgttattatattatnatgatatggncatctattttggganaatgttttgcccggctgtta

SEQ ID NO: 259536 - DNA, 943 bp, Homo Sapiens
gagatgacatggtcttgccatttgagccggtgccagtcattgaaatcccaggttttggaaatctttctgctgtaaccatttgtgatgagttgaaaattcagagccagaatgaccgggaaaaacttgcagaagcaaaggagaagatatatctaaaaggattttatgagggtatcatgttggtggatggatttaaaggacagaaggttcaagatgtaaagaagactattcagaaaaagatgattgacgctggagatgcacttatttacatggaaccagagaaacaagtgatgtccaggtcgtcagatgaatgtgttgtggctctgtgtgaccagtggtacttggattatggagaagagaattggaagaaacagacatctcagtgcttgaagaacctggaaacattctgtgaggagaccaggaggaattttgaagccaccttaggttggctacaagaacatgcttgctcaagaacttatggtctaggcactcacctgccttgggatgagcagtggctgattgaatcactttctgactccactatttacatggcattttacacagttgcacacctattgcaggggggtaacttgcatggacaggcagagtctccgctgggcattagaccgcaacagatgaccaaggaagtttgggattatgttttcttcaaggaggctccatttcctaagactcagattgcaaaggaaaaattagatcagttaaagcaggagtttgaattctggtatcctgttgatcttcgcgtctctggcaaggatcttgttccaaatcatctttcatattacctttataatcatgtggctatgtggccggaacaaagtgacaaatggcctacagctgtgagagcaaatggacatctcctcctgaactctgagaagatgtcaaaatccacaggcaacttcctcactttgacccaagctattgacaa

SEQ ID NO: 259537 - DNA, 735 bp, Homo Sapiens
  misc_feature (694)..(694): n is a, c, g, or t
agagaagaagaaaaaaggatattgtgaatgttgcttgcagaaatatgaagatctagaaactcaccttctaagtgagcaacacagaaactttgcacagagtaaccagtatcaagttgttgatgatattgtatctaagttagtttttgactttgtggaatatgaaaaggacacacctaaaaagaaaagaataaaatacagtgttggatccctttctcctgtttctgcaagtgtcctgaaaaagactgaacaaaaggaaaaagtggaattgcaacatatttctcagaaagattgccaggaagatgatacaacagtgaaggagcagaatttcctgtataaagagacccaggaaactgaaaaaaagctcctgtttatttcagagcccatcccccacccttcaaatgaattgagagggcttaatgagaaaatgagtaataaatgttccatgttaagtacagctgaagatgacataagacagaattttacacagctacctctacataaaaacaaacaggaatgcattcttgacatttccgaacacacattaagtgaaaatgacttagaagaactaagggtagatcactataaatgtaacatacaggcatctgtacatgtttctgatttcagtacagataatagtggatctcaaccaaaacagaagtcagatactgtgctttttccagcaaaggatctcaangaaaaggaccttcattcaatatttactcatgattctggtct

SEQ ID NO: 259538 - DNA, 725 bp, Homo Sapiens
tgtacatagaagttgataaagtaacagagagggagaaagttactgttatgagcaccattaatccaactaaggacctgttggctgacttgattgggtgccagagacttcctgaagaccaacgtaagaaagtacaccagctaaaggacttgttggaccagattctgatgttggacccagctaaacgaattagcatcaaccaggccctacagcacgccttcatccaggaaaaaatttaaacaagatgaagaaactccaagggtttgagtaaatacaaagactgaagaaatttcacagcagtttattaatgtatataaacttataaatatttctccagcaaatttgaggaagcatgatatatttgaattaacaccaagggtgatatttcttttagagatgttagttaatctgttttgtgtcttacgtgaaatttcactgtagactgttttaaattgccaagactgcacaaaattacagtgctaatgtatatggttgcagttcacataaagacaaaagcatctgttatgaaatgagtagtaacattgggtggttgatttgttcttagcagacttggcttcattttggtcttgagataaaatggccagcataaatgctgtttatattcacgttttcctaggtgtgtgtgtgcaggccacagcagcatgcccttggtgtagtcagtgccgaaaggggtctgttccttcttgagcctgcctgcagggatggtc

SEQ ID NO: 259539 - DNA, 499 bp, Homo Sapiens
ctatagactttatatacattttgttaaatatagttcctagtgacatagaaacgatgcgtagttttcatttactaattacaaatgttgaggcctaattctgaaagtcctcatatttaaaggctagacaacgtaatgaaatttttaactatttgtatgtcattttgaaagtgtactgctttatggtaaaagtgtttttcatttgttcattgttttcattatttgtgatcatgttgtctttcaatacaggcataaaccttccactcttgaacaaagcagctgctttttaaaagcggtaattgcttctttaccttttatttcttttgtaaatgaagcttttctttaagaatgtgactttaaagtgttgtctattgcataaaacagttgacactcacttattgtaaagtgaagattgttctactgcatgtgaagtggaccatgcagatttctgtatgttctcagtatgcatcactagataataaagtcttttgtgaacaaggaa

SEQ ID NO: 259540 - DNA, 1305 bp, Homo Sapiens
gaaggtggggaggggaatatacacattgcttttatatttaatacttttgctgatgcttttgaaaatgtttatgccacagaatttgctaatatattgtaatcacattccttaggaggactttggtaattggttttatgcattgatggttttcctttccttttttgccaaattgactgtcacgcggcagcttcagggagctcgcattctcttgtgttcgtgttgccctcgtgcccatcaagtgcagtcgggacctcccaggacaagcacgaggcctcaggtcggccctgtggcgggtaggcaggaaggactgtcccagacgaggggcttcctctagagtctcactgctggggaggagaggactgggcctgatggaagttaacccggagctaagtcacccagagcacaggagctgccatgtcagatgggaaatctgcctatgtcataccgtgacagcccgcaggatcaggtgacttctagcagagaccctggtttttttcctgtgcccactccggcttgtcctcatctctacccatcccctgatgcccaggtcaccgggagggctgctgggagcctctcctgtccccgccgggcagtgtcactgagtccttgaaatcctcccctgccccgcgggtctctggattgggacgcacagtgcagttgaggtctgcgtcgggcttggcttttcacaaaggctgatgtcttaactgtcacccatatggtccctgggccaccgggcagcctggggcggtgtgtgtgccatgtcacagcatggcctctcggccttggggaaggaaggcagtgcctgctctgctgtgagccgccaggaaccctcctcctgtcaatgggggtgtagtatttttgccaaaatatcatgttcaatttcagtagtttgatcagttgaaggctagaagtgtgaagtgcagatgagtgtgtgttcttccccaaggtccccccacagctccaggacaccgctgtcctggcatttgtggccactcactttgtaggaaactcatctccttcctgaggagccgggaggctggaccagtcccgtcgtgcagtcaggtgggcggtgtgtctttccagaaggtcacgtggaaatgtctcgggacttgggtcccggagtgcccgtgaagcgtgtttttgctcctgaggtgcattttctcatcatccttgctttaccacaatgagcaatgaggtcgggttttatatgcaacttattgtatctgaattcctgtagcacacctcataggtatgatttttttaaattaaagaattcagaataaacattttttgatccaaaaaaaa

SEQ ID NO: 259541 - DNA, 1240 bp, Homo Sapiens
  misc_feature (986)..(996): n is a, c, g, or t
  misc_feature (1044)..(1044): n is a, c, g, or t
catatctggcaaaaaggataagttacgtgtctactatttgtcctggttaagaaataaaatacttcacaatgatccagaagttgagaagaagcagggatggacaaccgtaggggatttggaaggatgtgtacattataaagttgtaaaatatgaaagaatcaaatttctggtgattgctttgaagagttctgtggaagtctatgcgtgggcaccaaagccatatcacaaatttatggcctttaagtcatttggagaattggtacataagccattactggtggatctcactgttgaggaaggccagaggttgaaagtgatctatggatcctgtgctggattccatgctgttgatgtggattcaggatcagtctatgacatttatctaccaacacatgtaagaaagaacccacactctatgatccagtgtagcatcaaaccccatgcaatcatcatcctccccaatacagatggaatggagcttctggtgtgctatgaagatgagggggtttatgtaaacacatatggaaggatcaccaaggatgtagttctacagtggggagagatgcctacatcaatagcatatattcgatccaatcagacaatgggctggggagagaaggccatagagatccgatctgtggaaactggtcacttggatggtgtgttcatgcacaaaagggctcaaagactaaaattcttgtgtgaacgcaatgacaaggtgttctttgcctctgttcggtctggtggcagcagtcaggtttatttcatgaccttaggcaggacttctcttctgagctggtagaagcagtgtgatccagggattactggcctccagagtcttcaagatcctgagaacttggaattccttgtaactggagctcggagctgcaccgagggcaaccaggacagctgtgtgtgcagacctcatgtgttgggttctctcccctccttcctgttcctcttatataccagtttatccccattcnnnnnnnnnnncttactccaaaataaatcaaggctgcaatgcagctggtgctgttaaanccctccaactcccaccacccatattaatatgtcggcccgcctccggccctcaaaaaaggctttcttagaccatttccttttggacccgcccggccccagcaacgttaaactggaaccctggctccactagcctggtcttccccagggaaaatccctggggtcactgaattaggcgcctttggaatttcctcccccc

SEQ ID NO: 259542 - DNA, 1694 bp, Homo Sapiens
  misc_feature (1204)..(1215): n is a, c, g, or t
gagcgaggcctgggtggcgaattcggcacgagggagtgacaccccggagattcgtaaatacaagaagaggtttaactctgagattctgtgtgctgccttatggggagtgaatttgctagtgggtacagagagtggcctgatgctgctggacagaagtggccaagggaaggtctatcctcttatcaaccgaagacgatttcaacaaatggacgtacttgagggcttgaatgtcttggtgacaatatctggcaaaaaggataagttacgtgtctactatttgtcctggttaagaaataaaatacttcacaatgatccagaagttgagaagaagcagggatggacaaccgtaggggatttggaaggatgtgtacattataaagttgtaaaatatgaaagaatcaaatttctggtgattgctttgaagagttctgtggaagtctatgcgtgggcaccaaagccatatcacaaatttatggcctttaagtcatttggagaattggtacataagccattactggtggatctcactgttgaggaaggccagaggttgaaagtgatctatggatcctgtgctggattccatgctgttgatgtggattcaggatcagtctatgacatttatctaccaacacatatccagtgtagcatcaaaccccatgcaatcatcatcctccccaatacagatggaactgggagcttctggtgtgctatgaagatgagggggtttatgtaaacacatatggaaggatcaccaaggatgtagttctacagtggggagagatgcctacatcagtagcatatattcgatccaatcagacaatgggctggggagagaaggccatagagatccgatctgtggaaactggtcacttggatggtgtgttcatgcacaaaagggctcaaagactaaaattcttgtgtgaacgcaatgacaaggtgttctttgcctctgttcggtctggtggcagcagtcaggtttatttcatgaccttaggcaggacttctcttctgagctggtagaagcagtgtgatccagggattactggcctccagagtcttcaagatcctgagaacttggaattccttgtaactggagctcggagctgcaccgagggcaaccaggacagctgtgtgtgcagacctcatgtgttgggttctctcccctccttcctgttcctcttatataccagtttatccccattcnnnnnnnnnnnncttactccaaaataaatcaaggctgcaatgcgccggcgggaaaaacagaggccggagggcggacagggcatcgccacgataaaaagcgccacaacaggccaatgagcagccgggaggaagtcttgcgggtagaagatctcttggcggtgatagcgggtatgacgaggtcggtgggcccgttttggcagacggacacggaatcaggccaactgatgagaagtaagtgtggcggggtgaggcccggcgccccccgtggctccctccgaggagaagtggttttttacgaaggaaccacattcttcttattggcgacgcgccctcgaccaccacccccagggtacgtcgcggggcggaaaacaggcggcgggcaaaaaccaaacggctagctgtgcctaagagaaggaaaatcatccgggggacgtgcacgagcagaaacggaagagacgggggtgtgcaagacaatcctcccacaccacaaa

SEQ ID NO: 259543 - DNA, 515 bp, Homo Sapiens
gtgtgacccaacagtggacagggttacaaccccctctcctttcttttttgtatttatctatttgtaggattgtcagatcaagtacaagatgcccagttaagtttgaatttcagagaaacaatttcacgttaagaatgtttcatgcaatatttggcatatatttacagtaaaagcattcattatttgtctgaaattcaaatttaactgagcatgctggtttttctcattgtttggtttttctaaatctggcaatcctacagctgtggtcatgggaaatcacctacagcatgttaaagtcctctagtcatcatctcgtcacctgaaatggaagtcctttttccctcaccctccacttctttccaaaggagggcatcaaggaacttaacctgcctgcctggtgggtttctatttaagacatctttgtgattatatttaacctgcaattgtgctttggcttaatgtctagctcactgtacttgtaaatgattaatattcaataaaaccatttttaaagt

SEQ ID NO: 259544 - DNA, 701 bp, Homo Sapiens
tttaaaaacacagaatgagcaagtcattcctgaacaaaaatttactgtgtgtataacatacacctcaaaatgaattttaagggaacatattactaatcaaataacacagtttatgctttttcaatttccacaaattgttaattatgatacttaagggaacccttacaatatataacaagtcatttcaatattattcatcatccttaacttctgaaagtttggtttatgctatcttatctagaaagaaaactacttacaaatctcattttcccacaaaattaattcaacatccaaccttaaaaataaataaagctttgccaatggtaaattggaatgcatatacttgccaggctttgatgaaataaaaataaacgatttacataagcagtacctggtaaaaccaaaacctccttttgaagtataaagttccattcttcttgccctctcagaactgccaatcaattagaatcctctcccccaggaactgttctggtttgtaatgtcatacacagtattttttaacattaataaattattgatatgctaccataaataaatagtcactttttaaaccaaaatgactgtagaggactaacagcacactgaaataatttatttaaaactaagatttgtaaaactgtgatctatcctggtctaatattattaaaattaaaaatcaaaagatgaaatattatttcaga

SEQ ID NO: 259545 - DNA, 558 bp, Homo Sapiens
  misc_feature (21)..(21): n is a, c, g, or t
  misc_feature (33)..(33): n is a, c, g, or t
  misc_feature (219)..(219): n is a, c, g, or t
ataaccctgcaaagtccagancacaaaaatccnaagtgtagcaacaggtgtggcaattccagaagagcaagctgtcaacacatctgaagggcaaagacccccctatcatgcccaggctgggagaggccactcctgtatttggcaggtggcttgtgcccagtggcatcaaggctatggcagggtatagcagagatctaaggccaagtggaagtagagcantgtcgctttgattttgaaaatcaaatgaatggcctttacaaacttccacccacaattctttgaaaagggatgagtaactctgaccctactcttacctccctccccatcaattcaagctgaattaagagaaatcctatgtggatacacagatacaatgacctcagctctgtctagcaccactttcagggaggcggatgtcctcactgggccctcttgcatctcttcaaaatgggaatgaccaagtttggatttattattctattcttgaatcccaaagaccatcctaagagcaaaatatgctccttgaaggatgaggatgtggagaagcacggtatcttt

SEQ ID NO: 259546 - DNA, 616 bp, Homo Sapiens
gctgttgctgtatttgtgaaggctttgaattcatgtatcggatcaatgagattgcctggtcctgtttcaggctgtagactaaaatccaacttgtaacgatatggattactgaattcatcaaatggatatgatacacatgtcaggtctatggatggttgcctttcctttgtataatctattttatcttctatgagctcaacttttagtgacttagaacctttagcagttgtactcattgcagacggattagccatatctgggttctctttacccttttgtttttgctttgaagtttctctacgttccttttgagacacagtttggtctttaggagcatttttactgggctttcccatcttagatgtctgaatcgaatcttcaatggctgttttccgcaattctttgaatagttcttctatttgaatagctggtccatgtgtgatgcccatatcaacaagatgttctttttttaaccacttcaagactgctccattcacgtcttgttcagtcaaaatttccctgtgtttttggtcaatcttatgactttctaaccactgatttacatcctcttttgtccaatcatctgtattttctggaaggttaagttgctttgcca

SEQ ID NO: 259547 - DNA, 1387 bp, Homo Sapiens
  misc_feature (1276)..(1293): n is a, c, g, or t
ctataagaaaaggattcttcttccagaagtaaagaactcatctttagagtacctttaaatgaattttgtttttcttccttattttgaggtggattggtcttctctttttttgggtttccagctcactgggactctcagaccttacctttccagctcaaacaccattagttaaattccttcattctcattagaatgcagcctgctgagtatgtgggtttcactgccggagtccatcatttagccagtatacatagaggaactgcttcgaatcaaggcaactggtgaagggcttagcatgttggcagcaatatcccagagattgaatctgtttgcattttcctcatctaggataacagctgcttgaagccagggctcttagccctttgcattccccttgagcgaggaagccacactgcctttctgtgtctggttcagagctcttccttcttggcatgttttctggactacatgcacatgggcagctatagattaatctgcaaaacctagtcacttacctacccataatatctgggaaggtgtggtatttgttttaaagaaacattgtttctttgggagggcagtttctgtctggactttgaggtggacttagttatccctacagttctttaactctcagcttttaataaaagatgaaatcagatattgatgcagttgggtcacaattctttagaatgcttctaccccagggccgcttcctgttcctagtcatggttttccagtttagtagtggagtttcttgaggctaacttacagaaatttctaactgaaaactttaagagttattgatacttgttttttcagtcagtcacttacatcacctagcctactctctggaatttaaatttatttctctaggctggtcctggaagttgataaccttttggcaaagcttagatttaggagaaggcttgagtccctgttcagcgggtctgtggattctctttgcttatggctctctgcctgcagccctggcagaccatactgtatgtcatggatacccagtggaaatattactgagatgaaacacatttccaagggtatttaaactctcactctgccacctttctaagggtgggaggctggcagagatgctgcaatgcttgataatcatttggccacactgaaatttccaaaggggagctcttgcccggtgcttaaaaaccaaaacttcctggacacttaaaaaattccatgaatctagcacaaaatatccattcttgcccaagtgtatcccctttctctccagccttaatcnnnnnnnnnnnnnnnnnnaaagcccaggcccaggggtactttttaaccgggaaacctgcgggaaggaggggaaagaacacctagcaggggaagctaaaaaaggaaggtttgc

SEQ ID NO: 259548 - DNA, 757 bp, Homo Sapiens
gggggaagaggtagctcacgcgatagaaacgtgttcgctgcccagaagaagggaaggcgcgagtgaggaaaggaggtactgtagatgccctccaaatccttggttatggaatatttggctcatcccagtacactcggcttggctgttggagttgcttgtggcatgtgcctgggctggagccttcgagtatgctttgggatgctccccaaaagcaagacgagcaagacacacacagatactgaaagtgaagcaagcatcttgggagacagcggggagtacaagatgattcttgtggttcgaaatgacttaaagatgggaaaagggaaagtggctgcccagtgctctcatgctgctgtttcagcctacaagcagattcaaagaagaaatcctgaaatgctcaaacaatgggaatactgtggccagcccaaggtggtggtcaaagctcctgatgaagaaaccctgattgcattattggcccatgcaaaaatgctgggactgactgtaagtttaattcaagatgctggacgtactcagattgcaccaggctctcaaactgtcctagggattgggccaggaccagcagacctaattgacaaagtcactggtcacctaaaactttactaggtggactttgatatgacaacaacccctccatcacaagtgtttgaagcctgtcagattctaacaacaaaagctgaatttcttcacccaacttaaatgttcttgagatgaaaattaaacctattcccatgttcaa

SEQ ID NO: 259549 - DNA, 473 bp, Homo Sapiens
  misc_feature (342)..(342): n is a, c, g, or t
  misc_feature (418)..(418): n is a, c, g, or t
  misc_feature (423)..(423): n is a, c, g, or t
  misc_feature (438)..(438): n is a, c, g, or t
gcgcgagtgaggaaaggaggtactgtagatgccctccaaatccttggttatggaatatttggctcatcccagtacactcggcttggctgttggagttgcttgtggcatgtgctgggctggagcttcgagtatgctttgggatgctccccaaaagcaagacgagcaagacacacacagatactgaaagtgaagcaagcatcttgggagacagcggggagtacaagatgattcttgtggttcgaaatgacttaaagatgggaaaagggaaagtggctgcccagtgctcttcatgctgctgtttcagcctaacaagcagattcaaagaaggaaatcctggaaatngcttcaaacaatggggaattactgtgggccagcccaaggttggtggttcaaagcttcctgatggaagaaaccctgnattgncttattgggcccctngcaaaaatgctggggactgactgttagttttattt

SEQ ID NO: 259550 - DNA, 871 bp, Homo Sapiens
  misc_feature (226)..(226): n is a, c, g, or t
ccacacagttatcaaagtgctgcaaaaccaggataatttcatggttgctcttattaggaactattgcacgtaccgcatttatcttctctttcatgttctcaaaagctcctccctgggccagtacggtattggactgcaaatcaaaaatgaatcctgatgaatccttctggtttctgtttcccgggacattgtcgtttcttcgatctccaaaaaatatacaagaaanagtatccttttgccttgtctgggttttgagtgtaggtatctctgatttaaaagtgggcaacggaagtgtgcagttgaaagcaaaaaatacgaaatcctgctgttcgaaattctgctcactagctgttaatctcctttccttttcttgtatcaacttcttgtcaggaagtatcattgcagacattcatgtctccttttccagggagattctctttgtccactgctgtaaatgctgtatgatgtgtgttctcttctgttgctgacatgcaagtgtggtcatatgaactgaagcggatggcttgagaatatagacaggcttgtggtgtactttgcaggagtacttggaagcagagttcactagtgacctcagatatgaggtaaccagggtagtcacattcatagagacagaaagtagaatattggtagccagcagctagcccaggcccccgcaatcgcctcgtcgccccagctccgggctccgcgtcccggacgctcccgggtctgagaagaggaaaggagatcctccacctccccttctagagccaccgccgccgtcgccgccgcgctcctcccccagctctctcagagccggacgccgccccgcccccaccgccgcctccccacttctctcctgggccggactccc

SEQ ID NO: 259551 - DNA, 1645 bp, Homo Sapiens
gtgcgaggaggctgtgagtccgggcgctgcgaccgctgtcagaaaaagatccggatctaccacagtctgaccgggctgcattgtgtatggtgccacctagagatccacgatgactgcctgcaagcggtgggccatgagtgtgactgtgggctgctccgggatcacatcctgcctccatcttccatctatcccagtgtcctggcctctggaccggatcgtaaaaatagcaaaacaagccagaagaccatggatgatttaaatttgagcacctctgaggctctgcggattgaccctgttcctaacacccacccacttctcgtctttgtcaatcctaagagtggcgggaagcaggggcagagggtgctctggaagttccagtatatattaaaccctcgacaggtgttcaacctcctaaaggatggtcctgagatagggctccgattattcaaggatgttcctgatagccggatttcggtgtgtggtggagacggcacagtaggctggattctagagaccattgacaaagctaacttgccagttttgcctcctgttgctgtgttgcccctgggtactggaaatgatctggctcgatgcctaagatggggaggaggttatgaaggacagaatctggcaaagatcctcaaggattagagatgagtaaagtggtacatatggatcgatggtctgtggaggtgatacctcaacaaactgaagaaaaaatgtgaccccagtcccctttcaaatcatcaataaactacttctctattggcgtggatgcctctatgctcatcgattccacatcatgcgagagaaatatccggagaagttcaacagcagaatgaagaacaagctatggtacttcgaattgccacatctgaatccatcttctcaacatgcaaaaagctggaggagtctttgacagttgagatctgtgggaaaccgctggatctgagcaacctgtccctagaaggcatcgcagtgctaaacatccctagcatgcatggtggctccaacctctggggtgataccaggagaccccatggggatatctatgggatcaaccaggccttaggtgctacagctaaagtcatcaccgaccctgatatcctgaaaacctgtgtaccagacctaagtgacaagagactggaagtggttgggctggagggtgcaattgagatgggccaaatctataccaagctcaagaatgctggacgtcggctggccaagtgctctgagatcaccttccacaccacaaaaacccttcccatgcaaattgacggagaaccctggatgcagacgccctgtacaatcaagatcacccacaagaaccagatgcccatgctcatgggcccacccccccgctccaccaatttctttggcttcttgagctaagggggacacccttggcctccaagccagccttgaacccacctccctgtccctggactctactcccgaggctctgtacattgctgccacatactcctgccagcttgggggagtgttccttcaccctcacagtatttattatcctgcaccacctcactgttccccatgcgcacacacatacacacaccccaaaacacatacattgaaagtgcctcatctgaataaaatgacttgtgtttcccctttgggatctgct

SEQ ID NO: 259552 - DNA, 545 bp, Homo Sapiens
gctgaacactgtgtcttcactgagcgggatgagtgattggtacctgccaggccccccgtccacaccctcacaccatgctgagactgtcgggggttcccattggggagtaatggtgatattctgactctctgaattcctaggccatttgggaactgtggtgactgaatatctcagagcaccctcctggcttctttctcttctggctggagaacgtctctaagagcattttaaaatcaggcttttctgtagaaaaatggccgaggccttgaaggcctaagaataacatggactttgcatgcctttgatagtttagctggatgtaaaattcagccttcaaatatttccttcaaactctgaggatggaacatcacagttttctggctctccgtgtttctcacgtatagtctgaggtcaattcgattcccattcttttttctctgggactttagaatttatctttgacattgatgttcttcaaggtcttatggcttttttatgttatttttccaccttgtgcatttccaggctgactgagatcattcacc

SEQ ID NO: 259553 - DNA, 571 bp, Homo Sapiens
  misc_feature (228)..(228): n is a, c, g, or t
  misc_feature (382)..(382): n is a, c, g, or t
  misc_feature (390)..(390): n is a, c, g, or t
  misc_feature (411)..(411): n is a, c, g, or t
  misc_feature (415)..(415): n is a, c, g, or t
  misc_feature (457)..(457): n is a, c, g, or t
  misc_feature (516)..(516): n is a, c, g, or t
aagaacctcggccccagtgatggctgatctcactcccactgtctcgtagaattacactccttcctggggatccctcttcctgcagccttgtccttggggagtacagggaagtacctgcagtgaccctgcccccatgaccttggccaggcaggatgattccagagcccgtactgtggggatcctcactgaccagcccagccccatccgcaagccaggctgggcctgggncattaacttcgctgggctctcccaagaccatcagcagtgcatccagccccctggggcctgggctgctgctggttcttcatcagtcccttggtctctagcctcggccagggctgctctgctctccgccctcctttgtgtatcaagtgtcgctcanagccccantcactggggagcctttcgganctanttggtctttctcatgtcccccactggtctgtaccccagggancgggtgcttgtactgtgtgaatccagtgttcacattcacacttaatgacttccttggcnccaatcatgtatttcaccgtttgcactttttgtatttcaataaaaatgttgatgc

SEQ ID NO: 259554 - DNA, 474 bp, Homo Sapiens
  misc_feature (445)..(445): n is a, c, g, or t
  misc_feature (451)..(451): n is a, c, g, or t
tttgctcttcagccaaaatgtcactcatagtgcactggagaaggtagggcacctccacattccggtctccgtcaaacacaccatacagggcttcgcggttgtcacagaagttattcaccgacaggctgcgacacacaacttgttttttacccccgaagcttcagtgtaaccatgactccatacagctggggctccggaagcgtctcctgtagaaggctgatcaatcttgaaacagcggatattattcagtagttccaggggttttgtgatcaagggacaagggcgcgggtttccagtcaggtctaggctcctgcagtttggggagggcaggttttctgggtaatgtgacttcacttaggctcattacagctcagggtccacacacttgatcttctggggagctggcataacttcggggaaaagaccccggtggcagttgggagtnaggcancccgggtttgcatgcggcctggt

SEQ ID NO: 259555 - DNA, 1074 bp, Homo Sapiens
  misc_feature (23)..(23): n is a, c, g, or t
  misc_feature (785)..(785): n is a, c, g, or t
tgtccacagaagttaattcaccnacagggctacgaacacacaacttgttttttaccccccaaagcttcagtgtaacccatgactcccatacagctggggctccggaaaccgtctcctgtagaaggctggatcaatcttgaaacagcggatattattcagtagttcccagggttttgtgatcaaggacaaggcgcgggtttccagtcaggtctagctcctgcagtttgggaggcaggttttctggtaatgtgacttcacttagctcattacagctcaggtccacacacttgatctctgggagctgcataacttcgggaaagacctcgatgcagttggagtgagcaatcacggtgtgcatgcgcctgcaattcatgatcgttgttgggatgctttcagcttattcccactgagatcaatttcttcaagttcctccagtttcgccattttacttgctggaaaactctgaagtcggttataggccatgtgaaggatcttcaaatgggggtgtcccgttaacaagggcacacatttgtctgtgaggctgttatttgtcaaatacaactcttgtaagatactgtttgtctcttcggaaagcgtggctggaggaaggctttccagtttgttcgcagaggcgttcaggaatctcaggctgtcagccttcatcagaaggttaggtgggagctcaaggagctggttgtgttgcacatccaagacctccaccgaggttctttctagcctttcaggcagccttgccaactggttgtgtcctgccagtagtttccggnagactgcctattacaaaataagcgggcaggaagttccacatatttgaattatggcccaatatcccaaaacttcctagctttcggctttcacataccccactcaggcacattttcctaagcggttccttgaaacatccatgtaggacagataatttggaactgggtaaacatcaagttgaacaagttcattagaagaggcatagagcgcttttaggaaatagccacagatgtctaatgtgaccagttgattcctttcacagtgtaaaacttcaatgttgttgaaaatcaa

SEQ ID NO: 259556 - DNA, 574 bp, Homo Sapiens
  misc_feature (248)..(248): n is a, c, g, or t
cattatgatttggttttaaagagaagaaaaatgagtcttagctcaaaaaaacctctctgactaaggtcaagctggttaagtggtgaggccagaatttgaaaccagaagaggctgactcgaagcctgtcctctttgccgcccacctcagtctattacctttacttacaattatcttctatcatcaaaaatcctccagtgaaagaaatagtaattcaatttctgaaaaaaagatttcccttttttgcccnaatggatatttctcccctttcagctgcttttaaatgatccttatgatctttataaagaaggtatttttaatgtttgattctctttaatgtcattttattccaaccgagtccataacaaacatcatcagcacatatgtgccatttcctgaaaacatttaagtcattgttatttgcttgggatgtacctacaaaagaaaaattcatgaggatatataaagatatgacaattctcttctctcaaacctacaggcagaaagagttaggttttctccaaggcttgagaagggatcttcttctccattaatgcaatggccatctttacagga

SEQ ID NO: 259557 - DNA, 1185 bp, Homo Sapiens
ggggagccactggacaaagcttctgtctctgtgtgtacatttataatgttctaaccaagtctcaaaccttgatgaaaaacacaaaatttttccataaacttatcagaagactcacttttctttctttcttggatagagaaaccattttctgacactaggtttacaatctcagtgtccttacaagttaagtcctaagctcacaggatcctccgagcatgtccatcacctgctctttggctaaggtggcagtgtacctctagatcaacctgggaacagtcacaagggagtgtgacttcttggccataataaactcactcgatagtgtttatgttattaatctgaatgcaacagaagacaaaagcacaggcatgcacacacacacaaccccaaaccactaaaaactacgtaaacactgacttaataaatagtaaaaaggtaatgttgggacttttaaaccttgaatccattagccaggcttgggatgaaaggaccatctaaaatcatgctagtctaaaccatgctcttccacacagctggttaaaaaacactggggtatgaaggaatatgctagaaagaaatgttaaaaatagattgttggctcacacttatttttctaataaataggaccattattactaccaggaaagtcttatttattttgcctgaaattggcttaaagaaagtctcatgacgggatgggatgggctgcgcttctcaatgaactctgaggcagaaatatttgccttggattctgtggattctttaaacctgtgtgctaataattcaaacaatgttgcattaattgtataagggtttttgtatagttttcaaacatctgtggtgtaatgatctttgttaaacatatattctgtaaagtgccatagtctttttttatgtgtagcatatttaaaaatatatatgtatattatacatacacaagtttgtgtgaaagatgtgcaataacaaaggtgtatgtatgtttttgttgttttgttttggaaactggacaggagtcaaaacagggatgtttgtttctgttttggcaaaggagagttccacatttttgccttcatggcttattcagtaacccataattttaatgctacacaaatcttatgtgaagaaaagactggtatgaaatcattttttcctgggtctaaaataatcgctagtgttatgtcaaag

SEQ ID NO: 259558 - DNA, 523 bp, Homo Sapiens
ttcaaaacacagacactgcttatactatatccaaaacaaattagcacctgtttgctgttgctccccatataacttaacattgtgaagcatggtaattaaaaaaaatcagctttcatatctattcagtctctgttgaatgtatagagtaataattccaccccctgccatttttacaattaaaacacaatttaaagttcttgttaaattagccccaaagtaatttttgggaatacagataggggaggaaacaaaacaaaaaatagaacatcgactcactgattaactgttttggtagcagattcagtagtcttatactggatcagtttggatccaccataggcattcaccatttctttcaagtcctgaatatacagtatttgcagcagtgagtaaaccgcactagagttcagtgaataaacccattttctccaagaattcctgaatgttacagtatgaaatccagaaacattatgcaggcttctaaagtaaaaaatatccaatgcctgaaataacatctttacag

SEQ ID NO: 259559 - DNA, 1031 bp, Homo Sapiens
  misc_feature (178)..(197): n is a, c, g, or t
  misc_feature (720)..(720): n is a, c, g, or t
  misc_feature (793)..(793): n is a, c, g, or t
tgcatttatattacagttttcctctatgaaagtccttacttatatgatacaagcactgtgttttgtgcttaaactcttcagcggggtagcatcaaagttcttggggaaggatcgtatatgtgggtcccttccctagaagaatggttgctgatatggctactgcttctacatcttgagnnnnnnnnnnnnnnnnnnnnacactgtagcattgagactgcttgattcaagtctggtgctttgccagatgtattaatttccataaatgctttgtgagtttggttaaaatgaagattcacttgggaaaacactgcagctttagtctgtgttactatcttgttatgagtatgtaaaagtaaaatgcatgtgaatttatcatatttgcactatgaaggtatttggttaaaatacaaagacttttaagattttaaggccctttcttccaacagcttttatagttagcagccattctttattttctggatagccaggttttatcacgcttctagtcaggatgctcctattccttctaaaaattacggtctgactagtgagcaaagtcttgaatttattcaaaagtcctaaataccttctctaggtaagacacttggtagatgagagacggaaggcattgtcaagaaccattttcatgagaggtggtgtgcaaaaaggtagaataaaagagttctttcaacaaagatttactgtgctattctgtactanacccctgtaggtttttggggtacagggttaaacatgatagaggctctgcccgtcttggactttaatagcttanagaagagagcaaatgagctgacagggggttataatgggaattacgggctgcgggtttagggaattggagaaaacccccaagggagaggaattccgggggtaacggtaacggctttcctgggacaaaatggagattttagacccacgaaactctctaaaaagtaaccccacaaagaagggaggggaaacaagggggaccgaccgtggccggggcacccaaataaaacccgggctggtgc

SEQ ID NO: 259560 - DNA, 369 bp, Homo Sapiens; identical to SEQ ID NO: 178220

SEQ ID NO: 259561 - DNA, 804 bp, Homo Sapiens
gatcgctggtttcctctgcagcgcgagggctccggcgaccagaggattcttcccggaaggcattcctgccgcgctccccggggcacccctcaattgtgtactacgtccttgtttagtgtgtatccgtgcccacgtagatgatgtctgtaacgcagttttgtttgaaatatgagaatatgcggcttaaactttgatctgtaaggagcggggccgtggccgtttggagcacgctgtagacaccgttcctcatgctgccgggtgggttttgcagaagctcccttagtgatttcacgtttaacaggcagcatccattttcagaatttcctggcattgatttatattttgaagcatacaggaaacttctcgtttcctcgtttagccccacccagatcaggtgaaagggcagctttaatggtggtttttatggaccacattatcagagagcactgtgcaagccaaatggttcaataatgaatgaaaattctgggtgtaaagagtaaatatgccctggctctttctaccaatgtttgctcctggttggaaagaaaccaaagatttaagacgggctgctcttccagactggctgtgcctgcctgtgcccaacaacctgtgcagccggcagtgtgcctggtgtcacgccaggaggctgtggctgctgtggggccctctggaatttgtgctcctcacaaagtttccccaaaagggtgcttcaaaccttttattggccctggtaaaatgtttccgcggctgggcgccgtgggctcccgccctgtaatcccagcacttttgggagggccaaggccg

SEQ ID NO: 259562 - DNA, 744 bp, Homo Sapiens
tgactttgaaccccaaacccaaaggcctcaaagcattgctcgcaaaagacctggggtagtcccatcttccctccattcaagctcccagacgcagatggttgacgaatgcagcaatgatgtcatcatcaagaaaatcaaacaagaaatccccgaagattattacattgtggcaaatgcagaactgacaggaggagtagatggaccagccctgtccttgacacagatggcaaaacccaagcctcagactcacgctggtccctcctgtgtagggtctgctaaactgattccccatgtcacatctgccatcagcacggagctagacccacacggtatgtctgcatccccctctgtgatctccagaccaattgtccagaagactgctagggtatctctggcttcaccaaacagaggaccccctggtacacatggcaccaaccaacaggtggccatgcaaatgcctgtgagcacatcccatcctaacaaacagatcagtatccccttgtctgccctgcagctgcctggacaggatgagcaagttgcctctgaagagttcctgtcccatctgcccagccaggtctcctcctgtgaggtagccctttctccctcagttaacacagagccagaagtgagctccagtcagcagcagcccccagtcgctcaagccataaccactgaggccacagcacagtgcataccagaccaggatgaaagagcagctgagctcagcagggagcagaacgagaa

SEQ ID NO: 259563 - DNA, 1001 bp, Homo Sapiens
cccagcgaagaagagggtgaagggcaagatgaggacattttacctctaacccttgaagagaaggaaaacaaagaatacctaaaatctctatttgaaatcttgattctgatgggaaagcaaaacatacctctggatggacatgaggctgatgaaatcccagaaggtctctttactccagataactttcaggcactgctggagtgtcggataaattctggtgaagaggttctgagaaagcggtttgagacaacagcagttaacacgttgttttgttcaaaaacacagcagaggcagatgctagagatctgtgagagctgtattcgagaagaaactctcagggaagtgagagactcacacttcttttccattatcactgacgatgtagtggacatagcaggggaagagcacctacctgtgttggtgaggtttgttgatgaatctcataacctaagagaggaatttataggcttcctgccttatgaagccgatgcagaaattttggctgtgaaatttcacactatgataactgagaagtggggattaaatatggagtattgtcgtggccaggcttacattgtctctagtggattttcttccaaaatgaaagttgttgcttctagacttttagagaaatatccccaagctatctacacactctgctcttcctgtgccttaaatatgtggttggcaaaatcagtacctgttatgggagtatctgttgcattaggaacaattgaggaagtttgttcttttttccatcgatcaccacaactgcttttagaacttgacaacgtaatttctgttctttttcagaacagtaaagaaaggggtaaagaactgaaggaaatctgccattctcagtggacaggcaggcatgatgcttttgaaattttagtggaactcctgcaagcacttgttttatgtttagatggtataaatagtgacacaaatattagatggaataactatatagctggccgagcatttgtactctgcagtgc

SEQ ID NO: 259564 - DNA, 1462 bp, Homo Sapiens
  misc_feature (1207)..(1216): n is a, c, g, or t
  misc_feature (1234)..(1249): n is a, c, g, or t
attataatgatgaagaagtgtcaattagagttggtggaaatacacagccaagtaaagttttgaacaaaaaaaatgtagaagctattggacttcttggaggacaaaagagcaaagcagattatgagctatacaacaaagcctctaatcctgataaggttgctagtacagcgtttgctgaaaatagaaattctgagactagtgatactactgggacccatgaatctgatagaaacaaggaatccagtgaccaaacaggcattaatattagtggatttgagaacaaaatttcatacgtagtgcaaagcttaaaggagtatgaggggaagtggttgctttttgatgattctgaagtcaaagttactgaagagaaggactttctgaattctctttccccttctacatctcctacttctactccttacttgctattttataagaaattatagagtgagtgtattttccttgtgtatatattaaacacacccatacaaacattggtaaagttgattacatcaaagaatctttagcttatcttttgaagctactggatattattggtctctctaggtttttatataaatagtgaaatttgaattactgaaaaccatgttaatttttagaactcattttcctcagtagagactagtgatgcattagcttctgggaacaaacttgtatcggttcttaattaaattatccaaaacggaggcatttaaacacttggatttacaccagtcttttgtgtttgctttttaaaataaagtgctcgtatttgtattctccatattttggagtaattatctacatgatgtttatagttcctggggtttgtcacccaagaagcaaaatctcattcagtacatttagttttataagagtcatgaagctaaatcctggggctatgtcagaggcacaaagtctagaatgtgtgtattcacaatggtgtatgtacattttgtgccttgattcacttagaagtgtctcagaaaacctggacagttcgcttctacacaagaattttatatgtatttatgaagatgattctgtaccctagtatatctttttgggcatggactaatttgtatctgtttaactcatattctgcacgatctgtatatagtacatcaaacttagaggtgggaccttaaatttaactttttttaaaaactgggaaggtcaataaaatttaaactgcttaactatggtnnnnnnnnnncccccgcaagaaggagcnnnnnnnnnnnnnnnngaaccttgtcgggccgcccttcgggccctccgaagaaagcttttttttaaaacccagtttcggttttggggcggcggccggggcccccacagttagaggtaaaagtggcaaacactgtggggccaataaaccttggttttccctgaagggaagacatccgctggggccaatggaaccatacggggcttttgggtatttcctccccccacaatt

SEQ ID NO: 259565 - DNA, 615 bp, Homo Sapiens
gacaactgagaattttttccccccacagctgttcgttctttctgactttacttctcccaagtcagtaaataggggcagctgtagggctcttcacaaggaaaagtcccttctcttcccccagcatgccataactgttgctcccatcagtagactactttctaaaaatatggcttgtctgagtgactccttctcgaggccccagcctgtttctcctcagaccccaaatggtctaggaaacatcctacctcctacctgcccacgcactgttaccactgttatatctatgggttccgcgcctcgggggtatatcccgaacctcagctaagagtccttaccagtgctgtcttgcacctgcaggccttgagcactctcactctggaaatctcctggcaccagtgcttcattttcctctgcctgtggcagccctctcattagggttgccagctgtctccctaattttgtcagatacagagattacacttctgctttttctcccgtagcttttgggttatgactgagatgaaaagaagaaaggctgaatttactcccatatttaaaccacaagtcaaaatatacttttaaaatgtgagtaaaattgacacaactttcttccag

SEQ ID NO: 259566 - DNA, 792 bp, Homo Sapiens; identical to SEQ ID NO: 14457
  misc_feature (487)..(494): n is a, c, g, or t
  misc_feature (496)..(643): n is a, c, g, or t
  misc_feature (645)..(645): n is a, c, g, or t
  misc_feature (650)..(650): n is a, c, g, or t
  misc_feature (652)..(668): n is a, c, g, or t

SEQ ID NO: 259567 - DNA, 1229 bp, Homo Sapiens
aagaaacaggagggacttcttaaaaatattcaggtctctacatcaggaattttcgaaaatgaaacaatctaataatgaagctaacttaagagaagaagttttgaagaatttagctactgcatatgacaactttgttgaacttgtagctaatttgaaggaaggcacaaagttttacaatgagttgactgaaatcctggtcaggttccagaacaaatgcagtgatatagtttttgcacggaagacagaaagagatgaactcttaaaggacttgcaacaaagcattgccagagaacctagtgctccttcaattcctacacctgcgtatcagtcctcaccagcaggaggacatgcaccaactcctccaactccagcgccaagaaccatgccgcctactaagccccagcccccagccaggcctccaccacctgtgcttccagcaaatcgagctccttctgctactgctccatctccagtgggggctgggactgctgcgccagctccatcacaaacgcctggctcagctcctcctccacaggcgcagggaccaccctatcccacctatccaggatatcctgggtattgccaaatgcccatgcccatgggctataatccttatgcgtatggccagtataatatgccatatccaccagtgtatcaccagagtcctggacaggctccatacccgggaccccagcagccttcataccccttccctcagcccccacagcagtcttactatccacagcagtaatatgtctgctcagcagctcagctgattcagatcagagggaaagaaataccaaccctgcaataagtgtactaaactctacgctctggttaatgtaatgtactctcctggactgaatgcagtgtataatttctgtctacagctagaagctgtgccccagttccacatttggattacacatgtgagatttgctgctgttgcagtataaacactaggtataataggatttgaaattgcattacagttcataaaaattgaaaatgagaaattaaacctgcaagtgaaacatttgaaacgattatactttctacataagacatggttgggacatcagatacttacaaagatggtttaagtatggatactagagaaaattaagttttctttctctttggtttattgatttggtttaatttccattatgctattttgcataatcaaggcactgtaaatcttataattttaaaataaattacttaag

SEQ ID NO: 259568 - DNA, 1057 bp, Homo Sapiens
  misc_feature (856)..(856): n is a, c, g, or t
  misc_feature (895)..(895): n is a, c, g, or t
  misc_feature (1039)..(1039): n is a, c, g, or t
ctgtctcctccatgttctatagctctagttttatgtaagaaacctatttgccacttcaaataaattgcttgtatttactggcacttcctgagatctgccacctgaactgttttatcatttctgtgaccacaccaaaagtctccacatgattttttaaaagaaaattctttaagtacaatttgatacacaaaacagacttactttaagagttcatctctttctgtcttccatgccaaaactatatcgctgcatttgttctggaacctgaccaggatttcagtcaactcattgtaaaactttgtgtcttccttcgaattagctacaagttcaacaaagttgtcatatgcagtagctaaattcttcaaaacttcttttcttaagttagcttcattattagattgcttcattttcgaaaattcctgatgtgagacctgaatatttttaagaagtccctcctgtgtctttagagattcttggactttagttgtaagacctccatagactcgatctagttcagtaacagaaagagcttcttcatttatcacaccatcttgagccagggctgtcaaaaacttgcttgtcatgtcaaaattcacagatttcaagtcattctccagaccctctctttccttctttacttcatcaagatttgacaataaggattttaagacatttacaacctcactgccctgcatggtctttgctggattagcagaagggatggcagcattcagctcaggctctggcttacacaaaagcacgatggtgtcacgatgagactggtaacattctttcacttgtccatctgcctgcacagctttatctaaaactgttctgaagttggttccctctgctncttaaaggcttaatacagttcattggatggtgtcctttngccaacgttccttaaattttgctcttaaatcattatcggttgcttccttcttcatccaacaaccttaatgactcatctaggatttctctatttcgttgcagtaattcaggcagttctttaatcaactgatcaacagtctggatncctccctgttcaatcaca

SEQ ID NO: 259569 - DNA, 411 bp, Homo Sapiens
  misc_feature (20)..(20): n is a, c, g, or t
  misc_feature (30)..(30): n is a, c, g, or t
acctcacgccctgccatggnctttgctggnattagcagaagggatggcagcattcagctcaggctctggcttacacaaaagcacgatggtgtcacctatgagactggtaacattcctttcacttgtcccatcctgccctgcacagctttatcctaaaactgttctgaagttggtttccctctgggagaaaataaaagtttgcagagcacagaagtgattctaacagcaacgtttatcggctggttatatgttgagttctagtctccaactttacttatcctccccttctatagaccccaattcacttcataataaaaacagctcctgacagtctttgcgttctcgtttttagaaagatgacaaaatcacttataaaatcaaaagcatagctataccttaaaatacatattg

SEQ ID NO: 259570 - DNA, 1306 bp, Homo Sapiens
  misc_feature (27)..(27): n is a, c, g, or t
  misc_feature (84)..(84): n is a, c, g, or t
  misc_feature (156)..(172): n is a, c, g, or t
aactgccggcccatccccaagaagtanctttgctccagggtaaatgccaaagttaaacaaaaatacccacactgccatatttgnaaacaaacaaatgtgacgttgccctatactggccctccatgtgccagaaggaattttggtcagacaatgacnnnnnnnnnnnnnnnnncagattgtgaaatggaattaaaagcacaattctttgtatctgggaaacgtttcactggcaacactaactgtatgatacagacgttacctggaacagtagttatgtttctcttcctatccccaaagaagcacaatagaagaaatagacgcaaaatggaggagggtgttgtttaccaggttatttcagtgcagcctgtgggaatgaatacacgggccacagtgagcagtcccttggctgtattccccagggttctgtatgttgtgcgatggttatttacaagagggtttgacaaaagagagttaactactaaaggtatccaaaaaaggcctgagaaaatctggttaaaatgtataaccttgtattgctactgatgggagttgtttttatatcttttacaaataataaaaagattgttaaaaaatagatttatccagaaagatgttgatttgaactctaaaaagcaacgtggaatcattattttcccttttgaatgaagagccatggagctccgtggttttcagctccctttctggttgcaaatcaatccttcctctggagtgagtcctagggcatgcgggctcttccctaggtgtcctacgtggaaatccttcactcatgcaggtgtagaacacacctggtttggttctgtgtgttccaatattttggccagcttgcccacttcaagaacaagcctcaggttcccctagctgctccttcagggacaggattagctgcctttgatttagcctggagaatcctgctctcaaaagaattgcctttacaaattcaaatcagatccttcgatgcgtgcagtgaggtgatgtgaaactattagtaatgtttaaggctaaggcaacatccatggccatttgtgtatcttaatttgatgcaaatagttaacaataatctaaaatagattctatatgtatctcctctaactttagctgggtgtggaaggaatggaatcagatagatggaggaagaataatgacaatgtcctagaaaccctgtaaaaaggtaaaaataaggagatcagcacagattacccatttctttggtgaacagtaaagaagtgtctccaattctcatagatcacactttacaaaggcggctgctgctcttatatataaaagc

SEQ ID NO: 259571 - DNA, 966 bp, Homo Sapiens
  misc_feature (833)..(833): n is a, c, g, or t
  misc_feature (886)..(886): n is a, c, g, or t
  misc_feature (908)..(908): n is a, c, g, or t
  misc_feature (919)..(919): n is a, c, g, or t
agtaccatcaccccaaacatgacatttactaaaacatctcagaagtttggccagtgggctgatagccgggcaaacaccgtttatggattgggattctcctctgagcatcatctttcgaaatttgcagaaaagtttcaggaatttaaagaagctgctcgactagcaaaggaaaaatcacaagagaagatggaacttaccagtacaccttcacaggaatccgcaggcggggatcttcagtctcctttaacaccggaaagtatcaacgggacagatgatgaaagaacacctgatgtgacacagaactcagagccaagggctgaaccaactcagaatgcattgccattttcacatagttcagcaatcagcaaacattgggaggctgaactggctaccctcaaaggaaataatgccaaactcactgcagccctgctggagtccactgccaatgtgaaacaatggaaacagcaacttgctgcctatcaagaggaagcagaacgtctgcacaagcgggtaatttcagggctgatgtctatagggatttagggctaacaggttttcttgatcagaagaaatttgcatgtagattcagcacagggatatcttctagttctaggatgtcagaacatagatatgggttgtatgatatgcatttgtttgattaagaaaaatattttccatagtttaatgagaatgaagaatatacgcctttggaagtcaacaaaccatgttgattccccatattatccatggggactagcagtaatgcacaagtacataaaagcactaatgcattagtgctagcctgattagtactgacatggtagctaaagtgngtgctgagaaaaaattcagggagtagtttaattagaattttagctttgggtgntgacggtgaagcgggaatgctnttctcctgagntgtcctggggaggggattctccatttctggtttacaagaccagagta

SEQ ID NO: 259572 - DNA, 1829 bp, Homo Sapiens
  misc_feature (432)..(462): n is a, c, g, or t
  misc_feature (634)..(701): n is a, c, g, or t
  misc_feature (1776)..(1776): n is a, c, g, or t
  misc_feature (1789)..(1789): n is a, c, g, or t
  misc_feature (1791)..(1791): n is a, c, g, or t
aacggtggaagcggataagagggtcgcatgtggctgggtgagtagtaggagtttcaataggcgcgggtgcagataaaggtatggctgatttggtgataattgcgagaatgaaagatgtaaggatatggcgggagggggaggcgctatgtatgaagggtggcaggtgtaaaaaaggggtacacggactgtgaaaacacgcgtgtgtgtatacgcgcggcggtgaagaaagtggtgttgtggggggtgtaagacatactgtgctgtgtgcgggaggggcggggaaatatatatatgcggggaggggggaggcggtacgaggagcggacgcgctattggcggggcacacaagagtgataggagggtgtagacgggagaggagcggcaaggggaagggggtgggggaatgtgggatgtggagcaaatgaagggtannnnnnnnnnnnnnnnnnnnnnnnnnnnnnntgtgagttcagaatcggaaaagtattttacatgggggagggtcgcgggtgacgccaaagcgaaaaggctgtataagggatagggaaagtgtaaaaggaggtgagggatgggcaatccgattgagggaaagggaaagggggaaagggtggacgagtgacatgagtggattgannnnnnnnnnnnnnnnnnnnnnnnnnnnnnnnnnnnnnnnnnnnnnnnnnnnnnnnnnnnnnnnnnnnttaaggtggtttgtgtgtttagggtttgttgtgtgttttttatcaaatgaatactttattagagacataacacgtataaaataaatttcttttcatcatggagttaccagattttaaaaccaaccaacactttctcatttttacagctaagacatgttaaattcttaaatgccataatttttgttcaactgctttgtcattcaactcacaagtctagaatgtgattaagctacaaatctaagtattcacagatgtgtcttaggcttggtttgtaacaatctagaagcaatctgtttacaaaagtgccaccaaagcattttaaagaaaccaatttaatggccaccaaacataagcctgctatacctgggaaacaaaaaatctcacacctaaattctagcagagtaaacgattccaactagaatgtactgtatatccatatggcacatttatgactttgtaatatgtaattcataatacaggtttaggtgtgtggtatggagctaggaaaaccaaagtagtaggatattatagaaaagatctgatgttaagtataaagtcatatgcctgatttcctcaaaccttttgtttttcctcatgtcttctgtctttatatttttatcacaaaccaagatctaacagggttctttctagaggattattagataagtaacacttgatcattaagcacggatcatgccactcattcatggttgttctatgttccatgaactctaatagcccaacttatacatggcactccaaggggatgcttcagccagaaagtaaagggctgaaaaagtagaacaatacaaaagccctcgtgtggtgggaactgtggcctcactcttacttgtccttccattcaaaacagtttggcacctttccatgacgaggatctctacaggtaggttaaaatacttttctgtgctattcagccagaaatagtttttgtgctggatatgattttaaaacagattttgtctgtcaccagtgcaaaaacattacagatgtctgggctaatacaaaaacacataagaatctacaactttatatttaatactctattcaggtttanctcaaagtaatgngnaataattagaagtaaaggcttaattcttctgagagggc

SEQ ID NO: 259573 - DNA, 1066 bp, Homo Sapiens
  misc_feature (426)..(558): n is a, c, g, or t
  misc_feature (561)..(601): n is a, c, g, or t
  misc_feature (612)..(612): n is a, c, g, or t
  misc_feature (621)..(621): n is a, c, g, or t
  misc_feature (626)..(654): n is a, c, g, or t
  misc_feature (703)..(713): n is a, c, g, or t
  misc_feature (726)..(788): n is a, c, g, or t
  misc_feature (910)..(924): n is a, c, g, or t
tgacaagtagagaatactacattgagaaactaaaccctcttcttggggtcctgatactcattcccatttgtcccagtgctgacaacccaatcttcccaatactttcaggcctgctctacaaaagtacctgttcttgtagaaattttacagtctgccattttgggtgcccaccccaatttttaccttttagtaagttggcatgaaattttggtaaaatctgaaaatcacatttcagaataaaacaattgggcaaaactacctaggctttactcttgagtgtctccttttgatagggattgtttctggaccagtttgtctaagtcctggctcttattggttcatatgaaataatgttaacttcacttctttgtatattatgtataaattagaaaatgaaaaatgtgtgaataacattgtatgaaatannnnnnnnnnnnnnnnnnnnnnnnnnnnnnnnnnnnnnnnnnnnnnnnnnnnnnnnnnnnnnnnnnnnnnnnnnnnnnnnnnnnnnnnnnnnnnnnnnnnnnnnnnnnnnnnnnnnnnnnnnnnnnnnnnnnncannnnnnnnnnnnnnnnnnnnnnnnnnnnnnnnnnnnnnnnnaaaatccaccnccccaccancccannnnnnnnnnnnnnnnnnnnnnnnnnnnnaaaagagaattacccactcgttcttgggggcggggcgcgcccccctttnnnnnnnnnnncaggtgggcatannnnnnnnnnnnnnnnnnnnnnnnnnnnnnnnnnnnnnnnnnnnnnnnnnnnnnnnnnnnnnncgcccgccggggcgcaaccagggtgttcctcaacacaaacccggagggggccccgtggcgcctttttcctgcggttttttaaagaccgcggcccacccaccccctctccacatttaaaacannnnnnnnnnnnnnngccgtttacaatcagggatgcggggtggataaaccacatcacaccccctcccccgccgctgtcacaaacaccctccccccggggtggggagaaaatcccctcggcatcgccccggggacaatacccccctcgcccgcacggg

SEQ ID NO: 259574 - DNA, 795 bp, Homo Sapiens; identical to SEQ ID NO: 3238

SEQ ID NO: 259575 - DNA, 1232 bp, Homo Sapiens
gggacttttcagcggcaggcgaagggggctgaggaaaggaggtgggtctaggccaagggaaattggggtgccaccaaacggagacagctttggactaccaggcttttaagagactgtgctattgttgacttcttcacagaatcaagcactcttttggaagagggtaatctctctccaaaaactgaggacacttaccttccccatatattgagtccagctgtgtttggtggcccaggtactaatttcaagatgccaggacgttccagttcaaattcaggttcaactggtttcatctccttcagtggtgtagagtctgctctctcctccttgaaaaacttccaagcctgtatcaactctggtatggacacagcttctagtgttgctttggatcttgtggaaagtcagactgaagtgagtagtgaatatagtatggacaaggcaatggttgaatttgctacattggatcggcaactaaaccattatgtaaaggctgttcaatctacaataaatcatgtgaaagaagaacgtccagaaaaaataccagatttaaaattattggtagagaagaaatttttggctttacagagcaagaattctgatgcagactttcaaaataatgaaaaatttgtacagtttaaacaacagctgaaagaactaaagaagcaaagtggtcttcaagctgacagagaagctgacggaacagaaggagtggatgaagatataattgtgacccaagtcagaccaacttcacctgccccattacaaaggaagaaatgaagaagccagtgaaaaataaagtgtgtggccacacctatgaagaggacgccattgttcgcatgattgagtccaggcaaaagcggaagaaaaaggcctattgccctcaaattggctgtagccacacggatataagaaagtcagatcttatccaggatgaagcacttagaagggcaattgagaaccataacaagaaaagacatcgtcattccgagtaggaaaagccacctgcctgcagggacaccagcagcctacctcctaccccagctgtctgttgagagcagtgctgaccccagcagttagggactggctgcatagcatacttgttgggggtaaaacttgttgcttttatgtgtgcttgaaaacatttttcaaagttacacaacagaaatgcaatcatattgtttatttttaagtgttctataatgttaaataaaactttgatcatctgaaaaaaa

SEQ ID NO: 259576 - DNA, 604 bp, Homo Sapiens; identical to SEQ ID NO: 3594
  misc_feature (234)..(249): n is a, c, g, or t
  misc_feature (392)..(510): n is a, c, g, or t

SEQ ID NO: 259577 - DNA, 1155 bp, Homo Sapiens
gccctcttcaagatgtctaaaagaatggttatgtctgtccagttagggatttcacatccacatgtaatcatgtctgctgctgttgctacccaaattttcatttctccacattttgggtacttaagctaaaacgtaatggccacagtctgtaatccattcacattcctcagtttcaccacctccctcttccagactgcactctctgtcatcagtcccctcctttctaacagaaatggggttatgattttgaaggctgtgggttcagggagtctttgccaatcctgttggccctaaactatcaaggaggctccatttcaccatttgattttttgcatttcaggaggcaactgattgtttcgatatgtacatattactcacgtataccccatttccttccagtcagcccaacattttccaccagtctgtccccatctctgaaatccttccttctctttccccctaagtcttttgagtgtcatcatgtactggtggtttctcggttccatctcatccatttccttttcaatggagactacagcgtcagccagctcagccttggcttttaactcaatattccagtccataggggtggttaaaagttgctgcaaggctgcaggcactggcagtgggaagaggcagacgactagatgacttctgcacttttagctggttgaaaagtaccactcccactctgaacatctggccgtccctgcaaagagcgtactgtgcttgaagcagagcactcacacataaatggctgtgtgtggaattgcttgccaaagaagtttctagcctttccctttcccctaactgcatcagggaagaattcttatctctagcttggtttccacatgaggtttttctgagaagggcttgggacaagaagtctgtcatgttagttaagcaggcaagaaatcctactaatccagttttgtttgaaagttgtttgtccgtatgattttttaaaagtcaagtttaatttcaaaaaaccttttttttctgagattacttttggggtaatatttaaaatgagagacattttgtaaccctgtaaaatacatagggaatataacattccagtgtatacaaagaaggcaaattctttaatcaaataaagcgcaaaaaacccaaacaaaacctaacccactatcatgt

SEQ ID NO: 259578 - DNA, 956 bp, Homo Sapiens
agcagatagtgtttgtgtagggactgcggacttttgcattacagcctccctgctttgcccgcctgctgctggaagcttaacagagctccctctttgcccactagcagggcattagctggtgctgaagacagtggctgcttggcgagcctggatctccaagtgaccccctcagcaactcctgatgaacaggactgaagccaatattaaagcaagtcaaccaaaggttctctggtgtagacaagacagcaaaaggacagactaccttgtggaacctagcattgttctccttctgcagcactaagtaacatttgttctccgttaagatctttgcaaaccacacacaagaattgctggtcatcctgccaatagatgctgctcacagaaccaaatttcctgtgctgaattgtcactcatgggcctgagagtaggagactggagaccaaggtggctagaatccagttgggcctgatgtctccctgttgaaagggctccttgtggaatgaatagcacatggctcctgtggtggatctgatagtggcatagcaccaagtgatgcaggcctccaggggccacagacacagaagatgctcccgggtcccccatgtactccagacacactgcaggccacctctcccagcaggttgccagtcatgggccccatcatcatgacttctgtccaaggtactgtgtgcagaaatgtgattgagattcaagtcaggcctctctgcccttttccctccagaaacaaaaccaagataatttatcctgaacacggtgaaaaaaggaagggagggaggagaaaaagtccgggtctcacctgggattctctgtctcctgcaacatgaaggatttagcctgggaggaggtggtgagaactctgggagagaaaaaaagaagggaaagaatagttttacccatgctgaagttaatttaaaccttcacctagagaagcaaaa

SEQ ID NO: 259579 - DNA, 1048 bp, Homo Sapiens
  misc_feature (661)..(661): n is a, c, g, or t
  misc_feature (811)..(811): n is a, c, g, or t
cgtttttggttctgggcattttaggatgtgtttgatggtatagtgtggtgatggcgtcataggtactcagtagtatgcgtcgaggaagtgagtcagcgttagataagactctgttatagagatcgaatatgacatagggataatgttcttagaatctgctgtggtggaaataaatgaacacatgagagtctgccctgaagaggtaaatcagtgtttcttgggaagaaccagattccctgacagaagctaccctatgtagaggacaaagtaggtcttcaataaatattagttggtttactgcttttcccaaggatacatctggagggtctgcattcctttctcattggtgccgcctgaccacagaactagctttttccgtgacatctaacctaaaccccgcagtcctaagtcctgacacgtatgacaagatgctgccacctggtggatacagaatagatttaatgaaatggctaggaagtctttcactctagttggtggaactggcaatagggtgagagggaagcaggaatgagaagacaaaaattaagaaacaggaaaaggaaggagctccatctctaatatggaggtagaaaaaaagggactatcatctaaatgagactgaagagtccctagaggagaatggcttccctctccttccttntgagactagaaacgaggaaagaggctacagcttgtattgagggaaatgcaagactgaggagaaaagaaagcaggtctagctgatctcaacttagcaagctaaaataagagtagcctggtgttagcggccacccaagcaactccctgctcntagtttccacttggggaatccatgtgattttggggaggctgacccccacccttttccccaaaggtgttgtccatgatatagaataagcaaattagcatgtatcatcctcctggccacagtgattggtcagggtggacatgtgacccaggcctaatcagtgtgaatattagggcttttgctgagatttctggtacaaagatgccttctttttctgattggacataaatggggaaaagt

SEQ ID NO: 259580 - DNA, 968 bp, Homo Sapiens
cgggattttatggggtggacaactaagacatttagaattgcaaaatgccaatcagattggatggaacgctgggttgacgatgcattttggagcttccttttttcgcttatccttattgtaatcatgtttttgtggagaccatcagcaaacaatcagagatatgccttcatgcccttaatagatgattctgatgatgaaattgaggaattcatggtaacttctgaaaatttaaccgaaggaataaaattaagagcctcaaaatcagtttccaatggaacagctaagcctgccacttctgagaactttgatgaagatttgaagtgggtagaagaaaatattccctcttcattcacagatgtagctcttccagtgttagtggattcagatgaggaaatcatgaccagatctgaaatggctgaaaaaatgttctcttcagaaaagataatgtgattggaacccgtataagaaatgtagttaagcctgaaggactatccttcatcaagactgaaagtgagctttgatttgatattgcctaaaaatttttattgtgttatcttggaagtctgtgtatcaaaatgaagaattcagatggtaggaggttctatagtccttttaaagctgactcttgagtgtcagttgaatatccattaaattggatttggaaataacctgaggaaagtattatgataaagatctgcacagatgcctcttagctgataggtggcaggcctgtgggtttggggttctccctcttttctctggaacatatgacaattccagattaaagaaaaatgttttttaataaataccctttggtctttcttctagtcaccttttgaggtagatattgtgaatttctggagtataatatatccgtgtctctgtgtcttaggtttactagatgcaataatacttctctttgacatttgtactgaagtgatttgatattaagtaaaacagttaatgtt

SEQ ID NO: 259581 - DNA, 1749 bp, Homo Sapiens
  misc_feature (1271)..(1271): n is a, c, g, or t
  misc_feature (1428)..(1482): n is a, c, g, or t
ctcctgcaccttcagcacatccctgtgcacagctggaagggtgcatggcccgctcacctttgttcagatgggtggaaacgctgatgataccagctcctccctgccgtgcccctgccacggagcaggcattgtgaactggctggtgtttgcagtcccacgtggcatggcctccagcccaacccacagtggagactggagacagggcaatgagtctggtcgggggcacgtggacatgccccataggggccccacccagacttaacaggcaaggtcctgggcattgcgcgacgcaggactcaatgctaaagcaagcctgcctggctctgtgccagggcccctcttctgatttacacatcccatttttacacagacccttccttcttaataaaggctgacagttctgttggcagccaagaacccacaccatgaagacagggagtgaggggcctttgtgcccaactccagcacagctgcgttctggggtgtgtgagaggcatgttcgtgtctgtgcgctggtggtctcgtgagacagttccgaggacggggaaattgcagggtggtgggggcgtgaggcttatatgtggaactgatgcagagttcgcctgcagacggatctggatatacactatgtataattgttacgtgtaatttaaaatatatctgtttgccatcgtcatgagaagattatatgtaaggctctgaagggagagggagatgtacattctgccaggctcctggggaccttatccgagtcatgaaattgatgactgttgatccagtggtgcaagaagctacactccatgtgtcatcacgcttatgactcctaatgtatttttaaggcaaaaaatgtcagccgactccatcttcacccctcgattcctcgagtccagcctttctgtgccagtgcttcactgagccacaacgctctcgccatcgggacccggctgggcctggagtctcggggcacagttgccatggagccctcctgggtcattctacaaatgtgctgagtgccagctgaaaaccccacaggagatggagtaccttggccaagcttaaagagaagattttctcagggtatttattagtgtgtccagcagggtcaggaagcaggatggaaagatgcatttcagactgttaatttattaacaaggcaaatgattttgtgtttcttgatgacagactattaagtttgggacttattttcccatttgagaagttataatatatatttaagatgataagtttcctgcttaagttgtgcctttcangcttcaatgagtctaaggagcactaagggtaatgataccaatgagggttggtttattatcaaacctgaatagctgtggtttctccaggtaaatattttcttctactgaacatggagccattattaagagttgtgtgttttttattatgtacatttgnnnnnnnnnnnnnnnnnnnnnnnnnnnnnnnnnnnnnnnnnnnnnnnnnnnnnnnttaaagttgtgatactagatttagattctgatgctaactgcaaatcaggttggtctctgctgggtctctcctgcttttattttactttaaggacaagtgtagttgtcgtccaccacctttcaaaaaatgtgaaactgccctgcctcccctttttgctgacaacactgtgtacattgaccacttcctaccatactttatgttgtaaaatcaaactcttttgtggtacattatcgtcatgcttctgcaaattcgaataaattctatggc

SEQ ID NO: 259582 - DNA, 884 bp, Homo Sapiens
  misc_feature (463)..(640): n is a, c, g, or t
attataggcgtgagccactgcactcagcctgatgttccctcttttataagtgccattccttcttcctacctcacaacctagcaaaattggattcttcaaaacgccaggttggcctttcttgactccaaaagaggtgactcttgtagcattcttacaggcctaacatagcacttactttatgttgcaatgctgtgtgcaatgctgtgtttttttactcactagctctgagcaaaacattatttattcttggtaattgtaacacttggtagtgaagacatattttttgccatataatggattatactttgtatttgaatccatgtgaatcagtagcatattggtcttcattgtttttcctccttctccgacgtttttttgagacagggtctcactctgttgcccaggctggagtgcagggcacaattacagctccctgcagccttgatttctcaggctcaagccnnnnnnnnnnnnnnnnnnnnnnnnnnnnnnnnnnnnnnnnnnnnnnnnnnnnnnnnnnnnnnnnnnnnnnnnnnnnnnnnnnnnnnnnnnnnnnnnnnnnnnnnnnnnnnnnnnnnnnnnnnnnnnnnnnnnnnnnnnnnnnnnnnnnnnnnnnnnnnnnnnnnnnnnnnnnnnnnnnatgagccactatgcctaaccatattttttccaatattaaaaaatctttttttccccctaaggaatgtgttatataaggtcaacatgtttttagtgcttcagtttgacttgtctacatctaaagttaactctttaaggcttacatttatgattataattctttccatcgagggatttagtctccattattgtcatgtttcttgatttttttcattatacttggttcttctttttgtctaggtttt

SEQ ID NO: 259583 - DNA, 878 bp, Homo Sapiens
  misc_feature (783)..(783): n is a, c, g, or t
  misc_feature (807)..(807): n is a, c, g, or t
  misc_feature (849)..(849): n is a, c, g, or t
agttattataaatattatgtaaaatatatggctctctctgcaccagttatatcttattggttggtcatatcactggaaactggaacctttgattagcaaaattaatattgaaataagaaatagttcttttatattgtgtcatttggacactttcaagtacaaaatggtaataataacttggattgaggcagaaacacctattttatggctatctatctaaacatcttaaaatggccttctctgtaatacactttcttttaaaagacttcactaaatctatctttaaaaggaaaaacaaaagggagaggttgaaaatgcgcgagctgccctgcactgtgtgatgctccctccccaggagacgtggacgggggacgaggcacccgcagacgcccttctgctcactcgctcctctgtgcattcagcgagccacttgccacagatggagcccgtgacggtgtggagggtttcctggaaaggccatcttccaccaggtagaggcgagcgtgcctaggacaggccacagggctccacagaaatacctcaccccagcttcagggttctctctcctgagcctagatttgccagggtcttggtgccacgcaaatggtttcaaactgatctctatggataaatgctgatgttggttaaagaactgaaaaatgtgctcaactgtttcatcttttctattttatttttgtaaatttatattgtacacaacccagggaagtaactattttgggacatgttatttttattaaaccaggtaatttaactatttatccngggatttaggactagggttgtttncatttgttgacttagttttccagccaagaagggaaacgactnttctcccccatgttccaggtctcagtttt

SEQ ID NO: 259584 - DNA, 1199 bp, Homo Sapiens
gttggttattgcttaagaagtgcagtgtgtctggaagtgcagaacttggtatcctttagagaaaaaatattagtgaagaagccctggaggcccaggttgggagtcagtcgaggattcctcaagtaccatttgctaggctgtgaggtgccttagggcaggtctcttgtgccctgttctcttgtccccaccaccaacctatagcaggcaccaaagcaagtgcccggtaaataccaataagaaattaaggaaagaaacaaaccacgacacccaaatgccgtaatcttaaagaaaagcaaatgcagtcccagtcctctgaatgggtcagccccttagatggaggaggtgggacgtttgggcttgggggctcggcaaggcaagcaagacacaccagagctcttccctcgatgccagccattcatcgacagtcagcatgtcatccacaagtatttcctgccccgagcctatgctgtcgccatcccactggctgcaggcctcctgctgctcctgtttgtgggactgttcatctcctacgtgatgctgaagagcaagagagtgaccaagaaggctcagtgaaggtcccgcagggatgaggctgccagccccttctctgcttcccctccagcacagggaccaagtgggggagcctgcagaacctgtccaggcacagtggctcctcaagcctgcctgtcctgcagagtccccatggcatggagcttacacctgactgactggagccccctccccgactcccacttccagaagctaggagggagggatacctggaagactccggtcacctccttcttgctcagggcctaaaagatgctggtcctcccaacctcactctcagactccctgccaccttttcccctgggttctgccgtcttgcctcacttcccctcctgtcacatgctgacgttggacttagcaggttctaaggccacatgtgtgacctctctgacttctcttcctccaccaaggcagctttccttaccctgacacagccccagaccccacaaagccttctggacctggaaagcctggggaaggactgacagaccccaggaccagccctggggctcagggcagccaccccgggccgctgaccgactgacctctctcacggagcccagccccaaagccccagggctggcccgtttgggacagctgaccaataaacactgatggtgtgtttgtca

SEQ ID NO: 259585 - DNA, 786 bp, Homo Sapiens
acccggaaccggagtgtggcttgcggctcgggtggctgagcgcgcggggaaatggccacggggacagaccaggtggtgggactcggcctcgtcgccgttagcctgatcatcttcacctactacaccgcctgggtgattctcttgccattcatcgacagtcagcatgtcatccacaagtatttcctgccccgagcctatgctgtcgccatcccactggctgcaggctcctgctgctcctgtttgtgggactgttcatctcctacgtgatgctgaagagcaagagagtgaccaagaaggctcagtgaaggtcccgcagatcgacggctgccagccccttctctgcttcccctccaagcacagggaccaagtgggggagcctgcagaacctgtccaggcacagtggctcctcaagcctgcctgtcctgcagagtccccatggcatggagcttacaccttgactgactggaagccccctccccgaactcccacttccagaagctaggagggagggatacctggaagactccggtcacctccttcttgctcagggcctaaaagatgctgggtcctcccaacctcactctcagactccctgccaccttttcccctgggttctgccgtcttgcctcacttcccctcctgtcacatgctgacgttggacttagcaggttctaaggccacatgtgtgacctctctgacttctcttcctccaccaaggcagctttccttaccctgacacagccccagccccaaaaccccagggctggcccgtttgggacagctgac

SEQ ID NO: 259586 - DNA, 477 bp, Homo Sapiens
  misc_feature (433)..(433): n is a, c, g, or t
  misc_feature (446)..(446): n is a, c, g, or t
aaatggccacggggacagaccaggtggtgggactcggcctcgtcgccgttagcctgatcatcttcacctactacaccgcctgggtgattctcttgccattcatcgacagtcagcatgtcatccacaagtatttcctgccccgagcctatgctgtcgccatcccactggctgcaggcctcctgctgctcctgtttgtgggactgttcatctcctatgtgatgctgaagaccaagagagtgaccaagaaggctcagtgaaggtcccgcagattggagggctgccagccccttctctgcttcccctccagcacagggaccaagtggggggagcctgcagaacctgtccagggcacagtgggctccttcaaagcctggccttgttccttgcagagttccccatgggcattgggagcttaacaacttgaattgaattnggaaggccccttncccgaatttcccattttcagaaagttaaggg

SEQ ID NO: 259587 - DNA, 452 bp, Homo Sapiens
agggtcacttcgtcagctgagacctccttttctccaggccacggggacagaccaggtggtgggactcggcctcgtcgccgttagcctgatcatcttcacctactacaccgcctgggtgattctcttgccattcatcgacagtcagcatgtcatccacaagtatttcctgccccgagcctatgctgtcgccatcccactggctgcaggcctcctgctgctcctgtttgtgggcagctttccttaccctgacacagccccagaccccacaaagccttctggacctggaaagcctggggaaggactgacagaccccaggaccagccctggggctcagggcagccaccccgggccgctgaccgactgacctctcctcacggaggcccagccccaaagccccagggctggcccgtttgggacagctgaccaataaacactgatggtgtgttaaaaaa

SEQ ID NO: 259588 - DNA, 667 bp, Homo Sapiens
cgatgccaataacaaggacatcctgctgatgctgagtgacatggacatcaacgccatcgccgggacgctcaagctgtacttccgggaactgcccgagccgctcctcacggaccgactctacccagccttcatggagggcatcgccctgtcagaccctgctgccaaggaaaactgcatgatgcacctgctccgctccctgcccgaccccaacctcatcaccttcctcttcctgctggaacacttgaaaagggttgccgagaaggagcccatcaacaaaatgtcacttcacaacctggctaccgtgtttggacccacgttactgagaccctcagaagtggagagcaaagcacacctcacctcggctacggacatctggtcccatgacgtcatggcgcaggtccaggtcctcctctactacctgcagcacccccccatttccttcgcagaactcaagcggaacacactgtacttctccaccgacgtgtagcccgaggcagggtggctgcgggcgggtggtggaaccagcccctccagcctggggtccaactcagacttgaaagactgcaatagaaaactcccaaacccagcactccagactcgagggaagccagcttccaagaactggaatgcgtacgtcttttgtgccaccttgtacaaagccggctgc

SEQ ID NO: 259589 - DNA, 1809 bp, Homo Sapiens
  misc_feature (66)..(103): n is a, c, g, or t
  misc_feature (1449)..(1531): n is a, c, g, or t
  misc_feature (1766)..(1766): n is a, c, g, or t
accgagcgaggcctgggtggcgaattccgcacgagggtcgctccgggagctgccgacggacggagnnnnnnnnnnnnnnnnnnnnnnnnnnnnnnnnnnnnnnatgcccttctccaacagccacaacgcactgaagctgcgcttcccggccgaggacgagttccccgacctgagcgcccacaacaaccacatggccaaggtgctgacccccgagctgtacgcggagctgcgcgccaagagcacgccgagcggcttcacgctggacgacgtcatccagacaggcgtggacaacccgggccacccgtacatcatgaccgtgggctgcgtggcgggcgacgaggagtcctacgaagtgttcaaggatctcttcgaccccatcatcgaggaccggcacggcggctacaagcccagcgatgagcacaagaccgacctcaaccccgacaacctgcagggcggcgacgacctggaccccaactacgtgctgagctcgcgggtgcgcacgggccgcagcatccgtggcttctgcctccccccgcactgcagccgcggggagcgccgagccatcgagaagctcgcggtggaagccctgtccagcctggacggcgacctggcgggccgatactacgcgctcaagagcatgacggaggcggagcagcagcagctcatcgacgaccacttcctcttcgacaagcccgtgtcgcccctgctgctggcctcgggcatggcccgcgactggcccgacgcccgcggtatctggcacaatgacaataagaccttcctggtgtgggtcaacgaggaggaccacctgcgggtcatctccatgcagaaggggggcaacatgaaggaggtgttcacccgcttctgcaccggcctcacccagattgaaactctcttcaagtctaaggactatgagttcatgtggaaccctcacctgggctacatcctcacctgcccatccaacctgggcaccgggctgcgggcaggtgtgcatatcaagctgcccaacctgggcaagcatgagaagttctcggaggtgcttaagcggctgcgacttcagaagcgaggcacaggcggtgtggacacggctgcggtgggcggggtcttcgacgtctccaacgctgaccgcctgggcttctcagaggtggagctggtgcagatggtggtggacggagtgaagctgctcatcgagatggagcagcggctggagcagggccaggccatcgacgacctcatgcctgcccagaaatgaagcccggcccacacccgacaccagccctgctgcttcctaacttattgcctgggcagtgcccaccatgcacccctgatgttcgccgtctggcgagcccttagccttgctgtagagacttccgtcacccttggtagagtttatttttttgatggctaagatactgctgatgctgaaataaactagggttttggcctgcctgnnnnnnnnnnnnnnnnnnnnnnnnnnnnnnnnnnnnnnnnnnnnnnnnnnnnnnnnnnnnnnnnnnnnnnnnnnnnnnnnnnntaccacccgacacctacgccaaaaacccaccaccagtaccaaccactaaaccaacccccaaacactatataataaaaaatgccggcccggcccgccctccgccccctacataaaaatttttctcaaaaaacaacccctcttacggcgcgccccggggtcctccttgcggggcacgcccgccccgcgcgtctccacaaccggtcctcctccacaccagcagagacccccgcgcgtnagccacaaccgacagggggtggggttcttccacccccaagaac

SEQ ID NO: 259590 - DNA, 529 bp, Homo Sapiens
aaaatttaaagatatgcatactgaaaagtatataacatgtacgtacaatttaaagaataattttaaagtgaatactacgtaactccatccaagtcaagaaattgccagcttctcggaagcccactgtgtctccttcccctacctgcaacctcttccaggctcccttttccagccttcccctttttcccttttattttcatgccttgatttgacttgtgtggtgggaacatgtgaactatgaaacttaaacctgctgcccacccagagcagctgtgaccaagggctgcctcaaggggttgtccacgcaggttgggctcctctctgctgctggacccaagactctgaaccttccaagggacaggcagttcttctaagaagggctcccctgtgtgtgagcaagaccacagctctccttctatctacagatgcatgagggttggaagagtctgggctgtttttagaccttctggtcagctgtatttgtgtaacaacttttgtaataaatagaaaaaccctctgctctgacaaa

SEQ ID NO: 259591 - DNA, 881 bp, Homo Sapiens
  misc_feature (193)..(237): n is a, c, g, or t
gcccgcggaaaggaggggtttggcagggttagcggggtaaagggggtccccccgggggggtctttccggagaaagcctggccaatttttcttgaccttgggatgggaagttaccgttagtattccactttaaaaaattatttctgtaaattgtacggtagcatgtgatttactttttcagtatgcatatcttnnnnnnnnnnnnnnnnnnnnnnnnnnnnnnnnnnnnnnnnnnnnngccagatgatggaatagaaaagaaattaaagaggagagacgacgaaggaagaagatggccaaggtggaaaacgagaaagtcctggaggtgataatgctggcctcagtttctcttcttctgtctggatactggttctacttctagataccggagcccgaccagcatacccaggatggagaaacttgccaccatcaggggtgccaggacgccaatcgtgggagctgcagttccatagacaaacaactcagagaggaaatgccccagggcaaggaggaaggtccagagtgtgatgtgatagagcgtcttgttgtgaatgtcaatggcacagaggcagcgaatcactgatgagagcagcgtccagatcccaaaggtccgagcttggaggccattcacaaggtttggcttgccagtgtagagcttttcatagagaaaagtgtggtctcggaagctctgcagcgtgttccccatggctatgatggacaccataaccagccaacttcttaacacattcaggaaacggctcatgactcccctcaaacgtgggagggctttttgcctggcgaccgggcccccagcacagcagtggcagcagcagccgctgccgcaaacaagctcccccaggacagctccagcccggagtcccc

SEQ ID NO: 259592 - DNA, 346 bp, Homo Sapiens
gggcagatgatggaatagaaaagaaatttaaagaggagagacgacgaaggaagaagatggcccaaggtggaaaacgagaaagtctcacgcaacatttataaacacatggctctagccctattctcttcccagcctatttgctttagtcaaactataatatattcaagaaatttaataacttaccaaatcacaaagtccaacttgcccaaatttggccccaactgctaccaaagttctagtttctgatggatggagagccatagagaatattgggcctgtggtaactttgtaaacggtatcttcactaatgaccatgccatttaaattggctttgtagctaagaaaa

SEQ ID NO: 259593 - DNA, 1168 bp, Homo Sapiens
gggggttctaaggggcggaggagaggggggtgtgttttcccgggcgtttttgtttgttcttagcgcgtttgaaggaattggttgttttttgcgccccaaggtgtgtgaagaaaaggccacgtgttccgttcgggtcaacccccgggaaggccccgaggagggttccccccatttatttttagtgttaaagtcgcgggcgtttatataaaatcccactgttggggcagggatttgggggttttcagggacccctgaagccccctttccccgggggcagggcagttaagggttgccctccccccgggcaaggtgcacaggggaaggaaccaggacttgttcataatccagtggcagtctttggctaacaaggccatcataggtctgggagcgacaccccgggggtcgtcttttgaatgagcaccatgggattgtagctggcgggcacgcaacagggcgctggcaccgtgtcgggcttcaggcggtgcaggctcgtcttgatctgcgcgtgcatgtttgccgcccggaactggctcgggcacgcgccgatgcacatggtcacttgcacctcccgtggcgacagcacccaatcggcccagcccaggtcttccagcgacgcgcggaccgtgtgcagacggcagcaacgcccgggcccgagcggacagtcgtccccgttgcgcgcacgcgctctgcggcgccccctggcggcttgcggccgcaagtgcaactccagctggggccgtgcggacgaagattctgccagcagttggtccgactgcgacggcggcggcgacagtcgcaggtgcagcgcgggcgcctggggtcttgcaaggctgagctgacgccgcagcggtcgtgtcacgtcccacgaccttgacgccgtcggggacagccggaacagagcccggtgaaggcgggaggcctcggggagcccctcgggaagggcggcccgagagatacgcaggtgcaggtggccgccggatcccagccgcacttctggcgtgagtatccggactgcaggggccgggacgaggtcggtgttcgaatcttcccagctctggttggcccgcagcctggttagcaggtcctcgtagcgtttccgcaactctcggaatctggagtcttccctcgtgccgaattcgccacccaggcctcgctacttattttggtt

SEQ ID NO: 259594 - DNA, 1068 bp, Homo Sapiens
gaggcctgggtggcgctgaggcccagaaatgtgccctagctttactaggagcgcccccacctaaagatcctccccctaaatacacccccagaccccgcccagctgtggtcattggagtgtttactctgcaggcagggggaggagggcgggactgagcaggcggagacggacaaagtccggggactataaaggccggtccggcagcatctggtcagtcccagctcagagccgcaacctgcacagccatgcccgggcaagaactcaggacgctgaatggctctcagatgctcctggtgttgctggtgctctcgtggctgccgcatgggggcgccctgtctctggccgaggcgagccgcgcaagtttcccgggaccctcagagttgcactccgaagactccagattccgagagttgcggaaacgctacgaggacctgctaaccaggctgcgggccaaccagagctgggaagattcgaacaccgacctcgtcccggcccctgcagtccggatactcacgccagaagtgcggctgggatccggcggccacctgcacctgcgtatctctcgggccgcccttcccgaggggctccccgaggcctcccgccttcaccgggctctgttccggctgtccccgacggcgtcaaggtcgtgggacgtgacacgaccgctgcggcgtcagctcagccttgcaagaccccaggcgcccgcgctgcacctgcgactgtcgccgccgccgtcgcagtcggaccaactgctggcagaatcttcgtccgcacggccccagctggagttgcacttgcggccgcaagccgccagggggcgccgcagagcgcgtgcgcgcaacggggacgactgtccgcctcgggcccgggcgttgctgcccgtctgcacacggcccgcgcgtccctggaaacaccctgggctgggcccaatgggtgctgtcccccagcggaggggcaagtgaccctgtgcattcgggcgggcccgaaccaattccggggcgggaaacctggccccgcagaattaagacgagccttgacccggcctggaaaccccgaaccggggccacc

SEQ ID NO: 259595 - DNA, 902 bp, Homo Sapiens
  misc_feature (213)..(213): n is a, c, g, or t
  misc_feature (229)..(229): n is a, c, g, or t
tgggccgttggcccccccgtttccgggttttccagggcgggaccagggctttgtccttgaatttgccggcgggccttgttttcccgccccggaaacttgggttggggccacggccccggaggccacatggtccacttcgcacctccccgtgggcggcagcacccccaatcggccccagccccaggtcttcccagcaaccgcgcgggaccgtgntgcagacggcagcaancgccccgggcccgagcggacagtcgtccccgttgcgcgcacgcactctgcggcgccccctggcggcttccggccgcaagtgcaactccagctggggccgtgcggacgaagattctgccagcagatggtccgactgcgacggcggcggcgacagtcgcaggtgcagcgcgggcgcctggggtcttgcaaggctgagctgacgccgcagcggtcgtgtcacgtcccacgaccttgacgccgtcggggacagccggaacagagcccggtgaaggcgggaggcctcggggagcccctcgggaagggcggcccgagagatacgcaggtgcaggtggccgccggatcccagccgcacttctggcgtgagtatccggactgcaggggccgggacgaggtcggtgttcgaatcttcccagctctggttggcccgcagcctggttagcaggtcctcgtagcgtttccgcaactctcggaatctggagtcttcggagtgcaactctgagggtcccgggaaacttgcgcggctcgcctcggccagagacagggcgcccccatgcggcagccacgagagcaccagcaacaccaggagcatctgagagccattcagcgtcctgagttcttgcccgggcatggctgtgcaggttgcggctctgcctcgtgccgaattccccacccag

SEQ ID NO: 259596 - DNA, 1172 bp, Homo Sapiens
aaaccccaccggcccgcgcagcagacccaaaacaccaccacctggcctgggtggcgaattcggcacgaggcagagccgcaacctgcacagccatgcccgggcaagaactcaggacgctgaatggctctcagatgctcctggtgttgctggtgctctcgtggctgccgcatgggggcgccctgtctctggccgaggcgagccgcgcaagtttcccgggaccctcagagttgcactccgaagactccagattccgagagttgcggaaacgctacgaggacctgctaaccaggctgcgggccaaccagagctgggaagattcgaacaccgacctcgtcccggcccctgcagtccggatactcacgccagaagtgcggctgggatccggcggccacctgcacctgcgtatctctcgggccgcccttcccgaggggctccccgaggcctcccgccttcaccgggctctgttccggctgtccccgacggcgtcaaggtcgtgggacgtgacacgaccgctgcggcgtcagctcagccttgcaagaccccaggcgcccgcgctgcacctgcgactgtcgccgccgccgtcgcagtcggaccaactgctggcagaatcttcgtccgcacggccccagctggagttgcacttgcggccgcaagccgccagggggcgccgcagagcgcgtgcgcgcaacggggacgactgtccgctcgggcccgggcgttgctgccgtctgcacacggtccgcgcgtcgctggaagacctgggctgggccgattgggtgctgtcgccacgggaggtgcaagtgaccatgtgcatcggcgcgtgcccgagccagttccgggcggcaaacatgcacgcgcagatcaagacgagcctgcaccgcctgaagcccgacacggtgccagcgccctgctgcgtgcccgccagctacaatcccatggtggctcattcaaaagaccgacacccggggtggtcccctccagaccctattgatgactttggtagcccaaaaacttgccaccggcatatggaccaagtcctggggcccttcccactggtggcccctgtcgcggggcgggagggccaactcttagatttggccctcgcccccaggtgggaaatggggggtctcaaggggttcccggggataaaaacccaagaggtttcctgtgct

SEQ ID NO: 259597 - DNA, 903 bp, Homo Sapiens
  misc_feature (138)..(138): n is a, c, g, or t
gatgcaatttcactccatcttgaggcaactgtcaagagttgaccagttccatttactctcatagttgtaaaaattccacaaaattgttaaagtctctgtaagcgataactttaaacagtcagagcttttgtcttgttntgagtcatttttcccctttcctctttgtatgccattctttctgtcaaactatctagttaaggaagatatgtgaggtataaggatgcataatataaaaaaatttttgctattcttattaaacattttgtcttaattgtaaaggtaaagaaaagaacattcgactattctaactttaggaaaacctaagttaaataatgatttacctatgtgactctccactaattttctcttgcaaatcatcaccccttaattaactgacatccccaaggcagtcaactcaagctgtagctttaaccacagaggttaaacaattcacagtcctgttgttgctgtcagaaacccaagttacactgtacctttgtctaatcaatggtgccctagtttggtgggagatggagaggaagggacctgttggcaaggaaacagctgcttccttcctgaacaagggaaaaccagtaaggtgacagatgggcagagcagaaaagtagccaaaaattgctgtggctcctgtttggcaataatttctggaactgaggcacaactgaatattttaaagtatatcaacaattgagagagtattgtttacctgagtgcgccaaagttcaacaagccttcccacacgtttcccacatttgaaaaacttttaagtttgcagtagtacaaagagcttagccttagcctatggtacagtgggcaaagactggcaaggcactgtcccatttcactttaggattacacccaagcaaatgcactttccggttaaaa

SEQ ID NO: 259598 - DNA, 693 bp, Homo Sapiens
  misc_feature (592)..(592): n is a, c, g, or t
  misc_feature (643)..(643): n is a, c, g, or t
tgaagagcttctctggcgaggtttggggcaggaggagtcttggtagtttctcttcagagttgtggattttcacttgtggatacctcttcttgaggttcaggtgctgtgaggttgttgttttctggtaccatggagacttgaagctggtcttggccctccgaggagtcagctgagataagcttattatccttttccttgtcttccatcttctttgcctctccaggctctgaagcaacctgagatgtcattaaggtgggggaagtacaaagttcttcagggttctgattgtggatgttttcattttctttggcctcaggagttcttactggcttctctggtggttctggattaggagagacctctagggaggtcctaggacttgcagtcccagtccccaaggaggccctagggctggtgggtgaaccccctccagaggctgtagggctggaaggtatgttccctgaggagggcctggggcttgcagtggctctgggtggaggaggcctactagggggtgctgaggtcctctggatagaggctctcttctttggttgttcagatccttcacttgcggtgcgggttcgaaggactnacttctgtggcagatgatgaaggctgccctgaaggcttcagggctccgctnggttgatggagttgtggagctggggagaacttcctcctgggaacttggcc

SEQ ID NO: 259599 - DNA, 1534 bp, Homo Sapiens
aagtgggtgcgggccagccggctcgcccgggggccatggcagcagcggctactgcagccgagggggtccccagtcgggggcctcccggggaagtcattcatctgaatgtgggaggcaagagattcagtacctctcgccagactctcacctggatcccagactccttcttctccagtcttctgagcggacgcatctcgacgctgaaagatgagaccggagcaatcttcatcgacagggaccctacagtcttcgcccccatcctcaacttcctgcgcaccaaagagttggatcccaggggtgtccacggttccagcctcctccatgaagcccagttctatgggctcactcctctggttcgtcgcctgcagcttcgagaggagttggatcgatcttcttgtggaaacgtcctcttcaatggttacctgccgccaccagtgttcccagtgaagcggcggaaccggcacagcctagtggggcctcagcagctaggaggacggccagcccctgtccgacggagcaacacgatgccccccaaccttggcaatgcagggctgctgggccgaatgctggatgagaaaacccctccctcaccctcaggacaacctgaggagccggggatggtgcgcctggtgtgtggacaccataattggatcgctgtggcctatacccagtttctagtctgctacaggttgaaggaagcctctggctggcagctggtgttttccagcccccgcctggactggcccatcgaacgactggcgctcacagcccgggtgcatggtggggctttgggtgaacatgacaagatggtggcagcagccaccggcagcgagatcctgctatgggctctgcaggcggaaggcggtggctccgagataggggtctttcatctgggggtgcctgtggaggccttgttcttcgtcgggaaccagctcattgctacaagccacacagggcgcatcggggtgtggaatgccgtcaccaagcactggcaggtccaggaggtgcagcccatcaccagttatgacgcggcaggctccttcctcctcctgggctgcaacaacggctccatttactacgtggatgtgcagaagttccccttgcgcatgaaagacaacgacctccttgtcagcgagctctatcgggacccagcggaggatggggtcaccgccctcagtgtctacctcacccccaagaccagtgacagtgggaactggatcgagatcgcctatggcaccagctcagggggcgtgcgggtcatcgtgcagcaccggagactgtgggctcggggcctcagctcttccagaccttcactgtgcaccgcagccctgtcaccaagatcatgctgtcggagaagcacctcatctcaagtctgtgccgacgaacaaccacgtgcggacatggtctgtgactcgcttccgcggcatgatttccacccagcccggctccagcccactcgcttcctttaagatcctggctctggagtcggcagatgggcatggcggctgcagtgctgggcatggacttgggcccg

SEQ ID NO: 259600 - DNA, 1284 bp, Homo Sapiens
atctgggctgcgtcttctcgccgctgctcttcgtggcccaacgccccaatccttgcgtgtccttgcagtcccaccccacactcagccttgtgtccctcgatccagtctccgacttccatttcccaccctaaaccgcctacccggtgtctgttccccgcccggttgtcctcgccctgctgcgctgagtgtcccctgttagcctcgaccccatggcgctgcagacgctgcagagctcgtgggtgaccttccgcaagatcctgtctcacttccccgaggagctgagtctggctttcgtctacggctccggggtgtaccgccaggcagggcccagttcagaccagaagaatgctatgctggactttgtgttcacagtagatgaccctgtcgcatggcattcaaagaacctgaagaaaaattggagtcactactctttcctaaaagttttagggcccaagattatcacgtccatccagaataactatggcgctggagtttactacaattcattgatcatgtgtaatggtaggcttatcaaatatggagttattagcactaacgttctgattgaagatctcctcaactggaataacttatacattgctggacgactccaaaaaccggtgaaaattatctcagtgaacgaggatgtcactcttagatcagccctcgatagaaatctgaagagtgctgtgaccgctgctttcctcatgctccccgaaagcttttctgaagaagacctcttcgtagagattgccggtctctcctattcaggtgactttcggatggtggttgggagaagataaaacaaaagtgttggaatattgtgaagcccaatatagcccactttcgagagctctatggcagcatactacaggaaaatcctcaagtggtgtataaaagccagcaaggctggctgcagatagataaaagcccagaaggacagttcactcagctgatgacattgcccaaaaccttacagcaacagataaatcatattatggaccctcccggaaaaaacagagatgtggaagaaactttattccaagtggctcatgatcccgactgtggagatgtggtgcgactagggctttcagcaatcgtgagaccgtctagtataagacagagcacgaaaggcatttttactgctggcctgaagaagtcagtgatttatagttcactaaaactgcacaaaatgtggaaagggtggctgaggaaaacatcctgattttgcttgcttttatatatggtatatgtagattaataaagtgtttgatcctttttgac

SEQ ID NO: 259601 - DNA, 1913 bp, Homo Sapiens
  misc_feature (898)..(924): n is a, c, g, or t
  misc_feature (1674)..(1674): n is a, c, g, or t
  misc_feature (1676)..(1692): n is a, c, g, or t
  misc_feature (1819)..(1829): n is a, c, g, or t
attttcttcgctggctccatgcgcaggcgcagtgttcccgcccggcctcgtgggcggttaggggagcgcctggagaactacgatgacccgcacaaaacccctgcctccccagttgtccacatcaggggcctgattgacggtgtggtggaagcagaccttgtggaggccttgcaggagtttggacccatcagctatgtggtggtaatgcctaaaaagagacaagcactggtggagtttgaagatgtgttgggggcttgcaacgcagtgaactacgcagccgacaaccaaatatacattgctggtcacccagcttttgtcaactactctaccagccagaagatctcccgccctggggactcggatgactcccggagcgtgaacagtgtgcttctctttaccatcctgaaccccatttattcgatcaccacggatgttctttacactatctgtaatccttgtggccctgtccagagaattgtcattttcaggaagaatggagttcaggcgatggtggaatttgactcagttcaaagtgcccagcgggccaaggcctctctcaatggggctgatatctattctggctgttgcactctgaagatcgaatacgcaaagcctacacgcttgaatgtgttcaagaatgatcaggatacttgggactacacaaaccccaatctcagtggacaaggtgaccctggcagcaaccccaacaaacgccagaggcagccccctctcctgggagatcaccccgcagaatatggagggccccacggtgggtaccacagccattaccatgatgagggctacgggccccccccacctcactacgaagggagaaggatgggtccaccagtggggggtcaccgtcggggcccaagtcgctacggcccccagtatgggnnnnnnnnnnnnnnnnnnnnnnnnnnngagtatggccctcacgccgacagccctgtgctcatggtctatggcttggatcaatctaagatgaactgtgaccgagtcttcaatgtcttctgcttatatggcaatgtggagaaggtgaaattcatgaaaagcaagccgggggccgccatggtggagatggctgatggctacgctgtagaccgggccattacccacctcaacaacaacttcatgtttgggcagaagctgaatgtctgtgtctccaagcagccagccatcatgcctggtcagtcatacgggttggaagacgggtcttgcagttacaaagacttcagtgaatcccggaacaatcggttctccaccccagagcaggcagccaagaaccgcatccagcaccccagcaacgtgctgcacttcttcaacgccccgctggaggtgaccgaggagaacttctttgagatctgcgatgagctgggagtgaagcggccatcttctgtgaaagtattctcaggcaaaagtgagcgcagctcctctggactgctggagtgggaatccaagagcgatgccctggagactctgggcttcctgaaccattaccagatgaaaaacccaaatggtccatacccttacactctgaagttgtgtttctccactgctcagcacgcctcctaattaggtgcctaggaagagtcccatctgagcaggaagacatttctctttcctttatgccattttttgtttttgttatttgcaaaagatcttgtattcctntnnnnnnnnnnnnnnnnnaaatgctaggtttgtagaggcttacttaaccttaatggaaacgctggaaatctgcagggggagggagaggggaactgttatctcccaagattaaccttcacttttaaaaaattattgtacatgtgannnnnnnnnnncctgttcatacatttgtgctgcccatgtactcttggaacatttcaataaaattgtttggaaaataaacacagcacttgctgcga

SEQ ID NO: 259602 - DNA, 888 bp, Homo Sapiens
taatggtgacccgggtgtactagaggtgtatcggctaggtctgtgtgatgtctagctgtgggggggagcatcgcaggctttttgttggcagagagttgtgaccgttgaggcgccatcgggccttttcgggcagaggtctattgaggaggttggtagcggagtctcttcttagacaggatgacaaccccgtcggcccggaggccgcggagctggcggcgtgacgggacgaatctacggctgccgcgtgaaggagttcgtagctccccattccgggggccgaggccgactaggcccccaagcggtgaccccccactggtggacccatccttctcccttcgtagtgaggtggggggggcccgtagccctcatcatggtaatggctgtggtacccaccgtggggccctcctggggggtgggaaggaaagagagggaggacgggtgagaatttgcacggcgggcggcgggcaggggcacatgagccacgggagtccacggaggggaaccccctgccctcaccatattctgcggggtgatctcccaggagagggggctgcctctggcgtttgttggggttgctgccagggtcaccttgtccactgagattggggtttgtgtagtcccaagtatcctgatcattcttgaaacatattcaagcgtgtaggctttgcgtattcgatcttcagagtgcaacagccagaatagatatcagccccattgagagaggccttggcccgctgggcactttgaactgagtcaaattccaccatcgcctgaactccattcttcctgaaaatgacaattctctggacagggccacaaggattacagatagtgtaaagaacatccgtggtgatcgaataaatggggttcaggatggtaaagagaagc

SEQ ID NO: 259603 - DNA, 331 bp, Homo Sapiens
ccagttgtccacatcaggggcctgattgacggtgtggtggaagcagaccttgtggaggccttgcagagtttggacccatcaggtactgggctcagaggccaggtgtgggcttccaaagttgactcctgggtgtccttgtgtgtccaagatttctggttggaaatagtgattttgttgccatcctggtctagattctgtggccgctctgcttttgggttggccattgtactttgtgtcagattacagcaagttccatgaccctttttccttccttcgtttttcctctgccttgtagtttctagtcagtgttctcttttccagacagagcaag

SEQ ID NO: 259604 - DNA, 2383 bp, Homo Sapiens
  misc_feature (1885)..(1902): n is a, c, g, or t
  misc_feature (1911)..(1949): n is a, c, g, or t
  misc_feature (1996)..(2068): n is a, c, g, or t
  misc_feature (2107)..(2115): n is a, c, g, or t
cagcctgttcacaagattgatatgaacctcactgatcttcttggggagctacagagggacccatggccagtaactcaggggaagagacctttgcgatccactggtgtggctttgtccattgctgttggcttgctggagggcacttttccaaacacaggagccaggatcatgctgtttactggaggtccccctacccaagggcctggcatggtggttggagatgaattaaagattcctattcgttcttggcatgatattgagaaagataatgcacgattcatgaaaaaggcaaccaagcactatgagatgcttgctaatcgaacagctgcaaatggtcactgcattgatatttatgcttgtgcccttgatcaaactggacttttggagatgaagtgttgtgcaaatcttactggaggctacatggtaatgggagattctttcaacacttctctcttcaagcagacattccaaagaatctttactaaagattttaatggagatttccgaatggcatttggtgctactttggacgtaaagacctctcgggaactgaagattgcaggagccattggtccatgcgtatctctgaatgtgaaaggaccgtgtgtgtcagaaaatgagcttggtgttggtggcacgagtcagtggaaaatctgtggcctagatcctacatctacacttggcatctattttgaagttgtcaatcagcacaacaccccgatcccccaaggaggcagaggagccatccagtttgtcacgcattatcagcactccagcacccagagacgcatccgcgtgaccaccatcgcccgaaattgggcagatgtacagagtcagctcaggcacatagaagcagcatttgaccaggaggctgcggcagtgttgatggcacggcttggggtgttccgagcggagtcagaggaggggcccgatgtgctccggtggctggaccgacaactcatccgactgtgtcaaaagtttggacagtataacaaagaagaccccacttcttttaggttatcagattccttttctctatatcctcagtttatgttccatctgagaagatctccatttcttcaagtgtttaacaacagtcctgatgagtcgtcatattacagacatcattttgcccggcaggacctgacccagtccctcatcatgatccagcccattctctactcttactcctttcatgggccaccagagccagtactcttggatagcagcagcattctagctgacagaattttgctgatggatactttctttcaaattgtcatttatcttggtgagaccatagcccagtggcgtaaagctggctaccaggacatgcccgagtatgaaaacttcaagcaccttctgcaggcaccactggatgatgctcaagaaattctgcaagcacgcttcccgatgccacgttacatcaacacggagcatggaggcagtcaggctcgattccttttgtccaaagtgaacccatctcagacacacaataacctgtatgcttggggacaggaaactggagcacccatcctaactgatgatgttagcctgcaggtgttcatggaccatttgaagaagctggctgtctccagtgcctgttaagctgaggatacaaccaggaaatgcaacggtgtcagattgtgttcaaaatgtctagaaaggcttgataacattcctgttacttttctagcagattttaacaaataatcaaggacattttatatgtaactctttagattataatttatttgtattcctgtctttgtcctttttcttgcactataaaattataaggtcataaatgttttggtacttgtagatgtttatgtgctttttgtatcctaacttttagaatctaaataaaatcagaggtaatgtnnnnnnnnnnnnnnnnnnctcgaggcnnnnnnnnnnnnnnnnnnnnnnnnnnnnnnnnnnnnnnncatggtcatagctgtttcctgacccagctttcttgtacaaagtggtnnnnnnnnnnnnnnnnnnnnnnnnnnnnnnnnnnnnnnnnnnnnnnnnnnnnnnnnnnnnnnnnnnnnnnnnntgcagtacccgggaatttaacccgcctaatgagcgggcnnnnnnnnngtgatccaaaggatcttcttggaaatcctttttttcctgcgaaaaatccgctgctgggcaaccaaaaaaccacccctacccgccggggggttggtttgccgggagcagaaactaccagactctttttcccaaaagggactggggtcgcgccagacccaaaatccccgaaacctggctctctgaaatgggaacccgaaagttgggcgaccaccgttcaaagaacatctgtaacaccgccaccaaatacgctcgcccctcgcgtatgcca

SEQ ID NO: 259605 - DNA, 1293 bp, Homo Sapiens
ggtgtcagagagcatgcagcgtcagggcctactgcaagggatggcctacactgtccagggcccaccaggccagcctgggccacaggggccacccggcatcagcaaggtcttctctgcctacagcaacgtgactgcggacctcatggacttcttccaaacttatggagccattcaaggaccccctgggcaaaaaggagagatgggcactccaggacccaaaggtgacaggggccctgctgggccaccaggtcatcctgggccacctggccctcgaggacacaagggagaaaaaggagacaaaggtgaccaagtctatgctgggcggagaaggagaagaagtattgctgtcaagccgtgagctagccatggcaggacagctcctggaccaggtctcataatgcatgtggcacttaggtccaagctctccagagggtgaaagctggagtctgtcaatgtcctactgagacagcacagccaacctagctagcaacatttgttttagtctgaacaatatatacttatagaattcagtcaaagatacacaatctgaaacagcttcatggggtggactctaacagtagttgcaatgttttagaatgagacttacttctctgctatctagatctgaactccttggcttctttacttagttcaagccccagcctaggaaagccagttacataaaagttggctcaggagtcttagagctttacctaaatatgagcccagaaaacggagggatgggggtggggcgccttcctggaggtgacacttgatgggggtgtgttctggttactgttctaaggctgtgccatcagctccttcctcccctgttcattctgcattctctagtcagttggctaagaagtgactcttgcaactaaaaaaattaagaaattcacttcccctctaggaggtgatgatagggtttctaatggttatatgtatatcacattcccatttgcttagaaagtctgattgtagctatgattgtccataggcccatactagagttcatggatatgttatactgaaccaggccagagcaaacagaaaaagaaggttgagggcaatggacaaggaaggaataaagggagaagagggaaaacagaaaacctgatgctggggacacagcatcagctcaagacgtcaccctccattctgcactcagaaaatggcacttgggggactgggcgcagttggtctttaaccacttttcaatgtctaaaaacatttgtttgtggtctataagatgaaacatcatttcaatcgtaaaatttcccattaaagaag

SEQ ID NO: 259606 - DNA, 937 bp, Homo Sapiens
  misc_feature (710)..(710): n is a, c, g, or t
actttgtaacaaaagtgctgcagccgcttgctccggccggcaccctaggccggcccgccgccagctgtcgccgacatggaacccttggccagcaacatccaggtcctgctgcaggcggccgagttcctggagcgccgtgagagagaggccgagcatggttatgcgtccctgtgcccgcatcgcagtccaggccccatccacaggaggaagaagcgacccccccaggctcctggcgcgcaggacagcgggcggtcagtgcacaatgaactggagaagcgcaggagggcccagttgaagcggtgcctggagcggctgaagcagcagatgcccctgggggccgactgtgcccggtacaccacgctgagcctgctgcgccgtgccaggatgcacatccagaagctggaggatcaggagcagcgggcccgacagctcaaggagaggctgcgcagcaagcagcagagcctgcagcggcagctggagcagctccgggggctggcaggggcggccgagcgggagcggctgcgggcggacagtctggactcctcaggcctctcctctgagcgctcagactcagaccaagaggagctggaggtggatgtggagagcctggtgtttgggggggtgaggccgaactgctgccggggcttcgtcgccggccaagagcacagctactcccacggcggcggcgcctgggctatgaggttcctcancccaggggcgggcccctgccctctactccggccaggcccaacttgccaaggcaggaacccctccccagcccttccagggctgctcgggagtccccctgttggggaatgggactaaaaggaacccttgtgggggggaacagggggctccccccaaacacccctgcttgctgggctggccagggcaggccccttctggggaaggggaaggggggcagggactcccttct

SEQ ID NO: 259607 - DNA, 1198 bp, Homo Sapiens
  misc_feature (20)..(20): n is a, c, g, or t
  misc_feature (365)..(365): n is a, c, g, or t
  misc_feature (380)..(380): n is a, c, g, or t
  misc_feature (1056)..(1056): n is a, c, g, or t
ttggccctagaacccccagnaattcggcacgaggaaacggggagacctggtaacaccgggcctgtttcccatgacagcacatgcctggctcctgagcagaggtgtacacgcagcagtgcaccctgctcccagttcccacccctggacgccacagcactccagtcctttatccttgactaggccccaaatgcctttgagattgtggtgccccccaacccccaatctaggcagcaccctgacaggacgtgtgcatggccggaaaggggctggctttctggaggatgtgggtgcaaccctctggggcctggatttagtcgccacctgcccggagtgggcattggccctggtggccgttggcccgggtnactggagtggtgctnggggtgcagcccaagcccccacgccgctgaacccagccccttgctcctttgggatccgcagaagctggaggatcaggagcagcgggcccgacagctcaaggagaggctgcgcagcaagcagcagagcctgcagcggcagctggagcagcctccgggggctggcaggggcggccgagcgggagcggctgcgggcggacagtctggactcctcaggcctctcctctgagcgctcagactcagaccaaggtgagtgccccgaggctgaggggttgtgtggccctcggggcgagccaggtcttctgaccggacccctccccgcgcagaggagctggaggtggatgtggagagcctggtgtttgggggtgaggccgagctgctgcggggcttcgtcgccggccaggagcacagctactcgcaacggcggcggcgcctggctatgatgttcctcaacccagggccggcctctgccctctactcgtgccaggcccacttgccaggcaggagccctccccaagccttcagggctgctcggagtcacctgttggaatggactaaaaggacccttgtgtgggaacaggtgctccccaaacaccctgctgctggctgccaggcaggccctctggaagggaaggggcaggactcatcaggacctccctggacccctgcagggcaggcnagcttgggcccgagcccaagcatttggctctgctgcccccaaggggacaggaagcctcttgggcctcttcccttcctggacaaggccccctgcctttgcctcacataaactgtacagtattttcattaaaagcctctttcat

SEQ ID NO: 259608 - DNA, 904 bp, Homo Sapiens
  misc_feature (550)..(563): n is a, c, g, or t
  misc_feature (568)..(569): n is a, c, g, or t
  misc_feature (574)..(574): n is a, c, g, or t
  misc_feature (580)..(580): n is a, c, g, or t
tttcctcaacatggctgcgcccttgtcagtggaggtggagttcggaggtggtgcggagctcctgtttgacggtattaagaaacatcgagtcactttgcctggacaggaggaaccctgggacatccggaacctgctcatctggatcaagaagaatttgctaaaagagcggccagagttgttcatccagggagacagcgtgcggccaggaattctggtgctgattaacgatgccgactgggagctactgggtgagctggactaccagcttcaggaccaggacagcgtcctcttcatctccactctgcacggcggctgagggcccttctctgggcctgggcacccttagaggggagaacgaagcaatcagacatccccttgggccctgcttccaggtctccctgtcccccttgcctgccttcttccctgctctgtcccctaagctccctccaggcagggaaaagaggccaggtgctaaaaatgagcctttctcaagcacgtgagcagcggaaggcagacaggcgccagagcccagcactcccttttccacctnnnnnnnnnnnnnnaaggnntcccntccagnttgtcaagagttgaaggaggctctgtggccaggtgacctggctgccttccactccttgtacctcagtctaaacatggagtggccgctgacaaggcgctccagccccagagccagcgtcttcatggggaagatgaatggacctgagtagctgaaggaaaggccctccctacccaaagactggaggcttctcagcctccaatttccctggctgtacagctgagggctctgcctgtcccccactggctatcatatggaaacccccgctgggggtcccctattgaggtggcgaatccccccaccggccagcaactggtttttcaggca

SEQ ID NO: 259609 - DNA, 812 bp, Homo Sapiens
  misc_feature (244)..(252): n is a, c, g, or t
gagcgaccggcgacatccttgagggacggaaggagcccgtacctaccagttgtaaggagggtcggcggccttttttccccaggagagacggctggttagtggacgagcgaaccccctttttcaggagcccagtcccagggtttacgattgaggttccgaagggatcggaaggcccacgcgaggttccgcggcccctcaggagcctcccttgaacctgttggcgagactgggggggaaccccttnnnnnnnnnacagctgctggaaaaggggagtgctgggctcgggcgcctgtctcccttccgctgctcacgtgcttgagaaaaggctcatttttagcacctggcctcttttccctgcctggagggagcttaggggacagagcagggaagaaggcaggcaagggggacagggagacctgggaagcagggcccaaggggatgtctgattgcttcgttctcccctctaagggtgcacaggcccagagaagggccctcagccgccgtgcagagtggagatgaagaggacgctgtcctggtcctgaagctggtagtccagctcacccagtagctcccagtcggcatcgttaatcagcaacagaattcctggccgcacgctgtctccctggatgaacaactctggccgctcttttagcaaaggcttattgatccagatgagcaggttccggatgtcccagggttcctcctgtccaggcaaagtgactcgatgtttcttaataccgtcaaacaggagctccgcaccacccccgaactccacctccactgacaagggcgcagccatgttgaggaaaaaa

SEQ ID NO: 259610 - DNA, 1317 bp, Homo Sapiens
tagcgaggcctgggtggcgaattcggcacgaggggagttcggaggtggtgcggagctcctgtttgacggtattaagaaacatcgagtcactttgcctggacaggaggaaccctgggacatccggaacctgctcatctggatcaagaagaatttgctaaaagagcggccagagttgttcatccagggagacagcgtgcggccaggaattctggtgctgattaacgatgccgactgggagctactgggtgagctggactaccagcttcaggaccaggacagcgtcctcttcatctccactctgcacggcggctgagggcccttctctgggcctgggcacccttagaggggagaacgaagcaatcagacatccccttgggccctgcttccaggtctccctgtcccccttgcctgccttcttccctgctctgtcccctaagctccctccaggcagggaaaagaggccaggtgctaaaaatgagcctttctcaagcacgtgagcagcggaaggcagacaggcgccagagcccagcactcccttttccagcagctgtggtggaggggagggttcccctccagtttgtcaagagttgaaggaggctctgtggccaggtgacctggctgccttccactccttgtacctcagtctaaacatggagtggccgctgacaaggcgctccagccccagagccagcgtcttcagggggaagatgaatggacctgagtagctgaaggaaggcccctccctacccaaagactggaggcttctcagcctcaatttccctgtctgtacagctgagggctctgcctgtcccccactgctatcagtatggaaccccagctggggtcccctattgagtgccgactccccccaccgccagcagctgctcctccagccacacccctcctgctccccccacccctagcccttgaccctggctggcctgccccgctccacaggccaccagatgggctcctgagaccctccccaggctgttacagctcattctgctgggggtagagatgaggggagggagtaagttaaaccttggactagcaagtagaagcctggggggatgcgtgtgcctcagtttcctcctccacaactgaatatctatagtggctgaaaactacggagatacttgatggcgcgaatgtccgttttctctcccttcccaccctcctgcaggaagcaggacggggcaggcagcacctggtaggcacagtgtttgcccctcctccccttcccgtctggaagtcgtggggccgcagtgcttgcaacagccggccttgggcaaataaaagactaggttgtttact

SEQ ID NO: 259611 - DNA, 1031 bp, Homo Sapiens
  misc_feature (914)..(927): n is a, c, g, or t
gggcgcatgagcagtgctgctcccaacccgccagtcgcggtctccggcgccagctacgccgctgccgctgtcactatggcccattacaaagccgccgactcgaagcgtgagcagttccggaggtacttggagaagtcgggggtgctggacacgctgaccaaggtgttggtagccttatatgaagaaccagagaaacctaacagtgctttggattttttaaagcatcacttaggagctgctactccagaaaatccagaaatagagctgcttcgcctagaactggccgaaatgaaagagaagtatgaagctattgtagaagaaaataaaaaactgaaagcaaagcttgctcagtatgaaccacctcaggaggagaagcgtgctgaataggattcttctcagtttgaaagacaatgaaaaatggttttgtatgacttgaatagtttgtatagtatataatcttttctgaacagatgctatagaactcttttaatatgtttaattcacctatcacactctgttaaaaacacatagaatcatcaataaaaactcaatataactttctttgggtcttaaagcaggagaatccaaagtaaatcctgaacaaaacctaaacacagccatctaactcattaccttaaaagacattctgtttattagtctgattaggaatgatggcactggttgtattttagccaagacagtttagcatggagctattccttggtgcagttcaggatatgaacacaggtacagtcattctttgaaggtgacactgttctgtatattccctataggcagctggagagatctgtgtgacacaagatgcttttgtacgggttcccatgaatcttctgctcttgtttgtgtgacatggaacaaataacttctttgccaccactttgccttagataacnnnnnnnnnnnnnnccagtttgaactctgacaccacattttccttctatgcaatcatgcctgtctgataatcttgcattgctttcctctgagctttagtgggtcctagttgcacactg

SEQ ID NO: 259612 - DNA, 564 bp, Homo Sapiens
  misc_feature (83)..(92): n is a, c, g, or t
  misc_feature (142)..(235): n is a, c, g, or t
  misc_feature (237)..(270): n is a, c, g, or t
ggggggggacccaacccccttggttttgtgccgggttttcttttggaaacaggtttttgccccttttccctttccctttgggnnnnnnnnnnaaaaaaaaggtttaaaaaatttttcgggggccgggggggccgcccaaagnnnnnnnnnnnnnnnnnnnnnnnnnnnnnnnnnnnnnnnnnnnnnnnnnnnnnnnnnnnnnnnnnnnnnnnnnnnnnnnnnnnnnnnnnnnnnncnnnnnnnnnnnnnnnnnnnnnnnnnnnnnnnnnncagacatcagtgttacttgccaagaccctcatttttaaactccaacgagttattacgttcctttccactcttgctttccaattcctacaccaagacaactctgtattttgagtatatgagtcaagtatggcaaaaagtacagtaccttaaaaacttttattttagtccttcctggcccatgctaaaacttatatctagaaatacggcaaaacaaaatgaaacagatctctccttgtacataaaacagctaaaaatttggcctctttattgatcttatgtcatgtatttggcttg

SEQ ID NO: 259613 - DNA, 907 bp, Homo Sapiens
  misc_feature (59)..(59): n is a, c, g, or t
  misc_feature (144)..(144): n is a, c, g, or t
aaaaaaccacaaccctcaaaaagaccccaaaacagttccctctggggaacaagccccangcccttgtccctgcatgtaaccccacaggtgaaggggcaaggcggggtgcctaagggatgctgccaggcctgtgggctgaacccngcggtctactcgccccagataggcaacccctgggcagcccacgttctgcctacgaaactgtatgtccatatatgtgcatgtgagcatacccagaggggcacagccgggcatgctgggtgctggggggggtcactctggttatgcatattcacacagaacatggtgctacaattgggaagcacagggtgttacggacagccccgagtatttaatggccgatatagcgcgtcgctctttactttttattcactcacacccaggttctttccacaaagggttcaaggtagttacaagaattactactgtttggcgtttgctgaaagaagtacgtgagaatattatatgctttagaaaccacagagtcgaagcctgtcatcgtcctcatagaccaatgagtagccacacgtacttgtttggcattaccaagtgttccgggcaaaggccgcagcctgcagctcaaccagccgtgctgctcggcctgtgcacgtcaccggctcttccctagggtagcttttgcttgctttctcccacgtccatcctctctctctctgactcacagccagccaggtttctagccttgtcattccctaaactactgcctcaagcccaggcgggcgcacacaaactaaaatgctaatctccacagcggtgtctggactaatggtgtcccccaccgtggaatgtatgtgagctaaagacaggatctcagcaggcagcctggactgaggtagctgtagaattcaaggtacacagtctctttttc

SEQ ID NO: 259614 - DNA, 1138 bp, Homo Sapiens
ttacaagatgttgcatcactttattttaattgcatgatttatcagaacaactattaacatacgaagtaccattcagttcagctgcaggtataggcagtgacaagtatctaattcttagaagaatcacttactcccacaatctgtccagacacattaatctaaggacaagtttataaatagcaaacgtgattttcacattgcagtgttctcaagaatgtatatacaagtgtgtagtcctgttgatgggatgtttccccgagttctttctattgatgcgttcatgctcttgaccctggtagagacagttctttctttccacagagcagattttcttttgtcatccaccatttacaatactctgtgaattagtattacttattacatttatgaaacggcaatatttggattgtaatagctcttcagtacaattccttgtgtcttctggtaagtctctgcactatcagagagcttttagttataatcattttcctgcaacaacagccaaactcaactattgagtttcagtgtgacacaccctctttgtagcttgctgggttaacccttggcttcaagtcctgatgatgtaatgagggtggggtgtattggcaatcagtacatttccttatcgcaatttacagtcattgaaaatcatgctgtcattaatcccagtctgacataccttttctaaaatgttcacagtgcagtgtttttgtggcctaacaaaatttttctcatatcattaaaaataaacatttttataaaaaatataacactttaaatgtttacgtcgacaaaaccagttagagtaacctacaccacatgcactatacagtagtaagcacaaaattccacagaatgaagcatcacaaagttctgctcagggtggctattccatctaggtgaaatagctgggattttcaattgcctttttcatttgcttctaaagtatgttttgcttaacataaaacacaccctaatgcaaaataaaactccccaaaagttttgtttccattgcttgcgaggtgggaacctgccaccgagacagaggctaatcttttcaatccatccaccctttctttgctctacctatgagctgtgacttggaaccaatgaaccttttagtaaaatgtatcctgct

SEQ ID NO: 259615 - DNA, 396 bp, Homo Sapiens
  misc_feature (381)..(381): n is a, c, g, or t
ttaattgcatgatttatcagaacaactattaacatacgaagaccattcagttcagctgcaggtataggcagtgacaagtatctaattcttagaagaatcacttactcccacaatctgtccagacacattaatctaaggacaagtttataaatagcaaacgtgattttcacattgcagtgttctcaagaatgtatatacaagtgtgtagtcctgttgatggggatgtttccccgagttctttctattgatgcgttcatgctcttgaccctggggaggaggacagttctttctttccacagaggcagattttccttttggtccatccacccattttaccaatactctggtggaattagggattaccttattaccatttatggnaacgggccaatattt

SEQ ID NO: 259616 - DNA, 727 bp, Homo Sapiens
cagagcagacacgagtgaaccacgaagagaaaacccacccactggcctgttctcttctttggaagggtcatagtaatgcaggaaagctggatccttccttagaacaaagcgacgcaccttccagtttttcctcttgtgtccaaaagtgtacagggctgtggagtcatccaggaactgctcggccagatccccagagcgaatggctcccatgcttcggacacccacaggcctgaggaagttctcctccatgagcatggaggccagggtcaccgcctccagacggctggccgtgaagctgttggagatgagccagtccaccagggaggagccgaggaaggtctttttataggtgcttccctgctccatgttggggcttgaacggattccggtgttgctatcgtgcatcttgtccacaatgcgatgcaggctgatgtgcgggggcagcttgaaggagtttctcaggctgtgcagctgctggaccttccccggctgccctgcatgaatagccccggtgatctcaaaggcccaggcatcccgctcctctcgagaacaggcctccaggaagtactccgtggatgtttgagtcttcagcttaatgaggagcggtcggttttcatactccaggcaggggcaggtgatggtgcagccatccaggaggatccggcccttgggaggggtcactctccgacccccctcaagcttgtagtacaccagcgtgttctgccga

SEQ ID NO: 259617 - DNA, 686 bp, Homo Sapiens
gagttaagtggcacggtggtgaaacaaggctacctggccaagcagggacacaagaggaaaaactggaaggtgcgtcgctttgttctaaggaaggatccagctttcctgcattactatgacccttccaaagaagagaacaggccagtgggtgggttttctcttcgtggttcactcgtgtctgctctggaagataatggcgttcccactggggttaaagggaatgtccagggaaacctcttcaaagtgattactaaggatgacacacactattacattcaggccagcagcaaggctgagcgagccgagtggattgaagctatcaaaaagctaacatgacaaggacctgagggaaccaggattcctccctcctaccagatgacacagacaagagttcctggagaatgggagtattaagacttttgacttctttgtaagttttgtactgctttggagagtgaatgctgccaagagttcctcagattacaaacagcagtggtgccatttccttccccatcttcatgttacaaacctggaaaggctagaacagccattaggcgtcagcatcttgacttttccccagcatcacaaacagccatttcctcgggcaccaaagtaggttccctttgttggaacaattacactggccatgccataatgttgaataaaactctcttcttatgaggttc

SEQ ID NO: 259618 - DNA, 875 bp, Homo Sapiens
  misc_feature (86)..(86): n is a, c, g, or t
gggtgaggacccgaagaagcctttcccctgggccccatcccagggaattaatctaggaaagtttatccgcccaaaaacccattttnatggggagaacaaaaccaccagggaggctaccttctagagggctgctggccctcagacctcagaaagtggaggcctcaggcccatgatctattctgaaaagactagaaaaaggctccagggccaggccactctctgctcttcagacaccaccctgagttgcaagtcctgtggccatctttctaggttgaggtctggcctgtggagtcacagggaatgtccgcaggccccacagcctggtcttcagagatggccccatggggcaattctgtatacttgcgggaagagctgcgggccagatgggctgggtagcgtcgccggttgatgtccattttggagagcactgctagcggcagatccacacggcagcgggctgctaatgccaccaggtagatgaggacgtcactaagctcctcttgaagggctgcccgttccctgggggaccagccttgggggccaggttccccatcggttttccactgaaagagttctgccagctcccccacttccccaaccaaggccaggaggagattccgaggctgatggaactgttcccagtctcgttccgcagcaaactcagcatggaggcggcggatgtcctcgagcgtgggctccgggctgaagctgaaccggccgggagcagcagtgtcctctccccccgtgtccccacgaatctccccaccggccacagacatgccgcccaccgctgcaccgcgacttcacggaaaacccacgagccacgctcgaagccccgcctccagagctccgaccaattacgggagttctctata

SEQ ID NO: 259619 - DNA, 1067 bp, Homo Sapiens
gaattagttgcagaatctcctggtcccaggccccattacatactacgggggtagctgcctctggcccctgcatcaccctctaacccggagacttggacttacactcctttgtcctatttcagccgccgcctccatgctgagtttgctgcggaacgagactgggaacagttccatcagcctcggaatctcctcctggccttggttggggaagtgggggagctggcagaactctttcagtggaaaaccgatggggaacctggcccccaaggctggtcccccagggaacgggcagcccttcaagaggagcttagtgacgtcctcatctacctggtggcattagcagcccgctgccgtgtggatctgccgctagcagtgctctccaaaatggacatcaaccggcgacgctacccagcccatctggcccgcagctcttcccgcaagtatacagaattgccccatggggccatctctgaagaccaggctgtggggcctgcggacattccctgtgactccacaggccagacctcaacctagaaagatggccacaggacttgcaactcagggtggtgtctgaagagcagagagtggcctggccctggagcctttttctagtcttttcagaatagatcatgggcctgaggcctccacttcttgaggtctgaggcccagcagcctctagaaggtagcctcctggtgtttgttctcccagtaaaatggttttgggcgataacttctagattattcctggatggccagggaggctctctgtctcagcaggtgatgacgggggtaccaggggtgcctctgagacccattctcgtgtttccctgttgtaccttttgcctgcagggcagagagatctggtttctagcaaattcccagtaggatgtcatgtaagttccttccccctcttagagattgaaggctgtaagagtccagatggtggagccaggctgtctgggttcaaatgccatctttgacacttgcaagctaaatgacattactcaaattaatcgttctgcacttcagcttccttgtctatcaaataaaaagaatagtacctgccc

SEQ ID NO: 259620 - DNA, 1132 bp, Homo Sapiens
  misc_feature (203)..(240): n is a, c, g, or t
  misc_feature (945)..(945): n is a, c, g, or t
  misc_feature (1109)..(1109): n is a, c, g, or t
ggtacgggtccggaattccgggatatcgtcgacccacgcgtccgagacttctagcttttttacacgttcgtttttttcaaactatacagccccctctgctactatgtcttcgtttcagggagagcttatggatggagaccaaacatccagatctggagtgccggcacaggtacaaagtgaaatcacttcagcaaacacagaannnnnnnnnnnnnnnnnnnnnnnnnnnnnnnnnnnnnnagaagaaaacgcagaggatcggaaccccgggctctccaaggagagagtgagagcttcactgtctgacttgtcaagccttgatgatgtggaaggaatgagcgtgcgccagctgaaggaaattctggctcggaattttgtcaactattctggctgttgtgaaaaatgggaactggtagagaaagtaaaccggttatacaaagagaatgaagaaaaccaaaagtcctatggcgagcggctgcagctgcaggatgaggaagacgacagcctgtgtcgcatctgcatggatgccgtcatcgactgtgtcctactggagtgtgggcacatggttacctgcaccaagtgcggcaagcgcatgagtgagtgtcccatctgccggcagtatgtggtgcgagccgtgcacgtgttcaagtcctgaaacaggctcccctcaccaggacagtcacccccaaacttgacccccaacatttcaatgcacagaagggactggaaagttatgttcaaaggctgaagctattttaaaacattattttgactactaagtggggacagaaagatccatcctgagttgtggaaacattggtccatgccgtgagcctgtctgcctgtggacacgtgagcttcccgggctcagctgggctttatcacacatcccgtgaacactcattgaagtcagcctgtttgcgccatgtgggcatcagccactgnctgttcttggggaggacacttatcctgttctcttatttccccttcatcctatttttaaacttaaaactggcttcagatgtttggaaactttctgttcctctttgggatggaggattcagtgttccacaagtgggccgacatgggaacatgctgaggcagtgggntcctctggaattgtttcacttta

SEQ ID NO: 259621 - DNA, 764 bp, Homo Sapiens
  misc_feature (15)..(15): n is a, c, g, or t
ctcccctcaccaggnacagtcacccccaaacttgacccccaacatttcaatgcacagaagggactggaaagttatgttcaaaggctgaagctattttaaaacattattttgactactaagtggggacagaaagatccatcctgagttgtggaaacattggtccatgccgtgagcctgtctgcctgtggacacgtgagcttcccgggctcagctgggctttatcacacatcccgtgaacactcattgaagtcagcctgtttgcgccatgtgggcatcagccactgctgtcttgggaggacacttatcctgttctcttatttccccttcatcctatttttaacttaaactgctcagatgtttgaaacttctgtcctctttggatgagatcagtgtccacaagtggccgacatggaacatgctgagcagtggctcctctgaatgttcactttattagtcatgtatattttaaatgctaacatttgatgaatgtaagtttccacattgttgctgtttctgcatttaaacataattgggaacaactgacattctctagtcgactgccagggccttagactccacatgtccatttttgttcaggtatagctttttatagcaagggctgcatctagcttcttttattagaagtgtgtgtgctaaattccttattaatgtgtaatcagtttacattgttttgtatagtgaaggtgtattttcagtgctacccgctagctgattttaactttaggaataaaattagtttaatt

SEQ ID NO: 259622 - DNA, 425 bp, Homo Sapiens
  misc_feature (207)..(207): n is a, c, g, or t
ctcctgccccccttggaaggaggaccagtggccccacaagtggcccgaccagggaacatgccggagcaggggccccccccgaatgttccaccttaattagtccatgtatattttaaatgcctaacatttgatgaatgtaagtttcccacattgttgcctgtttccgcatttaaacataattgggaacaactgacattctctagtcgnactgcccagggccttagactcccacatgtcccatttttgttcaggtatagccttttatagcaagggctgcatctagcttcttttattagaagtgtgtgtgctaaattccttattaatgtgtaatcagtttacattgttttgtatagtgaaggtgtattttcagtgctacccgctagctgattttaactttaggaataaaattagttttaaaagcttta

SEQ ID NO: 259623 - DNA, 788 bp, Homo Sapiens
tcagaaagcctcagcaaaaactgggagatgaagatgaagaaattgatggagataccaataaatacaagaaaggacgtaagaaagcagcttatgctggaggcttggttttggaccccaaagttggtttttatgataagttcattttgcttctggacttcaacagtctatatccttccatcattcaggaatttaacatttgttttacaacagtacaaagagttgcttcagaggcacagaaagttacagaggatggagaacaagaacagatccctgagttgccagatccaagcttagaaatgggcattttgcccagagagatccggaaactggtagaacggagaaaacaagtcaaacagctaatgaaacagcaagacttaaatccagaccttattcttcagtatgacattcgacagaaggctttgaagctcacagcgaacagtatgtatggttgcctgggattttcctatagcagattttacgccaaaccactggctgccttggtgacatacaaaggaagggagttttgccatctggtaatgaatggttgaagtgataaactcctggcaccaccgcattttgctgttgatactagtgtgtgtctatagcttgtggtacagaagcactaagtgaggtccatgctgtacagtgagaagccgaaagagttgctgctctgtgtgccagattttgatgcatacgaaagagatggtacaaaagatgaatcttgaagttatttatggagatacagattcaattatgataaacaccaatagcaccaatctggaagaagt

SEQ ID NO: 259624 - DNA, 533 bp, Homo Sapiens
gagattccctggactccagacccaagtggtcagagtcacacttcaacctgaaagaaagtttcagagccacagtggccagcagcatatagcagcccagagcccacaagtaatgcagctggcagagtctcttccattgaaccatcgtcacagaatgggagacaggtggagaccgagcacagggaaggtggaggaggacacaatcctttagtagcttctctcctgcttagggatgatctcttcacaaggcgtgattctgtttccaagtgaagactggcggtgttccgtggcagcaaatgtgaacaaccatgtcccctgatcttctaaccctccaaaaggtattttctgacattcataagatgtccaaggaacagtttcaggctcctctttaatatctttgccaggcgtcagcttggtcttctcattgacaggaagctccttgaggtcatgttcttcatctgtttcccttcagcacctacagtgataggtattagcagaatcccagggcttcccagaacaaaaactgctgagtaaag

SEQ ID NO: 259625 - DNA, 1400 bp, Homo Sapiens
tggattgcgggtaaatgagattatactattttaagaatctcaaattgtgtgtatggtatattatttcaagataaagtctgataagaacacctattgtaacctgtaaagcaattactaaaataaaaagtgcaggtagctgcaccactagaaagatggcggagcaagagcaaagaaaaatccctttggttccagaaaatctcctgaaaaagaggaaggcttatcaagccctcaaagccacccaggcaaagcaggcacttttggcaaagaaggagcagaagaaaggaaaagggctcaggtttaagcgactggaatcattcctacatgattcctggcggcagaaacgtgacaaggtgcgtctcagacgactagaagtgaaacctcatgccttggaattgccagataaacattccttggcctttgttgtacgcatcgaaaggattgacggcgtgagtttactggtgcagagaaccattgcaagacttcgcctaaagaaaatttttagtggtgtctttgtaaaagtcaccccccagaatctaaaaatgctgcgtatagtggaaccttatgtgacctggggatttccaaatctgaagtctgtccgagaactcattttgaaacgtggacaagccaaggtcaagaataagaccatccctctgacagacaatacagtgattgaggagcacctggggaagtttggcgtcatttgcttggaagacctcattcatgaaattgccttcccagggaagcatttccaggagatctcatggttcttgtgccctttccacctctcagtggcccgtcatgctaccaaaaatagagtgggcttcctcaaggagaggggcacacctgggctatcggggtgaacgcatcaatcagctcatccgtcagctgaactagacccaggtgaggcagggctgaaaactgcccttgggctgacttttgataggccatgccttgccactttacaagttctttttgcatttactagtatttaagagtaaccttgagattgggaggaatagaggaggctggtacaaatagatggagacctgctgggatcagtgaatgcctgattaggacatggggctatgcatagcctaagagttataggcttaaagatgtcgagtaactaaaaactgtattggcaggcgtgagcaactgcgcccagctctgtgtacccttatgtgaagaagtcctgctcactcaggatcgggtcacgcaggcctgaatctgctactctggtttccatggtcctatgggaagaccacggttacccagaataaatttttccttcatattggggatagtgttaacccctggacatttgttatccaaaaatcccacaattttcccgggttgaaaaaaagggggccgagaaacaatggcttaaaccataaggagta

SEQ ID NO: 259626 - DNA, 1014 bp, Homo Sapiens
  misc_feature (861)..(881): n is a, c, g, or t
  misc_feature (946)..(946): n is a, c, g, or t
tggctagtcctccggctccgacagctgggtgtccaggccatggggcagccctgggcggctgggagcacggacggggcgcccgcgcagctgcctctcgtgctcaccgcgctgtgggccgcggccgtgggcctggagctggcttacgtgctggtgctcggtcccgggccgccgccgctgggacccctggcccgggccttgcagctggcgctggccgccttccagctgctcaacctgctgggcaacgtggggctcttcctgcgctcggatcccagcatccgtggcgtgatgctggccggccgcggtctgggccagggctgggcttactgctaccaatgccaaagccaggtgccgccacgcagcggacactgctctgcctgccgcgtctgcatcctgcgtcgggaccaccactgccgcctgctgggccgctgcgtgggcttcggcaactaccggcccttcctgtgcctgctgcttcatgccgccggcgtcctgctccacgtctctgtgctgctgggccctgcactgtcggccctgctgcgagcccacacgcccctccacatggctgccctcctcctgcttccctggctcatgttgctcacaggcagagtgtctctggcacagtttgccttggccttcgtgacggacacctgcggggcgggtgcgctgctgagcggggctgggctgcccttccatgggatgctgctgctgcggggccagaccacatgggagtgggctcgggcgccagcactcctacgacctgcgtccctgcccccacctcgcagtagcctctggggcccccgctgggcccctcccaccggcgcctggacccttccccggactccccaatggcctgccgctcgggannnnnnnnnnnnnnnnnnnnnatatatccgaacaccaacgcttcccgccccctcacccaaccacccccttatctttccattatatncaccggtggcgccccaagcgagcaccctcctctcgcctataccaccccctccccgataataccaccca

SEQ ID NO: 259627 - DNA, 684 bp, Homo Sapiens
  misc_feature (578)..(598): n is a, c, g, or t
acttgccaccccacagagagaagaaatcaaaatgtaaaaatctggataaatcttaacattgggtgccttatgaattctcactttatgattttgagagaaggtcaaatactcaatctcttcagccattcaatagctgaatctagcagtgcctgtcaatttcttctttcagaagaatctgagaaaatcatccatgtaatattgataatgaaaaaaaccatgataaatcacctattgcacaccccaccctctaacccagttatctttgaaagcaaagcatcctacagtctatagagatcagaggatgtagaatgagaaaccacctcatcgaaaagggtctttgggttgtcttctaccaggaagagtttttaaataggagtagccagctactagacacgctaaacacactgcatcagagtcaaacatagaaaaagaatagattgacatgcaagaaattgcgtttagccttttactacctgatgttcaacactcagggaaggcaaagggggacagacaaacttggggaaacaaagaagaaacagaaaagaccaggatgttaaagtctcctgtgtggttcatgnnnnnnnnnnnnnnnnnnnnngaccaagacttgggggaagaaatagactgtaaaggacaatgatagtggtattctcgccaatacagtatggtataaaaacctaaata

SEQ ID NO: 259628 - DNA, 597 bp, Homo Sapiens
  misc_feature (438)..(438): n is a, c, g, or t
  misc_feature (455)..(455): n is a, c, g, or t
  misc_feature (481)..(481): n is a, c, g, or t
  misc_feature (497)..(497): n is a, c, g, or t
  misc_feature (503)..(503): n is a, c, g, or t
  misc_feature (576)..(576): n is a, c, g, or t
  misc_feature (585)..(585): n is a, c, g, or t
ccatcctgcgggagagtgaacctgcccccgcctccgtcacagccctcacggacgccaggggccacacggacaccgagggccggcctccctcccccacgcccacctccacccctgaaaagtgcctcagcgtagcctgcctggacaagaatgagctcagtgaccacttggatgctatggactccaacctggataacctgcagaccatgctgagcagccacggcttcagcgtggaccaccagtgccctgctggacctgttcagcccctcggtgaccgtgcccgacatgagcctgcctgaccttgacagcagcctggccagtatccaagagctcctgtctccccagggagccccccaggcctcccgaggcaggagaacagcagcccggattcagggaaggcagctgggtgcacttacacagcgcagcgctgtttccttgctnggaccccgggttccgtnggaacaccggggaggcaacgaccttnccggtggttgtttttnaggttnggggagaggggtttcttatttttttccgaagggggaacgggtttttggcaagggggaacccccaccatttttncttgttttnaaaaggtttcgg

SEQ ID NO: 259629 - DNA, 495 bp, Homo Sapiens
  misc_feature (90)..(90): n is a, c, g, or t
caccacacacacacaagtataggtatatattttcccctaacccttccctccggggcccctcccctcagatcccttgagtccaccgatagnaaaaggagcctccgagttcccttgtgtagggaaagttaaagccttccctgcccgcggtgttccttgcaattgcccttaggaattccacaagcctcctaggagttcctgaacggaaggcagacgagaggcactttatcccagtccccagaaagaatctctaaccgtgtgactgagaagtcatctagaaaaacttatatttttaatgtaaaaacaaatggggcttaccagacctcacagagtattggacgtctacaagtgcttttatattttgtaactgtaaagaagtttcatatgcacagaagagcagttggaaatctggtcgactgcaataaaacaagatgacctttgcatgtacaaagatgttgcattcagactatgaaaatagcaaataaagctttggtgcaa

SEQ ID NO: 259630 - DNA, 439 bp, Homo Sapiens
  misc_feature (55)..(87): n is a, c, g, or t
  misc_feature (371)..(371): n is a, c, g, or t
  misc_feature (399)..(399): n is a, c, g, or t
  misc_feature (405)..(405): n is a, c, g, or t
  misc_feature (420)..(420): n is a, c, g, or t
gtgatcctccaaatgctttgtaagatggggcagggcgtggaaatatatatatatnnnnnnnnnnnnnnnnnnnnnnnnnnnnnnnnnagtatagtatatattttcctaacctttcttctgggtccttcctcagatctttgagtcacgatagaaaaggagctcgagttctttgtgtaggaaagttaagcttcctgcctgcggtgttcttgcaattgccttaggaattcacaagctctagggagttctgaacggaagggcagacgagaggcactttatccagtcccagaaaggaatctctaaccgtgtggacttgaggaagtcattctaggaaaaacttattattttttaatggtaaaaaacaaatggggggnttaccagaccttcacagtgtttttgggnacgtcntacagtggtcttttnttattttgttaaccgttaa

SEQ ID NO: 259631 - DNA, 587 bp, Homo Sapiens
  misc_feature (344)..(456): n is a, c, g, or t
  misc_feature (464)..(477): n is a, c, g, or t
tattaattgaaggaaaatgttataattaatgtatctatttgctgcattgtatatggattaaatgataaaaaacaagtaatctaccctcagagccatgtatttgagaatgcttcaatcatattttcctatgtacttttttttataaacttagttttagactatgttgtaaaaatgggaaggttgtaaactatgttgtaaaaataggaaatgtggcttaaaatatatacattatattgtttcaggattttgtcagtgtttaaagaaccaatgttcatctttgtatttatatacatgatttaaattttgtctaaaattttaaataaaactgcagtgatttatccttnnnnnnnnnnnnnnnnnnnnnnnnnnnnnnnnnnnnnnnnnnnnnnnnnnnnnnnnnnnnnnnnnnnnnnnnnnnnnnnnnnnnnnnnnnnnnnnnnnnnnnnnnnnnnnnnnttggcggnnnnnnnnnnnnnnaaaaaatttttaaaacctttttttgggggccgggcccccaaaaggaaaggaaaagggccttaattttttccaaagaaaatcggggcaagaaaaagggttggatttccccc

SEQ ID NO: 259632 - DNA, 892 bp, Homo Sapiens
  misc_feature (826)..(826): n is a, c, g, or t
caattgtctacacttgtatggcagaaataaccttataaagtgtttaaggaattcagagaagggaatgtaccaaataagcaacagggagaaaattaggtaagaagtaagatacgaacgagaaacctgatttattgctcatccttcccttgcctccctaatggcaagcaaaactctgaacatctgaaaaggatgtagttctggacaaatcctgactacccagaggaaactcactgtgagattgctgttgatttgaagggtgctttcactaaggttatattttaaagtagaataacacatgctgagtgtaaactggctttggattggtcagctgcagtagtacaaaaacagcatagaatttgagaaaactaaaactgctatgagatagctatgagaaaactaaaactgctatgagatagaaatgatgtaaaattatgtggaaagttttccctcatatactcacatacagcctttgaagggctctggctctgaccggttgatggccttgagcgagatgaaatcatgaaattgagtcaaatcaatttgacattgaaatgacaagaggaaactcttaaatacataaaaacaagctctcatttgcctaggatagatactgtcttaaaaataaagactgaacctagatgttctgagcactagcaacaaggtattttaacaagtttaaaggaattctctgaaaaagttataaaattattctaggaaacataaccataatagtgttttaagggactttcacctggggattttatattcatgaacagagtgtattctgtatttaaaatgtctcatttgtgggaattggatgacatgnttttttgataaatttattcacaatataaattgactttttattctaggaccatgtgaataatgggtt

SEQ ID NO: 259633 - DNA, 681 bp, Homo Sapiens
  misc_feature (400)..(400): n is a, c, g, or t
gtaatgatctaatgactagaatggggcctattttgatcactaaatgccctatttccacaatatagtatagtaaagcagtcaatactgcactttctgatggagtcttaaggagtcacaagtatttataaccattttgagctaataagctatacctcactctctgctttctctctcactctttttgatagtgtgttagggtgaaaaatcagttatttaacccaatttacttgtgaaagaagttttatctttatggactatgatgacttttgacatcaccatttcttgaagaccttggtattaaatgcatgagaaaccttttgccatctagaaatttctaagtttgtttatgttataagactgtaattaattgatagggaatttggggatctcaatccggggnctttttgaaatcagatcattaaatatctcgtcactttggggacttgttatttttaactatgatgtggatatcctgttttaattatgaagtctagaattggtacatatgttgtatgctttgtaaagaatttcacttggtctaatttattgcatatactagcttctgttggaaaatgactgacagctagaaagtttaaggtaatttctaagtatactacctataagtaactgataagaattaggcatcattcagtgatatagcagatgactaatgggtttttc

SEQ ID NO: 259634 - DNA, 1091 bp, Homo Sapiens
ggcctgggtggcgaattcggcacgagggtgcagcttggtggcggctgagccggcagcgggccgcctcaggcagccccggccgggccgcccgggtccccggcagcggggtaggatggcgctaaagcggatccagaaggaattaaccgacttgcagagggatcctcctgcccagtgttctgcaggacctgtcggtgatgacttgttccactggcaggccaccatcatgggcccgaatgacagtccttaccaaggaggtgttttcttcctgaccatccactttcctacagattacccgttcaagcccccaaaggttgctttcacaaccaaaatttatcaccctaatatcaacagcaatggcagcatctgccttgatatcctgcggtctcagtggtctccagcgttgactgtgtcaaaagttctcttgtccatctgctcgctgctctgcgaccccaaccccgatgaccccctggtgccagagatagcacacacctacaaggccgacagagagaagtacaacagactagcaagagagtggacacaaaaatatgctatgtaagtgccttggaggttttacatgagacactgtccaagagaagctggcagagaggtcttcccttaaaactttgggctgttggctgagccattcaaagagcatcatctgttcttcaaacaaatgttggtcacccactctctccagctgcagcatgttggtgccattttcagcaattacggctttgacagtgccacctctttgatgccaaatcagcaaccattgttgttatgatctgcagtcttcctggtgacactggaatctctctctctgccgcctcagtttgtctgctggtcctcttgggggggcaggcccctggcacgtctctcctacccggcctcaaatggtgctgctgcccatgatggtaccacaccagggcctcagcctggcccctcaccacataccctttgccttttagaactcagtgccatcctgggtgcccagggcagagcaggctttgttcgcacctcatctgctgcagaaccacatcctgaggagtctcagcttatcctggagggaattgggaacagtgtcactggga

SEQ ID NO: 259635 - DNA, 850 bp, Homo Sapiens
  misc_feature (740)..(740): n is a, c, g, or t
gaaacgggaaggcctgctgcattccagccacatctcggaggagctgaccacaactacagagatgatgatgggccggttcgagcgggatgccttcgacacgctgttcgaccacgccccggataagctcagcgtggtgaagaagtctctcatcacttttgtgaacaagcacctgaacaagctgaatttggaggtgacggaactggagacccagtttgcagatggcgtgtacctggttctgctcatgggccttctggaagactactttgttcctctccaccacttctacctgactccggaaagcttcgatcagaaggtccacaatgtgtccttcgcctttgagctgatgctggacggaggcctcaagaaacccaaggctcgtcctgaagacgtggttaacttggacctcaaatccaccctgagggttctttacaacctgttcaccaagtacaagaacgtggagtgacgggggagctgtggatggtggcaggagtgtcccagcaagaaaggcggcatccgtctgtgccctgtgcctttccagggagccaggcgccatgggcttctggtccaagctgtgttgactgtcatccccaccccacccctacctcacgcctgccccaccccctgcctcttttggttgttgttcttaatctcctctccatgtagttcccagtgggcaagagcctttgaaaatgcaggattctaaacactcgtgcttgcgtttgaagcctcgcgtcactcantcgcgtgggatgatgagtccgttgttgtctgccttggccgaaagatgaaaaaaagcctgaaccccaacccccacctggttgagagcaccctgcattctgcctcatggtgc

SEQ ID NO: 259636 - DNA, 2689 bp, Homo Sapiens
  misc_feature (2285)..(2305): n is a, c, g, or t
  misc_feature (2550)..(2550): n is a, c, g, or t
  misc_feature (2600)..(2600): n is a, c, g, or t
gggagggttgggtgcgccgctgaacggatggctgagggagccccgcggatcgtttaggaaagccggccagctgatcgtcgtgtgttgccacccattcatgtcaagatgactaagtttggatttttgcgattgtcctatgagaagcaggacacacttttgaagcttctcattctgtcaatggctgctgtattatccttctccactcgtctgtttgctgtcctgagatttgaaagtgttatccatgagtttgatccgtactttaattatcggactaccaggttcctggctgaggaggggttttataaattccataactggtttgatgaccgagcctggtaccctttgggacgaatcattggaggaacaatttacccaggtttaatgatcacctctgctgcaatctaccatgtactccattttttccacatcaccatcgacattcggaatgtctgtgtgttcctggcccctctcttctcctccttcaccaccatcgtcacgtaccaccttaccaaagagctcaaggatgcaggggctgggcttcttgctgctgccatgattgctgtagttcctggatatatctcccgatctgtggctggctcctatgataatgaagggattgccatcttttgcatgctactcacctactacatgtggatcaaggcagtaaagactggttccatctgttgggcagctaagtgtgcccttgcttatttctacatggtctcgtcatggggaggttatgtgttcctgatcaacttaattcctctcacgtcctcgtgctgatgctcacaggccgtttctctcaccggatctatgtggcctactgtactgtttactgcctgggcactatactttctatgcagatctcctttgtgggtttccagcctgtcctttcatcagagcacatggcagcctttggggtctttggtctctgccagatccatgcctttgtggattacctgcgcagcaagttgaatccacaacaatttgaagttcttttccggagcgtcatctctctggtaggctttgtccttctcaccgtgggagctctcctcatgctgacaggaaaaatatctccctggacggggcgtttctactcactgctggatccctcttatgctaagaacaacatccccatcattgcttctgtgtctgagcatcagcccacaacctggtcctcatactattttgacctgcagctcctcgtcttcatgtttccagttggcctctattactgctttagcaacctgtctgatgcccggatttttatcatcatgtatggtgtgaccagcatgtacttttcagctgtaatggtgcgtctaatgctagtgttggcacctgttatgtgcattctctctggcattggagtctcccaggtgctgtccacatacatgaagaatctggacataagtcgtccagacaagaagagcaagaagcaacaggattccacctaccctattaagaatgaagtggcaagtgggatgatactgggtcatggctttctttctcatcacctacaccttttcattcaacctgggtgaccagtgaggcctactcttctccgtccattgtactatctgcccgtggtggggatggcagtaggatcatatttgatgacttccgagaagcatattattggcttcgtcataatactccagaggatgcgaaggtcatgtcctggtgggattatggctatcagattacagctatggcaaaccgaacaattttagtggacaataacacatggaataatacccatatttctcgagtagggcaggcaatggcgtccacagaggaaaaagcctatgagatcatgagggagctcgatgtcagctatgtgctggtcatttttggaggcctcactgggtattcctctgatgatatcaacaagtttctttggatggtccggattggagggagcacagatacaggcaaacatatcaaggagaatgactattatactccaactggggagttccgtgtggaccgtgaaggttctccagtgctgctcaactgcctcatgtacaagatgtgttactatcgctttggacaggtttacacagaagccaagcgtcctccaggctttgaccgtgtccgaaatgctgagattgggaataaagactttgagcttgatgtcctggaggaagcatataccacagaacattggctggtcaggatatacaaggtaaaggacctggataatcgaggcttgtcaaggacataaatgtcacgtccagctctgatatgcttcgcactgagcacatcacatttaggacgttgaagannnnnnnnnnnnnnnnnnnnnaaatatgcagtttgtaagaacaaaactggatggcatcagaattgtctggaagttttgtcttgggcagtatgggctgggccaaatgaaatgatttttataattctaaacaggttaccaaatgaaatgtcatggctttactttggtcaattaaaggggggaattttttttaaaaaatgtgcccttaatttgttttgacttataactggatttgagggaaggcaaaagctatgctaagcttgccgaanggacataaagcagaactttggtcaattcttcttagcttccctaaataagnccaaaataaaaactttcttttctccaattcgggaaaactatccaaggaaccatttccgaatcctaactttacacagaaaggtttttgtc

SEQ ID NO: 259637 - DNA, 508 bp, Homo Sapiens
  misc_feature (61)..(82): n is a, c, g, or t
  misc_feature (259)..(375): n is a, c, g, or t
  misc_feature (385)..(398): n is a, c, g, or t
gggtcacgtccagctctgatatgcttcgcactgagcacatcacatttaggacgttgaagannnnnnnnnnnnnnnnnnnnnnaatatgcagttggtaaaaacaaaactggatggcatcaaaattgtctggaagtttggtcttgggcagtatgggctgggccaaatgaaagtgatgttttataattcgtaaacgaaggttaccaaatgaaagtgtcagtggcttatacttgggctcaattaaaggggggaatttttttannnnnnnnnnnnnnnnnnnnnnnnnnnnnnnnnnnnnnnnnnnnnnnnnnnnnnnnnnnnnnnnnnnnnnnnnnnnnnnnnnnnnnnnnnnnnnnnnnnnnnnnnnnnnnnnnnnnnccttgggggnnnnnnnnnnnnnnaaaaaatttttaaaaccttttttttggggccggggcccctaagggaagggaaccggggcaaaattgtttccaaagaaaaccggggcaaaaaaaggggttggattcccccc

SEQ ID NO: 259638 - DNA, 529 bp, Homo Sapiens
  misc_feature (181)..(181): n is a, c, g, or t
acttgaactccaaacccgacgccattctgttggtaaagttactgaagttctcaaccaacacctgcttgatcatgtctggctcagaaataacaataaacatccgacgaccaagatagtacccacacagaggtccatacagctttctgagctccatttggctttcccaaaaaaccctggcggnaaaaatgtcaagtttcccaatgaaaggagaaggcttgggatgtctgaggcctaacttctccagtcttgagaatgctgatgtggagtaccatttcaggagggccaagagagccactgacagggccaccgtcaccatggggccattcacttccaattttagaaaccccaaggcttccatcattcctctgagaccccagagtggtggtcttccagatgagacaggaggctgatctcgccgcccttatgggaaccgtgctctgcaggtagaaaagggaacaggcaaccaagcaaacatcacatggagtgggcccccacaatgtgctctttctcagagtgtctccctataaag

SEQ ID NO: 259639 - DNA, 923 bp, Homo Sapiens
  misc_feature (633)..(633): n is a, c, g, or t
  misc_feature (652)..(652): n is a, c, g, or t
  misc_feature (661)..(765): n is a, c, g, or t
  misc_feature (812)..(812): n is a, c, g, or t
  misc_feature (843)..(843): n is a, c, g, or t
  misc_feature (846)..(846): n is a, c, g, or t
  misc_feature (892)..(892): n is a, c, g, or t
  misc_feature (904)..(904): n is a, c, g, or t
gggacgtcatgaggaagtgccggcccactgaagccgtggggacgcgcccagcggagctaatcagattacctggctggtgtttgcttgttctggagtgatcttctgactggaaaagaactatgtcatggatcaaggaaggagagctgtcactttgggagcggttctgtgccaacatcataaaggcaggcccaatgccgaaacacattgcattcataatggacgggaaccgtcgctatgccaagaagtgccaggtggagcggcaggaaggccactcacagggcttcaacaagctagctgagactctgcggtggtgtttgaacctgggcatcctagaggtgacagtctacgcattcagcattgagaacttcaaacgctccaagagtgaggtagacgggcttatggatctggcccggcagaagttcagccgcttgatggaagaaaaggagaaactgcagaagcatggggtgtgtatccgggtcctgggcgatctgcacttgttgcccttggatctccaggagctgattgcacaagctgtacaggccacgaagaactacaacaaatgtttcctgaatgtctgttttgcatacacatcccgtcatgagatcagcaatgctgtgagagagatggcctggnggggtggagcaaggcctgntggatcccnnnnnnnnnnnnnnnnnnnnnnnnnnnnnnnnnnnnnnnnnnnnnnnnnnnnnnnnnnnnnnnnnnnnnnnnnnnnnnnnnnnnnnnnnnnnnnnnnnnnnnnnnaccatggccagccggatttcagggatttttcaaaaagaaaataattnaattatttggtcacataatggaaatcctaantantaaaaggtggaagagactttttgaagccattttaaatatttggggncccccctcaggngtaattaattttaggtacc

SEQ ID NO: 259640 - DNA, 1116 bp, Homo Sapiens
  misc_feature (644)..(680): n is a, c, g, or t
tcagacccagccgctccctgcggcctggctccaggatcttaaaagctgggccgggtgtcctgtccacgtagggcgtttccgacccttcaactctcaagggtgtgttctcaacctccccccaggtcatcatcggggactcgttcacaccaggggcaggggaaggagtggcaacaaatccaaatccacccactcgaggggactcctgggggatcagctccttgccatcggggcccaccttgccctgtttgtgctgggcattgagggcggctgcctgctggagctggcacctgctcagggcttggctgaaggggtccctaaggaagcgcgtgttcttatgtaccacctgccggggcttcttaaacagctgctcctcgtcagggacaccctctggatagtacatgagggaattcttggccttgtacttccaggtctccacactggcctggctgctctcgatggcctggtgctctgctgacgggagttcgagattatctttctgcctcttctcaaactcttcctcagcctggtagagccaagcgtggcgtgcccggcttctctccttggccacctccatgatctcctggaaggaggcattgtcctcactcgtgtagcggctcaggaagacatctaggctgggcagcggnnnnnnnnnnnnnnnnnnnnnnnnnnnnnnnnnnnnnaggcctcggccgcggggcctgggcttgttgcccaccactccagtgcctgcatgcacctcaggggtttcaaatgtggctggagtcacatagggtggcgggggctcccgggacatcttgcccaaggcagagccaaacttgatggcaatctggcgcatccgttccaagtctccattctcctcggcttccaggtactccttctgtgcctggagcttctccacatcaggaaagaaatccctttggatgaccgtctggaggccctcgatatactcttcctcgtccaggacccgctgcttgctcgtcgcagccccagcctctcccgcctcgcgcttcctcgggggcctggacgcggcgggaagcaacaaggacgacgctgatgcgcccggcgtctccatcgcgacgcgtggtcgacgatatcccgggattccggaccgtacca

SEQ ID NO: 259641 - DNA, 933 bp, Homo Sapiens
  misc_feature (625)..(625): n is a, c, g, or t
  misc_feature (845)..(845): n is a, c, g, or t
  misc_feature (889)..(889): n is a, c, g, or t
  misc_feature (901)..(901): n is a, c, g, or t
ggtctggagcgggcgagacgaccagggccggcgagcgcagtgcagcgccgcgcggtgcgggcggccgagtgggggcgtcatggaggatgagcggagcttttcggatatctgcggcggccgcctggcgctgcagcgccgctactactccccgtcctgccgggaattctgcctcagctgccctcggctctcgctgcgttcgctcaccgctgtcacctgcacggtgtggctggcggcctacggactcttcaccctctgcgagaacagcatgatcctctctgctgccatcttcatcaccctcttaggtctgcttggttatctccattttgtgaagattgatcaggagactctgttaatcattgattcccttggcattcagatgacttcatcttatgcttcaggcaaagaaagcactaccttcatagaaatgggcaaggtcaaggatattgtcatcaatgaggccatttacatgcagaaggtgatttactacctctgcatcttattgaaagatccagtggaaccacatgggatatcccaagtagtacccgtcttccagagtgccaagccccggctggactgcttgattgaagtatacaggagctgccaggagatcctggcacaccagagngccacatcaacaagcccatgagccccagcgttcagaaggccagcattgtcttccatgggagatgactcttaagccataggggctggttttccgtactccaaaccatcaggtgggacacagtcctagggaaccattatgggatgtagtgcatcttaggagccatagagcaggtgactggaaatctaactcagtatatttccgtgtattatagtgtttttcnttgttaaggtttttgcctactttacccaaaggaggggggagacnttaagatttttngacacagtatgttcaaaagttattgttcaggc

SEQ ID NO: 259642 - DNA, 918 bp, Homo Sapiens
  misc_feature (319)..(319): n is a, c, g, or t
gatcaaaatggttggtgaacctccacatgtccagttctgttgccaaactttccattcagagtatttggtggagtttgaatttgagcaaactaaatgccttcatcttaggtagaaagggcctgaatcttccattttatattcaaacctcattgttatttggcctaagtaaaaagtcagatttcatttccatttacctgagttcgctttaaagagcttttcaaagagagctttatagacacccacaattgtccccaatctcttcatgatgttgcattaatagttgtttttgtccctttcttggaaatgttaatgccaaagnttgcctgaacattgggcggttttcttaatttgaagtataaaaattataaagagtaattccaaaggtattaaaagattgtttaacagtatgtgtggtgatgtcattatctccagagaggcttcaagaaatcctttggaaataaaaagttaaatgtttacatttcatgtggtatttcaagtcttcaggttctgattagcttacttttttcctttgtctttggctgatttctgctttgtagataaataataatagccctgagatgtttctaacatttaaataagaaaaaaatcaaatcgaagtcagcctgctggaaaagtgatcacatggcagttgcagtaacttgtatggaaagagaaaatgcaatgagcccagttactgcacttgccactaccatgctgtccatggaaggaataatcagcagttcagttgtcacaagccgcccttggaaggaaaacggcagcaaaatattttaaaatggaaggatattggcagtccccaggggccagtggaaggttttcttttgggtaaaatggaattgtggccattgttcaagttacccccgtagttgatggggcactgactgggtttcactgggccac

SEQ ID NO: 259643 - DNA, 951 bp, Homo Sapiens
  misc_feature (424)..(545): n is a, c, g, or t
  misc_feature (579)..(619): n is a, c, g, or t
gggtacggtccggaatttacgggatatcgtcgacccacgcgtccgaaattccctctacatagaaactgagtgacatgtaaaaatgtgtagctaagtcaggagttacttcctaagagcctgacgctctgcttttcatcaaaaggaaaaacaagcgtgaggcagaggcgagggaggtggaggtgagtggatgatgtgctgagttagggatgtttatatgccgcaaaggtttggttggtaggcttcgcgctaagattagcctggctttgtactgaaaagggggaaggacacatagtgacacagatccttctggtctttcccaggaggtgtgacctaatgaggtttgttgtgagaataaagcaatgtggtttcacatatattatctatcataggctagggactcaagaaatgcatattccccccccannnnnnnnnnnnnnnnnnnnnnnnnnnnnnnnnnnnnnnnnnnnnnnnnnnnnnnnnnnnnnnnnnnnnnnnnnnnnnnnnnnnnnnnnnnnnnnnnnnnnnnnnnnnnnnnnnnnnnnnnnctttctttgagagatagagtctcactctgtcatnnnnnnnnnnnnnnnnnnnnnnnnnnnnnnnnnnnnnnnnntccgatcctgggttcaagcgattttcgtgcctcggcttctgagtagctgggattacagggtgagtgcgccacagcctggtaatatgggttttaggtccaggacagttcccctgttgaccagctggtctggacctgatctaatgatgccgctggctccagggtgggtcggggcacccaggccagccttacttcttctttcggttattacacccgggggtggcgcggctctcacttcggcggttctctgagagcactggcgggggggcaacccggcctggcgaccgcccgggacagcttttcaggggccgcctcgtcctcctcttctcgttcgg

SEQ ID NO: 259644 - DNA, 1389 bp, Homo Sapiens
  misc_feature (1322)..(1322): n is a, c, g, or t
  misc_feature (1327)..(1327): n is a, c, g, or t
aacctacagcaatctcattaaattactgatgtcagaagattattttacacaagcaatggaagtgaaagcattcgcggagacccacatcaagggcttcacactgaacgatgctgccaacagccgcctcatcataacgcaagttaggcgggattatttgaaagaggctgtgacaacactgaaaacagtattggatcagcagcagaccccttctaggttagcagtgacccgtgtcatccaggcattggccatgaagggtgatgttgaaaacatagaagtagttcagaagatgttaaatggactcgaagactccattggactttcaaaaatggttttcatcaataacattgctttggctcaaataaagaataataacatagatgccgcaatagaaaacattgaaaatatgcttacttcagagaataaagtcattgaaccccaatacttcggcttggcatacttattcagaaaagtaatagaggagcagttggaaccagcagttgaaaagataagcatcatggcggagagattggccaatcagtttgcaatttataaacctgtcactgattttttccttcaacttgtggatgcaggcaaggtggatgatgccagagctctcctacagagatgtggtgcaattgctgaacaaaccccgattttgttgttgttcctccttaggaattctaggaaacaaggaaaggcatcaactgtgaaatctgtgttagaattgattcctgaattaaatgaaaaggaagaagcatacaattccctcatgaaaagctatgtctcagagaaagatgtcacatctgctaaagcactgtatgaacatttgactgcaaagaatacaaaattggatgatctgtttctaaagcgttacgcatctttgctgaagtatgctggagagcctgtccctttcattgaaccccctgaaagctttgaattttatgcacagcagctaagaaaattgagggaaaactcttcttgaaataaccaggcgatactttgttttgtatatatttgtgattctgtgtctacatgttattttgaagtatatctgagggaaaaataaatgaaaattttctttatgtacttatgtatgtgtgatgcatgttcaaagtcttattgaccataactctgtgcacttggttattggacatttttggagtttttttctctgggaaaaatcgatagtgttttcttcaatgctgctgctgtgtgaagccatactttttcaggattctttcccctaattggctctttggtttccctgcctctgtttcatttatttcttaaaatgttattccttttatttaagattccaaccntcctnattcataccatactattaatatcctcacccaagacccccccataatccatcccacccaatca

SEQ ID NO: 259645 - DNA, 1010 bp, Homo Sapiens
  misc_feature (843)..(843): n is a, c, g, or t
  misc_feature (922)..(922): n is a, c, g, or t
  misc_feature (940)..(941): n is a, c, g, or t
  misc_feature (957)..(957): n is a, c, g, or t
  misc_feature (986)..(986): n is a, c, g, or t
agaacaccgcctgcagctagaacagcctggtcaggagcgtaacggagtggtgcgccaacgtgagaggaaacccgtgcgcggctgcgctttcctgtccccaagccgttctagacgcgggaaaaatgctttctgaaagcagctcctttttgaagggtgtgatgcttggaagcattttctgtgctttgatcactatgctaggacacattaggattggtcatggaaatagaatgcaccaccatgagcatcatcacctacaagctcctaacaaagaagatatcttgaaaatttcagaggatgagcgcatggagctcagtaagagctttcgagtatactgtattatccttgtaaaacccaaagatgtgagtctttgggctgcagtaaaggagacttggaccaaacactgtgacaaagcagagttcttcagttctgaaaatgttaaagtgtttgagtcaattaatatggacacaaatgacatgtggttaatgatgagaaaagcttacaaatacgcctttgataagtatagagaccaatacaactggttcttccttgcacgccccactacgtttgctatcattgaaaacctaaagtattttttgttaaaaaaggatccatcacagcctttctatctaggccacactataaaatctggagaccttgaatatgtgggtatggaaggaggaattgtcttaagtgtagaatcaatgaaaagacttaacagccttctcaatatcccagaaaagtgtcctgaacagggagggatgatttggaagatatctgaagataaacagctagcagtttgcctgaaatatgctggagtatttgcagaaaatgcagaagatgctngatggaaaagatgtatttaatacccaaatctgttggggctttctattaaagaggcaatgacttatcaccccaacccagntagttagaaggctgttgnnttcagatatgggctgntactttttaatggactgactccaaatcanaatggcatgtgaaatgatgtaatg

SEQ ID NO: 259646 - DNA, 2355 bp, Homo Sapiens
  misc_feature (1610)..(1613): n is a, c, g, or t
  misc_feature (1623)..(1634): n is a, c, g, or t
  misc_feature (1719)..(1781): n is a, c, g, or t
  misc_feature (1824)..(1842): n is a, c, g, or t
  misc_feature (1873)..(1888): n is a, c, g, or t
  misc_feature (2130)..(2140): n is a, c, g, or t
attttttaccagagggagccagggctgcagcctcatctgtttgcggatcagaacccgagctgtgcttgtggctgcggctgctaactggctgcgcacagggagctgtcaccatgcctcactcgtacccagccctttctgctgagcagaagaaggagttgtctgacattgccctgcggattgtagccccgggcaaaggcattctggctgcggatgagtctgtaggcagcatggccaagcggctgagccaaattggggtggaaaacacagaggagaaccgccggctgtaccgccaggtcctgttcagtgctgatgaccgtgtgaaaaagtgcattggaggcgtcattttcttccatgagaccctctaccagaaagatgataatggtgttcccttcgtccgaaccatccaggataagggcatcgtcgtgggcatcaaggttgacaagggtgtggtgcctctagctgggactgatggagaaaccaccactcaagggctggatgggctctcagaacgctgtgcccaatacaagaaggatggtgctgactttgccaagtggcgctgtgtgctgaaaatcagtgagcgtacaccctctgcacttgccattctggagaacgccaacgtgctggcccgttatgccagtatctgccagcagaatggcattgtgcctattgtggaacctgaaatattgcctgatggagaccacgacctcaaacgttgtcagtatgttacagagaaggtcttggctgctgtgtacaaggccctgagtgaccatcatgtatacctggaggggaccctgctcaagcccaacatggtgaccccgggccatgcctgtcccatcaagtataccccagaggagattgccatggcaactgtcactgccctgcgtcgcactgtgcccccagctgtcccaggagtgaccttcctgtctgggggtcagagcgaagaagaggcatcattcaacctcaatgccatcaaccgctgcccccttccccgaccctgggcgcttaccttctcctatgggcgtgcctgcaagcctctgcactcaatgcctggcgagggcaacgggacaatgctggggctgccactgaggagttcatcaagcgggctgaggtgaatgggcttgcagcacagggcaagtatgaaggcagtggagaagatggtggagcagcagcacagtcactctacattgccaaccatgcctactgagtatccactccataccacagcccttggcccagccatctgcacccacttttgcttgtagtcatggccagggccaaatagctatgcagagcagagatgccttcacctggcaccaacttgtcttcctttctctcttcccttcccctctctcattgctgcacctgggaccataggatgggaggatagggagcccctcatgactgagggcagaagaaattgctagaagtcagaacaggatggctgggtctccccctacctcttccagctcccacaattttcccatgatgaggtagcttctccctgggctctccttcttgcctgccctgtctcctgggatcagagggtagtacagaagccctgactcatgccttgagtacataccatacagcaaataaatggtagcaaaacnnnngagaagaacnnnnnnnnnnnngcgaacagacggagacagaacgccgcgacagaagaagcaacgaggacgacagccccgccaaccgagccacaagagtaaggaccgnnnnnnnnnnnnnnnnnnnnnnnnnnnnnnnnnnnnnnnnnnnnnnnnnnnnnnnnnnnnnnngctcacccccaccacaccgtcgactgaaccccctttggaccgnnnnnnnnnnnnnnnnnnntaaatagtttttctccaacccactgttcgtnnnnnnnnnnnnnnnnccccccaggacagggtaacgaccgggcgccgactttacgttttctcaaggaaagacgcccaccggccctcacaacaggggtggtggaccccgaccccacaataaaacaccccccgggcggggcagaacattgggttccagacaacaatcaccgggagaggggtgtactgcggacctattttgcggtcacaccaacttaagcgtcgcgtgccccggggcccgcccaccctcataatatatcannnnnnnnnnngccaagcacttagtgccaggaaggtggggggggaaagactgggaacactaccgtctcccccggaagaggcgtcctcccatcaagaggacgcaaagcgggcgtctcgacgcgccctccgcgcgggtatctcaccgtgcatcagtccccctcatgacaatatataagtgtccccgcgggcgagaagagacacggcgagtcagaaataattcgtcccc

SEQ ID NO: 259647 - DNA, 614 bp, Homo Sapiens
aatgatagttttcataatggtaaaatggagagatacttgtcaagtttctcaggaagtattcatctcacaaagcggacttgtccacttttagctggggcaatcttcgcatttcatacctgcacttgctcttaccacaagaagtcccctccccccaggtgattttcctccaagacacgaggacagaagcattgccagtggcttgaagtgacagcagtgggcaggaggtaccagagctgcacaaggagcagtgtctgcttctcactatctttgaaaggatacccgagacctcgatgaaaaaacagatcctaaaataagccacattttgtcttttatgcctcaagacacttaacattaagttatataatcttatgccagagatgaaagaaactagatcacgtgtttagaatagcagtacacatctcaagtagctttcaagcaggataaataagtcaaaatactggccaccctgagagaaataaagaatagacaaagcactaagtttaaagatttttctccttgtgctattccatctaaaacaaaagctcagtacatgcaaggaactctgtggaatatatagcagcatgtgaagaccgatgaaaactcagacactgtcc

SEQ ID NO: 259648 - DNA, 865 bp, Homo Sapiens
cgccgcgaagccggtcgcgcgcagctcgtcccggccctggcccgccgcaaacgaggatccgctgcgctcggggaacgcgacagcggcgctcgtggccccggacctgaagacccttccagcatgccagaggaaagttcccccaggcggaccccgcagagcattccctaccaggacctccctcacctggtcaatgcagacggacagtacctcttctgcaggtactggaaacccacaggcacacccaaggccctcatctttgtgtcccatggagccggagagcacagtggccgctatgaagagctggctcggatgctgatggggctggacctgctggtgttcgcccacgaccatgttggccacggacagagcgaaggggagaggatggtagtgtctgacttccacgttttcgtcagggatgtgttgcagcatgtggattccatgcagaaagactaccctgggcttcctgtcttccttctgggccactccatgggaggcgccatcgccatcctcacggccgcagagaggccgggccacttcgccggcatggtactcatttcgcctctggttcttgccaatcctgaatctgcaacaactttcaaggtccttgctgcgaaagtgctcaaccttgtgctgccaaacttgtccctcgggcccatcgactccagcgtgctctctcggaataagacagaggtcgacatttataactcagaccccctgatctgccgggcagggctgaaggtgtgcttcggcatccaactgctgaatgccgtctcacgggtggagcgcgcctccccaagctgactgtgccctttcctgctgctccagggctctgccgatcgcctatgtgacagcaaagggcctacct

SEQ ID NO: 259649 - DNA, 727 bp, Homo Sapiens
gtcgatgggcccgagggacaagtttggcagcacaaggttgagcactttcgcagcaaggaccttgaaagttgttgcagattcaggattggcaagaaccagaggcgaaatgagtaccatgccgggcgaaggtggcccggccctctctgcggccgtgaggatggcgaatggcgcccttcccatggagtggcccagaaggaagacagggaagccccagggtagtctttctgcatggaatccacatggctgcaacacatccctgacgaaaacgtggaagtcagacactaccatcctctccccttcgctctgtccgtggccaactggcaaaaggtgggtttccagcacgtgctcgctccccgccttctcccattccctccctttgtatggtttcagaggagaaaaatgtataaattctggcattctcttggtgctcgcatccttccaggggaagatccttctgaatctagtctgcatctctcccacttacaaggattttctcctgttcagctctgcaaagagatggggcagctggtctgcaccttcagttagaatcctggctctcttagagtgcaagcgttaaaccatctttcggctcagttccttcacgctaaaagctcccaggtttaacatggaacagacctttttattttcccttgaaaacattcagttagatctgttgtcctctgtgagattacagaagttcccaaacagtgctagttccattgtttcc

SEQ ID NO: 259650 - DNA, 1110 bp, Homo Sapiens
  misc_feature (682)..(682): n is a, c, g, or t
  misc_feature (692)..(692): n is a, c, g, or t
  misc_feature (826)..(903): n is a, c, g, or t
  misc_feature (906)..(937): n is a, c, g, or t
  misc_feature (939)..(939): n is a, c, g, or t
  misc_feature (944)..(944): n is a, c, g, or t
  misc_feature (1014)..(1015): n is a, c, g, or t
aagccatttattttaatttgctatttttttcaatgttctaggtatctttaaatttgttattgtggaatcattttcctgccagatacctttatcaaaattattggcctcatgagagctgaagtaagtcagctttttggtgaactttagtggacttctgtgagattgtagttgtactttgtatctctaaatctaaagatagttttttaaaactcccaaagaaaatctgctctcctttctgatctaaaaactcatctttggggtaaagagttaagtgtccaaaggttgtcacagttcatgaggtcagagggagctagcctggcacctggactctgcccatccacagctgacagattccaacagaagtgtatttaaattctccagtagacaatgctgggtaagggagggggtagggctgggttattaagatacaggctgctgtattttacattggttgtgggggaaggggagcctggagaaaacaaagtcactattcccttttttgaaacaggaaaaaaaattattttttgttcagtaaaaatggtagagaattccaatgtccctagccacaagggaccagttccactgagaagtgaacagtgggaactcaaaatttcagaaacattgggggaagggaaaattggctttctcttaattggcagatggtccagtggggcgggggggnctctgttttntgttgggatgtgttatggtgtatgtacgcatatatggaccgaagtctgctgagtttataaggttccaaaaatatggtaaaaatcttggtttttggtaatttatctcaataaaagcccactggaactccaaaaannnnnnnnnnnnnnnnnnnnnnnnnnnnnnnnnnnnnnnnnnnnnnnnnnnnnnnnnnnnnnnnnnnnnnnnnnnnnnccnnnnnnnnnnnnnnnnnnnnnnnnnnnnnnnncntgggngggcccggctcgcgcccttccaaaaaatttttctaaaaaccttttcgttgtggcgcccgcggcccccccnnaagggaaagggggaacccgggggcccaaaactcttggtttctcccaaagagaaaaccccggggcccaaaaaaacaaagggggggtttgggaattt

SEQ ID NO: 259651 - DNA, 541 bp, Homo Sapiens
tcccttagctgcacccaggccccgaagctgttccccatgccttgagccttcccatggggaggatgcctgagtgagccagtttccctacgccgtggatctagcaagcccatggagacaggtagcatttgtaagatgctgcacaggagcagcattatccccaaagatattacagggtagacacgttttaactgaaatcaatcaagataactttattcaaagagcagcccgctttgtgtgactaaaatgaaacaagacagttgaattgtgtgacttgaagattaccaatgattttgaggcttttctataataaaaagaggttctaaccattatttgggaacaaagagagttttcatcttttttcagatcaaaaccattctgtaaaatctttgttgtttaattaaatgtgccgttatttacccctgatgttatttatgactatgtgccgattcctgctcgggctgtttgctgttggctggtaataatatatttgatttaaatgctgttgactgtgctattaactgctgccgtcagtaaactccaa

SEQ ID NO: 259652 - DNA, 1314 bp, Homo Sapiens
  misc_feature (1135)..(1190): n is a, c, g, or t
  misc_feature (1193)..(1223): n is a, c, g, or t
ggggcgctgagcttgcagggccgctcccctcacccgcccccttcgagtcctcgggcttcgccccacccggcccgtgggggagtatctgtcctgccgccttcgcccacgccctgcactccgggaccgtccctgcgcgctctgggcgcaccatggcccgcggggctgcgctggcgctgctgctcttcggcctgctgggtgttctggtcgccgccccggatggtggtttcgatttatccgatgtccttcctgacaatgaaaacaagaaacccactgcaatccccaagaaacccagtgctggggatgactttgacttaggagatgctgttgttgatggagaaaatgacgacccacgaccaccgaacccacccaaaccgatgccaaatccaaaccccaaccaccctagttcctccggtagcttttcagatgctgaccttgcggatggcgtttcaggtggagaaggaaaaggaggcagtgatggtggaggcagccacaggaaagaaggggaagaggccgacgccccaggcgtgatccccgggattgtgggggctgtcgtggtcgccgtggctggagccatctctagcttcattgcttaccagaaaaagaagctatgcttcaaagaaaatgcagaacaaggggaggtggacatggagagccaccggaatgccaacgcagagccagctgttcagcgtactcttttagagaaatagaagattgtcggcagaaacagcccaggcgttggcagcagggttagaacagctgcctgaggctcctccctgaaggacacctgcctgagagcagagatggaggccttctgttcacggcggattctttgttttaatcttgcgatgtgctttgcttgttgctgggcggatgatgtttactaacgatgaattttacatccaaagggggataggcacttggacccccattctccaaggcccgggggggcggtttcccatgggatgtgaaaggctggccattattaagtccctgtaactcaaatgtcaaccccaccgaggcacccccccgtcccccagaatcttggctgtttacaaatcacgtgtccatcgagcacgtctgaaacccctggtagccccgacttctttttaattaaaataaggtaagcccttcaaannnnnnnnnnnnnnnnnnnnnnnnnnnnnnnnnnnnnnnnnnnnnnnnnnnnnnnnccnnnnnnnnnnnnnnnnnnnnnnnnnnnnnnncttggtgggcccgcctccggcccctgaaaaacctttcaaaaacctttcgttggggcggcggggccccctaagggaaagggaaacaggggcc

SEQ ID NO: 259653 - DNA, 2911 bp, Homo Sapiens
  misc_feature (1801)..(1871): n is a, c, g, or t
  misc_feature (2177)..(2177): n is a, c, g, or t
  misc_feature (2186)..(2186): n is a, c, g, or t
  misc_feature (2253)..(2253): n is a, c, g, or t
  misc_feature (2267)..(2267): n is a, c, g, or t
  misc_feature (2330)..(2330): n is a, c, g, or t
  misc_feature (2335)..(2335): n is a, c, g, or t
  misc_feature (2562)..(2562): n is a, c, g, or t
  misc_feature (2566)..(2566): n is a, c, g, or t
  misc_feature (2624)..(2624): n is a, c, g, or t
  misc_feature (2635)..(2635): n is a, c, g, or t
  misc_feature (2665)..(2665): n is a, c, g, or t
  misc_feature (2669)..(2669): n is a, c, g, or t
  misc_feature (2695)..(2695): n is a, c, g, or t
  misc_feature (2786)..(2786): n is a, c, g, or t
  misc_feature (2794)..(2794): n is a, c, g, or t
  misc_feature (2819)..(2819): n is a, c, g, or t
  misc_feature (2854)..(2854): n is a, c, g, or t
  misc_feature (2883)..(2883): n is a, c, g, or t
ggctggtacggtccggaatctcgggatatcgtcgacccacgcgtcgggcatgggaagtctgatctaccttcttgtagagttaactcagaccatgttgagcaagagacttgcacactgtgaagagctgagagcacaggtgatggaggttaaagctctcccggggatgggcaccactatagatgtcatcttgatcaatgggcgtttgaaggaaggagatacaatcattgttcctggagtagaagggcccattgtaactcagattcgaggcctcctgttacctcctcctatgaaggaattacgagtgaagaaccagtatgaaaagcataaagaagtagaagcagctcagggggtaaagattcttggaaaagacctggagaaaacattggctggtttacccctccttgtggcttataaagaagatgaaatccctgttcttaaagatgaattgatccatgagttaaagcagacactaaatgctatcaaattagaagaaaaaggagtctatgtccaggcatctacactgggttctttggaagctctactggaatttctgaaaacatcagaagtgccctatgcaggaattaacattggcccagtgcataaaaaagatgttatgaaggcttcagtgatgttggaacatgaccctcagtatgcagtaattttggccttcgatgtgagaattgaacgagatgcacaagaaatggctgatagtttaggagttagaatttttagtgcagaaattatttatcatttatttgatgcctttacaaaatatagacaagactacaagaaacagaaacaagaagaatttaagcacatagcagtatttccctgcaagataaaaatcctccctcagtacatttttaattctcgagatccgatagtgatgggggtgacggtggaagcaggtcaggtgaaacaggggacacccatgtgtgtcccaagcaaaattttgttgacatcggaatagtaacaagtattgaaataaaccataaacaagtggatgttgcaaaaaaaggacaagaagtttgtgtaaaaatagaacctatccctggtgagtcacccaaaatgtttggaagacattttgaagctacagatattcttgttagtaagatcagccggcagtccattgatgcactcaaagactggttcagagatgaaatgcagaagagtgactggcagcttattgtggagctgaagaaagtatttgaaatcatctaattttttcacatggagcaggaactggagtaaatgcaatactgtgttgtaatatccccaacaaaaatcagacaaaaaatggaacagacgtatttggacactgatggacttaagtatggaaggaagaaaaataggtgtataaaatgttttccatgagaaaccaagaaacttacactggtttgacagtggtcagttacatgtccccacagttccaatgtgcctgttcactcacctctcccttccccaacccttctctacttggctgctgttttaaagtttgcccttccccaaatttggatttttattacagatctaaagctctttcgattttatactgattaaatcagtactgcagtatttgattagcaaaaaaaccacctgcatcacggcaaacagtcccctcgggctcccgtgccgctctgcggccgccgaggcgtgctggaatcaatcctgggcggcgcctcgcgcccccaaaaaagcttcacaaacatttggtgttggcccgggcccccccaggagagagcccaaccgcgaccccagccgcgttcgctaagcaagccccccggacacggcacgctggctnnnnnnnnnnnnnnnnnnnnnnnnnnnnnnnnnnnnnnnnnnnnnnnnnnnnnnnnnnnnnnnnnnnnnnnagcgccctctcgttggcgtccccttcccgcgcgccccctcttcaccgaggaatggcgcccaccggtgcccccttcgcatttctctaacctcctcgcccctcctctgtcctcctcgtctccgctccccagcaccgaggcgataggagtgggtcgtcgcggtcttcccgcgttcccatcccctctcttttctcgcgcccacgtacggaagcggcgcgaacggctgcttcgtcgaccgccgcacgcgcgcgccggtcttggctcgcggtaagaatctgtctatacgagatcggccgtcgcgtccggcgngcgcgctcnctccctcgtcaccgccacgcaccgcacttgcctaccagacgctgcacccccgctgcgtccgctcccncgcctcacgcacgncactgctacattctgcgctgcttatgacgcccgcgcgtcctggcgcgtcacggcgacgaggcngactngtcttccgcagtgagacctggcgcctcccccgcatatatcgtctacgtctacttgctttaatatcaacatggccgccacggcatgccgcacgacagcgtgtataactatcgcacgcgctcgaccctgtcagcgcggcccgtccgtgctatcgcagcccaacgacgtacaccccacctacgcgcatgacttctcaccatgatcgacacgtctcgcgctccgctgcgtntccntctccacgagcacacgataccgtatcgtgccgtaggccggtactgcgccggcatgctntgagaggacancgcacgccatcggcggttggattccaggcntatntgccggacgcagtgaccacggcagangtaggaatgcgggtcgcaccggcttaggcagcagcacggcgccatgccccggtacctcccggccgacactgcatccctaccgccgctcctngacgtctngctaaggtccagtccatccacgggngttggatgcagggcaacgtgagtcaacgagggccncccacagtaccacgtacttcacagacctncgtcatgactggaacctctgacaacttt

SEQ ID NO: 259654 - DNA, 908 bp, Homo Sapiens
ttcaccagctgcaggtattgaatcatttctacgaacacacagaatactagcttacactaaaacctatcttgaggaaacattaaaccagtggctctattattctgcaagttaatttggcttctgaagaaaaaagtttacgatcaaagtgttttgtgtttctgtatatgggaatgatgagaccccatactttcaacattattactttgggggaataaataccagctacctgccataaacgcatgacatgtgtgtagtctatgcaaacgtgtaaacatatgaagctattctctactctatgcccatttcctccactggcaaatatggagcagtgatttcacagtaggctctagcaggtagtgaaataaaaatttgagactctgtggggtcacaaaaaaatgaaactctttctatagtctgcaaatctgtaattacccatccccctgctccaactcctaagaggctaaatattattaccataatgttagagataagtattttccttcttacactgcatcacatatattactctgtaggactgtttcataaaattggcttgacctttgtacaattagtacaatttagtgtcttttagagtacaatttagtgtcttttaaaagcttcctaaatatttaaaacattttcaagggaaacttacaaggactatgtcccatctgtattctacattataatgttatctttaattttttaagacttaaaacaagaccaaggtaaacaaaaaatctgtattttcctcaagtctcttggccacttactaacaatacttttacagaaaacacggtgcagctggtggtctactttatcaagtttcattttagaaaacatcatagaaattaaggttagcaacccaactccaggataccaagtgaaaacagcaagtctgctgttcc

SEQ ID NO: 259655 - DNA, 878 bp, Homo Sapiens
  misc_feature (536)..(536): n is a, c, g, or t
  misc_feature (683)..(683): n is a, c, g, or t
tccaccagtcctgggaagtggagtcagttcttcaaccccatctgctgcttcctcctcttcaacatcatggactggctgggacggagcctgacctcttacttcctgtggccagacgaggacagccggctgctgcccctgctggtctgcctgcggttcctgttcgtgcccctcttcatgctgtgccacgtgccccagaggtcccggctgcccatcctcttcccacaggatgcctacttcatcaccttcatgctgctctttgccgtttctaatggctacctggtgtccctcaccatgtgcctggcgcccaggcaggtgctgccacacgagagggaggtggccggcgccctcatgaccttcttcctggccctgggactttcctgtggagcctccctctccttcctcttcaaggcgctgctctgaagtggcccctccaggctctttggcagcctcttctcgacgtctccttccggagctgagatccagcccagggcgaatggcgagcttggctcagcctctgccggggtggaggcccctgngcctgaggctgccagcagcgggcaggagctgctcttcatccacttggagtgctgcgggggaagaaatcaccaccggtcattctaaccctcacccagggaatgggggtgactcgcacaagaacctcatggaaaaaggtggatgactangggaaaaagagggtgcaagggcacgggctggctccccaccaaccagggcctggcattttggttcatccatccatccggaaccaaaagggggaacccaaaggggttcccaaaaagggggaaaggcgcgggggccccagccccccagggcccaagaaagcgcccctccattctttttccccaaagggcccctctaag

SEQ ID NO: 259656 - DNA, 709 bp, Homo Sapiens
cgttccctccactccgtgcccgtggagaagattagtgcagaaacggttcaatatggcaggtgtgggacatgagcggggaggagtggagaaaccacacacacactgagatccacacagggacccattcagggacaagagtgaggacacagaacggggtggtcagaaatgactcggggctctgaggtagaggactaaaggtcacgtagaccccactccttggagagaacgtggcaggtgaactgagcaatcgaatccagcctcaactaaattggtaattggggttgaccgtgcacaggcccaaaactccaaatggaacacatgttctaacacatcgttcagtgagacaccacgaaaaagatgactgaaagttcaaaagtcctaagtgtaggcacttaagtttatgggaaatttcggtgttagaggatcatagcaaattagtttaagccattcgatttatatatagcacatggtccgtaccgttgttttaaaaacaacgacaacaaaagactgttaggaatacactggataataaatctggcgatgagcaaagggcagttgagagcacattcagcataacaatgttgactgttgcagcaaattatgtttcagtaaagtttacttttcctgctctactcattcagaagtggcaactttctgaatgaatttaagtttttgctactagtacttaagctactgatgaaaacttaca

SEQ ID NO: 259657 - DNA, 1185 bp, Homo Sapiens
gatacacgggtagggcttccgctttacccgtctccctcctggcgcttgtcctcctctcccagtcggcaccacagcggtggctgccgggcgtggtgtcggtgggtcggttggtttttgtctcaccgttggtgtccgtgccgttcagttgcccgccatggctgagctggatccgttcggcgcccctgccggcgcccctggcggtcccgcgctggggaacggagtggccggcgccggcgaagaagacccggctgcggccttcttggcgcagcaagagagcgagattgcgggcatcgagaacgacgaggccttcgccatcctggacggcggcgcccccgggccccagccgcacggcgagccgccggggggtccggatgctgttgatggagtaatgaatggtgaatactaccaggaaagtaatggtccaacagacagttatgcagctatttcacaagtggatcgattgcagtcagagcctgaaagtatccgtaaatggagagaagaacaaatggaacgcttggaagcccttgatgccaattctcggaagcaagaagcagagtggaaagaaaaggcaataaaggagctagaagaatggtatgcaagacaggacgagcagctacagaaaacaaaagcaaacaacagggcagcagaagaagcctttgtaaatgacattgacgagtcgtccccaggcactgagtgggaacgggtggcccggctgtgtgactttaaccccaagtctagcaagcaggccaaagatgtctcccgcatgcgctcagtcctcatctccctcaagcaggccccgctggtgcactgaagagccaccctgtggaaacactacatctgcaatatcttaatcctactcagtgaagctcttcacagtcattggattaattatgttgagttcttttggaccaaacctttttgtctttagagttgttcattgtttgtgattgcatgtttccttccttcaactgtgttctccctggcattcagagaggaaggagaggaggaacaggaacgggagggaagcttccccagagtaacctccaactgcgcttctgggaattattctgaaaataaatttctgcccccgactggctaacaaaaaccgcctccccacctgccgccttttacccagcagttcccgcaacctcgagccccctttttctccttctggggggaaaaaaa

SEQ ID NO: 259658 - DNA, 960 bp, Homo Sapiens
ccccttgttccaagctctaagcctcagcttactccacctccatagcctgcacagtttcctccactagctccagggttagtggcttcactgtctgggtcaggacagctgtggttccaggcacaaagtggtagcggccagacctcttcacgggctctgtgggtgagctcagtgtccgcagcagcttggcgccagtctttgtgatcacacatgcgtccacattgcccccggagcccaggtcacccaagatcccggcggtgacggcttccaccagcagcccctgagcagcctccagcgtcatgttcggctggaaccggtcttctagcaccgccagggccgcgtcctgaccagagcccagggctgtgaagggcagacggctgtaggagccatggggatgcacaccgtagagctgcggtccagtcaggtctacgccgcccacgatcagcgatgcacccacgtggccctggtacctgaagagcgtctggcgcaggatgcgagtgaccgtggccacgcggggctcgcggcccgtagataacgcgtgtagctccatcttggacgccaccatccgtgtggtcatctcggcgtccgcggctactccagccccacagcagtagattttgggggcgatgaagtggatcttctcgcagctcttgtccgccacgaccgaatcgttagtggctcgcgtatcggcgcccagaatgaccccgtcttggaacaccaggcccgcgatggtggtcccggtcttgcgtgcgtgagggaccttgagccccgggaggacgcgttccaatgatgcatttctttggcagttctcgaaggagaagccccctcggggctccagggctggcttcagcatcttggggcaggcagaggggattaggggtcgcgggcggatgagtcggccagacaagcggggccagtgagcagctaaaaagtcctctgctaggcttcacgtctgtacttcct

SEQ ID NO: 259659 - DNA, 819 bp, Homo Sapiens
  misc_feature (766)..(766): n is a, c, g, or t
  misc_feature (771)..(771): n is a, c, g, or t
  misc_feature (779)..(780): n is a, c, g, or t
  misc_feature (800)..(800): n is a, c, g, or t
gggaacctgaatctggaagagaaagtgcgcgagttgagggagactgtgggagacttggaagcgatgaatgagatgaacgatgagctgcaggagaatgcacgtgagacagaactggagctgcgggagcagctggacatggcaggcgcgcgggttcgtgaggcccagaagcgtgtggaggcagcccaggagacggttgcagactaccagcagaccatcaagaagtaccgccagctgaccgcccatctacaggatgtgaatcgggaactgacaaaccagcaggaagcatctgtggagaggcaacagcagccacctccagagacctttgacttcaaaatcaagtttgctgagactaaggcccatgccaaggcaattgagatggaattgaggcagatggaggtggcccaggccaatcgacacatgtccctgctgacagccttcatgcctgacagcttccttcggccaggtggggaccatgactgcgttctggtgctgttgctcatgcctcgtctcatttgcaaggcagagctgatccggaagcaggcccaggagaagtttgaactaagtgagaactgttcagagcggcctgggctgcgaggagctgctggggagcaactcagctttgctgctggactggtgtactcgctgagcctgctgcaggccacgctacaccgctatgagcatgccctctctcatggcaatgtggatgtgtataagaaaagtgggcagcctgtacccctgagatgagtgcccatgagcgctccttggnatttncctcatgnnactgctgcacagggatcagnctgggatgagaactggtca

SEQ ID NO: 259660 - DNA, 986 bp, Homo Sapiens
  misc_feature (269)..(269): n is a, c, g, or t
atctagaatgtaatggatatgggctaaaggctttgatgctctggtgttcttcagtaggaaggattccaggagctgagggtgtcaggagttggggtttaaattcgggtatgaggagggggtggggactcttgagcttccagggtgggtactggggctctgggggtatctgccgccctgggccgggcgagcccttgccccgattatgtttggggacctccgccactctcaggatgtgatggtggtgggggagcccaccctgatgggcgggngagttcggggacgaggacgagaggctcatcacccggctggagaacacccagtttgacgcagccaacggcattgacgacgaggacagctttaacaactcccctgcactgggcgccaacagcccctggaacagcaagcctccgtccagccaagaaagcaaatcggagaaccccacgtcacaggcctcccagtaaaaggccctgctgtggccacccagtgctctgcctacctgccccacccctcacagccccagggagcagaagacagaatgaagagactgagcatctaaaatgggcagcctccatccacccgcttcagggaggaactggactctctgggggcaggtgccaagatttgcccccccagtggccctgggctgggcctggcctctacagagccttttagggggagggggtactcatgtggatgcctacttggaacctgggcctctgagacatgtcctgaccaccccccagggcatttgcctccatcttcaccccagattgtgggtttcccatccccctgactttacccctttcaagcctggggttgtctatacccacagcccttagggacttaaagttacggggcttcgttgaatgctccttcccctaggcagctggtaatagaggggtaaagctctgggcccctcctccctgctgccacttatcccagctccaagtttttttaaaaataatattattaaaaatgtaagttaa

SEQ ID NO: 259661 - DNA, 451 bp, Homo Sapiens
acgggagcgtgctggctcaccgaccgcattgcggcttggttttctcacccagtgcatgtggcaggagcggtgagatcactgcctcacggcgatcctggactgacggtcacgactgcctaccccctaaccctgttctgagctgccccttgcccacacaccccaaacctgtgtgcaggatccgcctccatggagctacagcctcctgaagcctcgatcgccgtcgtgtcgattccgcgccagttgcctggctcacattcggaggctggtgtccagggtctcagcgcgggggacgactcaggcaccatgagccaggacaccgaggtggatatgaaggaggtggagctgaatgagttagagcccgagaagcagccgatgaacgcggcgtctggggcggccatgtccctggcgggagccgagaagaatggtctggtgaagatcaaggtggcggaag

SEQ ID NO: 259662 - DNA, 760 bp, Homo Sapiens
cagatgcagtagccgaaactgcgcggaggcacagaggccggggagagcgttctgggtccgagggtccaggtaggggttgagccaccatctgaccgcaagctgcgtcgtgtcgccggttctgcaggcaccatgagccaggacaccgaggtggatatgaaggaggtggagctgaatgagttagagcccgagaagcagccgatgaacgcggcgtctggggcggccatgtccctggcgggagccgagaagaatggtctggtgaagatcaaggtggcggaagacgaggcggaggcggcagccgcggctaagttcacgggcctgtccaaggaggagctgctgaaggtggcaggcagccccggctgggtacgcacccgctgggcactgctgctgctcttctggctcggctggctcggcatgcttgctggtgccgtggtcataatcgtgcgagcgccgcgttgtcgcgagctaccggcgcagaagtggtggcacacgggcgccctctaccgcatcggcgaaccttcaggcctttccagggccacggcgcgggcaacctgggcggggtcttaaaggggccgtctccatttacccggagcttcttttaaaaggtgaagggcccttgggcttgggccccaatttccccaaaaacccaaaagggattgatttccccttcaaaatgagcttggttggaaaattcaaacccccaattttttggggccccccggggaaagattttttggaacggttctctttggaaaatccgggt

SEQ ID NO: 259663 - DNA, 774 bp, Homo Sapiens
tcactttaaaagtttactcgggccgggacgcagggcaaagcgagccatggctgtctacgtcgggatgctgcgcctggggaggctgtgcgccgggagctcgggggtgctgggggcccgggccgccctctctcggagttggcaggaagccaggttgcagggtgtccgcttcctcagttccagagaggtggatcgcatggtctccacgcccatcggaggcctcagctacgttcaggggtgcaccaaaaagcatcttaacagcaagactgtgggccagtgcctggagaccacagcacagagggtcccagaacgagaggccttggtcgtcctccatgaagacgtcaggttgacctttgcccaactcaaggaggaggtggacaaagctgcttctggcctcctgagcattggcctctgcaaaggtgaccggctgggcatgtggggacctaactcctatgcatgggtgctcatgcagttggccaccgcccaggcgggcatcattctggtgtctgtgaacccagcctaccaggctatggaactggagtatgtcctcaagaaggtgggctgcaaggcccttgtgttccccaagcaattcaagacgccagcaatactacaacgtcctgaagcagatctgtccagaagtgggagaatgcccagccaggggccttgaagagtcagaggctcccagatctgaccacagtcatctcggtggatgcccctttggcgggacctgctcctggatgaagtggtggcgggtggagcacacgggagatctggacc

SEQ ID NO: 259664 - DNA, 457 bp, Homo Sapiens; identical to SEQ ID NO: 7996

SEQ ID NO: 259665 - DNA, 545 bp, Homo Sapiens
taatccatttattgaaaaatatctttgtaagatcacctgctaaatatgaaaatctgacttgaatttgtactctttaaagttgcgtatctgctctagtgggcaggacctagggcttaaaggggaacttcctttctccaattctaagaactggtgactctaaaatgagaagctggttgtctgaagtaaccctgcaggtgtggttggggaaggtctgttttcttggatgaagggattaaactgagcaaatcactagaagtatgccctgtcccctgctcagaacactggggagctcaagagtgggctgcaatgtgcacccctcaggaatagctgtgaattgcaggtctactggctttttgctttttgtcttttgctgcaaggtaccccacgtacttaaccattctcaacagtgtaaatcagtgtcattttagaatgagatactcagcttgcttctaaagtcactgaattactgagtgagtctctcctttagagtcttcggcaaccaaattccagaattgaagagtctactactcagaggcaacaagatt

SEQ ID NO: 259666 - DNA, 581 bp, Homo Sapiens
  misc_feature (468)..(468): n is a, c, g, or t
  misc_feature (490)..(490): n is a, c, g, or t
  misc_feature (511)..(511): n is a, c, g, or t
  misc_feature (532)..(532): n is a, c, g, or t
cacgtttaataacggagattctggtgataagaattgcttgggcaaaccagctcatctggactctttctcagtcttggaagtgggaagaggaaaacttgtttccttcctgcttcttaaggatattctgagggtacactgatcaataacactaaatttggaatgaaaataccatgtgatgagtttagcctgctgatgcttccagtagatccttgtatagtttcaagatttaagttttccgatttcatataaatttcttaaagtcgaggaccttataagggtgcaatggatgtttgctaaatatgaaaaactgacttgaatttgcactctttaatgttgcgtatctgctctagtggggcagggacctaggggcttaaaggggaacttcctttctccaattctagggaactggggactcttaaaatgaggaagctgggttgtctggaaggtaaccctgccaggtgttggttngggggaaggtctgtttttcttnggatggaaggggatttaaacntgaggcaaaatcccctaggangtattgcccccgtcccccctgcttcaggaccactggggggagctccaga

SEQ ID NO: 259667 - DNA, 644 bp, Homo Sapiens
acaagcagaaacctcaagcatgccagcattggtgagcctgaagatgccagtgtctttatgctttggtgagcaaacaatggcaatgcctctggcaacatgagttgataggaacagtgagtgtgaagatcaacgctggataaaaatgcagtttgagtgggatgtgtatggatccatcctagagtgaggagatcatgttgatcctgaacattgaataattcctctacattctccatgtcacaatagtctggtcccgcagactgctttggcacaattacatgggtaatagtaaattcattatgtgtcagttttccacagagtattccacaggtttctattcctctcactgtattagattctgccagttgcagaaatttgtggcaaagatcttctggcaaaactacacatcgcagtccttcaaccactaaattttgctttgcaaatattcttggtattctacgttatatttctttaaaaggtcgtttttcaattcatctgtccttgggaatgcaatctccttcagtttcttcataatatcctgcttttcaggtactgcacattgctggtaatctcgatggttaggaagcttttctacaaataaggttataaatttattataaagaacaaaggcattttccaaatttcct

SEQ ID NO: 259668 - DNA, 2475 bp, Homo Sapiens
  misc_feature (1871)..(2028): n is a, c, g, or t
  misc_feature (2032)..(2035): n is a, c, g, or t
  misc_feature (2037)..(2040): n is a, c, g, or t
  misc_feature (2062)..(2062): n is a, c, g, or t
  misc_feature (2074)..(2075): n is a, c, g, or t
  misc_feature (2111)..(2201): n is a, c, g, or t
  misc_feature (2315)..(2376): n is a, c, g, or t
gctgaacaacggaaaagagctcgggctgagaagaaagcgttaaaaaagaagaaaaagatcagaggcccagagaagcgcggagcagatgaggacgatgagaaagagtggggcgatgatgaagaagagcagccttccaaacgcagaagggtcgagaacagcatccctgcagctggagaaacacaaaatgtagaagtagcagcagggcccgctgggaaatgtgctgccgtagatgtggagcccccttcgaagcagaaggagaaggcagcctccctgaagagggacatgcccaaggtgctgcacgacagcagcaaggacagcatcaccgtctttgtcagcaacctgccctacagcatgcaggagccggacacgaagctcaggccactcttcgaggcctgtggggaggtggtccagatccgacccatcttcagcaaccgtggggatttccgaggttactgctacgtggagtttaaagaagagaaatcagcccttcaggcactggagatggaccggaaaagtgtagaagggaggccaatgtttgtttccccctgtgtggataagagcaaaaaccccgattttaaggtgttcaggtacagcacttccctagagaaacacaagctgttcatctcaggcctgcctttctcctgtactaaagaggaactagaagaaatctgtaaggctcatggcaccgtgaaggacctcaggctggtcaccaaccgggctggcaaaccaaagggcctggcctacgtggagtatgaaaatgaatcccaggcgtcgcaggctgtgatgaagatggacggcatgactatcaaagagaacatcatcaaagtggcaatcagcaaccctcctcagaggaaagttccagagaagccagagaccaggaaggcaccaggtggccccatgcttttgccgcagacatacggagcgagggggaagggaaggacgcagctgtctctactgcctcgtgccctgcagcgcccaagtgctgcagctcctcaggctgagaacggccctgccgcggctcctgcagttgccgccccagcagccaccgaggcacccaagatgtccaatgccgattttgccaagctgtttctgagaaagtgaacgggacgctgggagacaggaaatgccttacttcactctggcccggcggacctcccaccacccagcagtgcactggggatggacaggcctggtgtgctgcgtgctcgcaaccacagatggctcctcggctttagacagaaaggggaaggggttctaagtcaagagcctttcagtgctccctcatattgagggcagtggcagaaaagtgaccactctgcaggctgggcccaggatgtggtgtcctgagatagttttgtatcttaaagactgaggcacagaagcgaaacgagaacacactgtttttgagacacagttgtccaaatgtttctggccagctccggcccctttttgtatgacacttctcttccaccctgcacagcacatgtgcccgtcattcttttaattttaaaagatgaaatggcagatgctagtaattcacagaatggcctcttgtgggggtgggtctgagggaagtcagctataaaacatttgctggagttttgttccaatggggctgtgcatttttatattatgtgtttgtaaatgacatgtcagcccttgtttcatgtttcctaaaagcagaatatttgcaacatttgttttgtataggaattatttgtgccacctgctgtggactgttttctttgcctagtgactagtgacctgtgttgtctaaacatgagtttcagccctttggttttgtttaataccatgtcaaatgcaaacttcaattctccccatttagctttattaaactgacgttctcttcnnnnnnnnnnnnnnnnnnnnnnnnnnnnnnnnnnnnnnnnnnnnnnnnnnnnnnnnnnnnnnnnnnnnnnnnnnnnnnnnnnnnnnnnnnnnnnnnnnnnnnnnnnnnnnnnnnnnnnnnnnnnnnnnnnnnnnnnnnnnnnnnnnnnnnnnnnnnnnggannnnannnngcgccaaaaaaaagaaaggggnaaggacggaggnngcgggcgaacccgcaagccgcgcaagggcaccgggnnnnnnnnnnnnnnnnnnnnnnnnnnnnnnnnnnnnnnnnnnnnnnnnnnnnnnnnnnnnnnnnnnnnnnnnnnnnnnnnnnnnnnnnnnnccaacaaaaccagaccacaccgggccgcgcgggcaagacggccgcggcccaggcccgacacgggcccaagcgacacccccacaaaaacagcgggcgaccgggaccaacgcggcnnnnnnnnnnnnnnnnnnnnnnnnnnnnnnnnnnnnnnnnnnnnnnnnnnnnnnnnnnnnnnacaaaaccggccgcgcggcaaagacaccgagcgccaccacaaagcaccgaaactgccgcgccgacccacccgcgaggcacaaaagcgcggcacacacaa

SEQ ID NO: 259669 - DNA, 822 bp, Homo Sapiens
  misc_feature (502)..(502): n is a, c, g, or t
  misc_feature (604)..(622): n is a, c, g, or t
  misc_feature (715)..(715): n is a, c, g, or t
  misc_feature (779)..(779): n is a, c, g, or t
  misc_feature (800)..(800): n is a, c, g, or t
tagaaagcctgaaagctgtgttagagatcaagaatgagaaactgcatcaacaggacatcaagttaatgaaaatggagaaactggtggacaacaacacagcattggttgacaaattgaagcgtttccagcaggagaatgaagaattgaaagctcggatggacaagcacatggcaatctcaaggcagctttccacggagcaggctgttctgcaagagtcgctggagaaggagtcgaaagtcaacaagcgactctctatggaaaacgaggagcttctgtggaaactgcacaatggggacctgtgtagccccaagagatcccccacatcctccgccatccctttgcagtcaccaaggaattcgggctccttccctagccccagcatttcacccagatgacacctccccaaagtccacagactctctgaaagcattttgatgcaggtctgcaggactgaccccaaggaggaacgtgggcacaagaggtatatcagcacacgtgtgantcaccgtagggtaaactggagcgtcaccaccggcggaaatcgaaacttctgagactggaactctggaggaagacttttgcctccgtccaaaagattcctccnnnnnnnnnnnnnnnnnnngatttcggcatcgacacggacgttgttgcacaaagcacttaaagaacgagagcatcttgttcattgcctttttcacctaaggcataagggganaaactctcagggccctatttaaggttttattaacgttctttcaccacagacaccttctttgttnagtttttcagtctggactgtnggggggttggggggttttgaat

SEQ ID NO: 259670 - DNA, 1214 bp, Homo Sapiens
ctagaaatatttttattgaatgcacgggaactgactttactaaggcaaaaatagttcttgatattattgtcaccatgttcagtgaatattgtgagaatcaatttacggtcgaagctgctgaagtggtttttcctaatggaaaatcacatacctttccagaattagcttaccgaaaggagatggtgagagctgacctaattaacaaaaaagttggaatcagagaaactccagaaaatcttgccaaacttctgaccaggatgtatttaaaatcagaagtcataggtgatgggaatcagattgagattgaaatccctccaaccagagctgacattatccatgcatgtgatattgtagaagatgcagctattgcttatggatataacaacattcagatgactctcccgaaaacttacaccatagctaatcaatttcctcttaataagctcactgaacttctccgacatgacatggcagccgctggcttcactgaagcacttacctttgccctgtgctcccaagaagatattgctgataaactaggtgtggatatctctgcaacaaaggcagtccacataagtaatcctaaaacagctgaatttcaggtggcacgcactacccttcttcctggcctcctgaagaccatagcagcaaatcgtaagatgccccttccactgaaactgtttgaaatctctgacattgtaataaaagattctaatacagatgtaggtgcaaaaaactacagacatctctgtgctgtttattacaacaagaatcctgggtttgagatcattcatgggctgctggacagaattatgcagttgctcgatgtgcctcctggtgaagacaaggggggatatgtgatcaaagcatcagaagggcctgctttcttccccgggcgatgtgcagagatctttgccaggggtcaaagcgtcgggaagcttggggtccttcatcctgacgttatcaccaaatttgagctgaccatgccctgctcctccctagaaatcaatattggaccctttttgtgaagattggtctctgtggtgtgattctcttcccaggtgtccctttctcctcccctagtgtccttaagtcctcctccacagggaacatctatttgggctttgatgtttaataaagtagaaagcactgtctggctgtgtgggtagagaccatcctttccctgcatattaggccagcttgtgccatatacc

SEQ ID NO: 259671 - DNA, 783 bp, Homo Sapiens
gctggtcagaaagccatttaatccataaacacaaagacacatgaatgggcaaattctgtaaatgaaagcaatctggcaaaagcccttggtggtgagcttggtctccctcacaggcaatgacagtcttggccatgggtctagacaacacacaattccaatgcagcctaggaggacattatggaagtgagctgggagaaccaatgatgcagaaagtagactcaggagaggcacagagaatgcaccccctgccccaagtgcagtggatcagagagctcagaacagagaagagatgaggagctcatggcctctcgtagcctagcctagagcacacttactgctcactatcttattgtccatcattttaagtcaaacatccccagttcagtgagagtgtacattctccaatattacacacataaggaaagatgggtaacccctaaagcctgaatgagaaaaagcttccaggagctgtttttcagatacaccaacatatatttgccaagggcaggcactgtgtttctccaggcaggcggtaaggcctttgacagggtttccaggaagacacatagcagccagagagttgtgcagccccaaccctggctccacacagagcaaacatgtaacagattaaatatttatctattgtcctgtctacctcaataaaatatcacactcctttaagcggttgccttaatgacatttgtgtgtcttggaatgacagcctgtgctaacaaattgcatctcaagatgtgaaaacatgaagatcaataaaaagaaatgccg

SEQ ID NO: 259672 - DNA, 1615 bp, Homo Sapiens
  misc_feature (1187)..(1297): n is a, c, g, or t
  misc_feature (1422)..(1431): n is a, c, g, or t
atttcggcacaggcgagatgtccttagggtacaagaacaggaattgaagtctgaatttgagcagaacctgtctgagaaactctctgaacaagaattacaatttcgtcgtctcagtcaagagcaagttgacaactttactctggatataaatactgcctatgccagactcagaggaatcgaacaggctgttcagagccatgcagttgctgaagaggaagccagaaaagcccaccaactctggctttcagtggaggcattaaagtacagcatgaagacctcatctgcagaaacacctactatcccgctgggtagtgcagttgaggccatcaaagccaactgttctgataatgaattcacccaagctttaaccgcagctatccctccagagtccctgacccgtggggtgtacagtgaagagacccttagagcccgtttctatgctgttcaaaaactggcccgaagggtagcaatgattgatgaaaccagaaatagcttgtaccagtacttcctctcctacctacagtccctgctcctattcccacctcagcaactgaagccgcccccagagctctgccctgaggatataaacacatttaaattactgtcatatgcttcctattgcattgagcatggtgatctgggagctagcagcaaagtttgtcaatcagctgaaggggggaatccagacgagtggcacaggactggctgaaggaagcccgaatgaccctagaaacgaaacagatagtggaaatcctgacagcatatgccagcgccgtaggaataggaaccactcaggtgcagccagagtgaggtttaggaagattttcataaagtcatatttcatgtcaaaggaaatcagcagtgatagatgaagggttcgcagcgagagtcccggacttgtctagaaatgagcaggtttacaagtactgttctaaatgttaacacctgttgcatttatattctttccatttgctatcatgtcagtgaacgccaggagtgctttctttgcaacttgtgtaacattttctgttttttcaggttttactgatgaggcttgtgaggccaatcaaaataatgtttgtgatctctactactgttgattttgccctcggagcaaactgaataaagcaacaagatgaaaactggagagagggggggcggcgcgagcgctcaggtccgggagcccnnnnnnnnnnnnnnnnnnnnnnnnnnnnnnnnnnnnnnnnnnnnnnnnnnnnnnnnnnnnnnnnnnnnnnnnnnnnnnnnnnnnnnnnnnnnnnnnnnnnnnnnnnnnnnnccgctgcgcggcgccggaaaacttctccccgcgccttcgtgggcggccggcggggccgcccggaggcggaggcgccgccggcgaccacgccggcgcacccaaacaagacccacgggggcgcggannnnnnnnnntggcggtcgcccggcacaaaaaaacacgccccggggggggcgagcaccaccgggagtgcgggaagagacgagcgccagagggcggcggccgcgcccggcggatctcttctggggggtccgtccggcggcgggcctgctggcgggcagcgggtgtcgcatgcggtgactggcgcgcgcgcgcgga

SEQ ID NO: 259673 - DNA, 412 bp, Homo Sapiens
  misc_feature (21)..(21): n is a, c, g, or t
  misc_feature (27)..(27): n is a, c, g, or t
  misc_feature (41)..(41): n is a, c, g, or t
  misc_feature (48)..(48): n is a, c, g, or t
  misc_feature (65)..(65): n is a, c, g, or t
  misc_feature (137)..(137): n is a, c, g, or t
ccatatgccccagcgcccgtnggaatngggaacccccctcnggtgccngcccagagtgaggtttnggaagattttcccataaagtccatatttccatgtccaaaggaaatccagccagtgatagatgaagggttccnccagcgagagtccccggaccttgtcctagaaatgagccaggtttaccaagtactgttcctaaatgttaacaccctgttgccatttatattctttccatttgcctatcatgtcagtgaacgcccaggagtgctttctttgcaacttgtgtaacattttctgttttttcaggttttactgatgaggcttgtgaggccaatcaaaataatgtttgtgatctctactactgttgattttgccctcggagcaaactgaataaagcaacaagatgataatt

SEQ ID NO: 259674 - DNA, 935 bp, Homo Sapiens
aaatagcacaaatatagtataaaactaaacaccgttactgtctatcagtttgggcttatgtgaaataaagggaactgtgactctgaaacaattttacttttaactttgagaatagattggccataaacacagaagatggttttggctttacattgacacatttctgtgtgtcaatgtagaagagaaaagaagtttaattataccttttaagcaggcaaaccattataataaactgctttagaaattactttaaaattatacacatttggaacaacagattttttaaaaaatgaagtttggtgttatgtcagcattttaactatttttgctatagcgaggcctcctcatatattatcataatttatcatagtttaaatagtgaatcatattctgatattctgattaataatcatattaattttgacaatgattttagtttttgaagttttagactgcaatacttaaaaaggccataatctactttaattaccttcatcatagattattaactataaataaaatgtttatatgatatttggattaggtacatggtacaatatctgtttttacctggaagcatgaaaatgtcttaaaaggtaaataaaaaagcaaaagtagtgtttttaaaatatatatgagagcatgaataatgtgttttcacatttgttccatctaatttttatttggagaaaataatttcagtatgaaattattctaataaaattattctaacatacaattaggagataattattttattcatcacaaaatttactacttttacacttagagaccagtgaacgtatgtaccattaccttttgaaaaacagaatgtctcctcatattgttttccggacgcgtggtcgacgatatcccgggattccggaccggtacagcctgcttaataaaacacccaaggggttttcatatattac

SEQ ID NO: 259675 - DNA, 2169 bp, Homo Sapiens
  misc_feature (759)..(759): n is a, c, g, or t
  misc_feature (1491)..(1506): n is a, c, g, or t
  misc_feature (1987)..(1987): n is a, c, g, or t
  misc_feature (2032)..(2032): n is a, c, g, or t
  misc_feature (2109)..(2109): n is a, c, g, or t
ctttgttaagcagcgagggcgcgaccgcgggtactctgctgccggcttctcggagcggcgctgggcgaccagagcagggtcgagatgtcctacatcccgggccagccggtcaccgccgtggtgcaaagagttgaaattcacaagctgcgtcaaggtgagaacttaatcctgggtttcagcattggaggtggaatcgaccaggacccttcccagaatcccttctctgaagacaagacggacaagggtatttatgtcacacgggtgtctgaaggaggccctgctgaaatcgctgggctgcagattggagacaagatcatgcaggtgaacggctgggacatgaccatggtcacacacgaccaggcccgcaagcggctcaccaagcgctcggaggaggtggtgcgtctgctggtgacgcggcagtcgctgcagaaggccgtgcagcagtccatgctgtcctagcagccaccaccatctgcgactcctgcctgccgcctctctgtacagtaacgccacttccacactctgtccccatctggcttctgctgaccgctgggccccagctcagaagggctatagctggtcccagaggcctggcctggccttccttcccttctcccatccctggcctggggcctctgggaccagctttctctcctggacaccgaggattggaaataagggcctggagctgagtagtagccagtctgctgtgaccacaggctcaggtccgaccctgctgcttggccacagcagtggtgnggcaagtgggaaccactatctcttgggagcccccaaaagctgggaaatgctggaggaaccaggcctttcccgcttttgcctggctgcagggttcggctccgccctgccccccagccctcgtgtgtccacaccgcagtgcctctgcccctcgggggactggacacacatcctgccagaggcgctacgaagctttgcccagatgaagccaggtgggctccgcgttcactcccactctcccgaggggtgctggcctccccagggtttgccttcttacggatttagacgaggttcgagggctcacctatcagggcagctctcaggattgtcattttcctctttgcctgtgggtttaacttttgtatttttttaatcacaagtttgatacaaaatgtttttatcgtactctttggagatgcccattctacttttgaatttagcttttactaattcgcatctggaagctcagcaagtgcacaagccttactttggttaccgtggaaaccactgccgcccctccccgatgtggtgcgctcaataaaaatgctggaattcacaacaaaccacacacacgcgcaaaaccctagcggaacgcgcggcgcctcgagtcctacgggcgtcctcagtgtgttcctgcaagcttcccatcctatcgcggccctacagaccgcggcactttacgggtcgatcgtcccccacgttccctacgccatccgcctatgttgttttgtgcgnnnnnnnnnnnnnnnntcaaaaagaaattttcttccagacacactcttgttttggtgggcgccgcgcgcggcgccctcggaggggggtatgggccagtatttgtgggcccgctaaccaccttcgcgcaccctctatagggaagattcccctccgcggagtccaccgatactatctgcggtggcccgcgggtgggattcttcccccgccccaacttagatataaagaagacgcgcctggcgcgcgcggggtgagcccacacctgcagagcggccgctgtttgggagagaatcgactactcccgctcacaggtgggcgaatgtatcttcgttagaggggagcgcacccccatcgcggcgaggcgtctctgttttttatcaccggcgcgggtcggcctccgcgcacgcgcgaggtcttctgcatgtcaactgcgcaccgcggcttatccccccgccgcgccgccgcgatctgcgaaaccatacacgcaccgaggaaaaangcgcggtctggttaataagcatacctccttatcaactacaccgcntatgttgcgtcccgctcgacgacgtggtggtacaccccgcaccgcgtcaacatacgcgcgacagcgtcgcgctatangcgcaccgcgcggatcacgtttccgcgcgcccggcggctcgttgtgtgacacccatttgt

SEQ ID NO: 259676 - DNA, 1058 bp, Homo Sapiens
  misc_feature (223)..(241): n is a, c, g, or t
ttgtaggacagagaccacactgggtcggcggacacaaagtccatccaggacccaggccgcagagggagcaggaagagatgctgatagtttgatctagaaaccagcagctactggctcaaattcaggttctggcgtcaaatagcgacatttccagtttctcttaaaaaccgtgtttggtttcagttgggataggcttgttttgtctgttgaaaatgtttctagnnnnnnnnnnnnnnnnnnnctctcattccatttctgccttaactttagtttgttcacagggaggcaaagctgacatgaaccttttgtcgtgggacttcaggccacattggcttgaaggcattcgtttccttctggggtggggacaggccctcatggcaggcttgttcccgtggctctgagcgaggcctcttcctgctgggctcccagactcctgcatccaggcccccaccttctcggcttctggtttttctttctttttggtagaacacaacatctaccattcagttaaaccttctttatctcctcctctggcatccatttttccaaagaagagtcgagtcctctgaggtctgtgcttgaaaaccgtccgaaggcattcttgttagctttgcttttctccccatatcccaaggcgaagcgctgagattcttccatctaaaaaaccctcgacccgaaaccctcaccagataaactacagtttgtttaggaggccctgaccttcatggtgtctttgaagcccaaccactcggtttccttcggattttcctccctttgttcggggtttggtttggctcctctgtgtgtgtccgtatcttgttcggtgtcctcgaggttgagcttcactccactgcggcagaggcagcgtgcacactcggatttgctacgtttctatatatcttgaagctaaatgtatatatgagtagtttgccatgagataacacagtgtaaacagtagacacccagaaatcgtgacttctgtgttctctccatttgagtattttgtaatttttttgaaatatttgtggacataaataaaaccaagctacactacaaaa

SEQ ID NO: 259677 - DNA, 1023 bp, Homo Sapiens
gcggtgctccgaccggaatcggaagtggctgcgtcgtcgacgctgggctttcgggtcccgcgcccagagatgggctccaaggcaaagaagcgcgtgctgctgcccacccgcccagcgccccccacggtggagcagatcctggaggatgtgcggggtgcgccggcagaggatccagtgttcaccatcctggccccggaagaccccccagttcccttcaggatgatggaggatgcggaggccccgggagagcagctctaccagcaaagccgggcctacgtggctgccaaccagcggctgcagcaggcgggcaacgtgctgaggcagaggtgtgagctcctgcagcgagccggcgaggacctggagcgggaggtggcccagatgaagcaggcagcattaccggcagccgaggctgactcctcaggctgacctctcggggcctgcaggcttgggcagcgcacaaggtggcctgcacccaggctttccctgggggtccgtcggcccagactgggcattcacggggtcccagcccacgttgggtgttgacacaggcgccctcctgatgctggggctgcggttcatccgtcgtctcatttcatgccgagttggtgggacccacccagctggctccgtcctgcgtgacctgagggccccactggggcttctggaaagacgatacggacattattgctgtactgtgattctgtcgtcagctcacagtggcgtgctcgagtggggcccctggtagcagtgccacttccttcttctcccggggcggactcgccgttccacttagagctccgggtggaaccacggtaacggtaatacacaagagtgcccccaagtgtaagacagccaggcaattaacctgtacccattatttgcgcccgccacccgacacgatattcagaacctgcgcgtctacacgaactacacactgcacccaagtcacagcctgaagtatcccccaggcgacacacaccccttgcggagcacgcatcctttactactaaatacgcccctgcg

SEQ ID NO: 259678 - DNA, 845 bp, Homo Sapiens
ttaagactagggggttgcatcgaccccccggtgtggcaccctggacgccactggagaccgaggaatcataacaggggccctgatccttaggagtgtttcctcgcttaagggaaattaggtcccatgatgatgatggcttccagtatgcctgtccagtggtctcacatccccatttgccacagtagccctctcccggccctccacaccctattggtacagtatgaccggggcaaacatagaagtcatacagtcttgtcctttttcttccccccggagagcggcaaccatctccaatatcgggttctgggtcatcccaatggtctccaactaaatcacacaagtcaaaatatagtttagggaaggtgtctgtcatcgtccccaggagggaggtagcgttagctgtttgtcctgtcattaggttggtaactctccaagtgacattgaagacctggtgagggctgtcacgttgtaccgaggctcctgccctcaccaagatccctataactattagggggccccacgggttaatcttatctttaaggggttttgagaacgctggaccttccatgctgctccggccggaggagttgtcgccgcctttacgtgagcggcgtgtatccacgcagagatgccgtcaactttgagagcggtgggggtggtcagcaggacggtgtagggtcctttccagcgaggttccaagttcttagtctggtgccggcgtacccacacggcgtcaccgacacggaaggggtgtggtatcactggctgatctagctggtcctgataagcagcggccagcggcttccagacctctcgttgtactgcttggagggcctgtaagtgag

SEQ ID NO: 259679 - DNA, 661 bp, Homo Sapiens
ggtatcgggacccccctactacgaaggggttgccgtcctaggtacctactccaaccatacctctgccccagctaactgctccgtggcctcccaacacaagctgaccctgtccgaagtgaccgggcagggactctgcgtaggagcagttcccaaaacccatcaggccctgtgtaataccacccagaaggcgagcgatgggtcctactatctggctgctcccgccgggaccatctgggcttgcaacaccgggctcactccctgcctatctaccactgtactcaacctcaccaccgattactgtgtcctggttgagctctggccaaaggtgacctaccactcccctggttatgtttatgaccagtttgagagaaaaaccaaatataaaagagagccggtgtcattaactctggccctgctgttgggaggacttactatgggcggcatagctgcaggagtaggaacagggactacagccctagtggccaccaaacaattcgagcagctccaggcagccatacatacagaccttggggccttagaaaaatcagtcagtgccctagaaaagtctctgacctcgttgtctgaggtggtcctacagaaccggagaggattagatctgctgttcctaaaagaaggaggattatgtgctgccctaaaagaa

SEQ ID NO: 259680 - DNA, 949 bp, Homo Sapiens
  misc_feature (738)..(738): n is a, c, g, or t
acacccaagcgtgggtttctaaggcgcggaattttccgtacagaccgatttaaggctgcaaggaaggagtcctgggagcatggctttccctgagccaaagccgcggcctccagagctgccgcagaaacggttgaagacgctggactgcgggcagggggcagtgcgagccgtacgatttaatgtggatggcaattactgcctgacgtgcggcagtgacaagacgctgaagctgtggaacccgcttcgggggacgctgctgcggacgtacagcggccacggctacgaggtgctggatgcggccggctcctttgacaacagtagtctctgctccggcggcggggacaaggcggtggttctgtgggatgtggcatcagggcaggtcgtgcgcaaattccggggccacgcagggaaggtgaacacggtgcagtttaatgaagaggccacagttatcctgtccggctctattgattccagtatccgctgttgggattgccgctcacggaggcctgagccagtgcagacgctggatgaggccagagatggcgtgtccagtgtgaaggtgtcagaccacgagatcctggcaggctccgtggatggccgcgtgagacgctatgacctaaggatggggcagctcttctcagactacgtgggcagccccatcacctgcacctgcttcagccggggatgggcagtgcaccctggtggccagccctggactccacattgcgggctcctggnacaaagacacaggggaagctgctgggcgagtacaagggccataagaaccaggaatacaagctggactgctgcctgaacgagcgtgacacacatgtggtccgctgttctgaggacgggaaagtgtttcttctggggacctggtggaagggtgcgctgggctctggccctgccctgtgggtttccggggtgggtgcaaccgcttggccctaca

SEQ ID NO: 259681 - DNA, 922 bp, Homo Sapiens
  misc_feature (855)..(855): n is a, c, g, or t
gaggctggaccggtccggattcccgggatgcaaatttgattttgatttatggaaatgaatttgacaaaagattctttgtgcctgctgaaaaaatcgtgattaactttatcaccctcaatatctcggatgattctaaaatttctcatcaggatatgagtttactgggaaaaagcagtgatgtatccagccttaatgatcctcagcccagcgggaacctgaggccccctcaggaggaagaggaggtgaaacatttagggtatgcttcgcatttgatggaaattttttgtgactctgaagaaaacacggaaggtacttctttcacccagcaagagtccctcagcagaacaatacccccggataaaacagtcattgaatatgaatatgatgtcagaaccactgacatttgtgcggggcctgaagagcaggagctcagtttgcaggaggaggtgtccacacaaggaacattattggagtcgcaggcagcgttggcagtcttgggcccgcaaacgttacagtactcatacacccctcagctccaagacttagaccccctggcgcaggagcacacagactcggaggaggggccggaggaagagccatcgacgaccctggtcgactgggatccccaaactggcaggctgtgaattccttcgctgtccagcttcgaccaggattcagagggctgcgagccttctggagggggatgggctcgggagaggagggtcttctatctagactctatgaggagccggctccagacaggccaccaggagaaaatgaaacctatctcatgcaattcatgaaaggaatggggggttatatgtgcagatggaaaactgatgccaacacttcctntttgcccttttgtttcctggtgcaaacaagtgaagtcaccccctttgatcccagccataaagtacct

SEQ ID NO: 259682 - DNA, 2118 bp, Homo Sapiens
ggcgaattcgcacgagggccagctccgcgtcccgaccggcccgcggcagcctgcgccgcgccatggccacctccccgcagaagtcgccttctgtccccaagtctcccactcccaagtcgcccccgtcccgcaagaaagatgattccttcttggggaaactcggagggaccctggcccggaggaagaaagccaaggaggtgtccgagctgcaggaggagggaatgaacgccatcaacctgcccctcagcccaattccctttgagctggaccccgaggacacgatgctggaggagaatgaggtgcgaacaatggtggatccaaactcacgcagtgaccccaagcttcaagaactgatgaaggtattaattgactggattaatgatgtgttggttggagaaagaatcattgtgaaagacctagctgaagatttgtatgatggacaagtcctgcagaagcttttcgagaaactggagagtgagaagctaaatgtggctgaggtcacccagtcagagattgctcagaagcaaaaactgcagactgtcctggagaagatcaatgaaaccctgaaacttcctcccaggagcatcaagtggaatgtggattctgttcatgccaagagcctggtggccatcttacacctgctcgttgctctgtctcagtatttccgcgcaccaattcgactcccagaccatgtttccatccaagtggttgtggtccagaaacgagaaggaatcctccagtctcggcaaatccaagaggaaataactggtaacacagaggctctttccgggaggcatgaacgtgatgcctttgacaccttgttcgaccatgccccagacaagctgaatgtggtgaaaaagacactcatcactttcgtgaacaagcacctgaataaactgaacctggaggtcacagaactggaaacccagtttgcagatggggtgtacctggtgctgctcatggggctcctggagggctactttgtgcccctgcacagcttcttcctgaccccggacagctttgaacagaaggtcttgaatgtctcctttgcctttgagctcatgcaagatggagggttggaaaagccaaaaccgcggccagaagacatagtcaactgtgacctgaaatctacactacgagtgttgtacaacctcttcaccaagtaccgtaacgtggagtgaggggctgccctgggcccaccactgcccaagagttcttgctgttggcgtactggaccctcctccgaactgccttaccctgcttattcctgtctcttgcactgtgctctcccacaagtccagctgcaacccagagatagtggaaactgaaattaggaaggaaatcatcaataactcagtgggctgacccatccctcccaggcgctggggaccaacctagcaatgaaggttgggaaggttgttcccttcccggtgccaggtccagatttccctccatgatttgggaaccagcttaggcaaaagagtccccacaagatgaaaataaagatcctagttaccattcaaaggatgctaactgtgtgtcaggccccacactaagtgctctgctctgatatactcaaggccattaatcttcaggactcccattgacgtaggtgtttcattccccttttacagatgaggaaactaaggcttggaggttaaatgacttgccagaagttggaatttttttcctctttgaacataacctctcccttctccctaaaggtaaccactattctgagtccaatcatcaaggtttgcttttctttttagctaagtatgcattcctcaatagtagacagtacaacatgtttataccaagccaattccataatgttcttgcatgttctacagttgtgtatgtgtgtgccaattgaacccgtgccatgttaacatgagcaagaacaggagaaccatggatttacacggggcagctagttaaagctaaggaattcatggacatgggaattggcttacccataatgggtgttgggggcgcccaacttgccatgaaaatctaagctacatataacgccggcggcaccgacgaagcgaaagggccgcgggacgtgcgcgcttcaaacactcacatgtccagggtatttcggaaccagtaatg

SEQ ID NO: 259683 - DNA, 774 bp, Homo Sapiens
tcacgggaacccctccggagtggacaatgctgtcagcacctggggaggagccctccgataccatcaagggaagatttcatccttaaagaggtcgccagctctccagatcctgctgaccaacaccaaagtccctcgcaataccagggcccttgtggctggcgtcagaaacaggctgctcaagttcccagagatcgtggcccccctcctgacctcaatagatgccatctccctggagtgtgagcgcgtgctgggagagatgggggaagccccagccccggagcagtacctcgtgctggaagagctcattgacatgaaccagcaccatctgaatgccctcggcgtgggccacgcctctctggaccagctctgccaggtgaccagggcccgcggacttcacagcaagctgactggcgcaggcggtggtggctgtggcatcacactcctcaagccagggctggagcagccagaagtggaggccacgaagcaggccctgaccagctgtggctttgactgcttggaaaccagcatcggtgcccccggcgtctccatccactcagccacctccctggacagccgagtccagcaagccctggatggcctctgagaggagcccacgacactgcagccccacccagatgcccctttctggattattctgggggctgcagttcgactctgtgctggccagcgagcgcccagctcctgacactgctggagaggccccagccgcttggcgatgccagccaagctctgcagtcccagcggtgggaccta

SEQ ID NO: 259684 - DNA, 444 bp, Homo Sapiens
  misc_feature (311)..(311): n is a, c, g, or t
  misc_feature (356)..(356): n is a, c, g, or t
  misc_feature (389)..(389): n is a, c, g, or t
  misc_feature (412)..(412): n is a, c, g, or t
acacgggaacccctccggagtggacaatgctgtcagcacctggggaggagccctccgataccatcaagggaagatttcatccttaaagaggtcgccagctctccagatcctgctgaccaacaccaaagtccctcgcaataccagggcccttgtggtgggcgtcagaaacaggctgctcaagttcccagagatcgtggcccccctcctgacctcaatagatgccatctccctgggagtgtgagcgcgtgctggggagagatgggggaagccccagccccggagcagttacctcgttgctgggaaggagctcnatttgacattgaaccaggcaccatcttgaattgcccttggggttnggggccacgtttctttttgggaaccagttttgnccagggtgaaccagggggccccncggatttttaacaggcaagttgatttgggcgc

SEQ ID NO: 259685 - DNA, 1131 bp, Homo Sapiens
caacttctccagccggccggggcgagcgccagcgcggcgtccggggcgagtgacacgcagagctgaagccatggttcatcaggtgctctaccgggcgctggtctccaccaagtggctggcggagtccatcaggactggcaagctggggcccggcctgcgggtgctggacgcgtcctggtactcaccaggcacccgagaggcccgcaaggagtacctcgagcgccacgtacccggcgcctctttctttgacatagaagagtgccgggacacggcgtcgccctacgagatgatgctgcccagcgaggctggcttcgccgagtatgtgggccgcctgggcatcagcaaccacacgcacgtggtggtgtatgatggtgaacacctgggcagcttctatgctccccgggtctggtggatgttccgtgtgtttggccaccgcaccgtatcagtgctcaatggtggcttccggaactggctgaaggagggccacccggtgacatccgagccctcacgcccagaaccggccgtcttcaaagccacactggaccgctccctgctcaagaccttacgagcaggtgctggagaaccttgaatctaagaggttccagctggtggattcaaggtctcaagggcggttcctgggcaccgagccggagccggatgcagtaggactggactcgggccatatccgtggtgccgtcaacatgcctttcatggacttcctgactgaggatggcttcgagaagggcccagaagagctccgtgctctgttccagaccaagaaggtggatctctcgcagcctctcattgccacgtgccgcaagggagtcaccgcctgccatgtggccttggctgcctacctctgcggcaagcctgatgtggccgtgtacgatggctcctggtccgagtggtttcgccgggcccccccagagagccgtgtgtcccagggaaagtctgagaaggcctgagccgtgacctcttctgcttactgtaactgcggccggtttagtgaccccatgacttacagccggttcttacctcttaggtgaaggagatgacatgtttttagaattgctgtgcaaggctcaccctctctctgtcaacactggaataaactttgccttttctaaaaaa

SEQ ID NO: 259686 - DNA, 701 bp, Homo Sapiens
tcacctcctctcggctgttcttcgctggagcccgagagggccaccttcccagtgtgttggccatgatccacgtgaagcgctgcaccccaatcccagccctgctcttcacatgcatctccaccctgctgatgctggtcaccagcgacatgtacacactcatcaactacgtgggcttcatcaactacctcttctatggggtcacggttgctggacagatagtccttcgctggaagaagcctgatatcccccgccccatcaagatcaacctgctgttccccatcatctacttgctgttctgggccttcctgctggtcttcagcctgtggtcagagccggtggtgtgtggcattggcctggccatcatgctgacaggagtgcctgtctatttcctgggtgtttactggcaacacaagcccaagtgtttcagtgacttcattgagctgctaaccctggtgagccagaagatgtgtgtggtcgtgtaccccgaggtggagcggggctcagggacagaggaggctaatgaggacatggaggagcagcagcagcccatgtaccaacccactcccacgaaggacaaggacgtgggcggggcagccccagccctgaggaccaccattccctggctactctctccttcctcccccttttatcctacctccctgccttggtcccgccaacacatgcgagtacacacacacccc

SEQ ID NO: 259687 - DNA, 968 bp, Homo Sapiens
catggacaatgaataaatgcacacttctgactataattttgagcagtgaaggaaggatgactgcctgttacacagaaacaggaataccatgttaagatagaggaaaaaaattttgtttatttgggggaacactgtaaataacgtttataatacttaaatacatttggttgttactagagagttctaatatgaagggtagtttttcattatttaaaaacacatggaaaaatatgagacatatttctaacatacgaactatagtgcctggatacattcttcagcatttggcagttaatctgctgaaaccaaagtaagaactgaatgacagtgacagttgtgttttatagtaatagaatgtgagagttagaatctttggacaaagttaggctttgtcatttgcctattcagacttttaccaagttgtacctcgagatcacatgtccgttttctttcactggttatattaaagggagagctattatttctaaatactttacacctttgacaaaatgagctgcttgtgttgaaatcagttgaattcactaaattataatattgccagtgttttcaacacgttagaattgataacaggtatttttcttttgttaccaggccttgttcatcaaaacaggtgacagtgagtaaccaaatgcagaccagttctatgcaggataatgataaattcccttctagctctattgtaaattgttgtacagatgtcatatttcaattactaagtttcagcagcttattcttgtacaaatgtttaaaatatggcttttctaattggatattgtattttttttaagtcttcttgaaggcactctaattgctgctaaatgatgttgcttctttgctaaaaaattaaatgacctagaaggtgcaagttgactgtacatcatagatattaaaaagcagacagtcattaacaatcaagatgtaaaagtgatccatgttggacataattg

SEQ ID NO: 259688 - DNA, 818 bp, Homo Sapiens
  misc_feature (738)..(738): n is a, c, g, or t
  misc_feature (795)..(795): n is a, c, g, or t
ctcctgacccctctgccaccctcccatccgtccgcgggtccgtggagctggagcagatcccccagccggctgagacaggttgtcttttggaaatgcaggtttaaggacaaattatctgcttaagctagaagatgggatcgaatagcagcagaatcggcgatcttcctaaaaatgagtacttgaaaaagttatcaggcacggaatctatctctgagaatgacccgttctggaatcagcttctctcattttctttccctgcaccaactagcagtagtgagttgaaactcttggaggaagcaaccatttcagtctgcaggtcattagttgaaaacaatcctcgaacaggaaatcttggtgcactaattaaggtcttcctttctagaaccaaagaactaaaactttcagcagaatgtcagaaccacatcttcatttggcagacacacaatgctttgtttattatttgctgtttgctgaaagtgttcatctgtcagatgtcagaggaggaattacaacttcattttacttatgaagaaaaatctcctgggcaattacagttctgactcagaagatcttttggaagaattgctgtgctgtttgatgcagttgatcactgatattccactcttagatattacatatgaaatatcagtagaagctatatcaacaatggttgttttcctttcctgccaactcttccacaaaggaagtttttgcgacagagtcatcagccacaaggtntttgatggcgaggtccatgttcttccattacaccagtcaaacttgtggaaggacctnattatattaacttttttcagaca

SEQ ID NO: 259689 - DNA, 464 bp, Homo Sapiens
ttatgtttaaaataatctacaaccaaaaatgtaccattttcaagcagtactaccattaggagccccttttatagaaaataatttcttctttacccccgttcccagtgtgaatctagtattctgttaacatttgtgtggcatttggagtttgtcatccccattgaagggagagccttctcagacatgaagcaagggaaacatactgaatagttttacacaaatttgatctggcttccatttgtccccctcatttcccaaatgtttaaatgtattggatttggattctcaatgtataagttgccttatctgttaatgtctatcttctgtctctttaattttgtatatctgctgttttgcttttggatacattttctaattagaagtcacatgataaatataatcagtatagtaataataccataatgtgcacatactcaataaataaatgactgcattgttgtaaa

SEQ ID NO: 259690 - DNA, 1096 bp, Homo Sapiens
atctttgctttgaaccaggccctcctgcagcaggaaagcctgcgagcaggcagtcttcagatcccctacacgacggaggatctcatcaaacactataactgcggggacctcagctccgtcatcctcagccatgacagctcccaggttcccaattttattaatgccacgctaccacctcaggagcgcatcactgctcaggagattgacagctacttacgccgggagctgatctacaagcggaatgagagaatagggaagcgggtgaaggcccttttggaggagttccctgacaaaggcttcttctttgcctttggagctggtcatttcatgggcaacaacacagtgctggatgttttgcggcgtgaaggctatgaggtagaacacgcccctgctggacgacccatccacaaagggaagagtaaaaagacctccacacggcccactctgtccaccatctttgctccaaaagtccctaccctggaagtaccggcaccagaagccgtatcctcagggcactcaacgctgcctccccttgtgtcccggcctggaagtgccgacacgcccagtgaggccgaacagaggttccggaagaagcggaggcggtcacagcggaggctgcgactccggcaattcagcgatctgtgggtccgcctggaggagagtgacatagtcccgcaactccaggtccctgtcctggacaggcacatctccactgaactgcggctccctcgccgtgggcattcccaccacagccagatggtggccagcagtgcctgcctgtctctctggactcctgtgttctgggtgctggtgctggctttccaaacagagacacccctcctgtaacgactggaagcaccaggctaagaacctgacccctcggacttgaagaatggccattcctgtactccacattctggtctagccttgttgggcccaatccagaagagactgctcttgaaaaagcggcccagtgttgattcttctctttccaaggaatgtgactttgggttatccaactttgggggcaggtgtacagttttgtaacatagtgagttgtgtgaaaataaattataaatgagttgtatgaaaataa

SEQ ID NO: 259691 - DNA, 447 bp, Homo Sapiens
  misc_feature (40)..(40): n is a, c, g, or t
  misc_feature (180)..(180): n is a, c, g, or t
gcttggcagcggtaatttcttggttctagggtgtgtgtantggggagtatgtttggtggtcctgagagctgcagcatttcaggttgtttttctcactgcaggtcatttcatgggcaacaacacagtgctggatgttttgcggcgtgaaggctatgaggtagaacacgcccctgctggacngacccatccacaaagggaagagtaaaaagacctccacacggcccactctgtccaccatctttgctccaaaagtccctaccctggaagtaccggcaccagaagccgtatcctcagggcactcaacgctgcctccccttgtgtcccggcctggaagtgccgacacgcccagtgaggccgaacagaggttccggaagaagcggaggcggttcacagcggaggccgcgactccggcaattcaagcgatctgtgggtccgcctggaggagag

SEQ ID NO: 259692 - DNA, 832 bp, Homo Sapiens
  misc_feature (596)..(600): n is a, c, g, or t
  misc_feature (603)..(683): n is a, c, g, or t
  misc_feature (699)..(700): n is a, c, g, or t
  misc_feature (704)..(704): n is a, c, g, or t
  misc_feature (708)..(708): n is a, c, g, or t
  misc_feature (712)..(752): n is a, c, g, or t
  misc_feature (756)..(756): n is a, c, g, or t
  misc_feature (770)..(770): n is a, c, g, or t
  misc_feature (776)..(790): n is a, c, g, or t
tttttctcccggaacctctgctcagcctggtgaaccacacaggccagcgctctgacatgcagaaggtgaccctgggcctgcttgtgttcctggcaggctttcctgtcctggacgccaatgacctagaagataaaaacagtcctttctactatgactggcacagcctccaggttggcgggctcatctgcgctggggttctgtgcgccatgggcatcatcatcgtcatgagtgagtggaggagctcgggggagcaggcgggccggggctggggctcccctcccctgaccactcagctctccccaacaggtgcaaaatgcaaatgcaagtttggccagaagtccggtcaccatccaggggagactccacctctcatcaccccaggctcagcccaaagctgatgaggacagaccagctgaaattgggtggaggaccgttctctgtccccaggtcctgtctctgcacagaaacttgaaccccaggatggaattcttcctcctctgctgggactcctttgcatggcagggcctcatctcacctctcgcaagagggtctctttgttcaattttttttaatctaaaatgattgtgcctctgccnnnnnccnnnnnnnnnnnnnnnnnnnnnnnnnnnnnnnnnnnnnnnnnnnnnnnnnnnnnnnnnnnnnnnnnnnnnnnnnnnnnnnnncttaaaccatcccccnnaacncaanttannnnnnnnnnnnnnnnnnnnnnnnnnnnnnnnnnnnnnnnnactntttccaaaaattgncggcgnnnnnnnnnnnnnnnaaaaaaatttttatacaacctcttttttgtggcgcggggggc

SEQ ID NO: 259693 - DNA, 1128 bp, Homo Sapiens
ggaagcactggtatcacccagagtggcattacggccggggacgctagcatcttctgctgatcctgaaattgtaccagcggcaagatgtggcctggaaggggactttaagttctccacaactgccagcaatccttccaccaggcaaaacacatcatctaaggaaaagaagtgaggtttgcttagggcgtggcagcttcggataaacgcaggactccgcctggcagcccgatttctcccggaacctctgctcagcctggtgaaccacacaggccagcgctctgacatgcagaaggtgaccctgggcctgcttgtgttcctggcaggctttcctgtcctggacgccaatgacctagaagataaaaacagtcctttctactatgactggcacagcctccaggttggcgggctcatctgcgctggggttctgtgcgccatgggcatcatcatcgtcatgagtgcaaaatgcaaatgcaagtttggccagaagtccggtcaccatccaggggagactccacctctcatcaccccaggctcagcccaaagctgatgaggacagaccagctgaaattgggtggaggaccgttctctgtccccaggtcctgtctctgcacagaaacttgaactccaggatggaattcttcctcctctgctgggactcctttgcatggcagggcctcatctcacctctcgcaagagggtctctttgttcaattttttttaatctaaaatgattgtgcctctgcccaagcagcctggagacttcctatgtgtgcattggggtggggcttggggcaccatgagaaggttggcgtgccctggaggctgacacagaggctggcactgagcctgcttgttgggaaaagcccacaggcctgttcccttgtggcttgggacatggcacaggcccgccctctgcctcctcagccatgggaacctcatatgcaattttgggatttactagtaaccaaaaggaatgaaagagagctctaaccagatgggaacctggaacattccagtgggacccggggaccattccagggaaaactggggacataggaatcgtccccgctatgaatgggaatggttccaaaccggtttattaataagaaggccccccggtgaacccca

SEQ ID NO: 259694 - DNA, 730 bp, Homo Sapiens
ctgacttcccttcctgtcctcagcggccgggcccacggccccgagcagccatgctgggcgcgcgggcctggttgggccgcgtccttctgctgccccgcgccggtgcaggcctcgccgcgagccgcaggggtagctcctcccgggacaaggaccgaagtgcgacggtcagtagttcagtgcccatgcctgctggagggaaaggaagccatccttcatctacaccccagagggtccccaaccgcctgatccacgagaagtcaccatacctcctacaacatgcctacaatcctgtggactggtacccctggggacaggaagccttcgacaaggccaggaaggaaaacaagccgattttcctctcagtcgggtactccacctgccactggtgccacatgatggaagaggagtccttccagaatgaggagattggccgcctgctcagtgaggactttgtgagtgtgaaggtagaccgtgaggagcggcctgacgtggacaaggtgtacatgacgttcgtgcaggccaccagcagcggcgggggctggcccatgaatgtgtggctgactcccaacctccagccctttgtcgggggcacctatttccctcctgaggatggcttgacccgagtcggcttccgcacagtgttgctgagaatacgagaacagtggaaacagaacaagaacaccctgctagaaaatagccagcgtgtcaccactgccctgctggcccgatc

SEQ ID NO: 259695 - DNA, 1025 bp, Homo Sapiens
ggggggtccttcgacccgtgctgagctggatggaccgcgagacgcgcgccctcgccgacagccacttccgaggcctgggggtcgaggtccccggcgtcggccaggctccgggccgggtagccttcgtctcggagccgggcgccttctcctacgccgactttgtgcggggcttcttgctgcccaacctgccctgcgtgttttccagcgccttcacgcagggctggggcagccggcggcgctgggtgacgcccgcggggaggcccgacttcgaccacctgctacggacctacggagacgtggttgtaccagttgcaaactgtggggtccaggaatacaactcgaaccccaaagagcacatgactctcagagactacatcacctactggaaagagtacatacaggcgggctactcctctcccaggggctgtctctacctcaaagactggcacttgtgcagggactttccggtggaggacgttttcaccctgcctgtgtacttctcgtccgactggctgaatgagttctgggatgcactggatgtggatgactaccgctttgtctacgcggggcctgcgggcagctggtccccgttccatgctgacatcttccgctccttcagctggtctgtcaatgtctgtgggaggaagaagtggctcctcttccccccagggcaggaagaggccctgcgggaccgccacggcaacctgccctacgacgtgacctccccagcactctgcgacacacacctgcacccacggaaccagcttgctggcccaccccttggagatcacgcaagaaaacggccgaagatggtgtttggtggcccattggcctggcaccacccaggatgaccaccatctccaatcaaccaccacctgggtccaatgggctttcaaccctgggccaaacattgggggcgccttcctttgcaaccaaagaaacctatgccgccccttggccaagaaagaagggtccatccgaaagtgtggagaggcacattccaatggcaccccagcttaggcact

SEQ ID NO: 259696 - DNA, 997 bp, Homo Sapiens
tgaagaaattttaaaagaactgattttcctatcatcattgaggccccttttacttcatgccatcagtatgcacttaagagtcccaaggaagtcaaatgttcccaaatgtagccctttacatcggcaccagggaagcctgccatatatacaatccccttcctagggtgaacaagctccaccagtttgagtgtgttaataactggaattttcatgtatagtacagggtagggtaaaagcagaccaatagccatcttgtgtgctgtgaccaggatggacattttgaggacaagcatgctgagcccagtttaactaaatgtgcaggcattctagcccacacattcaatctggcagttagcaggaaccaggttgccccacaacccatccctccagctggagccttttgctgggaaatggagtagggggcccactctgcattatggtttccaatgacccctccccagagcagagcactactctgcttgcagataggaggctactggtgctttctggcaatgcatttctgcaaggtgcagtttaaatgaactcatatggtacttgatatggaaagaagctttttttcttctcaagttggatgcagaactgagttcaaaagatacaaggaaagcagggtttcattagtgggagctgatttagggttcagttctttatcactgcaatcttaggcaggccccttaactcctagtctctataaaataaggaagggggttgtcccagttttcagtctaatgtccccattctatgacagacccatgtcttctttatgtagaccaaggaagaggaattttagcaaacctacctgattatgcccatgtttcccaaataccttgatttttcttatattgacatttcatctgcacatgtctgggtaataattcattaatcaatgtaaaacgtagggaccctttattagctccataatgaaaaaaatctctccaccagccaagtgctgggacccaggtggccaccattgttattg

SEQ ID NO: 259697 - DNA, 1102 bp, Homo Sapiens
  misc_feature (1041)..(1050): n is a, c, g, or t
taaaaatctggattcttgatgtcaaatctcttcgactccagatacacaatttcctggaagctgatggaaagtgattctatttctgacaatgaaagaggctcagaaagagtcctaatttgctttcacagtacaggcattttccaaaacctggttctgggcttacaaagcacacacacacaaatcttaatgcaatgaacaatatttcaaaccttatttcccaaagcaaaacctagggcttaagacgtcaaaatcttccaacagttctagacatccagacagaataggagctgatgcagattgcatatgagatgtactgttgatccaggtgttttaggatcacactcaaatgaatataaagtagtgaaactttttggggaaacacattaacttataaaaagctagccaagagcatatcggccaaaggaggaaagggagtaaatggcaattcaaagtagacagttctcactagagcctagggcactttattagaaaccaagtatatcataggcaaataaaaatagtttttacccccattgatacaacataagggattttacattcagcctagatatagggagtaacaaatcctcctgcccataaatctatgacttgcaagtatcttccaccacatgataactctatatagtacatatagtacatagcccttatttattggagggatccaaaatattccttgtaggctcacaaagtccaatacattagctctctcttccctttacacgtctaatagtaaaaactattttttccatgcaaaaagccattattcagttgaagagaaatcaggcaaaacagagatggcagataaggaatggagagaatattattggcacgtgcccaactagtgacaaacaaatgcagtacacaatgacttaaaaataaaagtcacattatagggataacaaaaacaactacatcaatctaagctaaggagtgtcaaacagggagggctgggagttaccggttctattagtacaacttaagtggaaagcaagcacttaaatacaatttatggtaacaggnnnnnnnnnntactgcagagagctgttcaaagaccacaccaagttgtctgcatcattaattt

SEQ ID NO: 259698 - DNA, 643 bp, Homo Sapiens
attatggcaccagtgggtataaaaagtgaattatggttatttggctcatgcagcaaattaattggagaaactgaccacaaatattctgtgaagaactacaaggtcttgccccatgctgtcccattttagtgaccatttagttatgcaggcattatacaaatgcctcaatttaggacacccttgctgtcttagtaggtcaagtgtatgaaaatttactttatgcagaagaaatgaattctaatttattggttactggaatcttaatgtatgaaagctctaagtaaatatttgatgaattgatggtagcagtgtcgatttttaactgttccaagctcctagttttgttttgtttttacaaaagccttaaaatttagtactagggaaatcaaaggaagcaactcccactgacatgcttcatggaaaggggaaaaacatctacctttgggtctaatctgcctcccaggtgagcctacaggtactggaactctaactgcaactatgagggcacagggaaaatgcatgtatgtaatatgcttgtcagcttcagcaacaactcatgtgtacattcacatttactataagtaaacaggtcccgtataatacttaaaacacaagttttgatctataaatatttgattcttaa

SEQ ID NO: 259699 - DNA, 2260 bp, Homo Sapiens
  misc_feature (2011)..(2011): n is a, c, g, or t
  misc_feature (2014)..(2014): n is a, c, g, or t
  misc_feature (2016)..(2017): n is a, c, g, or t
  misc_feature (2019)..(2020): n is a, c, g, or t
  misc_feature (2022)..(2022): n is a, c, g, or t
  misc_feature (2029)..(2030): n is a, c, g, or t
ggatgaggaaacagggctctgtcttctgcctctgaaagaaaagaagaaacaggtgcagacatcacaaaagaataccctcaggaagcgtagagtggtcatagttgacccagaaaccaataaagaaatgtctgttcaggaggcctacaagaagggcctaattgattatgaaaccttcaaagaactgtgtgagcaggaatgtgaatgggaagaaataaccatcacgggatcagatggctccaccagggtggtcctggtagatagaaagacaggcagtcagtatgatattcaagatgctattgacaagggccttgttgacaggaagttctttgatcagtaccgatccggcagcctcagcctcactcaatttgctgacatgatctccttgaaaaatggtgtcggcaccagcagcagcatgggcagtggtgtcagcgatgatgtttttagcagctcccgacatgaatcagtaagtaagatttccaccatatccagcgtcaggaatttaaccataaggagcagctctttttcagacaccctggaagaatcgagccccattgcagccatctttgacacagaaaacctggagaaaatctccattacagaaggtatagagcggggcatcgttgacagcatcacgggtcagaggcttctggaggctcaggcctgcacaggtggcatcatccacccaaccacgggccagaagctgtcacttcaggacgcagtctcccagggtgtgattgaccaagacatggccaccaggctgaagcctgctcagaaagccttcataggcttcgagggtgtgaagggaaagaagaagatgtcagcagcagaggcagtgaaagaaaaatggctcccgtatgaggctggccagcgcttcctggagttccagtacctcacgggaggtcttgttgacccggaagtgcatgggaggataagcaccgaagaagccatccggaaggggttcatagatggccgcgccgcacagaggctgcaagacaccagcagctatgccaaaatcctgacctgccccaaaaccaaattaaaaatatcctataaggatgccataaatcgctccatggtagaagatatcactgggctgcgccttctggaagccgcctccgtgtcgtccaagggcttacccagcccttacaacatgtcttcggctccggggtcccgctccggctcccgctcgggatctcgctccggatctcgctccgggtcccgcagtgggtcccggagaggaagctttgacgccacagggaattcttcctactcttattcctactcatttagcagtagttctattgggcactagtagtcagttgggagtggttgctataccttgacttcatttatatgaatttccactttattaaataatagaaaagaaaatcccggtgcttgcagtagagtgataggacattctatgcttacagaaaatatagccatgattgaaatcaaatagtaaaggctgttctggctttttatcttcttagctcatcttaaataagtagtacacttggatgcagtgcgtctgaagtgctaatcagttgtaacaatagcacaaatcgaacttaggatttgtttcttctcttctgtgtttcgatttttgatcaattctttaattttggaagcctataatacagttttctattcttggagataaaaattaaatggatcactgatattttagtcattctgcttctcatctaaatatttccatattctgtattaggagaaaattaccctcccagcaccagcccccctctcaaacccccaacccaaaaccaagcattttggaatgagtctcctttagtttcagagtgtggattgtataacccatatactcttcgatgtacttgtttggtttggtattaatttgactgtgcatgacagcggcaatcttttctttggtcaaagttttctgtttattttgcttgtcatattcgatgtactttaaggtgtctttatgaagtttgctattctggcaataaacttttaggacttttggtancancnnanncnaaaagannagaagaaattggcggcccgccttcgggccctcaaaaaagctttctaaaaccattccgtttgggggcggcggggccccacgaaagggaaagtgaacactggggtcaaatgctggttttccctaggagagatcccggcggccccgaacaaagggggcttgggagatccctcacgccaaattaagtatatggcccccgggggcggggagccccggagagggatttttcgagaa

SEQ ID NO: 259700 - DNA, 625 bp, Homo Sapiens
  misc_feature (531)..(561): n is a, c, g, or t
gggaattcaaacctctcacagagtacactagacatacactagagacaccttgtagtattttgggagcaaaaaaattattttctcttaacaagactttttgtactgaaaacaatttttttgaatctttcgtagcctaaaagacaattttccttggaacacataagaactgtgcagtagccgtttgtggtttaaagcaaacatgcaagatgaacctgagggatgatagaatacaaagaatatatttttgttatggctggttaccaccagcctttcttcccctttgtgtgtgtggttcaagtgtgcactgggaggaggctgaggcctgtgaagccaaacaatatgctcctgccttgcacctccaataggttttattattttttttaaattaatgaacatatgtaatattaatagttattatttactggtgcagatggttgacatttttccctattttcctcactttatggaagagttaaaacatttctaaaccagaggacaaaaggggttaatgttactttaaaattacattcnnnnnnnnnnnnnnnnnnnnnnnnnnnnnnntaaaataccagttttttttctctgggtgcaaagatgttcattcttttaaaaaatgtttaaaaaa

SEQ ID NO: 259701 - DNA, 1503 bp, Homo Sapiens
  misc_feature (1452)..(1463): n is a, c, g, or t
ggggggttgccctcgccccgaggccctggcctcaatctgccccctccaattggcggtgccggtcccccgctggggcttcccaagccaaagaagaggaaagagcccgtgaagatcgcggcgccggagttgcataagggagattcagattctgaggaagatgaacccacaaagaagaaaactatccttcagggatccagtgaggggactggtttgtctgccttgcttccccaacctaaaaacctgactgtgaaagagactaacaggttgctcctgccccatgccttctcccgcaaaccctcggatggctcccctgatactaagccctccagactggcttctaagaccaagacttcctctcttgcccctgttgtgggcaccacaaccaccactccgtcgccctctgctatcaaggctgctgccaagagtgctgccctgcaggtgacaaagcagatcacgcaggaagaagacgacagtgatgaggaagtagcccccgaaaactttttctccctccctgaaaaggctgagccacctggagttgagccatacccttaccccatccccactgtccctgaagagctgcctccaagcacggaaccagagccgcctttccaggacgatgcagccaatgccccccttggaattcaagatggcagcaggttcaagtggggcccccttggatgcctaagcctggggacgactacagctacaatcagttttccacatatggcgatgccaatgccgctggtgcttattatcaggattattacagtggtggctactatcctgcacaggacccggccctggtccccccccaggaaattgccccagatgcctccttcatcgatgacgaagcatttaagcggctgcagggcaagaggaaccgagggagagaagaaatcaactttgtggagatcaaaggtgatgaccagctcagtggggcccagcaatggatgactaagtcattgacagaagagaaaaccatgaagtcattcagcaaaaagaaaggtgagcagccaacaggccagcagcggcggaaacaccagatcacatatcttattcatcaggccaaggagcgggagctggaactgaagaacacctggtcagagaacaagctcagccgccgtcagacccaagccaaatatggattctagggctctggaactgattgctcccaggatctcctgccagcccagctggcctggcccccagcttcacctctgggaccccagctgctctaagcccaggatctctttccccaaggacccagccctcgcctctgcgagaatgaacatatttgatagatttttcttaacaagttagaaaattcagctcctttctgtcctggagctagcaaagacttgtgtgatgcctccgaaggggctctgagttctggggtgggagttttgctctctgtcaggtgtgataaaatgttgaaccctccccaccaccacnnnnnnnnnnnnaaaccagggatgtctgttgaaataaaacattcagtctgac

SEQ ID NO: 259702 - DNA, 924 bp, Homo Sapiens
  misc_feature (762)..(762): n is a, c, g, or t
  misc_feature (806)..(806): n is a, c, g, or t
  misc_feature (882)..(883): n is a, c, g, or t
acttccggcgtgtgcgtctggcgtccgcgcgctgcacaatggcggctctgaagagttggctgtcgcgcagcgtaacttcattcttcaggtacagacagtgtttgtgtgttcctgttgtggctaactttaagaagcggtgtttctcagaattgataagaccatggcacaaaactgtgacgattggctttggagtaaccctgtgtgcggttcctattgcacagaaatcagagcctcattcccttagtagtgaagcattgatgaggagagcagtgtctttggtaacagatagcacctctacctttctctctcagaccacatatgcgttgattgaagctattactgaatatactaaggctgtttataccttaacttctctttaccgacaatatacaagtttacttgggaaaatgaattcagaggaggaagatgaagtgtggcaggtgatcataggagccagagctgagatgacttcaaaacaccaagagtacttgaagctggaaaccacttggatgactgcagttggtctttcagagatggcagcagaagctgcatatcaaactggcgcagatcaggcctctataaccgccaggaatcacattcagctggtgaaactgcaggtggaagaggtgcaccagctctcccggaaagcagaaaccaagctggcagaagcacagatagaagagctccgtcagaaaacacaggaggaaggggaggagcgggctgagtccgagcaggaagcctacctgcgtgaggattgagggnctgagcacactgccctgtctccccactcagtggggaaagcaggngcagatgccaccctgcccagggttggcatgactgtctgtgcacccgagaaaaagcgggcaggttcctgcccctggnncaatcaaggggaagaccccttttgtgaagcttgtgaatgcc

SEQ ID NO: 259703 - DNA, 1353 bp, Homo Sapiens
ttacaggcgtgagccaccaacaccctgcctgaggcaacattttaaacttggtgtatgttgaaaatttcaaaacccctcagctgtcctgcatcctcatttaggttcctgcttggctcgagtttgagtttacagcccctgcaagtaaatccaagagcctgttacagattggcggtcgtgccttatgaaatctgacttctacttccagaaatcagagcctcattcccttagtagtgaagcattgatgaggagagcagtgtctttggtaacagatagcacctctacctttctctctcagaccacatatgcgttgattgaagctattactgaatatactaaggctgtttataccttaacttctctttaccgacaatatacaagtttacttgggaaaatgaattcagaggaggaagatgaagtgtggcaggtgatcataggagccagagctgagatgacttcaaaacaccaagagtacttgaagctggaaaccacttggatgactgcagttggtctttcagagatggcagcagaagctgcatatcaaactggcgcagatcaggcctctataaccgccaggaatcacattcagctggtgcaaactgcaggtggaagaggtgcaccagctctcccggaaagcagaaaccaagctggcagaagcacagatagaagagctccgtcagaaaacacaggaggaaggggaggagcgggctgagtcggagcaggaggcctacctgtcgtgaggattgagggcctgagcacactgccctgtctccccactcagtggggaaatgcaggggcagatgccaccctgcccagggttggcatgactgtctgtgcaccgagaagaggcggcaggtcctgccctggccaatcaggcgagacgcctttgtgagctgtgagtgcctcctgtggtctcaggcttgcgctggacctggttcttagcccttgggcactgcaccctgtttaacatttcaccccactctgtacagctgctcttacccattttttttacctcacacccaaagcattttgcctacctgggtcagagagaggagtcctttttgtcatgcccttaagttcagcaactgtttaacctgttttcagtcttatttacgtcgtcaaaaatgatttagtacttgttccctctgttgggatgccagttgtggcagggggaggggaacctgtccagtttgtacgatttctttgtatgtatttctgatgtgttctctgatctgcccccactgtcctgtgaggacagctgaggccaaggagtgaaaaacctattactactaagagaaggggtgcagagtgtttacctggtgctctcaacaggacttaacatcaacaggaaaaaat

SEQ ID NO: 259704 - DNA, 763 bp, Homo Sapiens
  misc_feature (483)..(607): n is a, c, g, or t
aaacttaaattgggagatgttccgacccccactcccatataagcattcaatcagtgtaacttgcaaaatgcataaacatccgacagtttgaatttatagtgttgatggaagaaatcatttttaatgtgtactgtaaaacttgaaatactcaggagctgagtgaatatgtttgttgctacttacaatcccgacctgttagtcccagtagttttgttttaacatggtctttttcaactttgtttcctgtttaactacagatgacttctgttgtagactcacaagtttaactgttgtattataacagtattacatgtcaacggtgtggttatgacctttatttatataaaaaccaaatatttagtcaatttaccgtgtcttaatttaatctttgtacaccttccatttttaagtgcttaaatgagtactatattgcaataaaatgtagtgatataattaaccagccattaaaaatttacttctacnnnnnnnnnnnnnnnnnnnnnnnnnnnnnnnnnnnnnnnnnnnnnnnnnnnnnnnnnnnnnnnnnnnnnnnnnnnnnnnnnnnnnnnnnnnnnnnnnnnnnnnnnnnnnnnnnnnnnnnnnnnnntgggggggcccctccggccccccaaaaaattttttaaaaccctttcttttgggcgcgggggcccccctaggggtaaggggaaaaggggcacaaagcttgttccccaagaaaaaacccgggcgccaagaaacaagggcgttgggattccccccccac

SEQ ID NO: 259705 - DNA, 953 bp, Homo Sapiens
taactgtggagtggggctgactcagccttcagaactgtgaagtggatgccttaacagggccaagatctatcagcctcttaaactgactttcatttctctggttcagagaaaaagcttatggtatcttcacgttggatgaacttgcatatcgtgagagtcctcagctccaatttcgtgtctaggcacatctggactggcattcattttgatacccaatccatagattaatagggttaatctaattagaataaattaaatcgttttccaaaaagttgaaaagggtaaatcacatgagttcttcaacattcaagactttaaatatgttagcaaactgattactgttccaactgttgccagttaagaagtttaaatcagcatttcccaaaaggtgtgtcaggactgagttaatcagtaagctaatagaaacaactgcaatagactagggatgagatttctcaaagcagtctgatataatatgcggcaaccccttatgtactggagcgtatccaatacattctcaaaactcctaaattagctaaaatgcaaggtaaagagcagtagaaaaatgcagctcttaggataggcaaaactttggaagatttatgtcctcacaccagggtccagcaacttaggtttgaatttatgataaggttaatgatataataaacttgggttggctggtttccctggcaattgttaattccccttaaataaaaatatgttgatacattgtaaaaagaagtattttacagttgaaacctttggaaagggcttttaaaaatctgagtttttaaaaggggaaaacaagaggtgggcacccttgtgggccgacattactcctaagatagagaacttagttttcatatataaaatgactcaatttcatgtcttttataaaacttaacaactaaagcaagtgagcttgctttaaggaaattagagccctaatttct

SEQ ID NO: 259706 - DNA, 477 bp, Homo Sapiens
gctgctcgatgaagctgcagacggtggcactgtaggggtgccaggtgcccagcccgtcgtgccattccccacacggccacagccgcggggctggtgtacacctgcaccagggaagggcttggggccatggccatcttcccaaggagtcccgctgctttcccaaacagcttcagacccctctggcctggagtcccggggtcattgcccagcgcctccggcagatcttttatctctggagagctggcacaaactgtcccttctggatgaagacaccagctccttaggaggaatgacttgtttgagttcccatcttgatacaaaccacaaacaacaaaaaccgggcaaatctgaaaggcttgctgactcagcgacacaaattccaaggcaccgaggctgaggaggacaagaggacggggctgagggcaccaacgcgctcgggctgcagctccggctcggcctgggcagggctctagctgt

SEQ ID NO: 259707 - DNA, 993 bp, Homo Sapiens
  misc_feature (635)..(645): n is a, c, g, or t
  misc_feature (763)..(763): n is a, c, g, or t
  misc_feature (801)..(809): n is a, c, g, or t
  misc_feature (915)..(915): n is a, c, g, or t
gggccctttggagctacttcctcatgctgcccgctcgcctaccgttcaggctgctgagccttttccttcgtggatccgctcccacggcagcgcgccatggcctccgggagccgctcctggagaggaggtgcgctgccgcctcctccttccagcactcatcgagtctgggacgcgagcttccttatgaccccgtggacacggagggctttggagaaggtggtgacatgcaggagcgttttctgttcccggagtacatcctggatccggagccgcaacccacccgcgaaaagcagctgcaggagctccagcaacagcaggaggaggaggagcgacagaggcagcagcggcgggaggagcggcgacagcaaaacctacgggccaggtcccgggagcacccggtcgtggggcacccggacccggcattgccgcccagcggcgtgaactgctcgggctgcggggcagagctgcactggccaggacccccggagtgccccggctaccctgcccccgaagagaaagttccctccgccacgggcgagaaggcaatcaccggcgggggcttgggcaacgggaccccgttgggggcccaaccggccttgccttgggcctggcctgtggacgaccaacccaacccnnnnnnnnnnnccttcttaaccgcccctggtcaaggggggaaatcccccccgaaggacaagttaacccctggggaagaccttgggtgcgaagcccgcccctcccctttgtgccggggcgggacccccgnagacccccttcccccttgggggggccttcctaacactnnnnnnnnnaaaccctggtcgggggaacccctggacccgcaaaccgccccctgggcttgcgccccggacacttggcccaccgctccctgggggtgggggccccccaaggcacganctgagtccgggcgtcttggagacaaaacacaaaatgtggaacctctccccggcccccccacagataggcctcccctgg

SEQ ID NO: 259708 - DNA, 2419 bp, Homo Sapiens
caggctggtacggtccggaattacgggatatcgtcgacccacgcgtcggaagtagttgagaaaggatttgaagatgatcgaatgaggctttacttcataaaattgaaatacagatgaaacatcagtctaccagctttgggctgatgctgacatcatacatagcttcttgctggaaccatgatggggaccctgtggagctcttgaagttgggaaatcagttagctaaattcagacagtgcctgcaggaaaatccaaaatttttgcaagaaaaagtaaaacagtattttaagaataaccagcataagctgactttatcgatgaggccagatgacaagtatcacgagaagcaggcacaggtggaagccacgaagctcaagcagaaggtcgaggctctgtcccccggagacaggcagcagatctacgagaaaggtctagaattacggagtcaacaaagcaaacctcaagatgcctcttgtctgccagcgttgaaagtttccgatattgaacccaccatacctgtcacagagttggacgtggtcctgacagctggagatatccctgttcagtactgcgcccagcccaccaatggcatggtgtatttccgggccttctccagcctgaacacactccccgaggagctgaggccctatgtgcccctcttctgcagcgtcctcacccaagctgggctgcgaccttcttgactaacgggagcaggctcagcagatagaattggaagaccggagggatgagtgcttctccccacgtgctccccgacgactcacacatggacacctacgagcagggtgtgcttttctcctctctctgcctggatcgaaacctgccagacatgatgcagctatggagtgaaatatttaacaacccgtgctttgaagaagaggagcacttcaaggtgctggtgaagatgaccgcccaggagctcgccaatggaattcctgactctgggcacctgtacgcatccatcagggcaggccggaccctcacgcccgcaggggacctgcaggagaccttcagcgggatggatcaggtgcggctgatgaagaggattgcagaaatgacagatatcaaacccatcctgaggaagctcccacgtatcaagaaacacttgttaaatggtgataatatgaggtgttcagtgaatgcgactcctcagcagatgcctcagacagaaaaagcggtcgaagacttccttagaagcatcggtcggagtaaaaaggaacggaggcctgtgcgcccacacacggtcgagaaacctgtgcccagcagctctggtggagatgcccacgttccccatggctcccaggtcattaggaagctggtcatggaacccaccttcaagccctggcagatgaagactcacttcctgatgcccttcccggtgaattacgtgggtgaatgcatccgaactgtcccctacacggacccagatcatgccagtcttaaaatccttgcacgtttgatgactgccaaattcttgcatacagaaattcgagaaaaaggcggtgcttatggtggaggcgcaaaactcagccacaatgggattttcaccctttactcttacagggacccaaatacaatagagacgctccagtcttttgggaaggctgtcgactgggctaagtctggaaaattcacacagcaagacatcgacgaagccaaactttctgtcttctcaaccgtagatgctcctgtcgctccttcagacaaaggaatggaccacttcttgtacggcctctcggatgagatgaagcaggcccacagagagcagctctttgctgtcagccacgacaagctcctggccgtgagcgataggtacctcggcactgggaagagcacacacggcctggccatcctcggacccgagaacccgaaaattgccaaggacccatcctggatcatccaatgagcagccgtggcgctcgactgcacaggagcccgagacaatacacctccgagctgaatatgaaaagtcagaaatgctactgctttttccaagaatattatgtcattgagtgtcgccaaagcccttgactggcgagtcaaaaactcagatctatcttaagagtgaccaggaagaggttcattgaaataatcatgcatgaagcgccaaagatgcaccatgtagaattttcactttgtactggcaggctcgttttacctcattctagaatatttaagaatctaaaaataaaggggcaacttctgactttgaaaaacggcggagcgaacggcccataaaagccttggcggccgccctcggcccccgaaaaagctttccaaaaccaattggggttggggcccgggggccccagaaggtcaagagaacggggccccttacctggttgcctaagggagaaccccggggcaataaacaaagggcttgggatttccccaccccaat

SEQ ID NO: 259709 - DNA, 1749 bp, Homo Sapiens
  misc_feature (1019)..(1019): n is a, c, g, or t
  misc_feature (1021)..(1109): n is a, c, g, or t
  misc_feature (1273)..(1281): n is a, c, g, or t
  misc_feature (1422)..(1434): n is a, c, g, or t
gatggcacagtggtagggggtgaagccccagtccctgtgctgccaacaccccctgaggctcctaggccccctgccacagtgcaccctgaaggagtccctcctgctgacagtgaaagcaaggaggtgggcagcactgaaacaagccaagatggagatgccagctccagtgaaggcgagatgcgggtcatggacgaggacatcatggtagaatcaggtgatgactcatgggatctgatcacatgttactgtcgaaagccctttgcagggcggcccatgattgagtgcagcctgtgtgggacgtggatccacctctcctgtgctaagattaagaagaccaacgtccccgacttcttttattgccagaaatgcaaggaactgaagccagaggcccggcggttaggggggcctcccaaatctggagagccctgatggcaccaactttagcctggaacttccaaatgacaacatgatttgggaactgagcctcagggtcctcagcctatcccctggagcttggatactgtctgcacttcaaggcaggaattctcaagggagacttgtttgaaaatgagtgtctcactttcccaccctatccttcctccccactctgtggacttgaaattgaatccattacggttggggatgggaggctgtctgtgtcccgacacataatctctgtctcttggacctgccaccatcactttctgggtcaggattggaattgggatggaatgggacagttgtctataaaactctagtgtaaatattagcactcccctccctcatcttttcttctatttcactccccatttattttcttctacaccggttgtatttttaattttggacttcccctattgggcatggcagctcaaaggtggagtactagagcctggccaagtgaggaaggaaagcagaaaggtgacgattctcactcacctcttttgtttttaataatatcggccgctgtttgtacagacagcctgcgtgttgtaaataaagcagagtgggctctttantnnnnnnnnnnnnnnnnnnnnnnnnnnnnnnnnnnnnnnnnnnnnnnnnnnnnnnnnnnnnnnnnnnnnnnnnnnnnnnnnnnnnnnnnnttcttgggcggccgccctcggcccttgaaaaagtttctctaaaccattccgttggggcgcgccgggccccaagaagggaaagtgaaacatgggccatagcgtgttttcccaaggaaaaacccgggggcaatgaacaaagggccttgggaattcctcacacgatnnnnnnnnncggcccgggggggaaacccgaagggttcttttgaaacaaatccccaaaatggggaagttccgaggagggccatgttcgggggattctttccaaccaggggggcccccaaggcggagcctcaaaaaattcaatatttacggnnnnnnnnnnnnngtggcgccctccctttggaaaagaaaccgggggggaaaattccctttttagaggacttttccggggcgccaaaaattgggaaaagcccccctcgcaaaaaaagggggggtgtggggtgaaaaccctcgaaaatttccgagcccagcggggggtttcccaaaccccctctttggtccgccccttgtgggaggaaataaattatttgggcccccccgggtggggggaaaacaaccgggggcggccgacaaacaaaaagtgtggcccccaaatatgtgggggccaccacgcttttaaaaagccgcaaaaaggcgcggg

SEQ ID NO: 259710 - DNA, 1044 bp, Homo Sapiens
  misc_feature (976)..(976): n is a, c, g, or t
aaggaagcgaggcctgggtggcgaattcggcacgaggtgcttgcggccgcttctagtagtttccaggcgctgccgggcggctggcactaagcggtcctgaggctgtggctacggctgctccggagctggtggcgccgcgataggagagccgatggccaagtggggtgagggagacccacgctggatcgtggaggagcgggcggacgccaccaacgtcaacaactggcactggacggagagagatgcttcaaattggtccacggataagctgaaaacactgttcttggcagtgcaggttcaaaatgaagaaggcaagtgtgaggtgacggaagtgagtaagcttgatggagaggcatccattaacaatcgcaaagggaaacttatcttcttttatgaatggagcgtcaaactaaactggacaggtacttctaagtcaggagtacagtacaaaggacatgtggagatccccaatttgtctgatgaaaacagcgtggatgaagtggagattagtgtgagccttgccaaagatgagcctgacacaaatctcgtggccttaatgaaggaagaaggggtgaaacttctaagagaagcaatgggaatttacatcagcaccctcaaaacagagttcacccagggcatgatcttacctacaatgaatggagagtcagtagacccagtggggcagccagcactgaaaactgaggagcgcaaggctaagcctgctccttcaaaaacccaggccagacctgttggagtcaaaatccccacttgtaagatcactcttaaggaaaccttcctgacgtcaccagaggagctctatagagtgtttaccacccaagagctggtgcaggcctttacccatgctcctgcaacattagaagcagaccggaggtgggaaagctccacatggtagatgggcacgtctctggggaattttactgatctggtccctgagaaaccttattggggaatgaantgtggaggttttaaaatctttgggccaaaggggacacttttggccaccatcacctttgtacccttcat

SEQ ID NO: 259711 - DNA, 2454 bp, Homo Sapiens
  misc_feature (1419)..(1453): n is a, c, g, or t
  misc_feature (1664)..(1675): n is a, c, g, or t
  misc_feature (1899)..(1967): n is a, c, g, or t
tggcagtactactagggtttaaggtagcgaggcctgggtggcggaaaagcaagccaggaggtgcttgcggccgcttctagtagtttccaggcgctgccgggcggctggcactaagcggtcctgaggctgtggctacggctgctccggagctggtggcgccgcgataggagagccgatggccaagtggggtgagggagacccacgctggatcgtggaggagcgggcggacgccaccaacgtcaacaactggcactggacggagagagatgcttcaaattggtccacggataagctgaaaacactgttcttggcagtgcaggttcaaaatgaagaaggcaagtgtgaggtgacggaagtgagtaagcttgatggagaggcatccattaacaatcgcaaagggaaacttatcttcttttatgaatggagcgtcaaactaaactggacaggtacttctaagtcaggagtacagtacaaaggacatgtggagatccccaatttgtctgatgaaaacagcgtggatgaagtggagattagtgtgagccttgccaaagatgagcctgacacaaatctcgtggccttaatgaaggaagaaggggtgaaacttctaagagaagcaatgggaatttacatcagcaccctcaaaacagagttcacccagggcatgatcttacctacaatgaatggagagtcagtagacccagtggggcagccagcactgaaaactgaggagcgcaaggctaagcctgctccttcaaaaacccaggccagacctgttggagtcaaaatccccacttgtaagatcactcttaaggaaaccttcctgacgtcaccagaggagctctatagagtgtttaccacccaagagctggtgcaggcctttacccatgctcctgcaacattagaagcagacagaggtggaaagttccacatggtagatggcaacgtctctggggaatttactgatctggtccctgagaaacatattgtgatgaagtggaggtttaaatcttggccagagggacactttgccaccatcaccttgaccttcatcgacaagaacggagagactgagctgtgcatggaaggtcgaggcatccctgctcctgaggaagagcggacgcgacagggctggcagcggtactactttgagggcattaaacagacctttggctatggcgcacgcttattttagggccagcggcaggggactccagcctgctggacacttcagtccagctctctcctgactggggcttgcgactcacaggattgcatcgtcccagctgctaacttggggccggggcccctcccttccacatataccttgggtttgtgcatgttttctgctgggtgggttcagagggcaatttctcttttatgtgtacatatgctaaataaacataatttaaaaaaccgcannnnnnnnnnnnnnnnnnnnnnnnnnnnnnnnnnntcaggacggcgtttgccgggggggccggccagccgccctcgcgtgccaaaccaattaaatgtactcgaccacaagccgaccacgtgccccggcggatggcccggacccccgctggagtggaccggatgcgcaaggacaacagccgcccctctttccttccgtgccgcgcgggggccgaaagccgtggtggacgacaccacggtctgcgggnnnnnnnnnnnngggactcccgaagcgcactgggggcgaccagtcgccccccccgcgtcggaggatggtagctgcccccactcatccccccgcgcgtgcctactgcggtactcgcgggcaaagcactcccccgcggggctcggccccccgctcgctcgtcctctcccgccccgggcgagggcggatgcttcaacccccccggcggatcacgtaggataagaaaaccccaacgattnnnnnnnnnnnnnnnnnnnnnnnnnnnnnnnnnnnnnnnnnnnnnnnnnnnnnnnnnnnnnnnnnnnnnacaactgaccgcccacattcttccggccgacccctgtacgtgcgcccaggtccactttccgcccggcccgacattatccctcgtctaccgtccggccagccccacctactccctctgaggcgaagcctgtactccctccatacgaatcacaccacctgccacgacccccgtcgcgagagctctggagtgacgctctcgcgtgccgggtgggtatcgccacaggaatctcgtgcatgtgtaagcgctgaggcaatcctcgcacgcgggcgatccgacccacgccgccaccccctttttcccctaactccagtaccgcacccccgcactctgaccaccctcgcccgcccaaatatcgtgccactacccaataacataggaacggggcgggagttaggggtgttcgaccacggcccgtgcgacaacgcgttgcggagcgagagggcggacccgcgcgcgtccgcgcctcagctggggtcccccgtcgctc

SEQ ID NO: 259712 - DNA, 1806 bp, Homo Sapiens
  misc_feature (1003)..(1014): n is a, c, g, or t
aatgatgttgagtatctttttgtgtgctaatattgccattatgtatcctcttcggtgaaatgtcttcatgtcttttgtctattttctatttaggtcatttgttctttttactattgagttttgagaggttttttatatatcctagataaaattcctctgttagatatgtggttgcttgaatttttaacataacttctaccaaggaaaaataagtaaaatttccaacccttgcacggccagtcacttacttaattcctgtccttcagtgttccatctagagaattaagagatatgatgtataaaatagacatcgagggccattaagagagtaaatacttaaaaatacatgttatgaaagcaaagccaataatcactgtaggagtatgagttgcctaagggccaaaactaatgtaaataagagaaagtgtggatataaatgaccattgtttataaacagtcatgaaaaatgctgtgacttgaaatctttcccacatctcccaagaaagtaggtaggagtttatcctttccgtaatctctttttaaccctgctgactattacagggcttgtttaatcacagtggcaagaattacatgtatcttacagtaaagaaacagaatactggaatcgttagagaaccctgatgtgttgacctggataaagtacaaaggtggaagagggaatgagttatgctgttaaaatctcaggctattctgttaatgttcctgctactatgaacccaaacttttttttcccccttttgactccttgtgtcttcctctcctgtggcataaaagtagttctgtcgttaacttgtacaacattgccatctgctgttgagaattggtaggtactgcttctgagaacctggctgcagatccttagcataggcagcaaatgttgagaaagtctatctgtagtattacatatactaagttacagaggatgcattcaagtagagaaaataatatgtgggttaagatacatccttaaacttttttttannnnnnnnnnnnacggagtctagctgcaaacgcccaggctggagtgcaagggcacttatctcagcgtcgctgcaaccttcaccctccggggtttcaagcaatactccgtgaccatcaagcctcctgagatagctgggaatatagggtgcaccaccaccatgccgtggctaaattgagagggattatcagaccacgaaagcagagctttcaccatatgggccaggtgtggtcctcgaactccgtgacctcaagtgatcgggcggccaacagcctacccaaagtgcggggattacacagcgtgagccacacacagccaagcctccatctttacacttttttaacatgggcgacattgctatcaggtaccgggaagcctaaacaagactgtcttccttatatccgacggggggctttaccccctttgagggaggcaaggacaggaacgctcgtaggacaggcctgcgatggtgacccaacgtccacgaacataggcagaacagaacaaagtgagtgcgaggagagccagggttcccaggtggtgacaacctacactaaagcatcgggcgagtgaactcttacgtccacaccgtacggacgcgaagaacagggcacctgggcccgggaaagcaagaacaccatggccatcaacaacacgtctcgcgcaacaagtcccacaacagcacggggtgtgcccctggccatacaagggcaccagcaacgcacaacgcgtacgggcccacaaggcgcaacgcacaaccacgaggggcaacaacgacactccggcgtggacgtgttacacaaccg

SEQ ID NO: 259713 - DNA, 795 bp, Homo Sapiens
  misc_feature (673)..(701): n is a, c, g, or t
cttggcgtggctgcaggtgaggccgcggcggggaaaatggcggacgggaaggcgggagacgagaagcctgaaaagtcgcagcgagctggagccgccggaggacctgaagaagaagcagaaaaacctgtgaaaactaagactgtttcttccagtaatggaggggaaagttccagtcgcagcgctgagaagcgatcagctgaagaagaagctgccgacctcccaacaaagcctacaaagatctccaagtttggatttgccataggtagtcagacgacaaagaaagcatcagccatatccatcaaacttggatcaagtaagcctaaagaaactgttccaactcttgctccaaaaactctttcagtagcagcagcttttaatgaagatgaagatagtgaaccagaggaaatgcctccagaagcaaagatgaggatgaagaatattggaagggatacaccaacatcagctggaccaaactccttcaataaaggaaagcatgggttttctgataaccagaagctgtgggagcgaaatataaaatctcatcttggaaatgtccatgaccaagacaattaaatgatgttttgaaattggggtgtggggtgggtgtaaagttaaaaggaacagtttcctttttttaaagaagggcgataagactatcttttgggagccggcnnnnnnnnnnnnnnnnnnnnnnnnnnnnnaaaaaaattgaagtgggtaccacctaaattccattggacaaattttggacaaatttaagcgcaacaacgcgacagggtcctgcgccaaacccct

SEQ ID NO: 259714 - DNA, 815 bp, Homo Sapiens; identical to SEQ ID NO: 86334
  misc_feature (538)..(538): n is a, c, g, or t
  misc_feature (587)..(587): n is a, c, g, or t
  misc_feature (601)..(627): n is a, c, g, or t

SEQ ID NO: 259715 - DNA, 614 bp, Homo Sapiens
gagacagctcagggcctggctcatagttgttccttaatacaagttatttcccttcttgggctgtcagagccgagactccaagcacttcttgggactgtcctggatttaatgatatcaaatcaaagtccctctcagcatccagaaattcaacatttgaaagatagccagaaattgctatgagtatccgactgattctggaaacattcattacctgcctcccttggtgacttctctttaggggtttcagcaaaccctgccacctgcacccaggcaagacccaattctgagctctctaacttttactgacctggcaggagggaagcctcatcatgctggggcttaaggccaagcagcatgctccagctctaggggaaggtagtgccactgcaggaagcatcctagttcttacattgataaatgctgccggcaggaacttagaagcctgggcaaaagctgctgcactgtgtttaatgcttccctggttaaagttttatcaggtactgaagacagcaggagtctataaagcaaatctgaaacgctttctaagtaaaagcaaaagtgctttccttgaggatcacagagatatgataagttactgagacaggttggcaaat

SEQ ID NO: 259716 - DNA, 829 bp, Homo Sapiens
ggggactcctggagcttgccaccagcttggacttctagggactttcctctcagccaggaaggattttgatattcatcagaaatacctccagaagattcaaggagctgtagaggtgaagtaagcctgtgaaggaccagcatgggaatcctatactctgagcccatctgccaagcagcctatcagaatgactttggacaagtgtggcggtgggtgaaagaagacagcagctatgccaacgttcaagatggctttaatggagacacgccccctgatctgtgcttgcaggcgagggcatgtgagaatcgtttccttccttttaagaagaaatgctaatgtcaacctcaaaaaccagaaagagagaacctgcttgcattatgctgtgaagaaaaaatttaccttcattgattatctactaattatcctcttaatgcctgttctgcttattgggtatttcctcatggtatcaaagacaaagcagaatgacgctcttgtacgaatgctacttgatgctggcgtcgaagttaatgctacagattgttatggctgcaccgcattacattatgcctgtgaaatgaaaaaccagtctcttatccctctgctcttggcaagccgtgcagaccccacaatataagaataaccatgggtgagagctcactggatattgcacggagattaaaattttcccccaattgaattaatgctaaggaaagccttggtaatccctggggacccacccgaatggaggataacgaaaaaaagttacgaactgggattctatcctccacttttagaccttttgggcctggggggccccctttaccctggaatg

SEQ ID NO: 259717 - DNA, 971 bp, Homo Sapiens
  misc_feature (891)..(891): n is a, c, g, or t
  misc_feature (894)..(894): n is a, c, g, or t
  misc_feature (924)..(924): n is a, c, g, or t
gtagcgaggcctgggtggcgaattccgcacgagggtcgtgaagctgggggagctcgtcgccgccgccggcggctagcgggcgtccgcgccatggagcgctacgcggccgccttggaggaggtggcggacggtgcccggcagcaggagcgacactaccagttgctgtcggcgctacagagcctggtgaaggagttgcccagctctttccagcagcgcctgtcctacaccacgctcagcgacctggccctggcgcttctcgacggcaccgtgttcgaaatcgtgcaggggctactggagatccagcacctcaccgaaaagagcctgtacaaccagcgcctgcgcctacagaacgagcaccgagtgctcaggcaggcgctgcggcagaagcaccaggaagcccagcaggcctgccggccccacaacctgcctgtggttcaggcggctcagcagcgagaactgagaggccgtggaacaccggatccgtgaggagcagcgggcgatggaccaaaagatcatcctggagctggaccggaaggtggctgaccagcacagcacactggagaaggcgggggtggctggcttctacgtgaccaccaatcccacaggagctgcagcctgcagatgaacctactggaactcatcagaaagctgcaccagaggggctgtcggggagggaatgccccctgggactgggaggccatggcaccgactgctgccaatgtgtacccaaagggagccctgtcccaccataccgacggcctgaaacattcgcgacaaattcattcttcttgaccttgggccaccgttttcccagccgcctccgggggggttccccctgctgatgaagagcaccggggggaccgccacccgtcttgttctcccccgccgccnagnaggtatacacttgtgcaccccccgcgaccnctattttgttagttattttttccccccgcgctcgactgtccctgcct

SEQ ID NO: 259718 - DNA, 427 bp, Homo Sapiens
  misc_feature (131)..(131): n is a, c, g, or t
  misc_feature (147)..(147): n is a, c, g, or t
  misc_feature (151)..(151): n is a, c, g, or t
  misc_feature (269)..(269): n is a, c, g, or t
  misc_feature (312)..(312): n is a, c, g, or t
  misc_feature (355)..(355): n is a, c, g, or t
  misc_feature (364)..(364): n is a, c, g, or t
  misc_feature (409)..(409): n is a, c, g, or t
tggagctataggacctcatacttaataggaaattgacagctacagatgaccaacaacccacaggagctgatgctgcagatgaacctgctggaactcatccggaagctgcagcagaggggctctgggcaggngaaggcagccctgggntagngaggtccctgggcagttgctgctgcccagtgtgaccagaaaggcagccctgtcccaccatagccacaggaggcaggaagtctggggcagagtttcatcttctttgacctttgggccantgcctttcccagcttgcccgcagggggtttcccccttctttgnagggagagaccaggttgggacccccagcttgcctttttcaccntttcatctnggggattttgcttgtttcaaaaccctagggataagtttttcattnaaagggggaggtttgggg

SEQ ID NO: 259719 - DNA, 414 bp, Homo Sapiens
ccactttaaaaatgatatatattactcagatttaacatccagaaagaagaaaaaaatggaaagaatgcacacacacaaagagagcaagaaagctgcagtaaaggcacataatttaaaatcatgttcctggtctccaatcttcctctgcaaagtgagacaccctgggccctttctttcacacctggctagttacctagaattgaataaggcccccttgagatgctctagccgctggttccctagggtttcccaaagtccccaaagggacatatgacatataaaataatgaatctttctgagtccccataaaacaatgttatctgtccctcctccaatgtgccaatacactatttacagctcttatgacatttagttcaaaacactgaacaagggctttgatatctgtgtacctcc

SEQ ID NO: 259720 - DNA, 526 bp, Homo Sapiens
aaaagttccttttgaaataatgggttttgggttacccctgggaaggcaggccccagaaccccatttcccttgacttggcaggttccgggctgtgttcacatgactgctgcctagctgatgcatttttcacatttgtcaactctggttagaaacaggtcctcaggagtattctctaacctgatattttctaaaaagatatgttgattcaactttgtttagcatcctactttctagattgtggggctcattttgccagggccaagctaccagaaaagtagaagtggagattacctggtatgtatctctctgggtgccccagttagagctgccacagctcaggaaaaagatgaggcataacgaccttgaatgtaattggagtaagtgacaaaataagaactaccctgggaaaccctgcattcaatgtagctgtcaattcagtatttttaagtacacctgtcagctgtttcttaccacttcgatggttgtgattaatttaaaatcaaaataaaggaattactgagtttaa

SEQ ID NO: 259721 - DNA, 905 bp, Homo Sapiens
  misc_feature (784)..(784): n is a, c, g, or t
ggggctcctgtcttgtctcagcggctgccaacagatcatgagccatcagctcctctggggccagctataggacaacagaactctcaccaaaggaccagacacagtgggcaccatgggacagtgtcggtcagccaacgcagaggatgctcaggaattcagtgatgtggagagggccattgagaccctcatcaagaactttcaccagtactccgtggagggtgggaaggagacgctgaccccttctgagctacgggacctggtcacccagcagctgccccatctcatgccgagcaactgtggcctggaagagaaaattgccaacctgggcagctgcaatgactctaaactggagttcaggagtttctgggagctgattggagaagcggccaagagtgtgaagctggagaggcctgtccgggggcactgagaactccctctggaattcttggggggtgttggggagagactgtgggcctggagataaaacttgtctcctctaccaccaccctgtaccctagcctgcacctgtcctcatctctgcaaagttcagcttccttccccaggtctctgtgcactctgtcttggatgctctggggagctcatggggtggaggagtctccaccagagggaggctcaggggactggttgggccagggatgaatatttgagggataaaaattgtgtaaggagccaaagaattggtagtaagggggagaacagagaggagctgggctatgggaaatgatttgaataatggagctgggaatatggctggatatctggntactaaaaaagggtctttaagaacctacttcctaatctcttccccaatccaaaccatagcttgtctgtccagtggctctcttcctgccctccaagctctggcccccaggctccctccctaa

SEQ ID NO: 259722 - DNA, 942 bp, Homo Sapiens
gaaacccaaggcttttcacccaaatatactgcctgctgtccagagggcacacttaggatcatgagccatcagctcctctggggccagctataggacaacagaactctcaccaaaggaccagacacagtgagcaccatgggacagtgtcggtcagccaacgcagaggatgctcaggaattcagtgatgtggagagggccattgagaccctcatcaagaactttcaccagtactccgtggagggtgggaaggagacgctgaccccttctgagctacgggacctggtcacccagcagctgccccatctcatgccgagcaactgtggcctggaagagaaaattgccaacctgggcagctgcaatgactctaaactggagttcaggagtttctgggagctgattggagaagcggccaagagtgtgaagctggagaggcctgtccgggggcactgagaactccctctggaattcttggggggtgttggggagagactgtgggcctggagataaaacttgtctcctctaccaccaccctgtaccctagcctgcacctgtcctcatctctgcaaagttcagcttccttccccaggtctctgtgcactctgtcttggatgctctggggggagctcatgggtgggaggagtctcccccagagggaaggctcagggggactggttggggccaggggatgaaatatttggaggggataaaaaattggggtaagaagcccaaaaaaatgggtatttaggggggaaaaccccaaaaaggaccttggggctttaggggaaatggatttttaaattaggggcacctggaaaaatactggctggcactatccttggggaacaaaaacaacagggtctttttaaagaacccccacctttgccaaaatcccctttccccccgtccctgccccctctagcctgggtagtgggccacccgcgc

SEQ ID NO: 259723 - DNA, 693 bp, Homo Sapiens
  misc_feature (20)..(20): n is a, c, g, or t
aatacaattaccttaatccncccgcctagttttgtcagtcagcctagcaggatggtaataggatacctttcccaagaaacagagactggagatgtgttttggtataacttcaataacctcagcactacagtaatgagagatgcagtatccttttgcctatggttcaagacaagaggcaaggaggtcagaagaaagagaataaatcaaaatttttacaactgagtaactatttctcattaggtctcaccacggtgccaccttcatttttacataaacgtggtggcataattcaatctcaataaatcagaattcttaatatttaaaatttaacttgactttccattatcaccatattaacaaccaaaataattagataaaacacataggaaagggtaatattaaaccccaccttaatagagttggtttcttgacacattaacttattttttatagaaaagggatagtgcatctcagtttgcttacaagctaggagatcactttgaattctgcatttcctaactgcaaacagaatatagcacttataacaggttataaataaactggttttcaagcatagagccagccccaacgataataatacactatttaaaaagacctaaggcaatgaattccatttccaatggaaaaaaagaactgtgcaaacaagcttaaaactacttttttgtgtgtgcc

SEQ ID NO: 259724 - DNA, 1988 bp, Homo Sapiens
  misc_feature (1808)..(1925): n is a, c, g, or t
acgaatacagcctcggcgctttcagtgctgtaggaccgaggctcacaaacatgcacatggcatcaagcaggtcctgccactccagagcaaacgaagccacccccgaaccttagcagaggccgcactccctcggtcagggggaccacggagccgacacggtgctttgatgcctccgaagagtctgagctccattccacggagggagcgggctgcgccgccgctccgtcccattggtccagttttgcaatcactagatgaagctccggttaaagttctaaatcagtgaatgacgcagaccatgaagttacaaggcatccacgaaggtcaccacatcacctggcaccctccaagggcccacgcggagccagctgaggactcacgtccatgctccagaacgtcagcacctctgcctcccatcactcaaggaaggggcttcagacacctcatggggacctatgacggctcgagcttgacacaggttctcccagctgctcgacacgctgtgggatgtactggaagggtcttccaggcctgcggagccctctttttgtcccaccagccctgcacccaccctcctcctgccaggggctgggtcttgggttagaaagtcactcgagggcttcagagccgctgacccagcttgcagctcaaaatgaggacaaaggcgcttccatccaccttcacggagatgctggcttcgcaggccggtgggcgaggcgaggtccatagttttacttaggacaggtttcccaggcagtacccaggtcgtgtgggggatccccaagcagaagcttaggacggcattctcccctctctgttcccacccacctatccgccagacactgggcttgcccttgctgtccgtcccagcactgacgggcaggacagagatgcatggggtgagtggccctgtggcactggaaggcatatcccaccagaaatgggtttcctgttggacaaagaccagaaatggccccgcagtatactggtggatgggaagaaaggagaggctggcatttgggggtgctgttcccaccacagccttgaagctggggccccccatcaaagcttgtcccaggcaagggtcagagatggaaggggacatctcttgctctgggacagggtcctgcttggctcagacagtgggaaaactaaaaacacctgtttattctgccagaatcgaaagaaaaattccaggaagaacttcttactaatatacatttttaagatattgaccagtcatctaaacttactcattaaactgttttaaacaaatgaacacaccgtgtgccaatgaaaggcaggaaccgtggttttagacgccgatgaaaaaccagtgtctttgtgcactgagaacaggaaacattctgctctgagaacaaactgcagagtcgacaggagacacacatgcgacagaaagcccccagcaggagagaccgtgcaccctggtgggtgatgggatgcccgggcagtggcttggacacagctgtcacgccacgatgcctgctgggtcctgcagggacaggggacacaggccacacacagagcccagccacgcactgtggagcgtggcacaggccacacaaactggctcctaccacctaacagagacgagtcgcacactgaaaaaagtcccctagaaggatggctcacgtccatcctaccgggggggatggacgcagggacctggccctggctctggtctggcggcaacccctgctggcagaggcaggaggtgtgcggctggagtcagaaactgaggtgctgtctataaaaattccaagattccgccgggtgcactggctcannnnnnnnnnnnnnnnnnnnnnnnnnnnnnnnnnnnnnnnnnnnnnnnnnnnnnnnnnnnnnnnnnnnnnnnnnnnnnnnnnnnnnnnnnnnnnnnnnnnnnnnnnnnnnnnnnnnnnctgagcgtggtggctcatgcctgtaatcccagctactgggaggcggggcagcctcgtccgaat

SEQ ID NO: 259725 - DNA, 538 bp, Homo Sapiens
attgttaagacaaagggtgtgcacttcctggccaggaaacctgagcggtgagactcccagctgcctacatcaaggccccaggacatgcagaaccttcctctagaacccgacccaccaccatgaggtcctgcctgtggagatgcaggcacctgagccaaggcgtccagtggtccttgcttctggctgtcctggtcttctttctcttcgccttgccctcttttattaaggagcctcaaacaaagccttccaggcatcaacgcacagagaacattaaagaaaggtctctacagtccctggcaaagcctaagtcccaggcacccacaagggcaaggaggacaaccatctatgcagagccagtgccagagaacaatgccctcaacacacaaacccagcccaaggcccacaccaccggagacagaggaaaggaggccaaccaggcaccgccggaggagcaggacaaggtgccccacacagcacagagggcagcatggaagagcccagaaaaagagaaaaccatggtgaacacactgtcacccag

SEQ ID NO: 259726 - DNA, 1174 bp, Homo Sapiens
  misc_feature (31)..(31): n is a, c, g, or t
aaaaccctctgtggttgtcgggaccagggancccaagaagagccatattgaatgggcctaagaagaatacctgcctagagccttatcatccttcaagacgatggtaccccagacagtcaggatggtgtcacatttttatggaaatggagatatttgtgatataactgacaaaccaagacaggtgactgtaaaactaaagtgcaaagaatcagattcacctcatgctgttactgtatatatgctagagcctcactcctgtcaatatattcttggggttgaatctccagtgatctgtaaaatcttagatacagcagatgaaaatggacttctttctctccccaactaaaggatattaaagttaggggaaagaaaagatcattgaaagtcatgataatttctgtcccactgtgtctcattatagagttctcagccattggacctcttctaaaggatggtataaaatgactctcaaccactttgtgaatacatatgtgtatataagaggttattgataaacttctgaggcagacatttgtctcgctttttttcatttttgttgtgtcttataaactgactgtttttctttgcttggatactgtgattccaaaataaatctcatccaagcaagttagagtccagcctaatcaaatgtcataattgttgtacctattgaaagtttttaaataatagatttattatgtaaattatagtatatgtaagtagctaatgaagtaaagatcatgaagaaagaaattgataggtgtaaatgagagaccatgtaaaatatgtaaattctagtacctgaaatcctttcaacagatttttatatagcaactgctctctgcaagtagttaaactagaaactgggcacatggtagaggctcacatgggagttgtcctcacccttgttaatctcaagaaactcttatttataataggttgcttctctctcagaacttttatctattacttttttcttcttatgagtatgtttactctcagagtatctatctgatgtagacagttggtgatgcttctgagactcagaatggtttactctaacaaaacactgtgctgtctatcccttgtacttgcctactgtaatatggatttcacttctgaacagtttacagcacaatatttattttaaagtggataaaatggccaccagccc

SEQ ID NO: 259727 - DNA, 914 bp, Homo Sapiens
  misc_feature (161)..(170): n is a, c, g, or t
tgggggatagaagaaaatggggggtggtacacataaagctgcgttcaggggaaaggggaaaaagaagtgggccaaagagaaataaaggcccccgagtgcgtgggggctgatgggaacggcccttgggcccgaaaaccggagattcttggaggggaaattgnnnnnnnnnntgggcttcaagacgcaggaggacgggaaaaaggccattggttttggaaccccggggatgaggttcctgttccccccaacccgccttaggggagggggccgggaaaaaccctgcgggaattcgtgttcccaatgggggttttcaccaaagttggaagcccaatgtttataaggggaaaagggggattttaggccgcctagggaaaaaaggaaaagttgctggctacctgtttttccggaagtttgtcaggcggagattttaggaaaccatatcccaggcctttccaggagaaggctagaggcaaggagaagaaggaagagaaattccttaaaacagaagcttctcccaagagataaggaagtcaaaaccacagttctaaagctggaccaaacagttcccaggcacagaaagggggaggtaaacctaactcaaactgtgccctctcatcaaagcctaaatgcccgctaacgtgatcccagtagctcttaggcagggagggcaagagaacacgaacacgctctcaaaccaacaggtggccctgtgggcagggctagtcttcctgggagtctaacgccattgacacctgaagaaaactatcttcccagtcatgagaactcggggtgtcgattgagcagcctctcctcaacaatggagatttttcagaaaagtgagtctggtttaagggacacaaatcccacagagtttcttggcacaatgtttcagtaagcatgagtgagacccaaaa

SEQ ID NO: 259728 - DNA, 337 bp, Homo Sapiens
catactgttgaaaagggtccccagcctaactttcggatcacatggtatctcccattgaatagatctccaattttcacaagatgataacctcctttacaataatcattaggatcttcttgcttatcatcatcagatcccagaatctcctcttcctgctctggtagatcactctcagagtggggagcagagcctcggtgctgagtttcagatttcctttgggctttgtccttcttggccttggtccttttctttcgggcctggagcgcaagcactttccgctccatggtgagaccggtaatcgccaggcgcctgcgcactcgagtggcggcgactcccc

SEQ ID NO: 259729 - DNA, 941 bp, Homo Sapiens
cgccaggtcgccttcgcggcccggggacacaggcagggacgcgggagctgatgcggctggaccggccggggaaacagtattttctggaagggggcccctctgaagcggtccaggatcctgcacatggcgctgaccggggcctcagacccctctgcagaggcagaggccaacggggagaagccctttctgctgcgggcattgcagatcgcgctggtggtctccctctactgggtcacctccatctccatggtgttccttaataagtacctgctggacagcccctccctgcggctggacacccccatcttcgtcaccttctaccagtgcctggtgaccacgctgctgtgcaaaggcctcagcgctctggccgcctgctgccctggtgccgtggacttccccagcttgcgcctggacctcagggtggcccgcagcgtcctgcccctgtcggtggtcttcatcggcatgatcaccttcaataacctctgcctcaagtacgtcggtgtggccttctacaatgtgggccgctcactcaccaccgtcttcaacgtgctgctctcctacctgctgctcaagcagaccacctccttctatgccctgctcacctgcggtatcatcatcggggggcttctgggcttggtgtgggaccaggaggggggcagaaggcacccctgtcgtggctggggcaaccgtcttccggcgtgctgggctagccctctgtgtcttcgctcaacgcccatctacaccaccgaaagggcctccccggcgggggaacgggagcaatcttggcgccctgactttcttaaaaaaacggtccaacggccgggcggtccttcttccctgggcccctgggctcctggctggcctggggggaaacttttcaaggccccttgggtgtgaactttttggcccccagctttggggaagatggcccccgttttttt

SEQ ID NO: 259730 - DNA, 1059 bp, Homo Sapiens
  misc_feature (127)..(127): n is a, c, g, or t
tagatttcctgtcctagaaaccgggcaggcagaccgttgggggggccctcccgttgagaaaagtgaggccagaattttgctccggtgaaagccatttcccagcccttttgcttgtacttattgtccntagacctcagcaaaactggtgatcagacttcctcgcttaaaaagtagctttgaaaacaggggcccattgatgtcacctcctccccatcagaccatagagaacccatcgaccatcaagagccaggcagttgacgttcttctcccagtaggatccgcctatgcagtctagaataagattaactccagcacctttggtgaatttcagcgttgcttcagagaaatcctcttttttgtaattgaatccagcagctgctccaagcttttctgccatttgaagcttcttctgggagccagctgtgaccagaggaatagctccagccatccgggtgagttggatagcagctgtgcccacaccactcagtcctgcatggattagcacatagtctccagcctgaacatttcccacaagatgtaacagctggaaggcggtgagccaggcctctgggatggctgcagcctgggtcagggtcaatccctctgggataggcatgaggagcccttcggggacagtgacgtactgagcctggcccccaccggggagcagagccatggctgtgtccccgatcttccagtgtccctggcagccaggccccagctctgccacatgtccagatgcctcaagtcccaaaatgttgctggctcctggaggtgggtcatactggccttgtctctgcattaagtccgcccggttcagggcgctggccgccaccttcaggaggacttcaccctcccccgggctcggcttggccacctccttcacgtagaggttttccggtcctcccggcttgtcaaagtgcacggctaacatattgttcctggcccggctcccctcccatgcaccaggcggcgccgagtggttctggctcctgcgggtcccggtgacaaagcccgagccccagagccccaggactgcctctgcctccaccggaatgg

SEQ ID NO: 259731 - DNA, 859 bp, Homo Sapiens
aggtagcgaggcctgggtggcgaattcggcacgagggacaaggccagtatgacccacctccaggagccagcaacattttgggacttgaggcatctggacatgtggcagagctggggcctggctgccagggacactggaagatcggggacacagccatggctctgctccccggtgggggccaggctcagtacgtcactgtccccgaagggctcctcatgcctatcccagagggattgaccctgacccaggctgcagccatcccagaggcctggctcaccgccttccagctgttacatcttgtgggaaatgttcaggctggagactatgtgctaatcccatgcaggactgagtggtgtgggcacagctgctatccaactcacccggatggctggacctattcctctggtcacagctggctcccagaagaaacttcaaatggcagaaaagcttggaccacctgctggattcaattacaaaaaagaagatttctccgaagcaacgctgaaattcaccaaaggtgctggagttaatcttattctagactgcataggcggatcctactgggagaagaacgtcaactgcctggctcttgatggtcgatgggttctctatggtctgatggggaggaagtgacatccatgggcccctggtttcaaagctactttttaagcgaaggaagctgatcaccagtttgctgaaggtctaagggacaataagtaccagcaaaaggcctggggaaagccttccccggaaaaaatttctggcctcactttctccaccggaagggcccccccacggtccggcctgccggtttctgggaaagaaatctaccccagtggaacgcgaaatcccagggggg

SEQ ID NO: 259732 - DNA, 1474 bp, Homo Sapiens
  misc_feature (95)..(139): n is a, c, g, or t
ggttccggaggttctagtgtcggagttgggtgcaggcaggtgccatgggcccgcttgaggcacactgaggggacgcggggctgggccatggccgnnnnnnnnnnnnnnnnnnnnnnnnnnnnnnnnnnnnnnnnnnnnncttcaggcaaccagccgcctcaggagctggggcttggggagctgctggaggagttctcccggactcagtaccgggccaaggatggcagcgggaccggcggctctaaggttgagcgcattgagaagagatgtctggagctgtttggccgagactactgtttcagcgtgattccaaacacgaatggggatatctgtggccactatccccggcacatcgtgttcctggagtatgagagttctgagaaggagaaagacacgtttgagagtaccgtacaggtgagcaagttgcaagacctcatccaccgcagcaagatggcccggtgcagaggacggtttgtctgcccagtaatcctgttcaagggcaagcacatttgcaggtcggccacactggctggatggggagagctgtatggacgctcaggctacaactattgtttctcagggggtgcagatgatgcctgggcagatgtggaggacgtcacggaggaggactgtgctcttcgaagtggtgacacgcatctttttgataaggtcagaggctatgacatcaagctgcttcgatacctgtcagtcaaatacatctgtgacctgatggtggagaacaagaaggtgaagtttggcatgaatgtaacctcctctgagaaggtggacaaagcccagcgctatgccgacttcactctcctctccatcccgtatccaggctgtgaatttttcaaggaatataaagatcgggattacatggcagaagggctcatatttaactggaagcaggactacgttgatgccccattgagcatccccgacttcctgactcactctctgaacattgactggagccagtatcagtgttgggatctggtgcaacaaacacaaaactacctgaagctgctgctttccttagttaacagtgatgatgacagcgggctgctggtacactgtatctcaggctgggatcggacccccctcttcatctccctcctgcgcctttccttgtgggctgatgggctcatccacacgtcctgaagcccactgaagatcctctactcactgtggctatgactggttcctctttcgggcacctgttggtagatcgggtcgcaaagggggggagttcctctctgctcaatttgaagctattactcgcagggtttctgctctggagaccgaggggagagtttgcgccgggtggggttcccgaagaatttctttgagaagccggggcccccccgggcgttccggtggaggcccggccgggtccttgggggccggcgtagaggggagctccggtgtggccaggccgcgggggccccatggcaggaggcagaggctccgcggc

SEQ ID NO: 259733 - DNA, 956 bp, Homo Sapiens
  misc_feature (142)..(173): n is a, c, g, or t
  misc_feature (668)..(795): n is a, c, g, or t
aggtattcagtgatagcaccagaaaacagactaatacaaataaccatcatttaacttaggttaatataagatttttaagttaccaaaaattaaatataaaaatatttaaaagtagacatcttggctaggtgcagtggctcannnnnnnnnnnnnnnnnnnnnnnnnnnnnnnnccaccatgcccggccatacgtaagtgttttgattagtaaatccaggtagaagttgtatgtgtgaactgtaaataatgttgacaactcttaagaattgtctgttttaattaaaccaagaaacttaaactagctttctatttactaaagattatctcagatcacgtgaccttgaaaaacatttagatgggctccagtttttctaagaaaatgctccatttatggaagcaattcttttctttcttttaaccaaatctttgcataggtaccaaataacacatttgtttaggatgagagctgcccactgcccccgccaaaaaaaagtacttttatatacaaaagtccaaatttccaaaggtatatgtacctttaattgtgacttgaactcaaggtaaataaagtaaataagtaataaattaaccttagcttactggacggccaccatcttatatgctgttcccttgactgaaatgttgtggggtaaatgactatatatgnnnnnnnnnnnnnnnnnnnnnnnnnnnnnnnnnnnnnnnnnnnnnnnnnnnnnnnnnnnnnnnnnnnnnnnnnnnnnnnnnnnnnnnnnnnnnnnnnnnnnnnnnnnnnnnnnnnnnnnnnnnnnnnncccagggaagccgatggtgtaattcttagttcaaggccaaaatccttagatccttcgggaggccactggtgtatgcactggagtccaagggctagaaatcctagactctgatgtccacaggcagaagagtgtcccagctccaggagatcagatggatttgc

SEQ ID NO: 259734 - DNA, 1397 bp, Homo Sapiens
  misc_feature (913)..(926): n is a, c, g, or t
tgaaaaagggggccaccttatcttagttccagaatttagtcttcctttggaatactacctaattcccttccttatcatagtgggcatctgtctcatcttgatagtcattttcatgatcacaaaatttgtccaggatagacatagagctagaagaaacagacttcgtaaagatcaacttaagaaacttcctgtacataaattcaagaaaggagatgagtatgatgtatgtgccatttgtttggatgagtatgaagatggagacaaactcagaatccttccctgttcccatgcttatcactgcaagtgtgtagacccttggctaactaaaaccaaaaaaacctgtccagtgtgcaagcaaaaagttgttccttctcaaggcgattcagactctgacacagacagtagtcaagaagaaaatgaagtgacagaacatacccctttactgagacctttagcttctgtcagtgcccagtcatttggggctttatcggaatcccgctcacatcagaacatgacagaatcttcagactatgaggaagacgacaatgaagatactgacagtagtgatgcagaaaatgaaattaatgaacatgatgtcgtggtccagttgcagcctaatggtgaacgggattacaacatagcaaatactgtttgactttcagaagatgattggtttatttccctttaaaatgattaggtatatactgtaatttgattttttgctcccttcaaagatttctgtagaaataacttattttttagtattctacagtttaatcaaattactgaaacaggacttttgatctggtatttatctgccaagaatatacttcattcactaataatagactggtgctgtaactcaagcatcaattcagctcttcttttggaatgaaagtatagccaaaacatnnnnnnnnnnnnnntcctcagtatagcttgcaattaagacctagatcacagtatttaagtgttttgcgttttatacatgaggtcagtgctacagccacctagcatgaactaacccagcttccacctccataaagttacctagagttgttgagttggaatatgttctggcatttacctgacctgccaatcattagggagaggcaacaaggtaattcagcctttcctcctatcagcacaaagaaactcaaagctgttttttccctttctgttccaaagcagtcttatcctgacaggagcggtctatactagtgcagatttcaacacttttttttaacgttttaattactatagtgttatgtagagatttgattgagcagctaatgtttctgaactttacttactaattttcagtgtcctttaagggttctgtagtgttatcaaagcaaaaagaaaatgctgcataaaaataccaaacttcagcaact

SEQ ID NO: 259735 - DNA, 619 bp, Homo Sapiens
gctgtgctgggaggagccgccgccagtcgcgcggtcagtgcctcgctccagactcgggagggtcgagggggcgcaggagagagcgcgggcggccgccggggctggtcgcctgcagggatgggggacgagcggccccactactacgggaaacacggaacgccacagaagtatgatcccactttcaaaggacccatttacaataggggctgcacggatatcatatgctgtgtgttcctgctcctggccattgtgggctacgtggctgtaggcatcatagcctggactcatggagaccctcgaaaggtgatctaccccactgatagccggggcgagttctgcgggcagaagggcacaaaaaacgagaacaaaccctatctgttttatttcaacattgtgaaatgtgccagccccctggttctgctggaattccaatgtcccactccccagatctgcgtggaaaaatgccccgaccgctacctcacgtacctgaatgctcgcagctcccgggactttgagtactataagcagttctgtgttcctggcttcaagaacaataaaggagtggctgaggtgcttcgagatggtgactgccctgctgtcctcatccccagcaaaccct

SEQ ID NO: 259736 - DNA, 991 bp, Homo Sapiens
gcatcgctgctagtcgtttcactagcatgctggctaggagtcttcttagtcactcttttcttctccttgatagtgtctgtactctggcttcagctcccatgtgtttttgtggatcccttttacattctgaacaccaatttcttttaagatttccttcaggtacaccacaggttgctttgtgatgtccaccaagtccttaagattatagtattgatgtttctcaaaggctgaaaatagcatgtctaaaacatgttgtttatcagctcgagctcgctttccgtcttctttctttttcctttcatattcgatattgtattgatgattagcaacaggtttgtaattggttgttacaactttgtccagctgttgtgatagcctcactggtttggaagactcttctatttgcaatctttttaatcgcatgtagttttcactggcagctggtcggcattcagctctttgtaccactattccttccaatgacagcttatctgatgagctctcagtaaatactgttaatgtctgtcctccaacactttgcaagacaaatggatgttctctaggagcactgactgaagctggttttccaccaatatcatgaatatttgcaagatcctcattcaaagtaaatgacacctcagtccttccttgagtcttggcaatccgcagtttcccaacttcacctcttccagaggctttagcccattgctgtgacaaatatttaggaaccttgactagccacactcctgtgttctgtttggcgccggtcaagtcgagttccccgcgctcggccatgggtctgcagccggtggaggcgtgcgggatgcagcagcgaccccaggagccgcagggctgaggagcgggcgtccggaacaaaggacaagccgcgctgagaggcgaagagccggcgttccttacctgccagaacactgggaaccgaggaaaagaggaacacgccgccaggagccgggactgcgcctgcgcactgccc

SEQ ID NO: 259737 - DNA, 925 bp, Homo Sapiens
tgtgctgtaagaaccgcataaaacgatccagaggaaaccatttctatcagaaaaataaagtacaagtttaggtgatgagcgtaaagctagggcctgtgcgaggctgctggcacgaggcggtatgaaggggtgggaaggtggcttctcccggcgtgaagcctcaggggcggccacctgcccactgctctcggagttagctgctctgtcaaggtccaggagaccccgggtccctgcccagagtcacagcccccgtatctgggctccggcctggggcagcctcggggagaagatggcaggcgtgctctgtgaaatacgtgaggctttcaggggctccgtttgtggttttcctaaccctccctgatgacccccacagaacatgaggctatgtcactcacggtaattaaataagacattcgcccagttcaagagtgcagccaggaccaggactggccaggccctttcctcccacctgtgcgcaggtgcccagtggcagctctattctctctcagggcggctacacagaggcagggctttgaaatgcttcaagaactcagaaaagtgaaggctgtcttgttccaaaggaaagggccttgtaagaatctactttgtcttagaggagtgggggaggggaagagccctttcagggcacccagatgtgtgaaaggacggttcactctgggcccttgcagacctgcctgggcccagtctggggctatttggcaccagctgttcaccccactagccactgcctcccttgtcccctgcctccattctgctgggggagggatgtcggcagtgacagtgacctgccacccttgagactcaagctttcttgccaggattcacagtgcacgtcacaagagagcaagagctgggctctggggatgtggacagatggaaaggacatgccccatgcctcgatcct

SEQ ID NO: 259738 - DNA, 726 bp, Homo Sapiens
ctgggatgttgatagtgggggaggctatgcatgtatgctgataggggctgtattggaactctgtactttctgttcaattttgctgtgaacctaaaactgctccaaaaaataaagtctcttttaaaaaagagttttaggaggggaattcataatcagatttaaatttgtaatagattggctgcagtgactcatgtgggtggaaataaagaacaaaaatgggtgtaggagaacagttaacgcaatggtctagctaaaagacggtgctagtttaggccaaggtggcagcaaaggagaaggtgaaaacatgctgcccctagagagggaaataagattcccgtaagtgtaacgaactgtttgcccttagtttcctcatctattaaaggagagaagaggagtataggggttagaagacagcctatcactgaaccaaacttaaggcaaacagaatcaactgagttcttgagtcagacatcttttcttttgtaatgtcaaccctctattagacaagagcagtatcaggcagacgatggtatttatgagagaactttgaacacataacttcctgagcactctttgaatataatgacccacttctttattaacctaattgtgctgatagtgactagtaaatatgataatgtaaccaaataccaaaatggacattctaggaactcaaaaatacttagtgttattttcagttggatttttcttttgtttatatttgca

SEQ ID NO: 259739 - DNA, 918 bp, Homo Sapiens
  misc_feature (441)..(442): n is a, c, g, or t
acgtgccaatagtagaatcccgttgagttatcctaggatgccttagaatcttggctgggcaaggcatcatgcccactgacatgctttagctctttttggaacctaaaaagtgatttggcagtttcaatttactgagttatttcaatgggactcattaagctggtgtgatgaactttgaagttaaaaatgtaaagcaaattctcgtacacctagatcacaccatcagcacaagcaggacaatgctggagcagcatgaaaggtgggtcactttaaaaagattcttccttgtactgcatgatatattaagatgacagacctaaatttcaactgggttaatgagttagaatagatctgtttcccaaatttagcacacaataatttcagtggattagagaaagaaacctcagatgtgaagaaagtgaagaaaaaaacaacaaaaanngcttgagctataatagctaacctgcagctctaaaaattgtcatgctacagagtactttcaaaaaattaagtttgtaacaaacataagaaaacagtgttttgagttgaagttgaccaactgctgcatagaaaatatgctaacatacaacagtcaagtttaagcctgtgcatagagaagataaagcacttatggtaactgcaaatggtaacgagtccttaaggtttgtacaacctagtatgggtccataaggaaaaaactgtagtagaaatggttaggacaaacaataaagtagaaacaggggggaaacttgagaagagaagaaagaagcaagaaaaaaagactttcaattgtataaaattcacaaaccagtaaagtataaagacaccatggagaaatggttaactctgccccaaacacccaacagcaaacaaaccagaatgaataagcctttggcagacaattttagaaatttgaat

SEQ ID NO: 259740 - DNA, 1308 bp, Homo Sapiens
ctgcaggtgagcagtggtgtgtgagagccaggcgtccctctgcctgcccactcagtggcaacacccgggagctgttttgtcctttgtggagcctcagcagttccctctttcagaactcactgccaagagccctgaacaggagccaccatgcagtgcttcagcttcattaagaccatgatgatcctcttcaatttgctcatctttctgtgtggtgcagccctgttggcagtgggcatctgggtgtcaatcgatggggcatcctttctgaagatcttcgggccactgtcgtccagtgccatgcagtttgtcaacgtgggctacttcctcatcgcagccggcgttgtggtctttgctcttggtttcctgggctgctatggtgctaagactgagagcaagtgtgccctcgtgacgttcttcttcatcctcctcctcatcttcattgctgaggttgcagctgctgtggtcgccttggtgtacaccacaatggctgagcacttcctgacgttgctggtagtgcctgccatcaagaaagattatggttcccaggaagacttcactcaagtgtggaacaccaccatgaaagggctcaagtgctgtggcttcaccaactatacggattttgaggactcaccctacttcaaagagaacagtgcctttcccccattctgttgcaatgacaacgtcaccaacacagccaatgaaacctgcaccaagcaaaaggctcacgaccaaaaaagtagagggttgcttcaatcagcttttgtatgacatccgaactaatgcagtcacccgtggggtggtgtgggcagctggaattgggggccctccagctggctgccatgattgtgtccatgtatctgtactgcaatctacaataagtccacttctgcctctgccactactgctgccacatgggaactgtgaagaggcaccctggcaagcagcagtgattgggggaggggacaggatctaacaatgtcacttgggccagaatggacctgccctttctgctccagacttggggctagatagggaccactccttttaggcgatgcctgactttccttccattggtgggtggatgggtggggggcattccagagcctctaaggtagccagttctgttgcccattcccccagtctattaaacccttgatatgccccctaggcctagtggtgatcccagtgctctactgggggatgagagaaaggcattttatagcctgggcataagtgaaatcaccagagcctctgggtggatgtgtagaaggcacttcaaaatgcataaacctgttacaatgtaaaaaa

SEQ ID NO: 259741 - DNA, 1290 bp, Homo Sapiens
  misc_feature (240)..(249): n is a, c, g, or t
  misc_feature (414)..(440): n is a, c, g, or t
  misc_feature (644)..(675): n is a, c, g, or t
  misc_feature (766)..(779): n is a, c, g, or t
  misc_feature (1204)..(1212): n is a, c, g, or t
cggagagaacaaaaggtttggggctgggagggaaacaagtgaaacaaacaaaacacgaacacaaaccaaagcttttacctaaagacaaaatatgatttaaatgccaggtttcttaagttacagaagtatctttttaaaaagatctgcttttatacagaaattgaaggatgccatattatgagtgctttaagattttattctactgacttctaaaactgttaatatatctttttttaaatnnnnnnnnnngtttgctgtcttttttaaaaagcaaacctcaaactctctagccacagcagtaattaagattaaggtctgtcagtgggctgatcccctccaggtagcctccctcactccaagagaagatgcagagaaatatggatgacacatgcttgcattgtttttgtgtcaaannnnnnnnnnnnnnnnnnnnnnnnnnnatataaggcagcccaaaggtctgtggcagaaaacactgcaaatgactcagtgatacactacatttgcaatctctcatttatacaaaaaaagaaacaagtttccagtttgttttcaacaaaaacaacaaagaaaaaagggatggacaaaaaggcatttatacaaatctagggtgaggaatacaaagaaacttgcttttaataatnnnnnnnnnnnnnnnnnnnnnnnnnnnnnnnnctggttacagttaagaacataatttaacaacagatgaccataccctttgaggaaagctccaacaacctattttaaagaaggtaaaattggnnnnnnnnnnnnnngaatttttttttgttttaattaaaacctctccttacaaaataaataattttagcaagtggaatgtcttgaaggttaactgctggtgttctgagaggcacaggtgacagagcgagcaggcatctgccttccacatggggcccaggcaggcaaccgggggcagtgtgctcgggcacttattggctgctgaaacattcccagaacagatttcatctcctttgcttgccttttacctctttcttaagactgcagtgaacaagcaaaggcaggaggaaatgcactaaaagagtgcaaatgtttcccagcagcaccgttttaaggctcaaggtgtttttctcttctttaaaaaatatatatacgataaagcttaccaaatgcttctctaggactattgtttactcccataattgcaaaataaggcctttannnnnnnnnaaggcagctcctccttaaatcgcaaagcctgaggaattaagcaaagttaacccccaaaactgatcacataacacaatt

SEQ ID NO: 259742 - DNA, 923 bp, Homo Sapiens
atatttgacaggctgcgcgcgggcgagctgccgcggagcacccggcaggggctgacagcatggcctcgcccgacccgcccgccaccagctacgccccgtccgacgtgccctcgggggtcgcgctgttcctcaccatccctttcgccttcttcctgcccgagctgatatttgggttcttggtctggaccatggtagccgccacccacatagtataccccttgctgcaaggatgggtgatgtatgtctcgctcacctcgtttctcatctccttgatgttcctgttgtcttacttgtttggattttacaaaagatttgaatcctggagagttctggacagcctgtaccacgggaccactggcatcctgtacatgagcgctgccgtcctacaagtacatgccacgattgtttctgagaaactgctggacccaagaatttactacattaattcggcagcctcgttcttcgccttcatcgccacgctgctctacattctccatgccttcagcatctattaccactgatgcacaggcgccaggccaaggggggaaatgctctttgaaagctccaattattggtccccaaaagcagcttccaacgtttgccatctggatgacaaacggaagatccactaaaacggccacggggattaacaagaacctccctgcagactgagcgatgacaccacactttggtttggacatttaaaattcactcctgccggatagggaggaaaccttttcctttcttcccgggggaaaaccacctggtctccttgggaaattattctggacccaatggaactttggcccctttccaaaagcaactccacattccaagagcccttccacctccccctaaatgggaagaaattccctaagccccccaccaagtgcgcccaagtcctggtttttgggggggatata

SEQ ID NO: 259743 - DNA, 802 bp, Homo Sapiens
agatcatcatctccacggggaagctgtacttctccaggtgcaggccagccagcttctggtgggacgagttctcctgtttgttctgcagttcctccagctccttcaccagggaccaggtgctgatgaagctctcgttgagcagggtgaggatgggcgaactttccaggacagtctcccggagagtccgccctgaacctcagcaggactggtcatccagggccccccacagcaggattgagtgcaccagcttgttctcagccttggctcggtcgaaggcctcagtgaacggcaagtaggagaccttcttgaaggggtacatggccacctccaggcgccgggcagcctcctcccagctcagctcctgctgccactgtgatctcctgcataacacaaactgcacggggctcgccctgacgggcagggtggcatgtcggatcagtgcatgccatcctgcatcacaggatcatcggagggcacagaggggcccgtggcctccagctccatctggggtatgtagccgatgtccacctccatgttgctgctttcactggccccgtaaagccactccatgtccacattcagagacctgtggttgggcacgaagagccggaagtcgcggacgtgggtggcgtctttggagaggatgatgtggccggtgaactgagcaggggagaaccaaaaggggaagtcgggcggctcactgagctggaactcggcatggatccggaacatcacagtgtagtagaagtcgctgatggcagtcaggcaggccacagctctctgaggggcaaagcgggtcttc

SEQ ID NO: 259744 - DNA, 724 bp, Homo Sapiens
  misc_feature (23)..(23): n is a, c, g, or t
ccgaagcttccggtggccggctntagttaggagctatggctaaacatcatcctgatttgatcttttgccgcaagcaggctggtgttgccatcggaagactgtgtgaaaaatgtgatggcaagtgtgtgatttgtgactcctatgtgcgtccctgcactctggtgcgcatatgtgatgagtgtaactatggatcttaccaggggcgctgtgtgatctgtggaggacctggggtctctgatgcctattattgtaaggagtgcaccatccaggagaaggacagagatggctgcccaaagattgtcaatctggggagctctaagacagacctcttctatgaacgcaaaaaatacggcttcaagaagaggtgattggtgggtggccccttcctccccccaacatcagtctgctgcagctgccagaaaacatgcctactactaccagcagaaagggagcagagcccagagcatcaccaggagtgcctgctagtgtactggcagcttgccaccccctcctctcccttcacccagacacgtggtagggatggaaaaggattcttcacagagcactctggcacaccatatcggagaaaaattgatagattagttaatggtttttcttgaattcgagaagcatagatctgttctccatattggtatgttctccctcaaccaagatcttctaaaaagaaataatattttagtcttctgcttgaggagttgactgt

SEQ ID NO: 259745 - DNA, 422 bp, Homo Sapiens
ctaccagcaccttaatctcccacatccaagttaaaattcatccaacactcaatctcccagctatcctgactgctcctatacaggtatctctcccactatatatatatcaagtgctattagtggctattatttgttgggttacacaaagccagaaatcatctacatctactctcttttcttctggttttgaatagcaaaatgcaacagggagatgttctcagatagagggagaacaacaaaaagaagggtccatgctgaacaaacttgtttgctttgaaatcggaagttctaggaggaggtattctgacagtgggccagggaaaacctcctgcccgcagaattttgtctaaatccaccccaggacagagttattccaacagccgggtatgggtgcagaccaggggcttttcggaaaggttggg

SEQ ID NO: 259746 - DNA, 897 bp, Homo Sapiens
  misc_feature (13)..(13): n is a, c, g, or t
  misc_feature (86)..(86): n is a, c, g, or t
  misc_feature (181)..(181): n is a, c, g, or t
gagatttgccatncattgctttctcgtctttttcggaaaagacacaggccagactttgcttaggctaaagctgacgtcttttaaangcatgcaacaagaatatccccacaatgattgtaaagaagccacttcaaagtaccaatgacatcgtcaacaggcatatcttgccactccttaaggngaatagctgaacaagttaaaactgatgttgtaaagaatacataatatattggagtcacaatggaagtgttgaatatatccagggccctatttaggtaattaatctgtgtgctcacacagacgatgaggctcagcagcagaatccaagccaggggatgccgcagcacaggcttccctgcaaacagctccttgatagcaatgcccaggcccttcacacaggagactgaaaacgcgccgattacagagcagattgttatgtacacaagaatgtttgtctgtccatggcgaggacccaccacgaagattaatatcaaggccacaatgaccacaagggttgcaaagaccacaaaacctggatcacctagcttgtgagacatttcacttaaagtctcaatctcctcttcctttggagcatgaatgaccataactgtagatcctagaatacttagcaaacacccaattttcccatgaagattaagtctttcattgagaaagtatgaagaaagaatggcacttactagcacgctgagagctcctagtggagtcactagagtggctggtgcaaacgcatacgcagcgaagttggccacctcaccagctcccattgacagcagtccagcccaccacaaccatcccttaagatatgcatggccaccttgacctgctctcatagagcctttcctggcaagtcgaaggaggcccttttttttcaaaatg

SEQ ID NO: 259747 - DNA, 1539 bp, Homo Sapiens
attggctctggcgacctccgcgcgttgggaggtgtagcgcggctctgaacgcgctgagggccgttgagtgtcgcaggcggcgagggcgcgagtgaggagcagacccaggcatcgcgcgccgagaaggccgggcgtccccacactgaaggtccggaaaggcgacttccgggggctttggcacctggcggaccctcccggagcgtcggcacctgaacgcgaggcgctccattgcgcgtgcgcgttgaggggcttcccgcacctgatcgcgagaccccaacggctggtggcgtcgcctgcgcgtctcggctgagctggccatggcgcagctgtgcgggctgaggcggagccgggcgtttctcgccctgctgggatcgctgctcctctctggggtcctggcggccgaccgagaacgcagcatccacgacttctgcctggtgtcgaaggtggtgggcagatgccgggcctccatgcctaggtggtggtacaatgtcactgacggatcctgccagctgtttgtgtatgggggctgtgacggaaacagcaataattacctgaccaaggaggagtgcctcaagaaatgtgccactgtcacagagaatgccacgggtgacctggccaccagcaggaatgcagcggattcctctgtcccaagtgctcccagaaggcaggattctgaagaccactccagcgatatgttcaactatgaagaatactgcaccgccaacgcagtcactgggccttgccgtgcatccttcccacgctggtactttgacgtggagaggaactcctgcaataacttcatctatggaggctgccggggcaataagaacagctaccgctctgaggaggcctgcatgctccgctgcttccgccagcaggagaatcctcccctgccccttggctcaaaggtggtggttctggcggggctgttcgtgatggtgttgatcctcttcctgggagcctccatggtctacctgatccgggtggcacggaggaaccaggagcgtgccctgcgcaccgtctggagctccggagatgacaaggagcagctggtgaagaacacatatgtcctgtgaccgccctgtcgccaagaggactgggggaagggaggggagactatgtgtgagctttttttaaatagagggattgactcggatttgagtgatcattagggctgaggtctgtttctctgggaggtaggacggctgcttcctggtctggcagggatgggtttgctttggaaatcctctaggaggctcctcctcgcatggcctgcagtctggcagcagccccgagttgtttcctcgctgatcgatttctttcctccaggtagagttttctttgcttatgttgaattccattgcctcttttctcatcacagaagtgatgttggaatcgtttcttttgtttgtctgatttatggtttttttaagtataaacaaaagttttttattagcattctgaaagaaggaaagtaaaatgtacaagtttaataaaaaggggccttcccctttagaataaatttaagcctgcgctttc

SEQ ID NO: 259748 - DNA, 900 bp, Homo Sapiens
ggtccggaatttctcgggatcgcgcgttgggaggtgtagcgcggctctgaacgcgctgagggccgttgagtgtcgcaggcggcgagggcgcgagtgaggagcagacccaggcatcgcgcgccgagaaggccgggcgtccccacactgaaggtccggaaaggcgacttccgggggctttggcacctggcggaccctcccggagcgtcggcacctgaacgcgaggcgctccattgcgcgtgcgcgttgaggggcttcccgcacctgatcgcgagaccccaacggctggtggcgtcgcctgcgcgtctcggctgagctggccatggcgcagctgtgcgggctgaggcggagccgggcgtttctcgccctgctgggatcgctgctcctctctggggtcctggcggccgaccgagaacgcagcatccacgacttctgcctggtgtcgaaggtggtgggcagatgccgggcctccatgcctaggtggtggtacaatgtcactgacggatcctgccagctgtttgtgtatgggggctgtgacggaaacagcaataattacctgaccaaggaggagtgcctcaagaaatgtgccactgtcacagagaatgccacggggtgacctggccaccagcaggaatgcagcggattcctctgtcccaagtgctcccagaaagcaggattctgaagaccactccagcgatatgttcaactatgaagaatactgcaccgccaacgcagtcactggggccttgccgtgcatccttcccacgcctgggaactttgacgtggaaaaggaactcctgcaataacttcatctatggaagctgccccgggcaataagaaacagttacccgctctgaaggaagcctggcatgctccccctgctttccgcccgccagaaaaatc

SEQ ID NO: 259749 - DNA, 881 bp, Homo Sapiens
tcggctgcagcctcggacctagctccggccctcggtctatccggttgcatcctccctccctgttccggatcttatcttgcgccagcgcctactccaggatcccgtagccagacctcaagccatggctggtcccttctcccgtctgctgtccgcccgcccgggactcaggctcctggctttggccggagcggggtctctagccgctgggtttctgctccgaccggaacctgtacgagctgccagtgaacgacggaggctgtatcccccgagcgctgagtacccagacctccgaaagcacaacaactgcatggccagtcacctgaccccagcagtctatgcacggctctgcgacaagaccacacccactggttggacgctagatcagtgtatccagactggcgtggacaaccctggccaccccttcatcaagactgtgggcatggtggctggagatgaggagacctatgaggtatttgctgacctgtttgaccctgtgatccaagagcgacacaatggatatgacccccggacaatgaagcacaccacggatctagatgccagtaaaatccgttctggctactttgatgagaggtatgtattgtcctctagagtcagaactggccgaagcatccgaggactcagtctgcctccagcttgcactcgagcagagcgaccagaggtggaacgtgttgtggtggatgcactgagtgggcctgaagggtgacctggctggacgttactataagctcagggaaatgacagaagctgaaaagcaccaacttattgatgaccactttcctgtttgataagcccggggtccccccttgctgactgcaacaaggaatgggttcccagaaatgggccaaaatggctcgtaggat

SEQ ID NO: 259750 - DNA, 1448 bp, Homo Sapiens
gggtccgcccgcccgcctgccactagctcattgcgcctctcctgcagtctgattggcaccggctcccattccggctccagcctccaatccgacccccatttcggctgcagcctcggacctagctccggccctcggtctatccggttgcatcctccctccctgttccggatcttatcttgcgccagcgcctactccaggatcccgtagccagacctcaagccatggctggtcccttctcccgtctgctgtccgcccgcccgggactcaggctcctggctttggccggagcggggtctctagccgctgggtttctgctccgaccggaacctgtacgagctgccagtgaacgacggaggctgtatcccccgagcgctgagtacccagacctccgaaagcacaacaactgcatggccagtcacctgaccccagcagtctatgcacggctctgcgacaagaccacacccactggttagacgctagatcagtgtatccagactggcgtggacaaccctggccaccccttcatcaagactgtgggcatggtggctggagatgaggagacctatgaggtatttgctgacctgtttgaccctgtgatccaagagcgacacaatggatatgacccccggacaatgaagcacaccacggatctagatgccagtaaaatccgttctggctactttgatgagaggtatgtattgtcctctagagtcagaactggccgaagcatccgaggactcagtctgcctccagcttgcactcgagcagagcgacgagaggtggaacgtgttgtggtggatgcactgagtggcctgaagggtgacctggctggacgttactataggctcagtgagatgacagaggctgaacagcagcagcttattgatgaccactttctgtttgataagcctgtgtccccgttgctgactgcagcaggaatggctcgagactggccagatgctcgtggaatttggcacaacaatgagaagagcttcctgatctgggtgaatgaggaggatcatacacgggtgatctccatggagaagggtggtaacatgaagagagtgtttgaaagattctgccgaggcctcaaagaggtggagagacttatccaagaacgtggctgggagttcatgtggaatgagcgtttgggatacatcttgacctgtccatctaacctgggcactggacttcgggcaggagtgcacatcaaactgcccctgctaagcaaagatagccgcttcccaaagatcctggagaacctaagactccaaaaacggggtactggagggaggggacactgctgccacaggcgggcggctttggataatttcctaattggggacgactaaggcaatcagaaggggggagctgggtggcactggggccatccgatgggagataaaacttatttggaattgatttggggaaacgcggggatctgggac

SEQ ID NO: 259751 - DNA, 1116 bp, Homo Sapiens
  misc_feature (412)..(412): n is a, c, g, or t
  misc_feature (663)..(663): n is a, c, g, or t
  misc_feature (810)..(810): n is a, c, g, or t
  misc_feature (812)..(812): n is a, c, g, or t
  misc_feature (1056)..(1056): n is a, c, g, or t
  misc_feature (1063)..(1063): n is a, c, g, or t
atgaggaaaagagggctgagggcctggaggtgggctcgcaccccctcgaacccacctagatgtctcctcctccccagcctatgagttcagacttggggggctccatctgtccctccctgaggtccctcatcttgtccctgctctgattctgtcagcagatcctgaacactccttggtggggacccatgcctccaaggctgcccccaatgccagctgtcctggggaaactccccagaactctcggggaaaggcccgagaaccttcggaggaagcctccgggactcctcgccacctgctctgtttctctcccggccccactgccttcaggtatcaggaagagggcaggcccctgtgccccctctccccttcccagggcggccaacaatactccaccatggggcgcttccttacnttctctggaaactaagacattggactgaaggaactggcctgaggggggctgaccgggggcccgtgctgctgggagctctacgcacaagaggccgccggggtcacggacaggaacctcagcccagggtgctggcctttctccttcgcaggagtcccccaaaatccacacagcgactcgagcagccttcctgccgtttccaaggcctccggaagcaacaacccagttctcagttacctcctctggccggaacngcaacgttgtcctccagagctgctctgggcccagggctggctccgtgaccacctgatggacgtgctgggcagcatgggctcccaaggcagcatccccagctgctctcccaccccaccccagctgcccggcggctgggcccacgaggntnctggggacacttccataggaaatgggcctggcactttgtgattgccacgtgtttcctgttaagccgcctgcccccagtgcaaatctctgtgttttgctctctcctgaacaaaaatgtaaaccgacgccggaaagcaaatggtattcgaattacctttcttggcccataaagggtttttaacaaaggaacgtgtcttcactagggaacttagggacacttcattcgggcccgaggaccaacttcngggggtnaaaagggattaagggagaatcgtgttttgttaacgagtttacaggatttgttt

SEQ ID NO: 259752 - DNA, 503 bp, Homo Sapiens
  misc_feature (115)..(115): n is a, c, g, or t
  misc_feature (138)..(138): n is a, c, g, or t
aaaattcggcacgaagcagggctggctcccgtgacccaccctgatggaccgtgctgggcaagcaatgggctcccccaaggcaagcatcccccaagctgctctccccacccccacnccccagctgcccggcggctgggnccccacgagggctcctggggaacaacttccccataggaaatgggcccctggcactttgtggattgccccaccgtgtttccctgttaaagccgccctgccccccagtgcaaatcctctgtgttttgctctctcctgaacaaaaatgtaaaccgacgccggaaagcaaatggtatcgaatacctttcttgcccataagggtttttacaaagaacgtgtctcactaggaactaggacactcatcggcccgagaccaactcctggataaaaggaataaggagaatcgtgtttgtaacgagttacaggattgtttctttcctggattttaaacttttgttaaattgtgaaattatggaggagttttatag

SEQ ID NO: 259753 - DNA, 651 bp, Homo Sapiens
tatctattgataatcccctctccctccagaacacaaatcagagggaaagggggtgttcagctgtactaccaaatcaggaagatgtaaggtttacaaattggctaagaatcatggctctgtagccatttcaaccagaataattttattgctaatctgctttgtgtgacagcattccaggccagccagatgggactgccttgtctggaggctttgttcatctcgaaggacacacacttccacactgtttgtgagccctcccacctccacaacttcagttgtaaatcaagtgtgtggatctcaaagggtgcaatttatctttatataggaatacatttctagggcttccttcaagcccactctcttcaccctattttttcttatcttaaattgagagaaagagaattaatcttatactttgtcaaaacattttctaccatatttccagatgacatctgcgcttgaagagtcaaaggaatctgtgtctaatatcctgtttttaactgctgtaggggcaggatggaaaggatgatgggggctgccacaccactgattggccttttctttcacgtgattcatccttcctcattgtggcaaggagtttctttctctttttcttcctcctttgggatcattgtgtatgaaaagaaaaac

SEQ ID NO: 259754 - DNA, 1314 bp, Homo Sapiens
  misc_feature (946)..(969): n is a, c, g, or t
  misc_feature (971)..(981): n is a, c, g, or t
  misc_feature (984)..(1010): n is a, c, g, or t
aaaaaaagcgctccctccgcttccggccgagcccgcgccccccagaccccgagagctcgcagctccggcccggcggcgatggcgcggagcgtgcgcgtgctggtggacatggacggcgtcctggccgacttcgaggccggcctcctgcggggcttccgccgccgcttccctgaggagccgcacgtgccgctggagcaacgccgcggcttcctggcccgcgagcagtaccgcgccctgcggcccgacctggcggataaagtggccagtgtgtacgaagccccgggctttttcctggacctggagcccatcccgggagccttggacgctgtgcgggagatgaacgacctaccggacacgcaggtcttcatctgcaccagccccctgctgaagtaccaccactgtgtgggtgagaagtaccgctgggtggagcagcacctggggccccagttcgtagaacgaattatcctgacaagggacaagacggtggtcttgggggacctgctcattgatgacaaggacacagttcgaggccaggaggagaccccaagctgggagcacatcttgttcacctgctgccacaatcggcacctggtcctgcccccgacaaggagacggctgctctcctggagtgacaactggagggagatcttagatagcaagcgcggagctgcgcagcgggaatgagcggggatgccgcgggcagcagctggagctaaaggaagggcaggcccacaggggccaccgcagagccgagtcggggcggcatcgtgctggtgcctctggccccgtggagtggagcaggcagataccgttaagcgctgtgctaccgggccccaggcccagccacccggtacctcccgagaggctgtccctggaccctggctggcatggaaatacagtgggaaaaccagtcgggacctttaataaaagaccttggctttctaannnnnnnnnnnnnnnnnnnnnnnnannnnnnnnnnnttnnnnnnnnnnnnnnnnnnnnnnnnnnnaacatgttcggccgccctcggcccctcgaaaaacctttcctaaaaccattccgtttgggcccgcgggggccccagtagggtaaggggaacatgggcccatacctggttcccaaagggaaatcccggagccatggacttaagggcttggaattccccacccaaataaaaaaaccgcccggggggggaaacccaagccggttctggaaacaaatcccaaatatggaaatttcctgggggtcctttaactggggattttactccaccgggagagtcccaaaccgagagccctcaataatccaattta

SEQ ID NO: 259755 - DNA, 1177 bp, Homo Sapiens
  misc_feature (1065)..(1065): n is a, c, g, or t
tggtaccggtccggaattccgggatatcgtcgacccacgcgttcgggaagatgttaagatactgttgacccaggaaaatcccttttttagaaaactcagcagtgagacctacagtcaagcaaaggacctggcaaagggaagcatcgtgctgaagtatgaaccagattctgcgaatccagacgctctgcagtgtcccatcgtcttatgcggatggcggggaaaggcctccattcgaacttttgtgcccaagaatgaacggcttcattatctcaggatgatggggctggaggtattgggagaaaagaagaaggaaggggttatcctcacaaatgagagtgcagccagcaccggacagccagacaatgacgtgactgagggacagagagcaggagagcccaacagcccagatgcagaagaggccaacagtccagacgtgacagcaggctgtgacccggcgggggtccatccaccccggtgagcaggcccaaggcagcgggggcccacacccctcacacgcaaaactggcttcttctggtcactggtgtctgaaaccaaatccagagcagcctgtggcctgtaaagcatatatttctaatgactgcagactggtgggatcataggagccttctgaatgaccaggactgctttctttggagctgatgaaaatgtactcttttagcgtgttagaaatcacttgttttattttgtttctttggccaagctgggtctagtgtttcttttgctgggaatagactttcaaaagttgtacttctatcaagaaacaaaactggccttgcagaaatttcaggtcttttgttaagcctgtattggtctttaaggtgcagtattttttaaattattatttatagaaaagaatctattaatttcttgggggaagggtggtataaccctttaataattacctttgaggctgccccctccaggggtggtggtcattaaacattgcaggggggggttaaatattctgaaggccctcagatgaacttttgtggccctttttggaaattaaagggggtaaaaattagaccttctctcccacaaagnaaagaaaactgggtaatccgtggcaatttgtgtccaatacctataatttaaattggagggcggggggcacctttatgggtggctctcttttctatttggaaaatgggggagg

SEQ ID NO: 259756 - DNA, 630 bp, Homo Sapiens
  misc_feature (452)..(542): n is a, c, g, or t
agcccgggctgcacgtgtggggggcagctcaccgggaagcaggcaggagtgggggacaggctgagcccagtggccatcaggccttggggtacatgccaaggggcaagagagcgctatggctttccttctgttcctcctctcccagccccaccacttacaatggtctccattgggggctgtgtgtccctttgtccagtggggctgaactcaggctggttgcagggagggggctcccagggcattccagtgtcctagggtagaggcagagtgccctagagcaaggtcccaggagagctcatcttgtcaggccaggagagtggggacaggacttctagctgggagaggacttctagctgtgtgtggcccattcttgaagaatggctgaaagggaggtgccatctcaggcagcacaccctgcctgcatgcccttggctgggctatgaaggcgcacnnnnnnnnnnnnnnnnnnnnnnnnnnnnnnnnnnnnnnnnnnnnnnnnnnnnnnnnnnnnnnnnnnnnnnnnnnnnnnnnnnnnnnnnnnnttcagggtgtgcatgtggagagggccagattgaggaggaggggtacagggttttccaggattagaaggaagccaagtttagctgcttg

SEQ ID NO: 259757 - DNA, 956 bp, Homo Sapiens
gggggaggggtgggcagggatacctctttgtttcttttcaccccgaaatacaacagcccataacagagacttcctcggaccccactaacagggcaaggaacaagaagactacaccgctcatcacaaaccctgcctgtatcgaaagccactttcctgctctgaagctactgcctcttagagaaagggaatagctctttatgggctgggggtgagggcccctccccagggtccctgttaatttctggccttggtgctcaggcctgtccacagcctcccttgtctatgtctctatccatgcttaaggggcccggacaggatttcccaaaccagccgaggccccagcacccgccgtctccccagaagccccctcctccttcccccatgggtcatatgttgaaagtctattttaaaaactatgttccttgccgtagattgcagagctaatttatcacgtttctctcctgtgagaccccccttttatatgatatatccagaggaagttttgtaatataaaacaggacgcccacactgatggttttgcactggtttttgtgaatgtttcttacaaaaagaaaaaggaacaaagaataaatagtgaccgtgaagaaaggtggtcttgatttggggttggggatagactggggcgaggcagaagcttgacaagaggctgctgatggctggagggagctgggagaagaggcgttccaggtcaccccaaacggagcgtagagcgggcccacaccgagctttcctcgctggacttaagggcccctgtccctcacccctctgccactgcctccttcccaactgtaaatctccttgccttagagtccccctgccctccaagctgtacggtctgtcttccagatcttacctgacctgcagccccctccctcaccctcacctgcaggctccactacaattagctctaaccaagccacccagtattttgtgag

SEQ ID NO: 259758 - DNA, 1077 bp, Homo Sapiens
  misc_feature (377)..(415): n is a, c, g, or t
ccaggctggtaccggtccggaatttcgggatatcgtcgacccacgcgtcgacacactccacagccaagcactgccacggtcctccaggacctgggaagcaaaggcacaggcccacggtggccagccattgtggtgccgccccagcttctggatacagccttttgggtaaacactgggaactccagaagttgtggggagagtggggaatcagacagccgcctctaggggctgggttctgctggggcctccttgttggtgctgtaggcacccgccagggagcagggacccgacttgcagacgcattgcccggtactaggaaggagtgaggtgtgttcccaccgtacacttcccacacgagctgcggctgccagcctcgnnnnnnnnnnnnnnnnnnnnnnnnnnnnnnnnnnnnnnncgacttatagccagttacagctccccggctcttctgtgtggcagagcgtcgtttccgggccctcagggctggggagctcagttcccattgcttgtgctcagggctgagtcttaaacgaagggtttgccggccctaacgctgcagcgcgtgcgcggtgagaggccctttttgagcctgtttactcctgtggccttgggcagaacagtaaatactctgtgcacggaggaaagacatgcccaagaggaaggaagtactgaccatcggctgactgtgagcagcttagcaagggagccctagctccctgggaaaggcggtgaacttgagtctcaaagatgcagtgcctggggctttcctagggtccctggctggatccgagtgttcgtgtgtgggcccagaagggtccccggttgagatgcaaacctgattgcaccagaacgggccaaaggagagctacaggcccaaaacggggacccatctacggtctatcagcgtaagggagcacaaagaccaaagattcgtaggcaggggcgcaccgcctgcggcaaggtgcaacagcggcgaaagcgcgaggcgcaacatgtaaagtacaccacccaaaagggaggagtcatgtggaaccgggcagcacaggcgcagaagaaccgcacggcgcccacgacgct

SEQ ID NO: 259759 - DNA, 1031 bp, Homo Sapiens
  misc_feature (377)..(480): n is a, c, g, or t
  misc_feature (592)..(621): n is a, c, g, or t
ttgtggtttgagcctttcactggatgtgagctacttgagagcagggtttatgccttcatcagcgtgacccctgtgcctgcagcctcataggtgttaatctgtaattttaaattttgacaaaagcattttcacagccctgccacataagatctagtttttatttctagagtgctgctatgaataattactatagctgctgtccatcttgcccatccattaaggtaccttctcacaaacatttctaatctactggctggagtgcagtggtgcagtctgtagctcactgcagcctcaaactcctaggctcaagcgatcctcttgccctggcctcccatgtagctgcaactataggtgtgtgccactacacctggctaatnnnnnnnnnnnnnnnnnnnnnnnnnnnnnnnnnnnnnnnnnnnnnnnnnnnnnnnnnnnnnnnnnnnnnnnnnnnnnnnnnnnnnnnnnnnnnnnnnnnnnnnngccaccaggcaccaggtgtgatctaccacacctgtctaaaaagtatgtatttttaaatttttttgtagagacaggatctcactatgttctccagctggtctcaagctcctgnnnnnnnnnnnnnnnnnnnnnnnnnnnnnnagtgtgagccacctgtgcctagtcactttaattgagatattggcaagtcaactgccatgcagagcccagggcactggttatattcagtaagaaactgaactcagcactcagaattttaaattaaatcaatgatcttcaagtatttgcccactttcgagtacagctaattggataatctcaaaccctttagtgaaaatatcttaaatgcattgagaatattttctaattacctgtgtatgctacagtacagacattaattctataaacatgttcataggtcttccccctcgccccgcccgtcttctaagggcattttctttttagtgagttcatgaatgtttaacggttctggtgcaaagctttcttgcattctgagcataaaaataataaaacccacttatatttgcttg

SEQ ID NO: 259760 - DNA, 599 bp, Homo Sapiens
gggaagcgccgccgcggtctgcggaatgtcaactattcacatggaggcggaggtcgataagctggaactgatgttccagaaagctgagtctgatctggattacattcaatacaggctggaatatgaaatcaagactaatcatcctgattcagcaagtgagaaaaatccagttacactcttaaaggaattgtcagtgataaagtctcgatatcaaactttgtatgcccgctttaaaccagttgctgttgagcagaaagagagtaagagccgcatttgtgctactgtgaaaaagactatgaatatgatacaaaaactacagaagcaaacagacctggagctgtcaccactgactaaagaagagaaaactgcggcagagcaattcaaatttcacatgccagatttatgaagaaatggacttggaaaggaaattctaacagagaagagcttaattccggagaaatttaggaagatgtcttgttaacccttgatgtctagagattgggggctggtgaagggggtttggcttcaatgactggataatgatatctttcatgagagagattataagaagaagggcagataatatatgaaataagttc

SEQ ID NO: 259761 - DNA, 521 bp, Homo Sapiens
caggatccatgctctcccagaggacgcctctcacacacatggggcggcagtcatgtgacactcccaggggcattctcaccccgcggacagtggaagcccctcagggggtgcagatcagagtgctgcaggagagagagggcgctggctggtgcgaagccgtccgaggtgcagcacagcccacaaggcctgccagtgtctttcccgaggacacgcgaatcctggggggctcactccggcaaagaggacgagacactgcaccaaggacagggcctgacctctctggccgccttccccggggcctcagtttcccccgatggtgagagtggagccgaccatgcgccctgctgtggactcacccggcgccctggcgtcgagtggcggcggagacctgacagacagcgtgggaaaaatcaagatgtctgcagatttcgagagatggggtgcggtggcgtgcgatggcgaaggacggcgagggacggcgaaggactgaggccacacgacaaggaagctacgctcgtttt

SEQ ID NO: 259762 - DNA, 1685 bp, Homo Sapiens
  misc_feature (776)..(776): n is a, c, g, or t
gagcaggagactgagaaggttatgctcattaaatattgtcattgtaacacggaatggaaatcatgatccttgcccatgggcactgagctgaaagaaagaggaacctcacatgaggctttcctagagaccaggatgttgggtgagtgggcgtgcacttctcaagtgggcaaggaagaactgcttttctccagctgacatgctctcaggggtgaagaagtttagcttaaaatacctgatggcgctgcataaactggggatttgggaactgagtttttagctctgtgacacacaacataaaaaacaaaaatcccagtatccattagctaaattcggattaaaatctgaaatgtttttatggagttgccaacaggctggaatgtacctgatacaatttaatctgcttttatttctttggctgtcttccaaaccactttcttcctgtaattcttaagttggctagttctccttcctcagaaaaattacccctaagaatcttcctaatagtgagggtgtacttccgaatagaagagtccttcggctgaaatggcatctccaaggcctacagttcgaatggggtctttacacaccaatactggtgtgaagtggaaggatattccctctctgtgccattctactactggcttgtttgggtttaatacaatccctggagcctgcctccgaatgggaagtcatgaactcttggggtgccctcagagacactcggctggtgtctatggtttctgtggcgcaggcctgtgtcccagccacacgagctnccctagccacggctgccagctggttggcccagtgtccatccacagttgcccaggatgtggtagaccagcgtgtggaaatggatcctggtgagatccgaggctctgcttttactcctcccatgttctttcaagatccagaagaggatgtcactgaccatgcccacatcaggaaacaccgtcccaggaagagagagaagagtgaggtccagaggctgactgggtgagaaataacagctcctgttcattcagcccaagggaagtcaccgcgggaaagacctgctgatggacaatgctgctcatgagctccctgttagtcatactggccagctctaggtgaactggaataccagtggggatgtcagaaaaggaggttacaacctccaagagtctcttcctctggagctccttgctttgtccctccatcatgtgcaatccagagaggaccaccaggtctggctgaaactcctccaggctagacacaaacacctccagcatattcatggccccgttggagaggtcgtgagagaagatgaatcggttggcatggggagcttttaactggccccactcctcccctgcttgatactctaaaatgaggtggaactcatccacttcctgcaatgactctggtggaacaaagacattgtcatcaagaagctcatgtagctttggaccaactggaccgcaaagaagaaccccactgccacgcggcgccagcgccggactggccgcacgataagcgcgtcccaggctgccgccaaccggccctcgggggagacgggtcccgggggcgcaggcgcgggccccagacacagcgagctccagagagagcgcagcgccgagcctggcagctctggctccagcaggaagacgcagcccacggccagcgccaggaagcccgcgtacccc

SEQ ID NO: 259763 - DNA, 478 bp, Homo Sapiens
cttccgcgggctagcgggcggtgggggcgccagcagcgcggaaggcgggcacgcgggccatggctccctgggcggaggccgagcactcggcgctgaacccgctgcgcgcggtgtggctcacgctgaccgccgccttcctgctgaccctactgctgcagctcctgccgcccggcctgctcccgggctgcgcgatcttccaggacctgatccgctatgggaaaaccaagtgtggggagccgtcgcgccccgccgcctgccgagcctttgatgtccccaagagatatttttcccacttttatatcatctcagtgctgtggaatggcttcctgctttggtgccttactcaatctctgttcctgggagcaccttttccaagctggcttcatggtttgctcagaattctcggggcggcacagttccagggaggggagctggcactgtctgcattcttagtgctagtatttctgtggctgcacag

SEQ ID NO: 259764 - DNA, 956 bp, Homo Sapiens
  misc_feature (625)..(625): n is a, c, g, or t
gcacccagttcacgcgccacagctatgtgtccccgagccgcgcgggcgcccgcgacgctactcctcgccctgggcgcggtgctgtggcctgcggctggcgcctgggagcttacgattttgcacaccaacgacgtgcacagccggctggagcagaccagcgaggactccagcaagtgcgtcaacgccagccgctgcatgggtggcgtggctcggctcttcaccaaggttcagcagatccgccgcgccgaacccaacgtgctgctgctggacgccggcgaccagtaccagggcactatctggttcaccgtgtacaagggcgccgaggtggcgcacttcatgaacgccctgcgctacgatgccatggcactgggaaatcatgaatttgataatggtgtggaaggactgatcgagccactcctcaaagaggccaaatttccaattctgagtgcaaacattaaagcaaaggggccactagcatctcaaatatcaggactttatttgccatataaagttcttcctgttggtgatgaagttgtgggaatcgttggatacacttccaaagaaaccccttttctctcaaatccagggacaaatttagtgtttgaagatgaaatcactgcattancacctgaagtagataagttaaaaactctaaatgtgaacaaaattattgcactgggacattcgggttttgaaatggataaactcatcgctcagaaagtgagggggtgtggacgtccttggtgggaggacactccaacacatttctttacacaggcaatccacccttcaaaagaggtgcctgcctgggaagtaccccattcatagtcactttcctgatgatggggcggaaaggtttcctgttagtccaggccctaatgctttttgggcaaataacctaggcctatcctggaaggatccgaggtttggatggaaagaagggagaaccgtcattc

SEQ ID NO: 259765 - DNA, 1031 bp, Homo Sapiens
  misc_feature (83)..(171): n is a, c, g, or t
  misc_feature (186)..(195): n is a, c, g, or t
  misc_feature (523)..(544): n is a, c, g, or t
  misc_feature (555)..(802): n is a, c, g, or t
attacagtcgcccaccaccatacctggctaattttttgtatttttagtaaagacagggtttcatggagaaaccaatatagaannnnnnnnnnnnnnnnnnnnnnnnnnnnnnnnnnnnnnnnnnnnnnnnnnnnnnnnnnnnnnnnnnnnnnnnnnnnnnnnnnnnnnnnngcctggcctaaaaannnnnnnnnncttcatctgggttttagctttgaaaacaagtttctccaaatttacagatttcctgatgatgttgggtctgaactcaccaacttgattaggtctttaggggccgagggacatagccagcgtgcacaggtgactggatggaggggcaggtgaggtggatctagcagaggtggcttcgcctttgaccttcatgctggtctcggctgaggtgacacgctagtgacagcccaatagggggttacccttattgagtaaaatacttcagatcggacggctcaatcttagttggcctccaattaatcttttatgcttagggattaaatgtgtggannnnnnnnnnnnnnnnnnnnnnggagacggaannnnnnnnnnnnnnnnnnnnnnnnnnnnnnnnnnnnnnnnnnnnnnnnnnnnnnnnnnnnnnnnnnnnnnnnnnnnnnnnnnnnnnnnnnnnnnnnnnnnnnnnnnnnnnnnnnnnnnnnnnnnnnnnnnnnnnnnnnnnnnnnnnnnnnnnnnnnnnnnnnnnnnnnnnnnnnnnnnnnnnnnnnnnnnnnnnnnnnnnnnnnnnnnnnnnnnnnnnnnnnnnnnnnnnnnnnnnnnnnnnnnnnnntgcgtgagctagaatgccttgggcctggtttaaaatatccaaacatgtgcggggaacccaccatagcctttctgtctagggaaaaaaattaccatttccatgaaatgggtggaggccacttttccggaataaaaaacagcggggggaaacctgatccattttccctgggccccttttggaaaagggctgccttcccaaaacagatttttcccggcctctcctgagaggg

SEQ ID NO: 259766 - DNA, 894 bp, Homo Sapiens
  misc_feature (748)..(749): n is a, c, g, or t
  misc_feature (758)..(758): n is a, c, g, or t
  misc_feature (763)..(774): n is a, c, g, or t
gctaggaagaggccgcgtggggcgaaggcggcgcttggctggtggggcccgcggcgggattttcccgggcggcgagagcggatctatcttgggatcccatggctttctttactgggctctggggccccttcacctgtgtaagcagagtgctgagccatcactgtttcagcaccactgggagtctgagtgcgattcagaagatgacgcgggtacgagtggtggacaacagtgccctggggaacagcccataccatcgggctcctcgctgcatccatgtctataagaagaatggagtgggcaaggtgggcgaccagatactactggccatcaagggacagaagaaaaaggcgctcattgtggggcactgcatgcctggcccccgaatgacccccagatttgactccaacaacgtggtcctcattgaggacaacgggaaccctgtggggacacgaattaagacacccatccccaccagcctgcgcaagcgggaaggcgagtattccaaggtgctggccattgctcagaactttgtgtgagttgagcccaggcctctggttgcaggactcgtgaatggagcagttctgagaaccacccttttgctaagggagcttgggagccacatggctgctcccttcacactgggtaacagtgtagtatcctgtgagagaataaatgtattcatttatgtgtttttccaaaggctttctggggatgtgggaaaaataaaatacacctgaagcaggccaannccccacaanacaannnnnnnnnnnnccctggttgggccgccctcggcccctcgagaaacctttcttaaacccatttcttttggggcccgggggccccgtaggggaaggggaacctgggccataacctgtgtttcctaggaggaac

SEQ ID NO: 259767 - DNA, 1219 bp, Homo Sapiens
  misc_feature (801)..(809): n is a, c, g, or t
  misc_feature (848)..(856): n is a, c, g, or t
  misc_feature (1095)..(1104): n is a, c, g, or t
  misc_feature (1194)..(1194): n is a, c, g, or t
aaatctcatcttcttttccagtagaaaatagtttgtgaaatgatgagggcattttatctgcttgctgtgaccagcgtgtgtacacataaaccttaacaagactacaagtatattccagaaggaaatcattttagttatgaactaaataataaaaattagaacttcaaatgcgatggtcttgactattagaccagatttagtagctccatatctaagatttttctacctgcccctcttcagtacagggatggctggctgctcaacacactcctcctccccttttttcctttctttaagctgtgtacagtgaaaattgtctttactgtatttttgttctctggtaatgtaataagcatgatggtgccttctattaatacatcattccagtcttgctggtaattttgtacagtatagtgtatgaattgctgtgctgcaaagccaaacagctgcaaaatgttgaaaaatcatcgaaatgtataaaaattgcagtatctttaaaatcagtaaaatggactagcatattatttaccttgttcttcagttaacaactttgtgttctctgtgggagggagggagtcctgtgtgtttgtggggagagggaaggaggaagtcagttatttgagtaagcctctagttgacttttctcttagcctgaatgtggacgttgaaacatatcacttcaggggcttgaaaaagtcagtcaacttgacgtacatttttattggacatttaaaagcaggcagaattctataaatggccaagtaagccctgaagtgaaggatactgcaaatttttcggagnnnnnnnnncgccagctcctttgaagggtttggcatttttcctaattnnnnnnnnnaagggaaacctgttcattccattttttgcccaattcccttgaaacttgatggtcaaacaaccccaagtgggcctccccgtaaatttaaagtcttgggaacgaaaaacctttttaattttttaccctggaaatccttttaaaaccaattttctggggaagcaaaaatttttgtaaacccgggcttggaaataaatttggcccaggcccttttaaaataaaaaaggtttcccgttttaaannnnnnnnnnagattttgggggcaaacaaccctcttatccccaaattttttatatagccctgggggagacccttacccaagttattctttaccccgggtntttttcctggaaaaggattttccaa

SEQ ID NO: 259768 - DNA, 970 bp, Homo Sapiens
  misc_feature (673)..(907): n is a, c, g, or t
actacaaccagtgtttattcttgatttgtcaccactcttttcatgtcttgttttcttccacatgttaaatatataataaccaaaactttactaacatacgaatgaagaaaacatgcgcagcatgtatgcatggcaggtagtgaggaaatctggccagctgactggttcctttaccaaggtttgcagagtaggttgtgtttgaacaccttctgtgggtctgtgtcatttccaagttgaagaatttcagccaaagagcaacatgtcacattgattaaagatggttaatgacacagaaacatttctgttaatactaagggaaaaggctgttcttttatttatttatttttcctgagtcctcacttttttcttctctgacaaatgtttgaaattcagtgaaataccaaaggagtcaaggatgaaggggacacaggatggaatcagaaaaaacataaatggaatccaggcagttctatgagacaacactgatatatctccttgataaagaaaaaatgtacagaatatttaatgagtctgtcttgccccaaaagggaaaaacacaagtagctaagccatttgcagagaggaaaaatgtcatggaaaaatgaaaaatctctctaatgtctatagcacatgaaatatctaagtaggtgggtgcagtggttcatgcctgtannnnnnnnnnnnnnnnnnnnnnnnnnnnnnnnnnnnnnnnnnnnnnnnnnnnnnnnnnnnnnnnnnnnnnnnnnnnnnnnnnnnnnnnnnnnnnnnnnnnnnnnnnnnnnnnnnnnnnnnnnnnnnnnnnnnnnnnnnnnnnnnnnnnnnnnnnnnnnnnnnnnnnnnnnnnnnnnnnnnnnnnnnnnnnnnnnnnnnnnnnnnnnnnnnnnnnnnnnnnnnnnnnnnnnnnnnntccacctcaaaaaagaaatatttagcaaatattaaaggacaagagggaatatctgtttaaaaa

SEQ ID NO: 259769 - DNA, 400 bp, Homo Sapiens
  misc_feature (138)..(154): n is a, c, g, or t
gactcgcctctgtgataacgatagacatgggttgcccctccttcctctggcacagatgaataatatttcccacactgacttgaagtatagtccatgaattcagccattgttctgaaggaagcactaagggttgggggnnnnnnnnnnnnnnnnnccgggagaacgcgctgcgggccggctgccggctgtttatataggtggggcgcctcccgggcaaggacccccatgcagcctttgggacgctccagggcatgccagtccaccgccctcctcttggccctctccagcacttctagagccagccttgctgaacgctgcagcgaacgtcggtccaccccattcagcgctgcggccgccaaacagttgtccatggctccccggctcactcgtcaaggcgcat

SEQ ID NO: 259770 - DNA, 508 bp, Homo Sapiens
  misc_feature (374)..(428): n is a, c, g, or t
tggctaatagaacaacaggcacatttttaatgtgttcattcttcaaaatgtgctcaaactgtctctaagactcttccagtcgctgtttgtctgtactgtccacaacatacaccagcccatcggtgttctcacagtaacagccccaaacagttctcattttttcctgtcctccaacatcccagactgtgagtgaaagattcctttccaactcgatcatttccacattgaaacctattgtagggatggtggtaatatccttagcaagctttaatttataaaggagagtagacttcccagctgagtcaagtcccaaaagaagaacttgggcttgtttggtttgcggatttttagaacccagcgaacccatttcagcnnnnnnnnnnnnnnnnnnnnnnnnnnnnnnnnnnnnnnnnnnnnnnnnnnnnnnngaatggccagagacaatgtgtcctttctggatctcacatgaaaatgttaggaagaaagaagaaagcaaattcttcatgct

SEQ ID NO: 259771 - DNA, 401 bp, Homo Sapiens
aaggagagataagttatagggagctggatttcaaaacgtggtccaagattcaaaaatcctattgatagtggccattttaatcattgccatcgtgtgcttgtttcatccagtgttatgcactttccacagttggacatggtgttagtatagccagacgggtttcattattatttctctttgctttctcaatgttaatttattgcatggtttattctttttctttacagctgaaattgctttaaatgatggttaaaattacaaattaaattgttaatttttatcaatgtgattgtaattaaaaatattttgatttaaataacaaaaataataccagattttaagccgtggaaaatgttcttgatcatttgcagttaaggactttaaataaatcaaatgttaac

SEQ ID NO: 259772 - DNA, 1245 bp, Homo Sapiens
gtaacccacgggtgcgcgcccacgaccgccagactcgagcagtctctggaacacgctgcggggctcccgggcctgagccaggtctgttctccacgcaggtgttccgcgcgccccgttcagccatgtcgtccggcatccatgtagcgctggtgactggaggcaacaagggcatcggcttggccatcgtgcgcgacctgtgccggctgttctcgggggacgtggtgctcacggcgcgggacgtgacgcggggccaggcggccgtacagcagctgcaggcggagggcctgagcccgcgcttccaccagctggacatcgacgatctgcagagcatccgcgccctgcgcgacttcctgcgcaaggagtacgggggcctggacgtgctggtcaacaacgcgggcatcgccttcaaggttgctgatcccacaccctttcatattcaagctgaagtgacgatgaaaacaaatttctttggtacccgagatgtgtgcacagaattactccctctaataaaaccccaagggagagtggtgaacgtatctagcatcatgagcgtcagagcccttaaaagctgcagcccagagctgcagaagaagttccgcagtgagaccatcactgaggaggagctggtggggctcatgaacaagtttgtggaggatacaaagaagggagtgcaccagaaggagggctggcccagcagcgcatacggggtgacgaagattggcgtcaccgttctgtccagggatccacgccagggaaactgagtgagcagaggaaaggggacaagatcctcctgaatgcctgctgcccagggtgggtgagaactgacatggcgggacccaaggccaccaagagcccagaagaaggtgcagagacccctgtgtacttggcccttttgcccccagatgctgagggtccccatggacaatttgtttcagagaagagagttgaacagtggtgagctgggctcacagctccatccatgggccccattttgtaccttgtcctgagttggtccaaagggcatttacaatgtcataaatatccttatataagaaaaaaaatgatctcttatcaattagcactcactaatgtactactaattgagcaacctacgcactcagttgactacgtaaatctgtcaggtcttttgtgatttcctctgatgcaggagaggaaaaattgtaattgatgaaaataatgaatgaaaatcaacagatgaataaatggttctttataagtgtcaaa

SEQ ID NO: 259773 - DNA, 577 bp, Homo Sapiens
ggaaggcgcgcggatttggcccctcttctcacatcagcgggtccaggcccaaccgacagactatgggggctccggcaaccaggcgctgcgtggagtggctgctgggcctctacttcctcagccacatccccatcaccctgttcatggacctgcaggcggtgctgccgcgcgagctctacccagtcgagtttagaaacctgctgaagtggtatgctaaggagttcaaagacccactgctacaggagcccccagcctggtttaagtcctttctgttttgcgagcttgtgtttcagctgcctttctttcccattgcaacgtatgccttcctcaaaggaagctgcaagtggattcgaactcctgcaatcatctactctgttcacaccatgacaaccttaattccgatactctccacatttctgtttgaggatttctccaaagccagtggtttcaagggacaaagacctgagactttgcatgaacggttaacccttgtgtctgtctatgccccctacttactcatcccattcatacttttaattttcatgttgcggagcccctactacaagtatgaagaaaa

SEQ ID NO: 259774 - DNA, 2479 bp, Homo Sapiens
gtttccggtcaggttaggccgggggggtgcggtcttggtcggaaggaggtggagagtcgggggtcaccaggcctatccttggcgccacagtcggccaccggggctcgccgccgtcatggagagcggagggcggccctcgctgtgccagttcatcctcctgggcaccacctctgtggtcaccgccgccctgtactccgtgtaccggcagaaggcccgggtctcccaagagctcaagggagctaaaaaagttcatttgggtgaagatttaaagagtattctttcagaagctccaggaaaatgcgtgcccttatgctgttatagaaggagctgtgcggtctgttaaagaaacgcttaacagccagtttgtggaaaactgcaagggggtaattcagcggctgacacttcaggagcacaagatggtgtggaatcgaaccacccacctttggaatgattgctcaaagatcattcatcagaggaccaacacagtgccctttgacctggtgccccacgaggatggcgtggatgtggctgtgcgagtgctgaagcccctggactcagtggatctgggtctagagactgtgtatgagaagttccacccctcgattcagtccttcaccgatgtcatcggccactacatcagcggtgagcggcccaaaggcatccaagagaccgaggagatgctgaaggtgggggccaccctcacaggggttggcgaactggtcctggacaacaactctgtccgcctgcagccgcccaaacaaggcatgcagtactatctaagcagccaggacttcgacagcctgctgcagaggcaggagtcgagcgtcaggctctggaaggtgctggcgctggtttttggctttgccacatgtgccaccctcttcttcattctccggaagcagtatctgcagcggcaggagcgcctgcgccctcaagcagatgcaggaggagttcccaggagcatgaggcccagcttgctgagccgagccaagcctgaggacagggagagtctgaagagcgcctgtgtagtgtgtctgagcagcttcaagtcctgcgtctttctggagtgtgggcacgtttgttcctgcaccgagtgctaccgcgccttgccagagcccaagaagtgccctatctgcagacaggcgatcacccgggtgatacccctgtacaacagctaatagtttggaagccgcacagcttgacctggaagcacccctgcccccttttcagggatttttatctcgaggcctttggaggagcagtggtgggggtagctgtcacctccaggtatgattgagggaggaattgggtagaaactctccagacccatgcctccaatggcaggatgctgcctttcccacctgagaggggaccctgtccatgtgcagcctcatcagagcctcaccctgggaggatgccgtggcgtctcctcccaggagccagatcagtgcgagtgtgactgaaaatgcctcatcacttaagcaccaaagccagtgatcagcagctcttctgttcctgtgtcttctgtttttttctggtgaatcgttgcttgctgtggacttggtggaggactcagaggggaggaaaggctgggccccgagtacaacggatgccttgggtgctgcctccgaagagactctgccgcagcttttcttctttttcctcatgccccgggaaacagtctttcttcagaattgtcaggctgggcaggtcaacttgtgttcctttcccctcacctgcttgcctccttaacgcctgcacgtgtgtgtagaggacaaaagaaagtgaagtcagcacatccgcttctgcccagatggtcggggccccgggcaacagattgaagagagatcatgtgaagggcagttggtcaggcaggcctcctggtttcgccactggccctgatttgaactcctgccacttgggagagctcggggtggtccctggttttccctcctggagaatgaggcgcagaggcctcgcctcctgaaggacgcagtgtggatgccactggcctagtgtcctggcctcacagcttccttgcaaggctgtcacaaggaaaagcagccggctggcaccctgagcatatgccctcttggggctccctcatccagcccgtcgcagctttgacatcttggtgtactcaatgtcgcttctccttgtgttaccccctcccagtattaccatttgccccctcacctggccttggtgaggctttaagtgcaagaacagatggggctgttttccccacctctgagtagtgggggggcactacacacggtctttttaatggcgtttctgcccgaatggtcacctcgccccttgggagggagaaggggcccagggcgacaatttagggggcccggacacgcaatacatgtgggccaaaaagggggggtaaacaagggggacagacaccggaaggccacggcgataaagaggggacagaaaagggtggaccgggggcacacgacaatgcatg

SEQ ID NO: 259775 - DNA, 473 bp, Homo Sapiens
  misc_feature (38)..(38): n is a, c, g, or t
  misc_feature (67)..(67): n is a, c, g, or t
aagccctcgcccccctgaaaggaacgcaagtgtggaancccactggccctagtgcccccggcctcanagcttcccttgcaaggctgtcaacaaggaaaaagcaagccggctggcacccctgaagcaaaatgccctcttggggctcccctcatcccagcccgtcgcagctttgacatccttggtgtacctcatgtcgcttctccttgtgttaccccctcccagtattaccatttgcccctcacctgcccttggtgagccttttagtgcaagacagatggggctgttttcccccacctctgagtagttggaggtcacatacacagctctttttttattgcccttttctgcctctgaatgttcatctctcgtcctcctttgtgcaggcgaggaaggggttgcctcaggggccgacactagtatgatgcagtgtccagtgtgaacagcagaaattaaacatgttgcaaccaaatatt

SEQ ID NO: 259776 - DNA, 837 bp, Homo Sapiens
tctctctcacgcctagcgcaatggcggcggccgcggcggagcagcaacagttctacctgctcctgggaaacctgctcagccccgacaatgtggtccggaaacaggcagaggaaacctatgagaatatcccaggccagtcaaagatcacattcctcttacaagccatcagaaatacaacagctgctgaagaggctagacaaatggccgccgttctcctaagacgtctcttgtcctctgcatttgatgaagtctatccagcacttccctctgatgttcagactgccatcaagagtgagctactcatgattattcagatggaaacacaatctagcatgaggaaaaaagtttgtgatattgcggcagaactggccaggaatttaatagatgaggatggcaataaccagtggcccgaaggtttgaagttcctttttgattcagtcagctctcaaaatgtgggactgcgggaagctgcccttcacattttctggaactttcctggaatttttgggaaccagcaacaacactatttagatgtcatcaaacgaatgttagttcagtgtatgcaagatcaggaacacccgtcgatcaggacgttatctgctagagctacagctgcatttatacttgcaaatgagcataatgttgctctgttcaaacattttgcagacttgctaccggggattcctacaggcggtaaatgactcgtgctaccagaaatgatgattctgtccctaaaatccctcgttgaggattgcagatactgttccaaagtattgcgtactcacttggaagcaatctacagctaagtctaagttgtgtggagacactagcctcaag

SEQ ID NO: 259777 - DNA, 655 bp, Homo Sapiens
aagatgttttgttttaataatatgctcctggcacaaagctaggagtaaatgtgactccaaagggagttcagttaatctctgaaatgcacaaaacctagctattttctccctctcatcacagtctgagtctggtccattgctaccccaattctctggggacataaaaccaggctggaaagggaccaggaagtttgaaatagtgacatatcatccactagtcccaagggctaaggaatagtgagtttattccggaaggaacttgggaagcttagtctaattagtgcctggggatgacctatgcaatcacaccgcttatgaccatcctagagagggccctgagcaccagcttgatcttagggatttccaaagtaacctgctttttgcctggatagggttaaaatagacctttcttgcctatccttgccttaacctatctgcctgaggttggcctgagattgtgagtcaacgactttgctatcttttcctcagtgttgaactttcattaagaaataaagtcctaggcttcttacagagagggggtccaaatgggtggaatgctcatcctgcctgggatttcaagggaattaggctcagaagattgggcccctaggctttttctggccttttgttagggggacagccaaaaggggggaaa

SEQ ID NO: 259778 - DNA, 1299 bp, Homo Sapiens
  misc_feature (410)..(418): n is a, c, g, or t
ggtacggtccggaattacgggatatcgtcgacccacgcgtccggatttttctctgtgtgtagtctctcatatttactcaaggagggaccaggatgatacagtcatctgaggttatgcttgcaaaaggctgacggtatggaatatgtttccatgtctgagtcttagaaactggctgctcattgttagaaagtgatgcttgtgagactatgtcttggggccaaaaataatcagagattttaaattgggcaagggacaaggtgctagaatcctaagctctggaaatatttcatgacactggtgtattcactcatgtgttccagatgtattctaattgtgtatgaaatgtatgtacacataagtgtgtgtgtctcaggaagtaggaaataaaaatggaagctattatgacctcnnnnnnnnngccaactttgagctaggataaaaattgggtaaaggacatttgcttacctgcaaatgaatcactgtggaaatgtgatcttcccatatcatcaagaaacttgttttctggatgaatactgggagaataaaatgagaactctggagtgagctaaattgatcccaattaagtttttctgcttagcagacagaaggtataattttttgacaccctttcccacctggtgcctatgctaggcttgtcctgagaacatccctcagtaacttgatattcacatgacctacaggatgtcccatctgcagggctgagtcagttggggaacaccagaggctacacagtagctcttcctgctactcggttaatgagcttggcaggttctttgtctcactgaattcttatcatggaaacagcagcagcagccgctaggaaatcttcaagtgtagtgtctgtgctaacccagtggtaaatcccttagatcccctgctggtctctggcagtctccttgattttgggtaccatgtatattttccgctttgactttaacgctttctaggatagggtaagcacccttaattcaggcactgtccattagcttcctttgcaaaggctacttatggccggtcacaatccagcactcagacagagccaaggcaatatcctcttgcccatggctatgatgtcagacagtggatgggctccagcaacaagagacaaaataactaaaggcctttgctctcctctgacattgaggcctggggcttacagtttggaatacaacatgtgaaggtttttgttgttgtttgtattttttagatgtaaacttgattattttattgctaatttaaaaataaaaatgactttgtattgattgtgaaaaacaacca

SEQ ID NO: 259779 - DNA, 1155 bp, Homo Sapiens
ctcttgcaccgcctgccgaatcaattcaacatggcagccatgcgctggcgatggtggcagcggctgttaccttggaggttgctgcaggcccgtggctttccacaaaattctgcacccagcctgggcctaggagcgaggacttattcccagggcgactgctcgtattcgcgcacggcgctgtatgatctgctcggcgtcccctccacagccacgcaggcccaaatcaaggcggcttactaccgtcagtgctttctctaccacccggaccgcaactccgggagcgcggaggccgccgagcgcttcacgcgcatctcccaggcctacgtggtgctgggcagtgccaccctccgtcgcaagtatgatcgcggcctactcagcgacgaggacctgcgcggacctggcgtccggccctccaggacgcccgcacccgaccccggctcgccgcgtaccccgccgcccacctctcggacccacgacggttctcgggcctcccccggcgccaaccgcacgatgttcaactttgacgccttctaccaggcccactacggggaacaactggagcgggaacggcgcctgagggcccggcgggaggcccttcgcaaacggcaggagtatcggtccatgaaaggcctccgctgggaggatacccgagacacggctgccattttcctcatcttttcaatcttcatcatcatcggcttttatatttaatcggagagagaagggaaggggagtgtccccagccaaccccccagaaacggccttttttcctgcctctgaacccttggccattgatagtctacctttgctgggatccgaaggaactgtactccccctgccctccccgacccgcccagcttagccgatgacctgcacatcgctccactgtggtccagaaaaggaggcctttccatgtctgagaaagaggccccacgctgtagagtcccgaaagcccaggagtgaagggggctcctggagtctctacggtgcttcttccagagtctggctccttgcttccagatgtggccaacttctggaacactcgctgtagctttattgtttagccccaagcaagatttatctcctcctgccccgcatgtgtatggtgggcctctgtaaccttgaaatgtgcaatgtgaccaattgttgactacc

SEQ ID NO: 259780 - DNA, 562 bp, Homo Sapiens
tcaatacagaccatctctggttccatgtctttattagcaaccacaaactggccatagatgagatctccaacctgcacatttggtctgtttcttttagttgcaccttcaaatgacaagtaagacaaagaagctggctcactccctccaacatcaactttgaatatatctccagatttagctgtcactatgccaatcacatggtctccttttactggaacataccgcttctgctgagagtccacccagtaaacaccgccgccgctgccactgccgggctccttgtgacggaggcggccgcacttggtgaccagcaggcggtccccacagcgccgaaggcccggaccgcatacaacgcgcacccgcgagcacgctctagcattcaggctcaacggtcgctccactgcacccccagggccttccgcgtcctcctgttccggcaggagcagctcctcacccgggagcaccacctgacctagtactgtgcgtgcagcgcgcgccctgctgcccgcgagagattcagccgcgacagacgcaggttcggccatcgcgggctccaccaaac

SEQ ID NO: 259781 - DNA, 741 bp, Homo Sapiens
  misc_feature (243)..(281): n is a, c, g, or t
aagaggatgtaacagaaccctatttcagaaacctaaggatcagggaggaaggaacactgaccgttttttctgggatgtttctgtgggggcaacagggatgaacaaaagaaatgttagcatgtcagagcatatgacaagtgaggggagacagaggtaggaagagggtgttctagccacaaggctaatgcatttgtgttcaaagagaagtctgggcaaaggaggggaaaccccccctcccccttnnnnnnnnnnnnnnnnnnnnnnnnnnnnnnnnnnnnnnnggtttcatacaacacagtatcaaaaagtaaaaggaacacactaaatgcacaagctggtggcaagtaagtccacagcctattgtgataggtccatccagcatcaatcagatttcttctcatctgttatctcaaggttatttacagatgtgttgactaacaagagtctctcatgggaggatgggcaggcttcaatcattggtttcgggatctgtctgcgccatgtaggcatccaactcagcatccaggtgtccttttgttttcgacatatatgcatccaattgggttgtccagctgctccttgggtcaatacagggcgagcaagggcacctctccctcgtccacggcctcggcctcgggctccaaagccccctcttccccgacctatcataccccgacctctaccacccgattccggcacgacccatagctccaaggcctagggcccctcttccaggacctg

SEQ ID NO: 259782 - DNA, 1805 bp, Homo Sapiens
gagcgaggcctgggtggcgaattcggcacgaggagagtacaaagagtgccaaagacagaaaagcaaggccgcgtccatactagcaccatgactgtagcaatattaccccagcctactgagattaatctggtgattaatccgaaagatttgagaattgacactaagcgagccagtggagctggggggcagcatgtaaataccacggacagtgctgtccggatagttcatcttccaacaggtgttgtttctgaatgtcaacaagagagatctcagctgaaaaataaagagctggctatgacaaagttacgtgcaaaactgtacagcatgcatctagaagaagaaataaataaaagacagaatgctagaaaaattcagattggaagtaaaggaagatcagagaaaataagaacatataattttccacagaaccgggtcacagatcacagaataaacaagacgctgcatgatcttgaaacttttatgcaaggagattatctactggatgaacttgtacagtcattgaaggaatacgccgattatgaatctttagtagaaattatttcccaaaaagtttaagttgatttgttatttatagactttcgtagcttagaaaaattctacagtacatccacatagggtgaaagtacccttactctcttgaaaaacgttgagttaacacagttggaggtaatatgcatattctgaagtcatagataatttacacagatctctctcaatgcattagcaaaaatcatacaatatacagatggtcctcgatttacattgtggttaattcccaataaacccatcataagttaaaaatgcatataaccgttagcaacacagcagtctcctaattaatgacagcttgacttaacaattttccaactttaccatggtgtgaaagaggtatgattcctaagccctaaggagctcctcagcttgaaatggggctgcatccctataaacccatcataaagtcaaaaaatcctaaaacataagttggtgaccatctgtaatcatgatgtggtggtaaatcttggacgctaccttacaataactagacaaaggaaaatcatcctttgtcctgttctgtgtaaatatttaatgaatgatcaaaacttcagtttaaatattatgaaaaactttaaacataaagtagtagaaataagacagtaaatactgtatcctaatatccagtcaggatacagaaaccataccattaacttgaacagggataattttaatataaaaaactgttaactgataatggtattaacttttaagagggatgaaagagagctatgatgtcctaggactgagagtaccccaggaaagaatacccttgaaagggtctccccttccccatggtgaagtcaggcctaatgaagagagtggctacagcctactcagtgattgggaaattccctgtcttgccctgggccagagctggtgtaccgctggtggatcaggtcttacaagcaaagaacctcacactcccaactggtaagccagaagcctcttgctagggtgtgagcaaaacttggacaggaactctcagtagatgtttgtgtttgtcaagattctccagacaaacttccttaaaaggattggcttgtgttgttattattaagtctaacaagtccaaaagctggagtgtgaggcaagaggctggaaacccaggaaagctgatggtgcaaggtccagtccaaaggtatctgttggaggattctcttgttctgggaagaagacggtctttttttctcttcagaccttcacctgactggatcaagcccactaacatc

SEQ ID NO: 259783 - DNA, 1230 bp, Homo Sapiens
  misc_feature (712)..(712): n is a, c, g, or t
gggaacaaaatacgatgggagagggaagagatgatgccgaagtgtcatcctgactgactgtccctgcagtgcccatgggtcccgtgccttattcattctcctctctcatttccacgatgtctgtcacctcctctgtcggaggcatgtctgtcatggcagagtcttccccctccgtggccgactcattctccatcttctttttctgcttccggtagacatagcacgcagcgatggcgaaccatggtggattctcccacaaaacccgccaggagggagcccacgcccagggtcgcaccgtgcacccccaggtagggtaggaccacgaggctggcgatgaggacgatgatccgcagcacagagctgggggcaaggacgaaggttttcttcagtgtcatcagccacccggtgagatgcgccctcactgtgactggaactgggaagaaggagaagatccgcaaaggaacaacacagagttctgcaaaggcaaagtccactccgatgatgtctatcaagattttctcagacacgttgggtgtccaaaacatcacgaaacagagcgtgagtgacagagccatgcagacgaaggtgaacttcttgatgtgggctgccgtgactgtgttgctcgtgctcaccagtttgttgctggggttattcttgtcgaaagcaggatacacagcacggatttccgtcaaccagccgtatggcatgtganccacagggtatgtggctgtcaaaatcgccactgcctctgtggctgcagaactgccaccaaggtcccgggaaacaaagaggttgacaataggccgactgattctctgtgtggccagaattagagccaaaggccaccagaagctcagcatctttcttattgttgcatctccccccagctccgggccacttctgtcagggatgatgtcgtgaatgttcttgtagtagcccaggcacagggtggtgcagcgcacaagtgcgcccatgtacaaggagaggatcgggatgagcaggggctcccggcattccaggtgactgtgaagcaaaatggctacaaaaacaacctgagctatgacatctgagattgaggcacatcccaccaggaaactgtatttgtgttttaagagaatgccagcatgggtccatgccattgcgtccatgaaaggaaaggcggcgaggtacaggaaggcccttctcgtcttgctccccaccgactcgtccacatggtgcagtttattgcca

SEQ ID NO: 259784 - DNA, 1332 bp, Homo Sapiens; identical to SEQ ID NO: 13342

SEQ ID NO: 259785 - DNA, 928 bp, Homo Sapiens
agccaacatagagccctcagtgggatgagggtgaaactgctattgccggcggctcctgttttaccgcgtcagcatgctggtgcatttatttcgggtcgggattcggggtggcccattcccaggcaggctgctaccgcccctccgcttccagacattctcagctgtcaggtactctgatggctaccgcagctcctccctcctccgggccgtggcccacctgcggtcccagctctgggcccacctccctcgagcccccctagctcccagatggagcccctctgcctggtgctgggttgggggagccctgctaggccccatggtactgagtaagcatccccacctctgccttgtggccctgtgtgaggcagaagaggcccctcctgccagctccacaccccatgtcgtggggtctcgctttaactggaagctcttctggcagtttctgcacccccacctgctggtcctgggggtagccgtcgtgctggccttgggtgcggcactcgtgaatgtacagatccccctgctcctgggccagctggtagaggtcgtggccaagtacacaagggaccacgtagggagtttcatgactgagtcccagaatctcagcacccacctgcttatcctctatggtgtccagggactgctgaccttcgggtacctggtgctgctgtcccacgttggcgagcgcatggctgtggacatgcggaggggcctcttcagctccctgctccgacaagacatcaccttctttgacgccaataagacagggcagcctggtgagccgctttgacaactgacgtgcagggagtttaagtcatcccttcaaagctttgtcatctcccagggggctggcaaagctgtcacccaagggggcagggcttccctggggtcccctgtccattgctggccgaaacccccttcaggcttg

SEQ ID NO: 259786 - DNA, 560 bp, Homo Sapiens
agacccgcccgcccgagccggagttacaagagccgcctccgcgcacgggggcccggccactcggagctgctctgccgcggggactgcaccgcccgccctgccagacccgcccggaacggggctcgtcgccgccagtagccgcagcaccgcagccttgggcctcgcgccggctatggccgtgccctggggctgagccctcaggttgtgaccgagattcccgacgagagagactgaggggaagagaggaaggaggggcgggctcctggcaaggcattcgctcctgagcggaatcctgcaaagatggagaaggaggagacaacccgggagctgctgctgcccaactggcagggtagtggctcccacgggctgaccatcgcccagagggacgacggcgtctttgtgcaggaggtgacgcagaactcccctgcggcccgcactggggtggtcaaggagggggaccagattgtgggtgccaccatctactttgacaacctgcagtcgggtgaggtgacccagctgctgaacaccatggggcaccacacggtgggcctgaagctgca

SEQ ID NO: 259787 - DNA, 1049 bp, Homo Sapiens
  misc_feature (102)..(102): n is a, c, g, or t
  misc_feature (236)..(236): n is a, c, g, or t
cccatggtaaaaaggccccctgggctggccagcaaagggggccatcaggtggagaatgaaaaccagattctcccaagccaggggccagggaaaaggggctgnggaaccaccagagggggggcggaggggcagagctgacctgaccctagagaagagagaccatgcccaagaattatccaggtagaagaaacagagaaattaaaggggggtgtatgtccacccccaagggtgcccanaaggcacagtggcagtgaggcttgctctggcctagtcctccagcaaattccatcactgctgatggactgggcaccatttcagccgttctcagaggtagcccgcccaggccaggcatgctggaccacaggctcttgaccttgactgccctctgcttctggggctggcggtctcctcactcaggctccctcagcacagcaaccagctccctctgttctctgtgtagagcctgccaggcctgctgctgggcctggacctgtagctgcagctcctccacctgcctccgccctgccaggacggcatctgccagctgctggttctcggcctcctgtttctgcacatggcgccgcagggtgtcccgttgctgcaggaagtagggtgccataacactgtgcagatccttctctgggatcccgctggggcgccaggctggctctttgcggactttgccttcttccacaattttatccaaggcattcaagacagcttctaggttcccctcctctttgatgtcagagatttcctcccggatagatgtctgcaactgagctataaacttgtcatagatttgctgtgtcatcgcaggctgcaactggtagaagcacttatagcagtcagtgaatctctggtagctgccggcggcgaccagcttctgaagaaaagtgtccaccatggtgtcgaggagcttcaccctcgaaatggtagtgccgggtggcacagattccgaagacgacccctcatgccttttttcctcacagccgctgcctagattggcgctacttgcttcggccatgttgaagttgaacctccaaaaa

SEQ ID NO: 259788 - DNA, 1161 bp, Homo Sapiens
ttcgatgaaaatgaaattcctcaagagaatggcaatgcctcagtgatttcccagcagatcattcggtcttcaaccttcccacaaactgatgttctttcaagttcacttgaggcagaacacagattgttaaaggaaatgggctggcaggaagacagtgaaaatgatgaaacatgtgctcccttaactgaggatgaaatgagagaattccaagttattagtgaacagttacagaagaatggtctgagaaaaaatggtattttgaaaaatggcttgatctgtgacttcaagtttggaccgtggaagaacagcactttcaaacccacaactgagaatgatgacacagagacaaggtagcagtgatacatcagatgacgacgatgtgtgaaggatttcctaacagcttaagaaatcttagtgtgatacatctctcatacagtttggggtgaattgtaaaatcccaatccaaaaaccgcaaagagggatcttggtcggccgccctcgggcccctcgaaaaaagcttttctagaacccatttcgttttgggcgccgccgggggccccagtaaggggtaaagccgaaaacattgggggccataagccctgggttttccctaagcgaaaaaatcccctggggcccaattgacacctaagggggggcttttggggaattttcgtccccgcccaaattgtaaaagaaaagaaagccgccccgcgcggggaggggcgccagaaaaacccgcgggaaaagccccggttcttccccttgggcaaaaccccagagactttgcccccagagaaaattggggcgaaaaagttttttcccttgagaagagggggccgcagcctgtttgtaaccgcgggggggaatctctctatatttcgccgaacaccgggggggaagacgctcgcccccaagaagtctcggaagaccctctcccgaaaaattactgtgcacaaaaattttttcagggggcccccgccgggggcgcgacgtggggtgcagaagagatttcgatccttcgcggcgaagggcacaaaactgtggagagtccggagcaaacttctccccctctcttacatgggggtcttttttctcctggtgccccgcgaacacaggtggggtgaaaataacccccaactctcccacacagggaagagaggg

SEQ ID NO: 259789 - DNA, 1213 bp, Homo Sapiens
  misc_feature (47)..(89): n is a, c, g, or t
gtgtgctctatcactatgagctgactgtaggtcgaggtggcgttatnnnnnnnnnnnnnnnnnnnnnnnnnnnnnnnnnnnnnnnnnnnctgttcctgactctttcgtcttttggacctgttttgtcctgtgtttgttcttcttgctgctactcgcttgactcttcgttttgtgttctatgctgtttttcgttttttgtctctatgattgtcttgttcttcctgtggtcggttgtcttcgtgcgcctgtcctgtcgctggagtacgcctctggcccgtccttggtggtgttcgtgctgtctactgctgttcctctctgttttgctgttctatgttctcacgtctgctcttttggttgatgtgtcgtatgtcccagtgttgtgtggccctttctggttttttctccagggttgttctggtgcccccgttctgtctgcaattagggtctctttcttgttttcccatgttaagcttatgtctggaaggttccccgctgtcgtcttgtacttttatgtcgaccgcttcttgggtccttctcgcccctgcaaggctgggtcgagtgaagggctcatgccccgtctcccagtcacacacggtcttcctgatggcctgcaggacactctggatgacgttcttcttcttcttgatggcctgccgcagcggctccctaagggtcacctgggatgaagtcctcgcagtgcggcatagatcggtgtgtccggatggcgtggttgaacacgctgctccatcctgcccatcagcacctgcaggcctttgatcatggcgatcacctccactagggcaaacttctcctcgctggtgtagttgtagcgcgtggcacgctcgtactcttcagcgctgtcggggcagtccttgttggagtacttgtcggtggggtgcacaagcttccaggaatacacttccatcacgtgcgcgctccactgcgacacatgctgcaggccctgcagcgccaggtcgaagagcttgcggtactccgcgtccgtcttctgggcctcctggcggcccgagcccgtgaccacctcgctgttgctgtagcgcgccagctccgaaatgaagcgcatgtggtcctcgcggatctggatcatctgctcgcagatgttgtactgagggctgctgccggaggatgtgcacgtccatcgagatttatcgcacgcgtgggtcgacgatatcccgaaaattccggaccggtacca

SEQ ID NO: 259790 - DNA, 2138 bp, Homo Sapiens
  misc_feature (1768)..(1768): n is a, c, g, or t
  misc_feature (1779)..(1779): n is a, c, g, or t
  misc_feature (1795)..(1795): n is a, c, g, or t
  misc_feature (1896)..(1897): n is a, c, g, or t
  misc_feature (2060)..(2060): n is a, c, g, or t
  misc_feature (2073)..(2073): n is a, c, g, or t
agatgccaacatggcagcggttggggctggtggttccaccgcggcgcccgggccaggggcggtttccgcgggtgcattggagccggggaccgccagtgcggctcacaggcgcctgaagtacatatccctagctgtgctggtggtccagaatgcctccctcatcctcagcatccgctacgcccgcacgttgccaggggaccgcttctttgccaccactgctgtggtcatggcggaagtgctcaaaggtctcacctgcctgctgctgctcttcgcacagaagaggggtaacgtgaagcacctggttctcttcctccatgaggctgtcctggtgcagtatgtggacacgctcaagctcgcagtgccctctctcatctacaccttgcagaataacctccagtatgttgccatctctaacctaccagctgccactttccaggtgacataccagctgaagatcctgaccacagcgctgttctccgtgctcatgctgaatcgcagcctttcccggctgcagtgggcctccctgctgctcctcttcactggcgtcgccattgtccaggcacagcaaggccggtgggggaggcccacggccactggatcagaaccctggggcaggcctggcagccgtcgtggcctcctgtctctcctccggcttcgcaggtgtctactttgagaagatcctcaaaggcagctcaggctccgtgtggctgcgcaacctgcaactgggcctcttcggcacagcactgggcctggtggggctctggtgggctgagggtaccgccgtggccacccgtggtttcttttttgggtacacacctgctgtctggggcgtggtgctcaaccaggccttcggcgggctactggtggctgtggttgtcaagtacgctgacaatatcctcaagggctttgccacctccctgtccattgtgctgtccactgttgcctccattcgcctctttggcttccacgtggacccattatttgcccttggcgctggactcgtcattggtgctgtctacctctacagccttccccgaggtgcagccaaagccatagcctctgcctctgcctccgcctccgggccctgcgttcaccagcagcctcccgggcagccaccaccaccgcagctgtcttcccaccgtggagacctcatcacggagccctttctgccaaagcaagtgctcatgaagtgagggctggcaccaatgcggggacacaagggaggcggaatggcgtggagggcgctgggaatctgcaagaccaaagttaccactctcctgggcccgagctcctatagggtccgtaaacatggcatgctctatccccagcccaatgtacatcctctcgcccgcgttgctacacaaacaccaccctcgggacgccaaactatgacaacccattacctccctatacattaacccccccctccttcccaccgtaccagtgaggggtaatacatttacgcctctctcactccccccatagccctactcatataacccacaactacaaatcaatatcgatcgtacattcattgcgcaattactcaaccccgctcccccactaacctcacttcctcccgccacagcacaacgcaaccgctgcctcaccgtaccaacatgtacacttgcgtgataaaaattttcccacatgcttctctcacacatctctcgctcttctaacaaccattccataccgccatggactccgcgagtgcctccttcacacaccctagcatccattatgaagtacgcaatgatacccacgntaccccaagangaacaccggcccacantacggaggaataactaacactatagtacgcctcacgcacccagcagacacatcatatccacgatcatacgctgcacacatcatgttacgctatctcacatnntttacttcctatatatagctgagctcgcgtaatttgcactgctccatgatctgacacgtaacatacttctacacattgcatctcatacagacacacgctcactacagttaatcagcaccacctccattaaatagtataacacacctaaatcacaccagtagcnagatttagacatncacgcgaaccaagcaaactaactcgtctatatactctcctctcccctaatacccgatctcccaca

SEQ ID NO: 259791 - DNA, 520 bp, Homo Sapiens
tgggcagcgggaagtcttccagctcctcctgtgactcgatgtccagcagccgcagcgactggtcgttcacttgcagcagcatctcctgggtccagatcttctccttggagctcagctgcaccagcttccggatggcgtcgtccacagacgtgatggcttcgctcttgtccatgatgaatgtggccaggtgctggacgtggtactgcgaggtctcgtgcatgatgacgttggagttggaatacttcttcctctgctcaaacaggtccttggggctcatcttggccacaccgtcggaccggcccaggctgccattggtggcacccgggcagcagctcacggccccggactggctcatggtgtcttgggtggcggccagcgggagaagggcagacctcagtgtggccccggtctgaggccagtgcctgtcccacacctgcctccggcgccccgcgctcggcctgtcccctcggcgctcgccggtgcgtccgtctgttcgcgcactcggccggggcgccaggtc

SEQ ID NO: 259792 - DNA, 1031 bp, Homo Sapiens
atggccgtcgcccgggtccgcgcgtccgccgcgcgccggccgttaataggcttgctccctgagcgccccgcaccgacatggcggccgtcttcgctgtggtgactttaactctcggttttcggttatagccggccggcgctcacttgtcttcaggaagctcggagcctttggtggagccggggagaggaagggtgggtgcaagagtgaaaggcgagaggggactgcaagcatccgggtcggctcctggccggagcaagatggctgagggcgagcggcagccgccgccagattcttcagaggaggcccctccagccactcagaacttcatcattccaaaaaaggagatccacacagttccagacatgggcaaatggaagcgttctcaggcatacgctgactacatcggattcatccttaccctcaacgaaggtgtgaaggggaagaagctgaccttcgagtacagagtctccgaggccattgagaaactagtcgctcttctcaacacgctggacaggtggattgatgagactcctccagtggaccagccctctcggtttgggaataaggcatacaggacctggtatgccaaacttgatgaggaagcagaaaacttggtggccacagtggtccctacccatctggcagctgctgtgcctgaggtggtgtttacctaaaggagtcagtggggaactccagcgcattgactacggaacagggcatgaggcagccctcgtggtttctctggtgctctgcagacggggtgtcggggggatgaccaaaataggtattggctccaagggtggtccaccggtacccctgaggtaggcggaatcccgaaaaactaaggatggagcagcggggcagggagtggggcggaagaaccagtgtggcctctagggcatggagtagcacctacggcccacctggcgggaaggcgggagacacaccgggactttcgggggattgtaaggaaacctagacacacgggaagctggaaaaggactaaggacgacaaggcttctgggacaatc

SEQ ID NO: 259793 - DNA, 853 bp, Homo Sapiens
ttttttctaggattacccttgctctatggagaacagcgaggccagaaaaatgaacagcgcaaatttattggggaaacagtttcttaataaaatatttggtggtcactaagcccatgtactaataaactcagccatggacagcatattaaagaacaaaagtttaaaatatctaggaagccagctggtggccatcttctctaaaacccaaattgcatgtgcactgagaaaaatgttactgcttcaaaacaaccaaaaatgggaaaataactgaggtctagaaacagattttctctttctagactcccagcgggctcggccagcagttccttattcaaaatcaatgtgtctataatcaactctagtatgtccacagttcacccaaatgccagatacattaagactaccaaatacaaacctaaaatgttccccccaaaatttcccttaaaactgttccccaatacctgcaattcacagatataatttagcatttttgtttttatatactaatttaggcaaaacccccccgccactgaatcgtccaacaaaatgattaatttgatagaaacaaatttaaataactgcacatacagtttatgtttatacaacgtgtggctgctctacagagaaaatgcttgtctgtagacacactctcttaaaaatcctacaagccatcccacgccctcagtcaaggatcctggaggttccaggacaatctggagaggcgaggaagaaggtgccttccccatctgagatgctcaaagttgcgataaaatgctgccagcttccgaatggctgacctcgatatctgcggacgcgtgggtcgacgatatcccgtaattccgggccggtacca

SEQ ID NO: 259794 - DNA, 1242 bp, Homo Sapiens
gggcctcaggtctcattctgtgcctgtgaacatggcggcgcccgttgtcacggccccgggcagagctctgctgcgggcgggcgctggacggctgcttcggggaggcgtccaggagctactgcggccgcgacatgaagggaacgcccctgacctggcctgcaacttcagcctttctcaaaatcggggcacggtcatcgtggagcgctggtggaaggtaccgctggccggggagggccggaagccgcgcctgcaccggcgacatcgcgtctataagctggtggaggacacgaagcatcggcccaaagaaaacctggagctcatcctgacgcagtcggtggagaatgttggagtccggggtgacctggtctcagtgaagaaatctttaggccggaatcgactccttcctcagggactggctgtatatgcatcccctgaaaacaagaagctgtttgaagaggagaaattgctgagacaagaaggaaaattagagaagatccagaccaaggcaggtgaggcgacagtgaaatttctaaaaagctgtcgcctggaggtagggatgaagaacaatgtcaaatgggagctgaaccctgaaatagttgcccgccacttctttaagaatcttggtgttgtggttgccccacatacattaaagttaccagaagagcctatcacacggtggggcgagtattggtgtgaggtgacggtaaatgggcttgatactgtgagagtgcctatgtctgtcgtgaactttgagaagcccaagaccaaaagatataagtactggttagcccagcaagctgccaaggctatggcccccaccagcccccagatctaaatctactctccctccaaggcagcaaagcagaatcgggagcagtggagcagaaaatgtgcaagcaccctgatctcactcccagctctgaccaaatacagaattttagagaacatctgaagacatcagactgcactgcgtatacatgttgaattcttcatttttgccatctttaactgtcatcactggggcagggaagtcctgttccagaagtaccaggctgtagatttgataagctagatgcagtagaccgaaaccatccaaaacctgtttagcttcttcctccattggagtttattgggacaaacaggagagccagccattgtctccagtacttgcctcattctcatcatccaaactgaacatttgtatcccaagcagaaataaagagaatatgttctttttaaaaa

SEQ ID NO: 259795 - DNA, 1019 bp, Homo Sapiens
taggtagcgaggcctgggtggcgaattcggcacgaggcaggcgtgcccttgacaggcagggagggctaggctgtgcatccctccgctcgcattgcagggagatggctcagcgacttcttctgaggaggttcctggcctctgtcatctccaggaagccctctcagggtcagtggccacccctcacttccagagccctgcagaccccacaatgcagtcctggtggcctgactgtaacacccaacccagcccggacaatatacaccacgaggatctccttgacaacctttaatatccaggatggacctgactttcaagaccgagtggtcaacagtgagacaccagtggttgtggatttccacgcacagtggtgtggaccctgcaagatcctggggccgaggttagagaagatggtggccaagcagcacgggaaggtggtgatggccaaggtggatattgatgaccacacagacctcgccattgagtatgaggtgtcagcggtgcccactgtgctggccatgaagaatggggacgtggtggacaagtttgtgggcatcaaggatgaggatcagttggaggccttcctgaagaagctgattggctgacaagcagggatgagtcctggttcccttgcccgcgtgggaccccaatagaactcagcccttccatgccagcccttcctgctgcctccctcctgtctggctcctggggcccatgcttagagcccaggctccagccctgagtgcttccgagctggcggaactgcccaggggccatcagaggatggtggtgctgctgctgatccggggaccgctgtcttccctcccatacgcctttcatccctccttctagggcctatggcagttctcccaggatgtgtggcgagagcctgggccagcccacagcgttcctagtcaggcagccacaccttggtcctcatctctggtcccttccaatctgaaacctcgtgcctggctcgtctgccacctacatttctctttccagctgctgttttgtaaaaa

SEQ ID NO: 259796 - DNA, 384 bp, Homo Sapiens
  misc_feature (313)..(313): n is a, c, g, or t
ctgacaagagaggatgagtcctggttcccttgcccgcgtgggaccccaatagaactcagcccttccatgccagcccttcctgctgcctccctcctgtctggctcctggggcccatgcttagagcccaggctccagccctgagtgcttccgagctggcggactgcccaggggccatcaggatggtggtgctgctgctgatccggggaccgctgtcttccctcccatacgcctttcatccctccttctagggcctatggcagattctcccagggatgtgtgggcgagactgggggccagcccacagcgtttcctnagttcagggcagccacaccttgggtccttcatcttctgggtccctttccaattttgaaaaacttgttgcct

SEQ ID NO: 259797 - DNA, 1401 bp, Homo Sapiens
tgcttcgtcccactgcaccgcctggctgagggcgttaggggctgtgcctcttgtgagggccatttgggacctccctggggcactgcacaattgatagtgtaccaatagagggagactgggcgatctggaacagcacgtggtggggtcctgcttgtgtgctctgcgttcctctgtggcgtggccaggccggggcatggctcttacccggggagtggtgggcatctcgatgcttctttgccttaatgatggccacatctgggctgctctgcacccacgggagaggctggcccagctgcagactgcttagggacttctgtgtccatcctggggggtaagcccacgtgacccacattcttggcactatgaacagagaacatttgcctgttggcttctgaagtggtcagggccgtggctgacacctccaggtccgcctggcatgggacaccaagtggaaggcccaagcagctcatctgctcttgggaccaggggccagttgggttgggtctggtcacggcagagcttttgtggagggtcaggaagggtggagaggagctgggttgaagcggactgctgcggatgcaactcccagcttgcccaccgcgggctgtctgctctccctcctagcagctgtcacactgaagttttgtcctctgctgtctcctctggtcctgagatgagctgtgagcctaggtggccaaggcttcctgcattgcttccctgtgagtccaaggccttcccccaccactgggcagaggctggacagcacggacttctagagagagccgcgttgccagttcctctcccactcgctcgtccttatccaccacgctattatagtttccgttgtcctccaccagcatttcccttactctgaagttccggcattcacatcattcatgttttcttttgtcttttagctaaaggaaaagcattggcgatttgtctgattctggttttgagttactctttgttcagtaatgcactttattttattgtccaaagagagtcagagctaagcatacaggcttgggggtgagccctgctgtgagagttcaggccctgggaggctcagccacctcctcttgtgggaaggaggtctcagccccacctcgcatcttcacctgcccttggtgtggacacaccctctcatgctaccagcaccataatccagtgggggtgactgggtgcacacctgcccaggtgaacacagcggctgccagtctcctggtcccgagaggaggtggggcctggccctggctccctccaaccagctgctcctgggacacaggtgctcctgcttcggctctgtttcggctcacaggtgtgcatcactgggcttggatttgcattacattgaccccagccctgcagtggaacctaataaaagcgcctgaagcaaaa

SEQ ID NO: 259798 - DNA, 769 bp, Homo Sapiens
tgtaaggtgtagctttccgaaacacatgtccaacatgtgagcatgtaacaatttccaaagttcctccacactgccaaatcctaaaggaaatttctaggttttctcctccccaaatatccattccagcatcatatgttccaatttcctgaaagtaatctctgtctattgaaaaaaggcctcctgccatggtaggtgtcctgacaggaagagtccgatcacctttccttctgcccatttctctttggggaacaggataccagcgaaaattgagcttccagttgaacccaccataggtcatatcagagcctgccatgtactcaaaagtatcatcactgatcacatcgatgatgggacacaccactgttctcctgtcatgtttgatcctggccaagagaggctccagccatcccactgtacactcacaatgggcatccaggaaggtgatcacttggcctttagacacagcagctccttttaatctagctctgatcaatccagaacgttgttccattcgaattacatgaactggtacttttagttttttcacataactctctaaaggccttttcaaaaagtctctttcactggcatcatctactagaacaatttcttctatcatgtgtcttggtgagcgattaatgacactatggacagttcgcagaagtgtgctccaagcctcattgtggaaaacaatcaccacacttgttgtaggaagattatctggatacacctttgttttacacccttctaacctaacatctggtaaaga

SEQ ID NO: 259799 - DNA, 1060 bp, Homo Sapiens
  misc_feature (32)..(32): n is a, c, g, or t
acaggttttggatttattccatataaaatgtngtggtctcagaatatttctggcagggtgacgtttcgaagaagccactgctgggaccgacttccattgcagtctctaatgctgggcacctggctatcctcttctgtggctttatccaggcactgattactgttcacatgctgcagggttaatttcactgggtcatactcccagagttggttgccttttaggtggtggcatttgagcattgtaactgggccattaagtttggaaacatccaagcaaaggtcatctgttctaatttctttgttggcagtataagagaaaacctgattaccccccataccatggcaattaaaaattccaactttttcattctcttttctagccatgttatctagacactgattcgtttccacatttcgtatctctcccaatgagaaatagtgacgtggaatttgagaatcaggatatatattctctaggtaccaggaaaaaggtttgcattgtagtttgtgtcttagaccaactcttgacgatatatctccataatctacctttgtaacacctggagaaattatatagaagaaattcttgaattcatccatccacacttctgcaagtcgtctgttatttttattgataatctgccctgtgcctcctggaaacgtgtaaggtgtagctttccgaaacacatgtccaacatgtgagcatgtaacaatttccaaagttcctccccactgccaaatcctaaaggaaatttccaggttttctcttatactgccaacaaagaaattagaacagatgacctttgcttggatgtttccaaacttaatggcccagttacaatgctcaaatgccaccacctaaaaggcaaccaactctgggagtatgacccagtgaaattaaccctgcagcatgtgaacagtaatcagtgcctggataaagccacagaagaggatagccaggtgcccagcattagagactgcaatggaagtcggtcccagcagtggcttcttcgaaacgtcaccctgccaaaaataccccgagaccaaatttacaaaaaaaa

SEQ ID NO: 259800 - DNA, 722 bp, Homo Sapiens
agcccagtcgccgccgcccgcccacaaagcccaggcaggtgcaggcgcagccgcggcgagagcgtgtggagccgagccgttagcgcgcgccgtcggtgagtcagtccgtccgtccgtccgtccgtcggggcgccgcagctcccgccaggcccagcggccccggcccctcgtctccccgcacccggagccacccggtggagcgggccttgccgcggcagccatgtccatgggcctggagatcacgggcaccgcgctggccgtgctgggctggctgggcaccatcgtgtgctgcgcgttgcccatgtggcgcgtgtcggccttcatcggcagcaacatcatcacgtcgcagaacatctgggagggcctgtggatgaactgcgtggtgcagagcaccggccagatgcagtgcaaggtgtacgactcgctgctggcactgccacaggaccttcaggcggcccgcgccctcatcgtggtggccatcctgctggccgccttcgggctgctagtggcgctggtgggcgcccagtgcaccaactgcgtgcaggacgacacggccaaggccaagatcaccatcgtggcaggcgtgctgttccttctcgccgccctgctcaccctcgtgccggtgtcctggtcggccaacaccattatccgggacttctacaacccccgtggtgcccgaagcgcagaaccgcgagatgggcgcgggcctgtacctgggctgg

SEQ ID NO: 259801 - DNA, 1715 bp, Homo Sapiens
  misc_feature (1126)..(1126): n is a, c, g, or t
aggctggaccggtccggattcccgggatcagctgtcggctggaaggaactggtctgctcacacttgctggcttgcgcatcaggactggctttatctcctgactcacggtgcaaaggtgcactctgcgaacgttaagtccgtccccagcgcttggaatcctacggcccccacagccggatcccctcagccttccaggtcctcaactcccgcggacgctgaacaatggcctccatggggctacaggtaatgggcatcgcgctggccgtcctgggctggctggccgtcatgctgtgctgcgcgctgcccatgtggcgcgtgacggccttcatcggcagcaacattgtcacctcgcagaccatctgggagggcctatggatgaactgcgtggtgcagagcaccggccagatgcagtgcaaggtgtacgactcgctgctggcactgccgcaggacctgcaggcggcccgcgccctcgtcatcatcagcatcatcgtggctgctctgggcgtgctgctgtccgtggtggggggcaagtgtaccaactgcctggaggatgaaagcgccaaggccaagaccatgatcgtggcgggcgtggtgttcctgttggccggccttatggtgatagtgccggtgtcctggacggcccacaacatcatccaagacttctacaatccgctggtggcctccgggcagaagcgggagatgggtgcctcgctctacgtcggctgggccgcctccggcctgctgctccttggcggggggctgctttgctgcaactgtccaccccgcacagacaagccttactccgccaagtattctgctgcccgctctgctgctgccagcaactacgtgtaaggtgccacgggctccactctgttcctctctgctttgttcttccctggactgagctcagcgcaggctgtgaccccaggagggccctgccacgggccactggctgctggggactggggactgggcagagactgagccaggcaggaaggcagcagccttcagcctctctggcccactcggacaacttcccaaggccgcctcctgctagcaagaacagagtccaccctcctctggatattggggagggacggaagtgacagggtgtggtgggtggaanggggggaagctggcttctgctggccaggatggcttaaccctgactttgggatctgcctgcatcggtgttggccactgtccccatttacattttccccactctgtctgcctgcatctcctctgttgcgggtaggccttgatatcacctctgggactgtgccttgctcaccgaaacccgcgcccaggagtatggctgaggccttgcccacccacctgcctgggaagtgcagagtggatggacgggtttagaggggaggggcgaaggtgctgtaaacaggtttgggcagtggtgggggagggggccagagaggcggctcaggttgcccagctctgtggcctcaggactctctgcctcacccgcttcagcccagggcccctggagactgatcccctctgagtcctctgccccttccaaggacactaatgagcctgggagggtggcagggaggaggggacagcttcacccttggaagtcctggggtttttcctcttccttctttgtggtttctgttttgtaatttaagaagagctattcatcactgtaattattattattttctacaataaatgggacctgtgcacaggaaaaa

SEQ ID NO: 259802 - DNA, 522 bp, Homo Sapiens
atagggcgcctcccagcccgtctccccgctccagtttagaacctaattcccaattcccggaccgggcccagccctgggctcttactgtccgcttttgctgggacctgttccacaaatgggcgtcttctgccttgggccgtgggggttgggccggaagctgcggacgcctgggaaggggccgctgcagctcttgagccgcctctgcggggaccacttgcaggccatcccagccaagaaggccccggctgggcaggaggagcctgggacgccgccctcctcgccgctgagtgccgagcagttggaccggatccagaggaacaaggccgcggccctgctcagactcgcggcccgcaacgtgcccgtgggctttggagagagctggaagaagcacctcagcggggagttcgggaaaccgtattttatcaagctaatgggatttgttgcagaagaaagaaagcattacactgtttatccacccccacaccaagtcttcacctggacccagatgtgtgacataaaaga

SEQ ID NO: 259803 - DNA, 1239 bp, Homo Sapiens
  misc_feature (1067)..(1067): n is a, c, g, or t
  misc_feature (1104)..(1110): n is a, c, g, or t
  misc_feature (1112)..(1113): n is a, c, g, or t
  misc_feature (1133)..(1135): n is a, c, g, or t
tccggtgggctctgaaccctgaaaggctcgcgatgcctctacacaagtatcccgtgtggctctggaagcggctgcagctgcgggagggcatctgttcccgcctgcccggccactacctgcgctccctggaggaggagcggacgcccactcccgtgcactataggcctcatggggccaagttcaagatcaaccccaagaacgggcagcgggagcgtgtggaggacgtgcccattcccatctactttccccccgaatcccagcgggggttgtggggcggcgagggctggatcctgggccaaatatatgccaacaacgacaagctctccaagaggctgaagaaagtgtggaagccacagctgtttgagcgagagttctacagtgagatcctggacaagaagttcacagtgactgtgaccatgcggaccctggacctcatcgatgaggcttacgggctcgacttttacatcctcaagaccccgaaggaggacctgtgctccaagtttgggatggacctgaagcgagggatgctgctgcggcttgcccggcaggacccccagctgcaccccgaggaccccgagcggcgggcagccatctacgacaagtacaaggaatttgccatcccagaggaggaggcaaagtgggtgggcctcacgctggaggaggccattgagaagcagagacttttggaggagaaggaccctgtacccctgttcaagatctatgtggcggagctgatccagcagctgcagcagcaagcactgtcagaagccggcggggggtgcagaaaagagccagtgggccagtgaccacacagctcctccatgcctgaccaacaggcccagcttttccctgccaggccctttgcactgaggacacagatcccgggggagctgtgaaggcaaccggggggcagtgggtggatcctgggttcgtgtgctgcccatgcaccttccagccccgggggcagcttgggcagggatccccagggaggcctgggccgccccagaggttcctctcagggctggggcccccacgttttgcggcagtgtttcctttgggcccctggnggcccgggaaccaaataaaagtcctgggcccaggccnnnnnnnannaaataaacaccgacaaaaannnccctcccaaggggttcttttgttcgggggggcggggaaaagaggggaattggaatgggccccttgggccataaacttggtttcccgggaacccaaccttttttc

SEQ ID NO: 259804 - DNA, 1063 bp, Homo Sapiens
  misc_feature (758)..(767): n is a, c, g, or t
  misc_feature (817)..(827): n is a, c, g, or t
caaaccacttcttcccccctaccccccgccacgcgaggctgcggcgcacggtatgggtgtgtttgtgtgtatttgtgtggggagggcgtttggagggaaggttaccgggagctccgaggccgctggggaacagggatcccggtgacaaagatggggatatttcctctgtcttccacttggaaacctcaacccccgcttcaggctccctagatactttctggggcccaaccgaaggccgtagccatccaaagcgttcccagcctttctggggagtgaaacttacccccggggttcgtcctagaggagcgtgagcggggaatgcccaggtcaaccgggctgtccgaattccgccccggctcagcctccggcctcagtccgggagagagatctgcctgtcggtctgggctgggggaaacgcggcagtggcctgggccacaggtgagggcagagtaaccagtgggaaggctgcgttttcacgaaggactccgggtgaagctgcagagctgcctttgagcccctgactccttggctccctgcggtcggaggaaatcttgtaatggagccggctcttcgtctcactaacaagatgcctgacttcctcaggatcaaggggatcgaaaaatgttccgaattccactggggcaaggtcctcctggagaaatgttttccgcgaacatagcaggctcccattaagattttgcgacgcgcatcttatccgcggcccaataacacaccctgtgccacccccattgaaacannnnnnnnnngtgggaaccaaaaggacgccgggttaccccgcaatactccatcccgtatnnnnnnnnnnngcgttttttatggaagcaaacgcccaatgctcccccccgtggccggccccaaaaatggccactctctcggggcacacagggcaagcatgcgtcctttcctcccgggttaaagttcctgggaaattaaaacgcgcccgccccgtgttaacgaagggcgaacaccgcccgcgagctgaacagtcgcgccccccgggagtgtttatatagataagcgcacctttcctttgaagccaaca

SEQ ID NO: 259805 - DNA, 1238 bp, Homo Sapiens
  misc_feature (778)..(787): n is a, c, g, or t
  misc_feature (827)..(841): n is a, c, g, or t
  misc_feature (1102)..(1110): n is a, c, g, or t
agattccaccacaaagacctcagcgggatcaaagagtgcgagaacaacgaataaatattcctccccaaaggggacccagaccaatccgtgaggctggtgagcaaggtgacattgaaccccgaagaatggtgagacaccctgacagtcaccaactcttcattggcaacctgcctcatgaagtggacagaatcagagcttaaagatttctttcaaagttatgcaaacgtggtggagttgcgcattaacagtggtgggaaattacccaattttggttttgttgtgtttgatgattctgagcctgttcagaaagtccttagcaacaggcccatcatgttcagaggtgaggtccgtctgaatgtcgaagagaagaagactcgagctgccagggaaggcgaccgacgagataatcgccttcggggacctggaggccctcgaggtgggctgggtggtggaatgagaggccctccccgtggaggcatggtgcagaaaccaggatttggagtgggaagggggcttgcgccacggcagtgaatcttcatggatcttcatgcagccatacaaaccctggttccaacagaatggtgaattttcgacagcctttggtatcttggagtatgaccccagtctgttataaactgcttaagtttgtataattttactttttttgtgtgttaatggtgtgtgctccctctccctctcttccctttcctgacctttagtctttcacttccaattttgtggaatgatattttaggaataacggacttttaaagaagcnnnnnnnnnngactgaatttccttgcttactttgcatatacagactggannnnnnnnnnnnnnnacagccatttccccaaaggaatgtcttgcatattactgacatttggtatgtttcattcattggaatatttcttattttctacgtgtttgaaaagcctgtaagaaatacaggatttgataatattttgaaggcaggaaaaacccaaattgtttcttctttgagagtcatgactaccttctggtgtggagaaattgccattggaaaatttgacaattttgattctcactggtgtgtttaaaaactgaataaaaggaatagaannnnnnnnngataaaggatcacaaaacaattctaaaaccctaactgtttttaccatttgaaattttaattgtggataataggtttttaaaatgtcctagaatgcaaactgaataagctttttccttgaactggtaag

SEQ ID NO: 259806 - DNA, 3174 bp, Homo Sapiens
  misc_feature (74)..(74): n is a, c, g, or t
  misc_feature (109)..(109): n is a, c, g, or t
  misc_feature (124)..(124): n is a, c, g, or t
  misc_feature (138)..(138): n is a, c, g, or t
  misc_feature (263)..(263): n is a, c, g, or t
  misc_feature (406)..(406): n is a, c, g, or t
  misc_feature (436)..(436): n is a, c, g, or t
  misc_feature (550)..(550): n is a, c, g, or t
  misc_feature (555)..(555): n is a, c, g, or t
  misc_feature (750)..(758): n is a, c, g, or t
  misc_feature (1014)..(1088): n is a, c, g, or t
  misc_feature (1215)..(1225): n is a, c, g, or t
  misc_feature (1506)..(1515): n is a, c, g, or t
  misc_feature (1597)..(1618): n is a, c, g, or t
  misc_feature (1776)..(1784): n is a, c, g, or t
cgaggatgcgccacggggcgcgcgcgctcgggccgaccattcccgtcgcgctagcaaccgagctgcatcgggtngcggtgacgccgtcggacagactctgacgagtctncgcgcgcggttctcngcggcggagatgcntctaacacgcgcgcgcgcgggacacccgcgtctcgacgagtaatctatcactgcagcgcgggcgcgcctcaagagactctgcgccgcgggcctgtcgcgcggctgctcttagcaccggttctgcncggtcccgcgctcgccagcagccgctcgcgtctcagaacatgcagagagtggcgcgggcggtacgcgtcgtgtttatgatggacggcggcgatggtgggtatttgattatgttgcggctggtcttctgccgtgcactgcactnaccaggatgtatcatcgctggttcgtggcntcgcacccacaggcggtggtggcgtcgcatcggcaggcgtgtcatcgctagcagaacatctctcgttgtgctcagcgcactccgtgcactgcgggcgtctctgtctctcgtagnggccncgctcggcggccgcgcctaacaccacctgttgttccattctcctgtcgtcccgcggcagagtctcctatctcgggcgcgccgcctcctatcacccccagccatcccgctgtccccgtgccgcccgcacccccggccctccccgtccactccgcggggtgggagctgtcggcggaaacgcgggcggggcgttcgcnnnnnnnnnccgctcggctacgccttgcggaatgggcgtgaggggctcggtctcgcgcctcggggggccccttgcggtgctgcttgctcggcgccggctcatgggggttgttcggagagcgcgccggcagtagagcaagcgcgcggttgggtccacgctccgtggggggggcgcgcccgcgccgccctccgggggcgccttggcccctgtttcggggaggggaaggggcttcggttttcctggggggtgtttcggcgttcttgcnnnnnnnnnnnnnnnnnnnnnnnnnnnnnnnnnnnnnnnnnnnnnnnnnnnnnnnnnnnnnnnnnnnnnnnnnnncgtaaattttcttccagaaatattttaataaaaattggccatttccaagtaacacccactgcatgcccatcaataaaagagaaccataacaaaatagaaaatttaccatatggctatgattttaagnnnnnnnnnnntgcggacacgagcacatgagcaaagtccaatattaaagtaacattccttcttacgggctatgattaggaatctgattagataccagaataaaaatacaaatgctgaactatttaggtcaaagaacctctatagaagcatctgtcttcaaaggcattccagtttgagactcaattttagaataaggcataacaaatatgttaacaaaagacatacacaaagtgatgaaagagggattctataattccccacatactctgaacctaataaaacaaatctagannnnnnnnnnaaacaattgccaagactgaaatcaaagataaatagaaggcacaacagttttgctctggttgttatcttgcggttttgggaannnnnnnnnnnnnnnnnnnnnnacaaatacaaattaaacatgaaaaaactacttcaaaaaaactaacagttcaagaaaagcctatcagttgcattctagacatttaaaacctattatcacaatttaaatttcaatggtaaaaacagttaggttttagaattgttttgtgatcctttatcnnnnnnnnnttctattccttttattcagtttttaaacataccagtgagaatcaaaattgtcaaattttccaatggcaatttctccacaccagaaggtagtcatgactctcaaagaagaaacaatttgggtttttcctgccttcaaaatattatcaaatcctgtatttcttacaggcttttcaaacacgtagaaaataagaaatattccaatgaatgaaacataccaaatgtcagtaatatgcaagacattcctttggggaaatggcagtcttcggggttcaatgtcaccttgctcaccagcctcacggattggtctgggtccccttgggggagaaatatttattcgttgttctcgcactctttgatcccgctgaggtctttgtggtgaaatctgagattcaggcttagactctggacggggctgtgaagctggtactttaacaacatgaggtggtatcccagtaactggaacagctccactgggtggaagattcttactggtcacagatgcccaagaaaatgtcctcaagtcttcctgtactgtctgagatatgtctgcaggtgctggagaagaactcttctgagcatcctcaggggcagtttcttctaatactggctcaggcttttcctcttggatttcagatacaggttcttgttctggttctggttcaggatcaggctctggttcagcaacaggctcctctaaatgttcttccatgtcattactgacaactgcctgatcatagaaagttccagaatcatcaggtaccacctcaggtgtttgctgtctttcttcaggttcctctacttcttcttcagactcctcctgaggctcagtgacaaacccaccaaagacctcatcttggtatctgaagatatcattgtgaacatagaatttatttgcaacagacccctcaggagcaaggacaaacgtttgcatgaatctcctcaaagcctggttgttgttagagagaagccccatcacctggactaccacaccatcatttagcgtggcatgagcatcaacatggcgaatcttggtgtggcagttggtgaagttttgtgacatcactttcctgtggatttctttctgtccgtagactgcatctgctggctttccatttgaatccaatcccccatggacataagaagagttctttccataaaatctatgcagcatgtctggggcctggttcagcagtgtgtaatactgtctcacaaattcccgcccgaccagcaggggactaggattatccatcaccattgctttggtcaattcaacctggggggaaaagagtcaaatatgtccaaacctacgcggctgagctggagaggaactagctctgcaccacagcaccgaggatagcacaaacccctcacgcaactgcgtccgcgcccc

SEQ ID NO: 259807 - DNA, 681 bp, Homo Sapiens
  misc_feature (13)..(13): n is a, c, g, or t
  misc_feature (438)..(438): n is a, c, g, or t
tgacatatagganggaagagaagggtataagatggtttttaatgatttttcttgtgagggaattgtccattttgtagtttaaaacttgttagctaagaaacttcattaagaaaaaggataagcctgctttgttttaacacaaaagttaacttaaaatttttcagccccgtccagagtctaagcctgaatctcagattccaccacaaagacctcagcgggatcaaagagtgcgagaacaaccgaataaatattcccctcccaaaggagaccccagaccaagtaagagctcagaagggccgatttctcgtttgggggattttgaggtgagagcttattttgggagggcagttgatatttatatactttaaaataaaaatattgtagggttgatggaattacctgtttttagtgtagagggaaaactattgaatgtgagcnagtcattgaaagatggtcctcgttctcgtggtcctttcattgatggtttttgtctccgttttaagtccgtgaggcgtggtgagcaaggtgacattgaacccccgaagaatggtgagacaccctgacagtcaccaactcttcgattggcaacctgcctcgatgaagtggacaaatcagagcttaaagatttctttcaaagtaggttattgagttttgaacactaaattcatctagtgtctctct

SEQ ID NO: 259808 - DNA, 856 bp, Homo Sapiens
gggcttgtggaggagaggaacttccgggtggaaaatcaccttcacccggtcggcactgctattgaagagcccgattcggcggatggtggtcaggatggggtctgaggagtcatccagcatattgtgggtgcacacaggggggaaagactgccgctgcgttgcaaagatggctctcttcatcatagtgaagtcttccttatccagcatcttgttcatgtcgggaaggctcccaaccagtaaggattcataaagcttcctcccgaacttttccttcaccgtgttggccgtgtcccaaagctgtttgcgcacagcttggcctttgagggtttccacgttgaaattgttggtccgcgctggcatgatgaagaaggcaaccactgtctgctcgctgccgttcactctgagcagatagttgagccgagccaatgcctccaggaagacgtcagcacccttgttggagaactcatagcggccggcgataaagaagtataaggtcttgtccaagttgaagtccagatgcccataaaaatggccccgcacaaactcctggattcgagccttgctctgagcatggaggttctggaactcatgcatggcagaaaacttcttcacattcagcccattgggggtcacaatatctggtttcctcttgagcaagtgctgtgcctcgatggcggtgatctgggacacagtagtgaagacgtgagcgcagtgggctgccgccctttccatgcagtatcggtggtagatctgcctctcccctgcttccttgtccacgttgaagttctccaggttgttgtagaagtccacggcaccggcacacaggtagcgccccagcagcgtggcatgggtggtg

SEQ ID NO: 259809 - DNA, 890 bp, Homo Sapiens
gggattcttcagccgaaaactaaatgtgacccttacgtacttgagcatggagatgaagtcaaaattggagaaactgtcttatcctttcacattcatcctggcagtgatacctgtgatggctgtgaaccagggcaggttagagcccaccttcgccttgataagaaagatgaatcttttgttggtccaacactaagtaaggaggaaaaagagttggaaagaagaaaagaattaaagaaaatacgagtaaaatatggtttacagaatacagaatacgaagatgaaaagacattgaagaatccaaaatataaagatagagctggaaaacgtagggagcaggttggaagtgaaggaactttccaaagagatgatgctcctgcatctgttcattctgaaattactgatagcaacaaaggtcggaagatgttggagaagatgggttggaagaaaggagagggcctggggaaggatggtggaggaatgaaaacgccgatccagcttcagcttcggcgaacacatgcaggcttggggacaggcaaaccatcctcatttgaagatgttcaccttctccaaaacaagaacaaaaaaaactgggacaaagcacgagagcggtttactgaaaacttcccagaaactaagccgtcaaaaagatgacccagggaccatgccttgggtaaaagggactttagagtgaaggctaatcatagaaaaaaaacctctagtttttttaaaaatagaatttggaaacttattttttctccccaaaagaatcagcagcacaggggaactatgtcacagtttacctcttcctgattcagaaatgtgtatggtttgcagcttttaaaaaccatttttttaaaactaataaatagtgactgaaccaatttatgcaa

SEQ ID NO: 259810 - DNA, 1646 bp, Homo Sapiens
  misc_feature (1067)..(1067): n is a, c, g, or t
  misc_feature (1070)..(1175): n is a, c, g, or t
  misc_feature (1496)..(1504): n is a, c, g, or t
gcaaagccggtggcgcccggaggctgcacggagagcggtgcccgcgtcagtgaccgaaggaagagaccaagatgaatacagagcccgagaggaagtttggcgtggtggtggttggtgttggccgagccggctccgtgcggatgagggacttgcggaatccacacccttcctcagcgttcctgaacctgattggcttcgtgtcgagaagggagctcgggagcattgatggagtccagcagatttctttggaggatgctctttccagccaagaggtggaggtcgcctatatctgcagtgagagctccagccatgaggactacatcaggcagttccttaatgctggcaagcacgtccttgtggaataccccatgacactgtcattggcggccgctcaggaactgtgggagctggctgagcagaaaggaaaagtcttgcacgaggagcatgttgaactcttgatggaggaattcgctttcctgaaaaaagaagtggtggggaaagacctgctgaaagggtcgctcctcttcacagctggcccgttggaagaagagcggtttggcttccctgcattcagcggcatctctcgcctgacctggctggtctccctctttggggagctttctcttgtgtctgccactttggaaaaacggaaagaaagatcagtatatgaaaatggacagtatgcctggagacagagaagaaaagcccactggccatggattgaaaaaaaaggacctgggtccaaaaccaaacagatatttaagcttcccatttcaagtctgggtccttggagaatgtgccaaatgtaggagtgaataagaacatatttccgaaagatcaaaatatatttgtccagaaactcttgggccagttctctgagaaggaactggctgctgaaaagaaacgcatcctgcactgcctggggcttgcagaagaaatccagaaatattgctgttcaaggaagtaagaggaggaggtgatgtagcacttccaagatggcaccagcatttggttcttctcaagagttgaccattatctctattcttaaaattaaacatgttgggganacnnnnnnnnnnnnnnnnnnnnnnnnnnnnnnnnnnnnnnnnnnnnnnnnnnnnnnnnnnnnnnnnnnnnnnnnnnnnnnnnnnnnnnnnnnnnnnnnnnnnnnnnnncccttgtgggcccccctcggcccctcaaaaacctttttaaaaacattcctgttgggcgccggggccccagaagggaagggaacctgggcccatacctggttcccaaggaaaaccccgggcctagacatagggcttgggattctccccccaaataaaaaaacgcccggggggaaaaccagaggggtttttaaacaaattcccaaatgggagtttctggagggtccttttcggggattttttccaacggggagtccccaagcggaacccccaattattaaaattatacccccccgccccgggcccattttattggaaagaaannnnnnnnnaaattccctttaaaaaatttttttgcgccaacattgtggaaacccccttccacaaaacgcgggtagtgtgataaaacctctgagaatcccgccgacggggggaaatctcaaaaacccttgtgtcccccctcttggcggtaaa

SEQ ID NO: 259811 - DNA, 1111 bp, Homo Sapiens
agaaggacgcgagggttgcttgggcagcgactgtcatggcggcggccgcccccaatgccggaggctcggcccctgagacagcgggttccgccgaagctccgctgcagtacagcctgctcctgcagtacctggtgggtgacaagcgtcagccccggctcctggagcctgggagcctgggcgggatcccaagtccagccaagagtgaggagcagaagatgatcgagaaggcgatggaaagctgcgctttcaaggctgcgctggcctgcgtgggaggatttgtcttaggaggtgcatttggggtgtttaccgctggcatcgataccaacgtgggctttgaccctaaggatccttaccgtacaccgactgcaaaagaagtgctgaaagacatggggcagagaggaatgtcctatgccaaaaatttcgccattgtgggagccatgttttcttgtactgagtgtttgatagaatcttaccggggaacatcagactggaagaacagtgtcatcagtggctgcatcacgggaggagctattggtttcagagctggcttaaaggctggggccattggttgtggaggttttgctgctttctctgctgcgattgattattacctccggtgagagtaattgcctgcagggaaggatgatgccagccccggatccgggctgctctctggaggacagtttctgtaccacaccagggccttgcttcagggcctgaagacattcattttccctcatgtcgttggtattctgagggagctgcctggcttctctgcctccagcctttggggtagccacactttgctgctcctggactccagccagccttcacagaggacgtcccgtgccagattctctcacagcagatcgggagacaggatgttgacatataggaattcagctccacaaagcttcaggcctgaccacagctggccctctaagttgttcggtgttgtggggcacagaggtgacagtgtctctgcaggcactcaagaagctgttctaccttggaactccatgcaactatccgtctcgaataccagggcagggcaaagcggactgatgccgttcaaccaattatctcacttgtttgtgtcttgtcatccttg

SEQ ID NO: 259812 - DNA, 954 bp, Homo Sapiens
ttcactttgtacctttctctcctcgactgtgaagcgggccgggacctgccaggccagaccaaaccggacctcgggggcgatgcggctgctgcccctgctgcggactgtcctctgggccgcgttcctcggctcccctctgcgcgggggctccagcctccgccacgtagtctactggaactccagtaaccccaggttgcttcgaggagacgccgtggtggagctgggcctcaacgattacctagacattgtctgcccccactacgaaggcccagggccccctgagggccccgagacgtttgctttgtacatggtggactggccaggctatgagtcctgccaggcagagggcccccgggcctacaagcgctgggtgtgctccctgccctttggccatgttcaattctcagagaagattcagcgcttcacacccttctccctcggctttgagttcttacctggagagacttactactacatctcggtgcccactccagagagttctggccagtgcttgaggctccaggtgtctgtctgctgcaaggagaggaagtctgagtcagcccatcctgttgggagccctggagaaagtggaacatcagggtggcgagggggggacactcccagccccctctgtctcttgctattactgctgcttctgattcttcgtcttctgcgaattctgtgagccaagcagaccttccctctcatccaaggagccagagtcctcccaagatcccctggaggaggagcgatccctgctgcctgcactggggggtggtcaatttccagaccgaccaagaatggagcattgatggggggagatcagaaggtcttgaggtgactcttgcaggagcctgtccctcatcacaaggctaaaagagcatagaagcctggacacctgaagcaagccagaaaaccacgggccttgaagctgtccgaaggctcagcatccca

SEQ ID NO: 259813 - DNA, 1092 bp, Homo Sapiens
atttttgggcaacggacgaattaagcggcgtggagatgcggcagccgctgagctggggccgctggcgcgcgatgcttgcccgaacctacggccccgggccttcggcgggttaccgctgggcctcgggcgcacagggttacgtgcggaatccgccagttggagcgtgcgatctgcagggcgagctggacagattcgggggcatctcggtgcgcctggcgcggctcgatgcgctggaccgcctggacgctgccgccttccagaagggcttgcaggctgcagtacagcaatggcgatcagaaggtagaacagctgtatggctgcacattcccatcctccaaagccgatttattgcccctgctgcttccctgggcttccgctttcaccacgcagaatcggattcatcaacgttgactctgtggctgagagaagggcccagcagattaccaggatatgcttcacatcaagtaggagttgcaggagctgtatttgatgaaagtactagaaaaatactggttgtacaagatcgaaataaattgaaaaatatgtggaagtttccaggaggcctgtcagagcctgaagaagatattggagacacagcggttcgagaagtttttgaagagactggtataaaatcagaattcaggtccgtcctgagtattcggcaacagcacacaaatcctggagcttttgggaagtcagatatgtatatcatctgccgcctaaagccatattcattcaccataaatttttgccaggaagaatgcttaagatgtgagtggatggatctcaatgacctggcgaagactgaaaatacaactcccatcaccagcagagttgctaggctgctgctgtatgggtacagagaagggtttgacaaaattgacctgactgtggaagaacttccagcagtttacacaggactgttttataaactctatcataaggaactgccagagaattataaaactatgaaaggaattgattaaattcacatttatatgtttagaaacatgtagactaacgaatgacataagaaatagtggacattttggattgattaaacatctgactgtgattttctaatgtaaaaaa

SEQ ID NO: 259814 - DNA, 826 bp, Homo Sapiens
tttataaaacagaagcagcttactttatttcgatcttgtacaaccagtatttttctagtactttcatcaaatacagctcctgcaactcctacttgatgtgaagcatatcctggtaatctgctgggcccttctctcagccacagagtcaacgttgatgaatccgattctgcgtggtgaaagcagaagcccagggaagcagcaggggcaataaatcggctttggaggatgggaatgtgcagccatacagctgttctaccttctgatcgccattgctgtactgcagctaaatgcagaagaaaaaagtctaaataatttccaaagagacgagtggaataaattaaaactcacctcagggtttcgcctcctccaggaaaccatcttttaagcaaaaagaggtccccaaatggtcttggttcacatcgctgggcactgggaagtaccatgttttatagtaaccaccttggtttatatgatttttccatcagactggaattccttcagaataaagtcattacactgctggacctttatatccataccaccaaagacaatgcttggcacgtaacagatgttctggtagttttagagtggacaaataaaaggatttaaaccgaatcaaataccatttgaatgctgttccttttaacatccttaggtttaatcttaaagacaattatggacttctatttttttcttcctttaggagttctgttataatgtttttaatgtataaatttcaaggtagttaaactttgtttttaaataatgtatgctggttgtagaaatttgaaaataaaaaatatgaagaaatcaaacttcacatttt

SEQ ID NO: 259815 - DNA, 1089 bp, Homo Sapiens
aatttagagccgcgcgccgggcgggaatgtaagatggcggagtagcaacgcaaagcgcttggtattgagtctgtggccgacttcggttccggtctctgcagcagccgtgatcgcttagtggagtgcttagggtagttggccaggatgccgaatatcaaaatcttcagcggcagctcccaccaggacttatctcagaaaattgctgaccgcctgggcctggagctaggcaaggtggtgactaagaaattcagcaaccaggagacctgtgtggaaattggtgaaagtgtacgtggagaggatgtctacattgttcagagtggttgtggcgaaatcaatgacaatttaatggagcttttgatcatgattaatgcctgcaagattgcttcagccagccgggttactgcagtcatcccatgcttcccttatgcccggcaggataagaaagataagagccgggcgccaatctcagccaagcttgttgcaaatatgctatctgtagcaggtgcagatcatattatcaccatggacctacatgcttctcaaattcagggcttttttgatatcccagtagacaatttgtatgcagagccggctgtcctaaagtggataagggagaatatctctgagtggaggaactgcactattgtctcacctgatgctggtggagctaagagagtgacctccattgcagacaggctgaatgtggactttgccttgattcacaaagaacggaagaaagccaatgaagtggaccgcatggtgcttgtgggagatgtgaaaggatcgggtggccatcctttgtggatgacatggctgacacttgtggcacaatctgccatgcagctgacaaacttctctcagctggcgccaaccaggagtttatgccatctttgactcatggaaatcttctcccgggcctgctattttctcgcatcaacaaacgcatggcttttgaaggcagttagttaagtcaccaataaccataccttcagggaggaaccagaatggaggccttggctcccaaaaaataacaggtggattggaacactccctaatggaatccttgggcagaaagcccattccggggaa

SEQ ID NO: 259816 - DNA, 696 bp, Homo Sapiens
cagaaaagtagtgaacttattttcagtagacatagaaaacaatgtgaatatttaaggtctgtgactatagttaaacttcactaagaatttgcagaattgttttgagatgtgtgaataaaggtaattttattgaatcttcattggtgctaatgatggacagttaaaaagatagctagtgtatattgttatgggtcagtacttattagtacttccaaaattgaatttgaaatgctatgtattcacttttcactctgtaaatgtaattctttacaatgactttatttattaaagggcagccagttgtcatttttacaggattgtgtgagctattcaaactcttcaacccctgaacagggtattaagcttccaaaataatgatggggataaatatggaaatcctttttaagttgtatttccattaaacaaaaacccttataattcatactatcatgaatttgctttatccatctcatttgcataacagttcatctgtctggtcccattaggctctaccaaagaaagactctgatgagtggacattattactgtgactcttgtaagtagccataaataaaccaaaatagtatcaaatttaggtatgaaattccacatgtgcaaagtactgttaaggtgataacatttttgatgagatttaaaaaaatatttgaaatattaaaaagcattatctgtaaaaca

SEQ ID NO: 259817 - DNA, 511 bp, Homo Sapiens
cgggttccccagtccccccatgcagtcaggcgagcctcctggctccaccacgccatcgagcgagttcggctcttcgcctgtcaccgtccgtcggggcgggtctccggtgcccccgtgctgtcgtgggggttccttggactgtcgccgtcgtcaggctgggaacccacgccgccaggctccccggtcggggcccgcgggcgtacgaaggcgcccatggcggtggcgtggcccgagcgtagcagctgcagctggcgccgcccgcggcggtacaggtactcgatgcgcagcacgtcggaccgcggcaggcccgcatgctgccggaactctgcccgcactcgcgcctcggcgcccggcttcccacgcccggcgcgcagcagatcgcggtacaggctcagaacctgcctctgcagccggctgtgccggctcatgaccgcggctaagcagagacgctcagcgaacgacctgcgaaccgcggagccgccacacagccagcaaaggccaaagggcaaaa

SEQ ID NO: 259818 - DNA, 1166 bp, Homo Sapiens
  misc_feature (129)..(129): n is a, c, g, or t
agccaagaacttgaatttgtttcaatgaaaaaaagatgttcaaaagcatgaaatcacactgtattttttaaaagatcaaaatcctagactcctatgaaaaactaggatcatttttataattttaacatnggacaatgtaatggcctgatgaggtgcagcaatatccgtcgactacattccataaagaggacagaaatggattgtataaatggccaccctgggaccttcgtggggagaagccatgtgagtccgaggcagaagaaagaagtaaccacactgctaatgcagtttagtgtggctgccccacatgagtactgtgagcactgagggatcagtaagctgcaacttctcctgctctgagattcgcaagagtcagaccagaacaaagggcacaaacgcactaagacccaacctccttagtatgtggatgtgataagcactgctgcacctttggccgtaaacttattttaagtgccccgatttttaagcaccattaagtggttagcctttctctccaatgtctttaattttcagattgaaagaaaatggcaacagctgaaggagaatgatgagcattctgtgagactgcaattaataaagtcaggacaaactcttcagtcagtttaggacccaggttacaaatatatgagagggaaaaagaaaaactggactaaaagacaaggaaaacaagaattacatattattccatggatctggattaaaagtagttttttaaaaaacgtttctttagctctgtgttcaaatgtggatgaacagatgcctatatctattaaaagacacatacactacatatagccttaaaaatatctattctacagttttttcagtactttgtaacattagtcaaaatagaatgagccaacagagtaaaaatgttcaggttttggagaaaaacataaccggaactgagtaataaattaccactgtgcgtgcatccctaaatgctattgcgatgtttccgggttaaattctaacaggtcagtgatgatgcaattgaaacgctcatcttaagcagcatctacgtggggctgaagacatttccctgtattcttattactaacagacaggagagatgtgcgagttgtttacatagtataaatactgctttggcaattatgaacatagcaatgtaggtttcacgtggt

SEQ ID NO: 259819 - DNA, 876 bp, Homo Sapiens
aaaaaagaccctcccgcgccccgcgaggctccggggtctcgggcttccgccttcttgctgccctcgttcttgccagggccgcggttagtccctgctggccaccccactgcgaccatgttcgttccctgcggggagtcggcccccgaccttgccggcttcaccctcctaatgccagcagtatctgttggaaatgttggccagcttgcaatggatctgattatttctacactgaatatgtctaagattggttacttctataccgattgtcttgtgccaatggttggaaacaatccatatgcgaccacagaaggaaattcaacagaacttagcataaatgctgaagtgtattcattgccttcaagaaagctggtggctctacagttaagatccatttttattaagtataaatcaaagccattctgtgaaaaactgctttcctgggtgaaaagcagtggctgtgccagagtcattgttctttcaagcagtcattcatatcagcgtaatgatctgcagcttcgtagtactcccttccggtacctacttacaccttccatgcaaaaaagtgttcaaaataaaataaagagccttaactgggaagaaatggaaaaaagccggtgcattcctgaaatagatgattccgagttttgtatccgcattccgggaggaggtatcacaaaaaacactctatgatgaaagctggtctaaagaaatccaaatggcagttctggctgaaatttgttttcagaaggggacaacatccccaaaagcatttagggccttggttgaagcatcttaaaggagggggcttccgaataccccaaaccccttagccgatgtaccccccaagtattttgtgcccttaaggtggagaaaaac

SEQ ID NO: 259820 - DNA, 832 bp, Homo Sapiens; identical to SEQ ID NO: 9122
  misc_feature (806)..(806): n is a, c, g, or t

SEQ ID NO: 259821 - DNA, 1425 bp, Homo Sapiens
ggcttgtacggtccggaattcacgggatatcgtcgaaccacgcgtgcgaaagaaagaatgttaagggaatcattaaaggaatatcacaaaattagcaatcaagtggacctttccaatgttgtgctcagtatagacaagtgagattttatgagggtgtggtggaactttctcttacggctgcagagaaaaaagatcctcaaggtcttgggcttcatttctataaagcatggagaaccagaagaagacatagttggacttcaggccttccaagaaagattaaacagttacaaatgcattacagacacacttcaagaactggtaaatcaaagtaaggccgctcctcagtctcccagtgtacccaaaaaacctggtcctccagtgtggtcatctgatccaaatatgctgagtaatgaagaagcaggacatcattttgaacaaatgcttaaattgtcacagcgatccaaggatgagctctttagtattgccctttataattggctaatacaagtcgaccttgcagataagctgctacaggttgcttctccatttctggagccacatctagtccgaatggccaaagttgatcaaaacagagttcgttatatggatttactctggcggtattacgagaagaacagaagtttcagtaatgctgctcgtgtactgtccagactggctgacatgcatagcacagaaatttcacttcagcagcgactagagtacattgctcgagccattcttagtgccaaaagttccactgccatttcatcaatagctgccgatggtgaatttcttcatgaattagaagaaaaaatggaggttgctaggatccaacttcagatacaggagacactacaaaggcagtattcccatcattcttctgtacaggatgcagtttctcagctggattctgagctgatggacataactaagctttatggggaatttgctgacccatttaaacttgcagagtgcaaacttgcaataattcattgtgccggttattcagaccctatattggtgcagacactttggcaagatatcatagagaaagaattgagtgacagtgtgacattgagctcctcggatagaatgcatgctcttagtctcaagattgttctccttggcaaaatttatgctggcacaccacgcttctttcctttagattttattgtacagtttttagaacagcaggtttgtactttgaactgggatgtgggcttcgtaatacagacaatgaatgaaattggagtaccattacctagactactagaagtttatgatcagttgttcaaatcacgggatccattctggaaccagaatgaagaagccactgcaccttttggattggatacatggattaattgataagatatgttggagatcccagccaaggtttaaattgtgaaaggaagagattttcca

SEQ ID NO: 259822 - DNA, 673 bp, Homo Sapiens
cccctttttttgtggccgttttggagacgtctgtttccgctattaactcactggcacaaggaacgtccaaacaatggtgtccttaacactcaagcagaaaatactaacagggctgccaaaaaatttatggatgaaatcgaaaaactaaaaaggattttgaaaagccatggtaatgatgaagaatgtgttttggaagcagaaaataaaaaactagtagaagaccaggagaaactgaaaactgaattaaggaagacttcagatgccctttctaaggcacaaaatgatgtgatggaaatgaagatgcagtcagagagactttcgaaagaatatgatcaactcctgaaagaacactctgaacttcaggtcccactgggcagcttctacatactggccttcgcacctgggctccataaccctcatccctccagcccaagaagtggtggtggcttttctgctattgataatcccagaggtgccttaccaccctgtttggtgtgtgtactttttcatcacctgtaaaaccaatttcccataatatctctgttggaaggaaaacaaaatctcagctccatagtttaccacttctgtaacccacaggtgactcatttgacatctatgctcctcaggtactttactacttaaataaaggttgtaataccttatgaaaattaaa

SEQ ID NO: 259823 - DNA, 831 bp, Homo Sapiens
  misc_feature (625)..(625): n is a, c, g, or t
gatgttggtgggcatccccagcagggtgtgaagcatgtcgtgcacctcccggtaccgctgaatcacatacgctagctcctcatcatccacgaagcgggtgggtgctcgggtgtctggggagaccctgttcacatccaggaaacggagatactcgcgaccgagggagccttccggcaggctctggagcttgcccaggtcgagggtggatgtcgaaatccggagacgctcctgcaggatctgggcaccctctggatccctcctcatctggtccctgaggaccttcagggtgcggtgtcctgtggtctcccctagaactgcgaccatgtcgtggcggtaggggttatagagcgccatcgccgcggagccggcggccaacagcgctttctgcagcggggagaaaaagaggtggtgcgagtatagcgggccggcgccgtcgctcctagcccggaggggcatttctgccgcaggccgctgtaggcccgggagcccgcagagccgacggaggacagggcgcagcagagtcgccatggcagcgggcgtccgcggaggatgggcgggtacgaagaacgccgcgattctgtcaggcgacggagcgtcggaggggtcaaaactcactgaaaaaccngattctggacggctgtagcctacggcctttcgaggggaaacatcgcttcacgggcagaaggcatgtaggccaagtaggcgaaggaaacgcacgcgaactgtctaccgtctacgtccaccgatccaagactctcgccatgtcacctcgccccagaaagtgtctgcaaaggacacgcaaccacgctcactcagcgccgggccctattt

SEQ ID NO: 259824 - DNA, 921 bp, Homo Sapiens
gggctctccgcggacgcccgctgccatggcgactctgctgcgccctgtcctccgtcggctctgcgggctcccgggcctacagcggcctgcggcagaaatgcccctccgggctaggagcgacggcgccggcccgctatactcgcaccacctccccacctccccgctgcagaaagcgctgttggccgccggctccgcggcgatggcgctctataacccctaccgccacgggagcgtccccggatttcgacatccaccctcgacctgggcaagctccagagcctgccggaaggctccctcggtcgcgagtatctccgtttcctggatgtgaacgagcctgcaagtgctggtctcggagttgatcccatgggccgttcagaacgggcgcagagccccatgtgtcctcaacctgtactatgagcggcgctgggagcagtccctgagggctctgcgggaggagctgggcattacagcaccacccatgcacgtccagggcttggctgagctcctgagccagcggggcctggcctacctcccccatcccctgcttcccttggaggcagagggctcccttgactacctttgttcctcttctttgaacactgacccttggacaacatttatcataatttgtcataaccactgctgagtggccttgaggacgaaccccgcagagacaagcagtacagtggcattcccagggggaccagcagctacccaaggagaaccatgcatgaacagtatcagtcgtctgggctcatgctgggatgttcgcagtgctcctgttgcaactcctcccagccagccaggtttgctgggggccaggctgggtgttcctcacaggagtgagggctacacccaattccaaaagcctgagaagagagaagtggagggggaggcgagtgtgtgaataaaggctcccct

SEQ ID NO: 259825 - DNA, 904 bp, Homo Sapiens
ccggtccggcgccgcccagccccgggctccgggcgggaagtgggcgagcgcgacggtgcggggcgcgcgggcgacgggccagcgggatgggagcagggtcccccggcggcccgcagcctcgggagccgcgctgaagccgggggcgggaccagcgcggagccgacatgtgtctgcgcctcggaggcctgagtgtgggcgacttccggaaggtgctgatgaagacaggcctggtgctggtggtgctgggccatgtgagcttcatcacagctgccctgttccatggcacagtgctgcgctacgtgggcacccctcaagatgcggtggctctgcagtactgcgtggtcaacatcctctctgtcacttccgccatcgtggtcatcacttcaggcatcgcagccatcgtgttgtcacgctacctccctagcacccccctgcgctggacagtgtttagctcgagcgtggcctgtgctctcctttctctgacctgtgccctcggcctcttggcctccatcgccatgacctttgccacccagggcaaggcactgctggctgcctgcacttttgggagctctgaactactggccctcgcacctgactgtcccttcgaccccacacgcatttatagctccagcctgtgcctctggggcatcgccctagtgctctgcgtggcggagaacgtgtttgctgtacgctgtgctcagctcacccaccagctgctggagctgaaggccctggtggggggaaaagcagccaccccatgatgcggggagaacccagagcctggtgggagggcccgtggacctgcttgagctgcaccaacctctggaaccttcggacccctctgaaaaatgattgtcctggccccagcccccaaagggccccctaggaaccctggcaagccaaa

SEQ ID NO: 259826 - DNA, 586 bp, Homo Sapiens
actgctgcggtgaaggaggaggaggagccgagcgggcgctggcaccgaggcctgaccatggacgaggaatacgatgtgatcgtgctggggaccggtctcaccgaatgcatcctgtcgggcatcatgtctgtgaacgggaagaaggtgctgcacatggaccggaacccctactacgggggcgagagctcctccatcacacccctggaggagctgtataagcgttttcagttgctggaggggccccctgagtcgatgggccgaggccgagactggaacgttgacctgattcccaaattcctcatggctaacgggcagctggtaaagatgctactgtatacagaggtgactcgctacctggacttcaaggtggtggagggcagctttgtctacaaggggggcaagatctacaaagtgccgtccactgagactgaggccttggcttccaatctgatgggcatgtttgagaaacggcgcttccgcaagttcctggtgtttgtggcaaacttcgatgagaatgaccccaagacctttgagggcgttgacccccagactaccagcatgcgtgacgcctaccggaagtttgatc

SEQ ID NO: 259827 - DNA, 437 bp, Homo Sapiens
gagagtagtcctcattcagtgcatagcaatggaaggctaggacaatttagattccttaggtaagagcacaggaggatgctatagaacagtgactgttcattccatcccccaaatgacagcggtgagccacgtgtcagaggctgcaacacagactcagaaactattctacttgcttttttaccactggtgtcagagagacagcttgtaatcctaatatttggtgccagcaggaagaacttcagagcttttgttcttagtggcatatgaaggtaaattcaaatgttttcttcttcggctttaaaacagagcttaaattcttaagcacagccccaaagcatgataataaagtggcttaccctcctgggtgtggagttacacaaactctccctcatctaactcacgtcgggaatcatgatgtggtttcatatgcacgcacc

SEQ ID NO: 259828 - DNA, 918 bp, Homo Sapiens
  misc_feature (739)..(739): n is a, c, g, or t
  misc_feature (836)..(836): n is a, c, g, or t
  misc_feature (863)..(863): n is a, c, g, or t
  misc_feature (867)..(867): n is a, c, g, or t
cagagcggatgccgcggcgggcctgtgggagcggggtcatcttctctctgctgctgtagctgccatgggcaaaagagaccgagcggaccgcgacaagaagaaatccaggaagcggcactatgaggatgaagaggatgatgaagaggacgccccggggaacgaccctcaggaagcggttccctcggcggcggggaagcaggtggatgagtcaggcaccaaagtggatgaatatggagccaaggactacaggctgcaaatgccgctgaaggacgaccacacctccaggcccctctgggtggctcccgatggccatatcttcttggaagccttctctccagtttacaaatatgcccaagacttcttggtggctattgcagagccagtgtgccgaccaacccatgtgcatgagtacaaactaactgcctactccttgtatgcagctgtcagcgttgggctgcaaaccagtgacatcaccgagtacctcaggaagctcagcaagactggagtccctgatggaattatgcagtttattaagttgtgtactgtcagctatggaaaagtcaagctggtcttgaagcacaacagatacttcgttgaaagttgccaccctgatgtaatccagcatcttctccaggaccccgtgatccgagaatgccgcttaagaaactctgaaggggaggccactgagctcatcacagagactttcacaagcaaatctgccatttctaagactgctganagcagtggtgggccctccacttcccgagtgacagatccacaggggtaaatctgacatccccatagacctgtttgacttctatgagcaaatggaccanggatgaagaagaagaagaagagacccngacngtggtctttttgaggtccagcagggaaatgattggagggaactcccagaaa

SEQ ID NO: 259829 - DNA, 1174 bp, Homo Sapiens
  misc_feature (371)..(416): n is a, c, g, or t
  misc_feature (829)..(843): n is a, c, g, or t
  misc_feature (1061)..(1061): n is a, c, g, or t
  misc_feature (1063)..(1063): n is a, c, g, or t
  misc_feature (1067)..(1067): n is a, c, g, or t
  misc_feature (1076)..(1076): n is a, c, g, or t
gctgggtggcgaattcggcacgaggcacccaacctcaccaagaagatgaagaagattgtggatgccgtgatcaagtacaaggacagcagcagtggacgtcagctcagcgaggtcttcatccagctgccctcgcgaaaggagctgcccgagtactacgagctcatccgcaagcccgtggacttcaagaagataaaggagcgcattcgcaaccacaagtaccgcagcctcaacgacctagagaaggacgtcatgctcctgtgccagaacgcacagaccttcaacctggagggctccctgatctatgaagactccatcgtcttgcagtcggtcttcaccagcgtgcggcagaaaatcgagaaggaggatgacannnnnnnnnnnnnnnnnnnnnnnnnnnnnnnnnnnnnnnnnnnnnnctccgaatccgaatctcggtccgtcaaagtgaagatcaagcttggccggaaggagaaggcacaggaccggctgaagggcggccggcggcggccgagccgagggtcccgagccaagccggtcgtgagtgacgatgacagtgaggaggaacaagaggaggaccgctcaggaagtggcagcgaagaagactgagccccgacattccagtctcgaccccgagcccctcgttccagagctgagatggcataggccttagcagtaacgggtagcagcagatgtagtttcagacttggagtaaaactgtataaacaaaagaatcttccatatttatacagcagagaagctgtaggactggtttgtgactggcccctgtcctggcatcagtagcatctgtaacagcattaactgtcttaannnnnnnnnnnnnnnattccgaattggggaacacacgatacctgtttttcttttccgttgctggcagtactgttgcgccgcagtttggagtcactgtagttaagtgtggatgcatgtgcgtcaccgtccactcctcctactgtattttattggacaggtcagactcgccgggggcccgggcgagggtatgtcagctgtcactggatgccaaacagtaataaatttaaaccttntnatanacccccatntacaccataaaaacttggtccggcccccctcggcccctccgagaaagcttttctaagaacctttccgtttggggggccgcggggccccctataagggc

SEQ ID NO: 259830 - DNA, 787 bp, Homo Sapiens
ggggtcagtgaggtcttccgggcaagccacactcagccgcaggaggaggaaacctccattttcacctgcactcacgtctgtggtcggcctcgtccgagcagtggtgggcgtggctgttgggggcttcatcgtggtcttcgctgaggttgtgatcttggctaaggtgctgttcgtccctcggctgctgttggttgtagtcggagggacagaaggaagagggtccctgctggtggggaagggccccttggttgcgatgtccatggtcagtgtctctgaaggggtgaagttcttgagggcggcttccgaggggctgtaggaggaagcagagctcccagcaaaggaagttgttttgcccactgctgacccagcctctatggagaccggagctgctcctgagactttgacgtaacttggtgtctcaacagagagggctgaggtttcttccaggggattcctgctaactgtgaccagagctccactgagggtcgtggccccgggtgctgtcacttctctttctgtggcgctgttagtggggagtggggtcccaaccgtggcatgaggtgcaactgactctgtggtgccggctgtggacagggtctcggcagaggctgtgacctcagtgatgtgtggttttgcttcagtagagtcaggcagagctggtggatcggaggtggacgaggccttcaccccttccgtggggatgagatctatgtctgaggccccaggggtgctggaagttgttgtttctatttctgtgatgctgcaattaataacctcgatgtttgtg

SEQ ID NO: 259831 - DNA, 694 bp, Homo Sapiens
  misc_feature (502)..(520): n is a, c, g, or t
aaccccagttttcggcacgagtcggcacgagcatggcttcctgggcctaccctcgttctgctactcatgggccagtgtgtttgcctctggaagcctctgtctcctcggctgtaaagcgggcctacgacattgaccgaccacccatgaggttgtggcaatgcggtgtgcagagggtgcttggtggttctctcctgatggccccgcagggtctgcagcctccatctggccagcagagggcgcagaaggactgcctgggcagctcggacgtgaccgcctggaagtggtgtacagcgttcctgacaacgttcccggccaaaacgggtcccgccgcccacttgtgtgcaagataactggaaaatgtctttctgtgtgctccgaggagaatgcaaaggctggtggatgtagtgcctttcctctactgctctctcagctgggggcaagaatgacaggacgtgaacatgcacacaagggcccggaactcacgacccccgacagcggtctnnnnnnnnnnnnnnnnnnngcgcttgcaggatttagggcactagcacagcacagtccaccccttgggactagcaccccctccgcagttctgctctctgcagcaacatagagtacaaatattgttccttttgtttcttttttccctttggatacatttttaattacaaaaatagagcttgattgttgcacctag

SEQ ID NO: 259832 - DNA, 1500 bp, Homo Sapiens
  misc_feature (643)..(694): n is a, c, g, or t
  misc_feature (1132)..(1132): n is a, c, g, or t
  misc_feature (1135)..(1135): n is a, c, g, or t
  misc_feature (1443)..(1443): n is a, c, g, or t
ggggatttcctccgggctacaggcgacagagctgagccaagcgtttactgggcagctgttacgctcagattccaaatgaaaatgtttgagagcgctgactctacagccacaagatctggccaggatctctgggctgaaatttgttcctgtctgccaaatcctgaacaagaagatggtgccaacaatgcattctcagactcctttgtggattctttgccctgaaaggtgaaggccagaaggggaggtggctgacttttgctgtccagcccagctgtaaagccttgggctcccttgcaggattcagaagtgtatttagcatctctagagaagaagctaagaagaatcaaaggtttaaatcaggaagtgacttccaaggacatgcttcgaactctggcccaagccaagaaggaatgctgggatcggttcctccaggagaagttagcttcagagttctttgtggatggacttgattctgatgagagcaccttggaacatttcaagaggtggctccagccagataaagtagccgtcagcacagaggaggtccagtatctgattcctccagagtcacaggttgagaagccagtggccgaggacgagccagcagccggggacaagccagcagcagcagaacagtaaattnnnnnnnnnnnnnnnnnnnnnnnnnnnnnnnnnnnnnnnnnnnnnnnnnnnngccgagcagctgtctcgggtccagagcgagcagcgtggagctcagtgacagcagcagggagaaatccactgaaggaaaaaacccaaatttccactccacaaagaaaacagctgcaagcccccagggacttacctggggctggcatgtgtgactgtctcggatgaagtgactgacccagtgcacactggatcaaaatgctgctttcctctgtgtctcacagcttggctgagctctgtctctgcaggttagaagtctgctaaagatcaaatgtgaaagtacttggagaaactgaggcctcttatgtgtaatgtgtaagttaagtgagccatatattttcttgcctcttccggacattcatgcttgtgtcccaagcattcccttggtgaattgtcacgtgagtggggccaggtaagagtgaagtctgctccttgaatcccnaanccatctggggcttctctaacaaatctgtagtaagtatacggactccagggagagaggctgggcttctttctctcatttgttccttgtggaacaaatgggcaaaagaagtgtgaaaatgtgggtgtttatgtctgtgtatatgtattttttacttcatgcatggcttctcctccaacttcctcctgcacttaaaaagggccaggttccaaattagacttgtaaatatggtgttagtgtttgacactactcctggatagttccaaacatcttccttgtggcaggtttcctggctgagcccgagcttcccnccctgtttattgtgttcatgatcagtatgtgtttccatataaaacttttctcaacgg

SEQ ID NO: 259833 - DNA, 1333 bp, Homo Sapiens
gacaactgtctccgtcgcaggctccggcgggggcgcaggaggtcgcccggcgcgtcactgtcgggtcggcgagccacgggggccgccgcagcaccatggcgaccaccgtcagcactcagcgcgggccggtgtacatcggtgagctcccgcaggacttcctccgcatcacgcccacacagcagcagcggcaggtccagctggacgcccaggcggcccagcagctgcagtacggaggcgcagtgggcaccgtgggccgactgaacatcacggtggtacaggcaaagttggccaagaattacggcatgacccgcatggacccctactgccgactgcgcctgggctacgcggtgtacgagacgcccacggcacacaatggcgccaagaatccccgctggaataaggtcatccactgcacggtgcccccaggcgtggactctttctatctcgagatcttcgatgagagagccttctccatggacgaccgcattgcctggacccacatcaccatcccagagtccctgaggcagggcaaggtggaggacaagtggtacagcctgagcgggaggcagggggacgacaaggagggcatgatcaacctcgtcatgtcctacgcgctgcttccagctgccatggtgatgccaccccagcccgtggtcctgatgccaacagtgtaccagcagggcgttggctatgtgcccatcacagggatgcccgctgtctgtagccccggcatggtgcccgtggccctgcccccggccgccgtgaacgcccagccccgctgtagcgaggaggacctgaaagccatccaggacatgttccccaacatggaccaggaggtgatccgctccgtgctggaagcccagcgagggaacaaggatgccgccatcaactccctgctgcagatgggggaggagccatagagcctctgcctcgatgccgttttgcccccgctctttggacacgccgacccggcgctccccaaggaatgctgtcccaacaagattcccgtgaaagagcacccgtgtcgccccctcccgtggacttctgtgccgccccgtccacacctgttcttgggtgcatgtgggttttcggttcctggcggtccaggacggggcgggggctcccctcccatctcgtgctgggaggtctcagcgcgctctcctgtccctgggacgtgcgtctctccttctcatgccgttctggaaaatgctcttgctgtagagagcagctgcttctgccagggtgttggaagtggtggagcgccttccgattccatcatggcattttgtgatgtgatgtaaatggaatagagctgttgattttaggcccactt

SEQ ID NO: 259834 - DNA, 803 bp, Homo Sapiens
  misc_feature (563)..(563): n is a, c, g, or t
cactgcagtggaccacgatggcccctgcatactgagggttacaggccttcaccttcttgaggaacttgagcatgccgatcggggtaaaaggcaccccaaagtctggccagctggtaaagtggaactgagtgatgaggcgctgtggctttctgttggtcatgtcgcccacctgctggatgcagaacttccgtactgtgtagtccaccaggacagtcacatcctctacagacacccgaatattcccataggtccagcagccttggtctggccagtactgggcgcacttgcactcctttctctccttcaggttggtaaccatgacgatggtggctgtgttttgttcccagatcatccgccagaaatcattcaccgtttcttcttttggtccttgtgcagcaatgaatttgttcttttcttggtaaccgttgatgaatgaagcattgatgtaatcggaatctggaaccccttcaaccggtgtcaggtggactctagagtggtcataaggcaagatgtttacatatcgatttttttccttgttttcctccttggaagcagcctcacanggtggacctggataggacatgcagggagagcgttgaattcctccctgaagagcttattgtcgtctgcaattctcgggttaatttcctcttcaagcttgtcaacgggaaggggtgggaatttccttttgttccttgggaatttggcaaaaattggaaaactctggggctcaacatcctcagtgcggccgttggataagcggaaagaattggaatggcctcaagcttgctgtatttcttaaa

SEQ ID NO: 259835 - DNA, 888 bp, Homo Sapiens
aagtccaacagggtttgggcagctcgggagggaagtccagtgactgaggggtacgttgatagagaggtgagggtcacccctcagccatagcccttcagcctttggcttcttcttagtaaccaattcagtaacggtcttagcctgaacttcaacctcctttaaaggcaaatttggggtcaaagaatttactgtcaaccttgtcaggggccaggaattccttggcagactacaaaagatctctgcagattcatggcgagagggctgggggcttggtggcctggacacggcggaacagctgctgaaagatccatagcagaggctgatagtcacgagaacggaaaacctttgtgatgaagctgccaccacgggccaaaaagtcacaagccaaacgtagagccatcagtgtcaaatgggcttgtgagtaagcatcatggacccagctagccccaacgttgggggccccatcattgagcacaacatcaaccttccaggtcttcagctccttcctcagggcctgcctacaacgttctgttgtgatgtcctcctggagagtcaccacattggggagaggcttgattggaaccaggtccactcccacaataaggctggatacaggcataaacttggcagctacctgcagccatccccctggcgcagcacacaggtccagcaaggctcgggctttctgcaggaactgaaagcggcgattgagctggatcagcttgaaagcagatcgggaacggtaacccgtctccttcgccaagtgataaaacttgtctcgtcggctcttgccaactttgcccttcttgcccatggtggaaagggggagtatccctcaatctagacccagagccgctttctccacacttggaaccgcacaagtatccc

SEQ ID NO: 259836 - DNA, 605 bp, Homo Sapiens
tccttcttcatgccgctctccaggcacttgcgcaggcggcaggcctggcactgtcgccgggtcttccgggtgatctcgcaggcgcccttccggaaggggcacctcagccgggcgttgcgtttcatggccctcctgaaaaagcccttgcatccttcacatgtcatgacattgaagtgatagccagtggccttgtccccacatacacggcagatttggggacctccgacttcctcatctgcgttgacactgggctttccaggaacagactctgtgtcctcacagtgtacaaagtcagcatggttccagctttctttgggtctcacctccaggtttgcttctgggcctcttggactgcttggtggtaagttctttgctccgacttctcccctggggtccactttgaacaatccggtgcaaaggatcgatcaaggagtagctttaccaaggagccgctgcctttttcaggacaggagtattagcttattctcttgcttttctcactgtgaacacttggcttgcaggctgaggccgagattcccactgaagtaaaggcagtgcttcctcttcccctcgtgccgaattcggccacccagcctcctaccgta

SEQ ID NO: 259837 - DNA, 491 bp, Homo Sapiens
ctgattgacttcaagaaggagtcagagatcagcttaagggcaaaggctggaagcagagcgaactgggagcagagcacacagagccgtggagcgagagatgccggccctgggctgggccgtggctgccatcctgatgctgcagacggccatggcggagccctccccggggactctgcccaggaaggcaggggtgttttcagacctaagcaaccaagagctgaaggcagtgcacagcttcctctggtccaagaaggagctgaggctgcagccctccagtaccaccaccatggccaagaacaccgtgtttctcatcgagatgctgctgcccaagaagtaccatgtgctgaggtttctggataaaggtgaaaggcatcctgtgcgggaagcccgtgccgtcatcttctttggtgaccaggagcatcccaatgtcaccgagtttgctgtggggcccctgccagggccctgctacatgcgagcactgtcccccaggc

SEQ ID NO: 259838 - DNA, 1214 bp, Homo Sapiens
tgatgaagttttatacagatgttgagcataccggagccaccagtgagttttatgacaagttcacaattcgctatcatattagcaccatttttaaaagcctttggcaaaacatagctcaccatggcacctttatggaggagttcaactccgggaagcagtttgttcgctatataaacatgttgataaacgacacgacgtttttgctcgatgaaagtctggagtctctgaagcgaatccatgaagtgcaggaagagatgaagaacaaagaacagtgggaccagttgccccggagcctgcagtgcagtacctgattgtatccatgagtcaaacagctcttattatctcctccccagcccatggcagagttgaaggaggaaagtgcgccagaggatcagcagcaggctcgtcagtctcagcttgctcaggatgagcgtgtgtcccgctcttacctcgccctggccaccgaaaccgtggacatgttccacatcctcacgaagcaggtccagaagcccttcctcagaccggagcttggaccccgattggctgcaatgctgaactttaatcttcagcaactttgtggccccaagtgccgtgacctgaaagttgaaaaccctgagaaatacggctttgaaccaaagaagctgttggaccaactgacggatatttacttacagctggactgtgctcggctcgcgaaagccattgctgacgaccagagatcctacagtaaggaattgtttgaagaagttatttcaaagatgcggaaggcagggatcaaatccacaatagcaatagaaaaatttaagctgctcgccgagaaagtggaggagatagtggccaagaacgcacgcgcagaaattcgactacagcgacgctcctgatgagttcagagaaccctctgatggacaccctcatgacagaccccgtgcggctgccctctggcaccatcatggaccggctccatcatcctgcgggactgtcagattccccaggacccttcaacggagaagttgcagagagatggtggacccgtgccagaactgaagagcagatacacgggggttgagggagaaacgacaggtactaaacggtggcggccccctgttaaagcaagcgccaggagcaaaaaggcgactaaaaccggggcagctacgggcactttgaagggcgccaggataaagcggaggcgaaccggaaggaggtgaggacctgga

SEQ ID NO: 259839 - DNA, 860 bp, Homo Sapiens
  misc_feature (24)..(24): n is a, c, g, or t
  misc_feature (293)..(301): n is a, c, g, or t
ggagaagttccggggaaccctttnatcctcctcaggcccacccccctccgaagagccgggacttgggtacccgccctgccccctgtaacccccagatacagttacatgtagggtacagatgatgaagcttcccagagcttatcctgatctcttagacagaactcacataaacacacaaatacaagaggttattttcaagacacacacttgcaagtaatctttctatagaaatggccacagcattataatattcaaaatatggaagattgacagtctgaggattttctagaggnnnnnnnnntcaaaggacttgccaaaaggataactacataacagatatgacaatctacaggacaaaaagacaacatgtcaccaaatattgttcatacaacagcgttaatggaaaacagtaaaacaccttttagcagtgtgcatgttaagtcttttagtaagattatctgtaatgaggtttgaaagtaaatcacttagtagacaaagtaaaccaccacagaaccaggaatagcacccatcactgctgctttgtcactccagaaagctgaaagtcaaccgaacaatgaaaaaaagtcaaagaagcatttccctttgaattcagtcctaaaaatatgaatgccttataattaatttcaaaataagtatcttacaagtgtttcatgaaacattgttttcctaaaaggcaaattcaacattatcgaaaatatatattttgccgggtagttactgagaaatgtcaatcctttcaactctagagaatgatgcatggaggtcggctttgagccccactgccgctggagcgtgtttccaatttgccttctgcatcggcaccttaatgcagatgtaca

SEQ ID NO: 259840 - DNA, 268 bp, Homo Sapiens
tttttgcttgctttacggttttattttgcctttcgtttgttagctcattttataatttgttacttctgaacaccttccaagtgctggtgctttcagatatctacctcaaagtattatttgtaaatgtcaaaaagtccctcttacatataattgaaagctggctacatggtagacaatatgatcacaaacttttaaacaattttttaagctgaagaaatactttttctttttataagtatcaaatcaaaatgtaattcagcatccaccc

SEQ ID NO: 259841 - DNA, 588 bp, Homo Sapiens
ctgctatgcagcgcatgacactggcccattctctcttaaatttgtggggttctccgaggtgactgtcgatacaggggtacagtaggccaacaacagcagctgctgtcccgcagcagggaagagagtgacattcctctggatctgcagcaggttgagcaccagggctaggaccaccccaaccgagaagagcacgaggctcctctgcaacaggcgatgatgccaggtgttggggtaggggctgccgggctcggggccgctcatcgcagcactgcggcccctgggcgcggggtcagcgtccggggcaccgtgggccgccagcagggagggcccggacacggaaacgttgatcatctccccaaccttggccgccagccccgcggcgctggctcgcggggggcctcggcgcctcgcgctgtgcgcacaggagcagctccagaagtggtcgtgcaatctgggcatcggtcacacgcgtccaagaggcgcttcctggccgagaggcgcccgcccgccggctctccgaacggaggcggggcgggggaaaggaggagtcacggcccgggacggccgcagcgcctggcgggcgcgcgg

SEQ ID NO: 259842 - DNA, 962 bp, Homo Sapiens
  misc_feature (838)..(860): n is a, c, g, or t
catagatcaaacagccaaacacctggaagtattagatacaagtttaaaatatcttttataggttttatataaaaatgtctgagtatgattttgtgtgaaagttctgataccagttgtaatagagtcaaatttatgtgagcaataaagaagaaattggcagatattggaaaaatattttgtgaaaagctgtatttattataaatactagggccatgacatagtaccattggggttaagtcattttcccaatctatttataatttaatgatatgttagtgcctctgttatatgtcaagtttaaagcagggcacattgttgcagcaaaatgtgtatttgacaaattatacttgcaattttgggtcatgaaagtttgcaatatagtaaatgcacgattgactgttgctttgtgcctcagtatttaatttgtttcagtaaacttactttattactgtttatgatttcagataaaaatagttgctgagtaaattttacttgtaatctacaattggctttttaaaaataacctgttgatatataattgtcagtccaaatgaatatgtgaaacagctggaattgtacaaattttggttgtatttaaagctcagtttcctttttgttttattgtatgcgttgggtttgcagcatgaacttgcacagataatgcacgttttctggttaagtaaacatgatgcacactattctgtaacagaaagccctattgtgccttacctgtgtgcttttgtgggcaccttgtttatgaagaataaaaaatgatttgttatctgaagagaataaattttaaattctcagtttatgtctcagatgctaacgtgtgaannnnnnnnnnnnnnnnnnnnnnnaagtaaccagtcttcctgtattttatgtgcatcatagtgatttatctgagcttagtgacccccatcttgtaacctgttgcaagagtgaatgtaaaaatagtt

SEQ ID NO: 259843 - DNA, 436 bp, Homo Sapiens
tttgtagaatcttacagcatctttgataaacttctcagtgaaaatgttggctaggcaagttcagttaaaatatagtagaaatgtttatcctggtatctctaagtatacatttaattgtacagaaaatttacagtgtaaccattgtgtccaaccatttgccagattgactgtatatgacccttaatcctttgtgccagccctgaaggatcagtgtagtaatgccaggaaagtgctttttacctaagacttccttctcagcttctcccataaagagaccctaatatgcattttgatttgtaattggaaatgtaactttcactgaaagtgtcatgtgatgtttgcattacttttaactgctatgtataaaggaaagtgtgtcttttgacttcatcagttatttctcttgtgcacagagaaaaatgcattaaaaatgact

SEQ ID NO: 259844 - DNA, 987 bp, Homo Sapiens
  misc_feature (244)..(244): n is a, c, g, or t
  misc_feature (363)..(363): n is a, c, g, or t
aaggcaggacgggcttccccaggcgtgtgcaatgttgttaccagtggaccctgcatagccctgggaaagcccttcagcccggtcaaaactcaaactccaatctccaacatagccactggagaaagctgtggttgctccatccccacatagttcatagcctggccagaccccgcaagctcctgactcttcctaaaagtcatccaagccccacccacacccatctgccagctggcccagacccccnatactggcatccgcccacggtatgtccgtcataggtggagtcgttgaggtacacggcctcagataaatacattgtctgccccacaggggcggtgtaagacaggagtccatccctccagnaggcagccatagagctctacccgcagacagacgctcatgacccggtcagcccgggggtagaagcgaaccagtcgggcaaccatggggggcccaaggtccttcagcaccactccctcagggtcctcattgcctgagatcacctcctgaccccagcggtccttccagcccatccagcggcgaccatcccgggagtaacgcagccggtagctccgggagaactccttgcccaggcccccggcatgccgtccctgggtgcccaccagagccaccaggtgcagtcgttgtagatccacctgcaagtactcctcctccttgggaaacaccgaccctgcggggcaccaggccccatccccgtcactgctctccaacctgctgtggcgggcggcagtggaatctgaccaggagctggaagcagagatgtcactgtctgggatggtccggtcctgcatgcccagggcatagcggcacttggcaggatcaaaatgtcccttcatgtcagcatctccacttgccaccaagagcagcagcagtaaagatgacagggcctctggtcccatagctcctgatccctcgggcctaagggggtgggggcagcatctccctccagagaacagcagctgggga

SEQ ID NO: 259845 - DNA, 1296 bp, Homo Sapiens
  misc_feature (1232)..(1254): n is a, c, g, or t
gggaggaaaggctcgggtaggcttctgggagcgaccgctccgctcgtctcgttggttccggaggtcgctgcggcggtgggaaatgctggcgcgcgcggcgcggggcactggggcccttttgctgaggggctctctactggcttctggccgcgctccgcgccgcgcctcctctggattgccccgaaacaccgtggtactgttcgtgccgcagcaggaggcctgggtggtggagcgaatgggccgattccaccggatcctggagcctggtttgaacatcctcatccctgtgttagaccggatccgatatgtgcagagtctcaaggaaattgtcatcaacgtgcctgagcagtcggctgtgactctcgacaatgtaactctgcaaatcgatggagtcctttacctgcgcatcatggacccttacaaggcaagctacggtgtggaggaccctgagtatgccgtcacccagctagctcaaacaaccatgagatcagagctcggcaaactctctctggacaaagtcttccgggaacgggagtccctgaatgccagcattgtggatgccatcaaccaagctgctgactgctggggtatccgctgcctccgttatgagatcaaggatatccatgtgccaccccgggtgaaagagtctatgcagatgcaggtggaggcagagcggcggaaacgggccacagttctagagtctgaggggacccgagagtcggccatcaatgtggcagaagggaagaaacaggcccagatcctggcctccgaagcagaaaaggctgaacagataaatcaggcagcaggagaggccagtgcagttctggcgaaggccaaggctaaagctgaagctattcgaatcctggctgcagctctgacacaacataatggagatgcagcagcttcactgactgtggccgagcagtatgtcagcgcgttctccaaactggccaaggactccaacactatcctactgccctccaaccctggcgatgtcaccagcatggtggctcaggccatgggtgtatatggagccctcaccaaagccccagtgccagggactccagactcactctccagtgggagcagcagagatgtccagggtacagatgcaagtcttgatgaggaacttgatcgagtcaagatgagttagtggagctgggcttggccagggagtctggggacaaggaagcagattttcctgattctggctctagcttccctgccaagannnnnnnnnnnnnnnnnnnnnnngaactttagtcgtgtaataaactcaccagtggcaaaccaaaa

SEQ ID NO: 259846 - DNA, 919 bp, Homo Sapiens
ggagcaggaggcggggctgatagcccagcagcagcagcggcggcggcggctgcggagcgggcgtgaggcggctggaccgcgctgcaggcatccgcagggcgcggcaagatggaggtgacgggggtgtcggcacccacggtgaccgttttcatcagcagctccctcaacaccttccgctccgagaagcgatacagccgcagcctcaccatcgctgagttcaagtgtaaactggagttgctggtgggcagccctgcttcctgcatggaactggagctgtatggagttgacgacaagttctacagcaagctggatcaagaggatgcgctcctgggctcctaccctgtagatgacggctgccgcatccacgacattgaccacagtggcgcccgccttggtgaatatgaggacgtgtcccgggcggagaagtacacgatctcacaagaagcctacgaccagaggcaagacacggtccgctctttcctgaagcgcagcaagctcggccggtacaacgaggaggagcgtgctcaacaggaggcccgaggccgcccagcgcctggccgaggagaatgcccaggcccgctccatccccgtgggcatccgctgtgacgtgcgggcggagggacaatcccctcgccgggggaccgtcctgtatgtaagtctcccagatttcaagcctggctactggattggcgtcccgctatgattgaccactgggggaaaaatgatggccatgtggaatggtaaaagctactttcaaatggcaggcccagcatggtgtactttgtaaggcaatcagccgtggacggggggcgggacttcccggcgggaggactactgggttggacacagatatgaacccttaccgaatttcccccggcttccacctcttaaattccggccattgaatggccccttcccg

SEQ ID NO: 259847 - DNA, 947 bp, Homo Sapiens
  misc_feature (926)..(926): n is a, c, g, or t
gtagcgaggcctgggtggcgaattcggcacgagggtgacgggggtgtcggcacccacggtgaccgttttcatcagcagctccctcaacaccttccgctccgagaagcgatacagccgcagcctcaccatcgctgagttcaagtgtaaactggagttgctggtgggcagccctgcttcctgcatggaactggagctgtatggagttgacgacaagttctacagcaagctggatcaagaggatgcgctcctgggctcctaccctgtagatgacggctgccgcatccacgtcattgaccacagtggcgcccgccttggtgagtatgaggacgtgtcccgggtggagaagtacacgatctcacaagaagcctacgaccagaggcaagacacggtccgctctttcctgaagcgcagcaagctcggccggtacaacgaggaggagcgggctcagcaggaggccgaggccgcccagcgcctggccgaggagaaggcccaggccagctccatccccgtgggcagccgctgtgaggtgcgggcggcgggacaatcccctcgccggggcaccgtcatgtatgtaggtctcacagatttcaagcctggctactggattggtgtccgctatgatgagccactggggaaaaatgatggcagtgtgaatgggaaacgctacttcgaatgccaggccaagtatggcgcctttgtcaagccagcagtcgtgacggtgggggacttcccggaggaggactacgggttggacgagatatgacacctaaggaattcccctgcttcagctcctagctcagccactgactgcccctcctgtgtgtgcccatggcccttttctcctgaccccattttaattttattcattttttcctttgccattgatttttgagactcatgcattaaattcactagaaaacccgganaaaaaaagtaaagcctgcccc

SEQ ID NO: 259848 - DNA, 457 bp, Homo Sapiens
  misc_feature (36)..(36): n is a, c, g, or t
  misc_feature (133)..(133): n is a, c, g, or t
  misc_feature (316)..(316): n is a, c, g, or t
  misc_feature (443)..(443): n is a, c, g, or t
gaggtgacgggggtgtcggcacccacggtgaccgtntttcatcagcagctccctcaacaccttccgctccgagaagcgatacagccgcagcctcaccatcgctgagttcaagtgtaaactggagttgctggtnggcagccctgcttcctgcatggaactggagctgtatggagttgacgacaagttctacagcaagctggatcaagaggatgcgctcctggggctcctaccctgtaggatgacggctgccgcatccacgtcattgaccacagtgggcgcccgctttgggtgagtatgagggacgtgttcccgggtnggagaagtacacgatcctcacaagaaggcctaacgaacccagaggcaaggacacggttccgtttttttccttgaaggcgcagaaaggtttgggtcggtaacaacgtaggtagggagccgggttttancagggaggtcctag

SEQ ID NO: 259849 - DNA, 1376 bp, Homo Sapiens
ggctggaccggtccggattcccgggatctggcactgagcacagtcaggcacctgcaggagctggtcggccaggagacactgcccagggacagccccgacctcctgctgctgctccggctgctggcgctgggccagggagcctgggacatgatcgacagccaggtcttcaaggagcccaagatggaggtagagctcatcaccaggttcctcccgatgctcatgtccttcctggtggatgactacactttcaatgtggatcagaaacttccggctgaggagaaagccccagtctcatatccaaacacacttcccgaaagcttcactaagtttctgcaggagcagcgcatggcctgcgaggtggggctgtactacgtcctgcacatcaccaagcagaggaacaagaacgcgctcctccgcctgctgcccgggctggtggagacctttggcgacttggcctttggcgacatcttcctccacctgctcacgggcaaccttgcgctgctggccgacgaatttgcccttgaggacttctgcagcagcctcttcgatggcttcttcctcaccgcctctccaaggaaggagaacgtgcaccggcacgcgctgcggctcctcattcacctgcaccccagggtggccccatctaagctggaggcgttgcagaaggccctggagcctacaggccagagcggagaggcagtgaaggagctttactcccagctcggcgagaagctggaacagctggatcaccggaagcccagcccggcacaggctgcggagacgccggccctggagctgcccctccccagcgtgcccgcccctgccccgctctgagggccctccagacctgctcgggtgctggggccatgccgagtcccggccctgctcaaccggaagaggctcccggacctggatgtacagggcagtctctcttcccggggctatggctgggcctgtcctgccggcatggccccctgcttcctgctccttggagctgggctcccggaacttgcccaccatccatgcaggggctcccagggcagagcctctcccttgtactttggcaaccataaaaagcgggctcattttctggtttccgggggtaggaaaaaaaccacctggtttcaaaagggagaaggccggggcctgaagggtggggggcgcgggccctccttcattgggcccagctttgggagaaaggcaaggggacccctggcttatttgcccttgggaggtttgcggaaaaaggaacaccccaaacctccctggggaggccctgggtgggggggaacgaaccccggggctcgggcccatggccggggcgcgtgcccggtgaggcctttggcgcggaagggaagccccacccctccgcccggcgc

SEQ ID NO: 259850 - DNA, 465 bp, Homo Sapiens
  misc_feature (191)..(200): n is a, c, g, or t
atcaatatgttaacatgggtcctttagcttttaaaatgacttgctttgttttagaaaggtggtattaatccactctctattcttgaaaatttggatgggagaattctgaagttgcctgctgttttcctttagcgctgaggttcttaaggttacttttatattactctggaatcaagtattttaaattgtannnnnnnnnnaaatgatctctcagcaataattgtttgaaactatccatatataaggttatcagacctacagttccctaagaggaactgcatgttctcttcaatcagaaatatacagtagaagcaggtatatcttccatgcagtttcagtagtaagcactacttatacctacataagagttaaaatccagatgtggggaccttttgataccatcagtgatatatatttttttaaactggtacagagaagtgaaaagattaaattctacttctattt

SEQ ID NO: 259851 - DNA, 995 bp, Homo Sapiens
  misc_feature (12)..(12): n is a, c, g, or t
  misc_feature (24)..(24): n is a, c, g, or t
agaagatcgagnaagcgcttgagnaaggagaaagcagaaattgaacgcatgcaaaacctgactgaggaagagaggagagctgaacttcgggcaaacggcaaagtcattaccaacaaagctgttaagggcaaatacaagttcttacagaagtattatcaccggggtgccttcttcatggatgaggatgaagaagtatacaagagagatttcagcgctcctaccctggaggatcatttcaataaaaccattcttcctaaagtcatgcaggtcaagaactttggacgctcaggtcgcaccaaatacactcaccttgtggatcaagataccacctcctttgactcagcttggggccaagagagtgcccagaacacaaagttcttcaaacaaaaggcagctggggtacgagaggtatttgagcggccatctgccaagaagcggaaaactacctagggtccaactgcttattcttccaactgtggaacacaaggggagtctcagcatctggtccttgatttggttttttcattgtttccttggcccctgtatccagatattggacttactgctatacttgtgatactgggtagcccagactttgaaggtgctttgtgaggtttggactcatgctgagaaacccacaggaaagcactgtccaggtaggattagaggcttcccacttaaaactatttctgagaaatcttaggttttatcactgctatggtttcccatatttacttgggactgttctgactttctttttccagcccttagcttgggttagaaaagtggacatgtaagtgaacaatgcattacttctaccttaggtttaggagtaatatacccggaaatctaagctcatggaaacatgttttccatttttgcttggagtccgtttttctagttgtacatactttttgatccatatatgtgtgcatgtcaagaaataaaagaatcacacaacaaggagatttttagcatgatactggaaataaaat

SEQ ID NO: 259852 - DNA, 1014 bp, Homo Sapiens
ggtacaaataccccagaaatggtctcactttgggaaaggctctggaatccttcacaaatgcctaaacagagaatcagagcattttccttggaagtagtacttttgtacttttgtaaacactatccacaagttagccttttatgcttgtcagtcaggtgaaatagttatgagtgtgtccccaacaagcaagtttaggaacagacactggacactgataagcatgaggagtattgaccccagtaagtcaagacacgtggtgaaaagaaactcaaccttgtggcagaacaaaggaagacagtagtgagtttgacagtatctaagatggtggtctcctggtctctcccctgaaaaggatttatagataccagtggaattagaaacttcctacagacaggagctctggggagtcacatgctgtagcttcaaaagataagtagttttagtgtctgataatcatggtctcttgcaaatcagttaacaatgcaaggactcttaatacatatacttgtcaatgtgttatataaccggaaagctgccccaaaatattcactgagcaaataccctgggcccagctgttcccaatagcctctgacaaaccaacctctggacaacctgcaattactgtaatgtgcttgtaaaaactagacttgaaacattttcaaaaactgcaagacatttactatggaaaaatgttatccttttcactgcaattcctcttaacatatgctaaaatccttttggtgtatgggttttccccaatatatggggcaaaggcaaaggttgggtcatccttggaagtttctaatcacctttgcattgaactgtgggaaaggggatgtgtcttgcttttaccatggcaatcccgtctagagtcatggggaggattttccctgtctgagctatctttccttaccctgactttttctttattcccatcactttctgcccgacgcgtggtcgacgatatcccgagattcgcgaccgtaccagcctgctttatagccagctgtcata

SEQ ID NO: 259853 - DNA, 1164 bp, Homo Sapiens
cagagatgtaagcccatatgatcacagtcgtgttaaactgcaaaatgctgagaatgattatattaatgccagtttagttgacatagaagaggcacaaaggagttacatcttaacacagggtccacttcctaacacatgctgccatttctggcttatggtttggcagcagaagaccaaagcagttgtcatgctgaaccgcattgtggagaaagaatcggttaaatgtgcacagtactggccaacagatgaccaagagatgctgtttaaagaaacaggattcagtgtgaagctcttgtcagaagatgtgaagtcgtattatacagtacatctactacaattagaaaatatcaatagtggtgaaaccagaacaatatctcactttcattatactacctggccagattttggagtccctgaatcaccagcttcatttctcaatttcttgtttaaagtgagagaatctggctccttgaaccctgaccatgggcctgcggtgatccactgtagtgcaggcattgggcgctctggcaccttctctctggtagacacttgtcttgttttgatggaaaaaggagatgatattaacataaaacaagtgttactgaacatgagaaaataccgaatgggtcttattcagaccccagatcaactgagattctcatacatggctataatagaaggagcaaaatgtataaagggagattctagtatacagaaacgatggaaagaactttctaaggaagacttatctcctgcctttgatcattcaccaaacaaaataatgactgaaaaatacaatgggaacagaataggtctagaagaagaaaaactgacaggtgaccgatgtacacggactttcctctaaaatgcagatacaatggaggagaaccagtgagagtgctctaccggaaacgtattcgagaggaccagaaaggcaccacagctcagaaaggtgcagcagatgaaacagagctaatgagaatgacgaaaaagaaaagggcaagatgacaagaacctaattttcatgacttgagaatttctgcgggtttaatttgaacccttgattggaaggagaacttgagccaatcggaactaaaggagggtcgctaaccttaatggctcaaggtttttcaaggtcattcccacggaggtaagcccccggaa

SEQ ID NO: 259854 - DNA, 1639 bp, Homo Sapiens
cggtccggaattacgggatatcgtcgacccacgcgtccgggcctggtcgtcgtctgcggcggcggcggcggctgaggagcccggctgaggcgccagtacccggcccggtccgcatttcgccttccggcttcggtttccctcggcccagcacgccccggccccgccccagccctcctgatccctcgcagcccggctccggccgcccgcctctgccgccgcaatgatgatgatggcgctgagcaagaccttcgggcagaagcccgtgaagttccagccggaggacgacggcgagttctacatgatcggctccgaagtgggaaactacctccgtatgttccgaggttctctgtacaagagatacccctcactctggaggcgactagccactgtggaagagaggaagaaaatagttgcatcgtcacatgatcacggatacacgactctagccaccagtgtgaccctgttaaaagcctcggaagtggaagagattctggatggcaacgatgagaagtacaaggctgtgtccatcagcacagagccccccacctacctcagggaacagaaggccaagaggaacagccagtgggtacccaccctgcccaacagctcccaccacttagatgccgtgccatgctccacaaccatcaacaggaaccgcatgggccgagacaagaagagaaccttccccctttgctttgatgaccatgacccagctgtgatccatgagaacgcatctcagcccgaggtgctggtccccatccggctggacatggagatcgatgggcagaagctgcgagacgccttcacctggaacatgaatgagaagttgatgacgcctgagatgttttcagaaatcctctgtgacgatctggatttgaacccgctgacgtttgtgccagccatcgcctctgccatcagacagcagatcgagtcctaccccacggacagcatcctggaggaccagtcagaccagcgcgtcatcatcaagctgaacatccatgtgggaaacatttccctggtggaccagtttgagtgggacatgtcagagaaggagaactcaccagagaagtttgccctgaagctgtgctcggagctggggttgggcggggagtttgtcaccaccatcgcatacagcatccggggacagctgagctggcatcagaagaccgacgccttcagcgagaaccctctgcccactgctggagactctgacagacgctgagatggagaagaagatccgcgaccaggacaggaacacgaggcggatgagccgtcttgccaacaacgccccggcctggtaaccagcccatcagcacacggctcccacggagcatctcagaagattgggccgcctctcctccatcttctggcaaggacagaggcgaggggacagcccagcgccatcctgaggatcgggtgggggtggagtgggggcttccaggtggcccttcccggcacacattccatttgttgagccccagtcctgccccccaccccaccctccctacccctcccctagtctctggggtcaggaagaaaccttattttaggttgtgttttgtttttgtataggaaccccaggcagggctagtaacagtttttaaataaaaggcaacaggtcatgttcaatttcttcaac

SEQ ID NO: 259855 - DNA, 906 bp, Homo Sapiens
tcccaaatgtcagtggacaatttttctctagttggaagactcctttgcaatcctagaagtaggtatggacagagggcactgggaatgccagtaggtaagggagtgaatgctacacaacttccaaccctatgggacagccttgggatgttccatattgtcatttctttttcaagccatacaaagttcaactttatagcaaatggcagcacataaattcatttctgagtagtaaaagtattccccatacaggtgacaagtccatcattaccatcctatagatttcatcacaagctcttgaaatatatactgagaaatgaaagaggcactaaatgtgttgaaattcacctttcaaaaaagcagcatgactgtgaaggaaggccaccttggctaataacctgtggcagtgcttcaaaaagatgtaaaattaaataaagacacaacaggttgataatcaccaagttatatatgaaagtctggctactccaaccttttttcaagtgtgttaaaaataaaaatcaaactgcctttcagacccctgagtgtaatcccaaagaagacaacatgctttaactctgtctaataaaacagagctaaaggcacaaattaccaacatcatcttaaaacacaacaaaaagatgtaaacatctacaaagtttaaggtaaaagcagtcttgtaaacagtaactgcagatgataatgttattgtaaaatcacagtttatcaatgtccttcaaactgatcaggaggttccaggtttggagctatacagagttaataacaatagttgcagcaggtttcaggcggttttcagtcctgtataaatttacttgtcagtaggtaggttattggtttatttttttctctctaaacactatggatgttattcatttcccatttttgagtcgt

SEQ ID NO: 259856 - DNA, 1072 bp, Homo Sapiens
  misc_feature (489)..(489): n is a, c, g, or t
  misc_feature (524)..(524): n is a, c, g, or t
tagcgaggcctgggtggcgaattcggcacgaggaaccaagcggcagcggcggagtcggggccggcccagtggtggtgccagacggcggcggagaggggccccagccgcaccccagcagcagtcagagcccgccagaccttcctctgaaggcaaagtgacctgtgacatccggctccgggttcgagcagagtactgcgagcatgggccagccttggagcagggcgtggcatcccggcggccccaggcgctggcgcggcagctggacgtgtttgggcaggccaccgcagtgctgcgctcaagggacctgggctctgtggtttgtgacatcaagttctcagagctctcctatctggacgccttctggggcgactacctgagtggcgccctgctgcaggccctgcggggcgtgttcctgactgaggccctgcgagaggctgtgggccgggaggctgttcgcctgctggtcagtgtggatgaggctgactatgnagggctggccggcgccgcctgttgctgatggaggnaagaaaggggggcggcgccccgacagaggcctcctgatccaggactggcaggattgatcccacctccaagtctccgggccaccttcctcctgggaggacgaccatctctacccctagaggactgtcactctagcatctttgaggactgcgacaggaccgggacagcaggccccttgacagcccctcccacaagatgtgggctctgaggcctaaaacattttccagctgagttttccttcccagactcctccaacccccaggtgtgcccccccttaacctcccggaaggcgggggctgggccctgatatctcaaaaaaggagggggcacagcttacccactcaccaaaggccccccctgcaccttggaactccgggaccttggggctggtctgcactggccaagggggcccaaaacttcgctcatggttccaactggcccccgggtggaaaactttcccctggggcctcttggcctggggccctgctttcccaagaaccacccttttctttgggccctaaagggggccttctcctctccaagggaaact

SEQ ID NO: 259857 - DNA, 996 bp, Homo Sapiens
  misc_feature (618)..(667): n is a, c, g, or t
ggtacggtccggaatgccgggatatcgtcgacccacgcgtcgagagaaggtgccagaaagatccaaaacaagtggctgcggccgtcgcccaggagtcatcggacgccagaatctggccgggttctgagcttgttccgcctccctcccccgggaatggcgctatccgggtcgaccccggcccggtgctgggaggaggatgagtgcctggactactacgggatgctgtcgcttcaccgtatgttcgaggtggtgggcgggcaactgaccgagtgcgagctggagctcctggcctttctgctggatgaggctcctggcgccgccggaggcttagcccgggcccgcagcggcctagagctcctgctggagctggagcgccgcgggcagtgcgacgagagcaacctgcggctgctggggcaactcctgcgcgtgctggccgccacgactgctgccgacctggcgcgcaagcgggccggcagtgtctccagaacgctatagctatggcacctccagctcttcaaagaggacagagggtagctgccgtcgccgtccggcagtcaagcagttctgcaaattctcagcaggggtcagtgggagacaggtcccccccaacaagcggannnnnnnnnnnnnnnnnnnnnnnnnnnnnnnnnnnnnnnnnnnnnnnnnncccagcggacccagagagttcagagccgccagaccttctctgaggggaaggacctgtgacatcgggtccggttccgaggaggacctggagcctggcaagcttgagcggcgtggatccggggcccaggcgtgggcgcagctgacttttgggagccccgaaggcgggccagaccggctggggtgggacacagccaaccccattggagcttggggaactcaggccgtagcccgggtttactagccaaacagggggagagccgacgtagagaaacaacagcgtaaaaaggagtcaaaactcaagggcaaaaaaggacacagagaccgccgaac

SEQ ID NO: 259858 - DNA, 321 bp, Homo Sapiens
gaagggtggcagtgactaccccattgccaggataagcctcgtaggagggtcaggaggggagggtgggacaccttgcccagtggcactttcctcttccctcatgggcgtgaacagccctggcctgccccttaccccaccagaaataccaaggaatctataaaagaaatggcatcctatgcttcctggctgaccacatcgtgccccaggccctcttgttactggcttgggccaggctcacaaagcctggggaggggctgccttttacatttttccatttttcttcaaaaaacagatgaaaatgagttgacagctaaaaaaaga

SEQ ID NO: 259859 - DNA, 547 bp, Homo Sapiens
ctgtttggcagggcggggcgcctcgcgaagatggtggcgcgcgcggcgtgtggctcccgtcgtctggccaagtctcagcgcagcgcaccggccggcgtctcgttggcctggagcccacacccaccgggtccctgaccccgcgccccccgcgcccggttcccggcatgcctcgcgcccgtaagggcaacacgctccggaagggtggtcagcgccgtggaggaggtgcccggagcagtgcccaagctgactcgggttccagtgacgatgaggcagccagtgagtgcccgcagcaccgccagtgaatgccccagccttctcagcaccactgcagaggacagccttgggggggatgtcgtggatgagcagggccagcaggaagaccttgaggaaaagctgaaggactatgtggactgtctcacagacaagagtgccaagacccggcagggtgctcttgagagcctgcgcctggccctagcgtcccgcctactccccgacttcttgctggagcgccgcctcacgctagccgatgccctggaaaagtgcctca

SEQ ID NO: 259860 - DNA, 1954 bp, Homo Sapiens
tctaagtccgaggcctgggtggcgaattcggcacgaggggcgcgcgcggcgtgtggctcccgtcgtctggccaagtctcagcgcagcgcaccggccggcgtctcgttggcctggagcccacacccaccgggtccctgaccccgcgccccccgcgcccggttcccggcatgcctcgcgcccgtaagggcaacacgctccggaagggtggtcagcgccgtggaggaggtgcccggagcagtgcccaagctgactcgggttccagtgacgatgaggcagccagtgaggcccgcagcaccgccagtgaatgccccagccttctcagcaccactgcagaggacagccttgggggggatgtcgtggatgagcagggccagcaggaagaccttgaggaaaagctgaaggagtatgtggactgtctcacagacaagagtgccaagacccggcagggtgctcttgagagcctgcgcctggccctagcgtcccgcctactccccgacttcttgctggagcgccgcctcacgctagccgatgccctggaaaagtgcctcaagaaagggaagggcgaggaacaagccctggctgctgctgtgctaggcctgctctgcgtgcagctgggccctggacctaagggtgaggagctgttccacagcctgcagcctctgctggtctctgtgctcagtgacagcacagctagccctgctgcccggctccactgtgcttctgcccttggcctgggctgctacgtggctgccgctgacatccaggacctggtctcttgccttgcctgcttagaaagtgttttcagccggttctatggcttggggggcagctccacaagtcctgtggttcctgccagcctgcacggcctgctctctgctgccctgcaggcctgggcattgctgctcaccatctgccctagcacccaaatcagccacatccttgacaggcagctgccccggctgccccagctcttgtccagtgaaagtgtgaacctgcggatcgctgccggtgaaaccattgcactgctctttgagcttgcccgggaccttgaggaggagtttgtttacgaggacatggaggccctctgcagtgtcctgcgcactctggccactgacagtaacaagtaccgtgccaaggctgatcgtcggcgccagcgctctactttccgcgccgtgctgcactccgtggagggcggtgaatgcgaagaagagatagtgcgcttcggctttgaggtgctctacatggacagctgggctcggcaccggatctacgctgccttcaaggaagtgctgggttcgggcatgcaccaccacctccagaacaatgagctactccgtgacatctttggcctgggccctgtgctgttgctggatgccactgccctgaaggcctgcaaggttccacgctttgagaagcacctgtacaatgctgctgccttcaaagcccggaccaaggctcgaagccgtgtgcgggacaagcgggcagacatcctgtgaagcaggacctgctgaagaggagactttctatgcccttggtccgtatttttaacagaagacagtgcaacaactggtctccaccagtatttgtcactttattttttttaatgacaaaaccaaaaacagacatggggtgggtagctgggggcccggacacttgggaccctgacccctttgtccctgcactcagccctgtggccccttcctgtcctgtctcaggccaggctaaatatgtgccttcctcagggctgtggggcaggcactagggggcctttcccttcctttcctttctcaggccttgctcccccaggatgacccactcttaggggggtggtggcatctggacaaatgccaccacagcaggtggggtggcaaagctacctggaatggatttgtgtgctgatttttaaggattattacagataattaaacagaacgggtcagccttctgtggtctt

SEQ ID NO: 259861 - DNA, 540 bp, Homo Sapiens
agggcgcaggggaagccaccgagaagggagaggcagccggacagcccctcccctccgcctggcctggactgggggcagataccaggcattgagctggcattgaggtttccattgcatctaccatggggcacaggctcccaagccagtctggggaggggagtcaggcagtccaggatctcctgggggtaacggtgggagtctcaggagtggcacggggggagacgcccgacctgcagcggggatgaacacagccagcccaggggtccacaaggcctcaatgcagggaggggcatgaagggcacatgaaggcccccagctagccaggcccacacctgggtgccacagtgaccactgccctagttcgtgtggaactggatgggatcccagggtaggagacttgcagttttaaacccaagacagtccccagccagctgggaagagctggttaccctcatggcaaaagaccagaaaaggagacctggagagaggcctgggtgctgggacatgggacacagatgggcccgaggggacaccctgctg

SEQ ID NO: 259862 - DNA, 1089 bp, Homo Sapiens
  misc_feature (40)..(40): n is a, c, g, or t
  misc_feature (54)..(54): n is a, c, g, or t
  misc_feature (135)..(135): n is a, c, g, or t
  misc_feature (145)..(145): n is a, c, g, or t
  misc_feature (221)..(222): n is a, c, g, or t
  misc_feature (238)..(238): n is a, c, g, or t
  misc_feature (299)..(299): n is a, c, g, or t
gtgggaaggaggccccgaccaggaagggcggccacccagncccgggccacttcngggttcccccatgtaccagatcctaggatctgactccattcacccagggagcagccctaaacccccaggccttgcagctcncaagggcccntgcctgcccctggacattattgcttttctgccccccataggggggacagcgggtgggggattggaccgccccgtgnnctgccactccgagccntagccacggggcctggaaggcagcaccactgtctgccgggtgtcgcgtcccaccagaaggncagccttcgtccagatgcagcagcgcggaggcagacaccagcacgacacccaggccagaaactcaggcaggccccaggcgccatgcttcacccctcactggggcttgtgtggattaaaacctgaatctccaaccgcccaacagcccaggcctgggcgggaggtggagtcttccaaatgcgagtctgggcacaaaggtgaggctggaggctggaggcaggggctgcaggggccgctggggtgcgtctgggaggggcctgaagaagaactggaaagggggtgaggaggtgggggtggggacacaaaccaaaaaggctaagtaaaaagttagggggaaaaaaccacccagcggtgatggcagcgagcgtgcgtcctctgcgtgggcagactgctcactcgcggatgctggccgagtaggagaactgggggaagtgggtccgctggtccagctccagtaagcccaggctgtcatagcggtcagggggtgtgattgtgatggactgggcggtaaattcatcatcgaagtaccttgtgtcgacctcggacgtgacctgaggtttgaagggtggcaggagcttcttctggaccacgtcctgccagttgatgctgaggaagaacctgtgctccatgacctccttggcatcgctgggccccccaccaagcctctgcttggggtccttcttaagcagcccagcaagcagggacttggcctcggggctgagcgtgcgcgggaagcggatctcttccatgaggatgagctcgaagaggcgctcgtggtcctggtgtagaagg

SEQ ID NO: 259863 - DNA, 1808 bp, Homo Sapiens
tccggaaaggggaagagcagccaacatggcggcggaacgcggcgcggggcagcaacagtcgcaggagatgatggaggaagaacatgagctgcctgtggacatggaaaccatcaacctggacagagatgcagaggatgttgatttgaatcactatcgcatagggaagattgaaggatttgaggtactgaagaaagtgaagactctctgcctccgccaaaatttaattaaatgcattgagaatctggaggagctacagagtcttcgagagctggatctttacgacaaccagatcaagaagattgagaatctggaggcgctaacagagctggagattctagatatttcttttaatctgctgagaaacatcgaaggggttgacaagttgacacgactgaaaaaactcttcttggtcaacaataaaatcagtaaaattgagaacttaagcaacttacatcaactacagatgctagagctgggatctaaccgcatccgggcaatcgaaaatatcgacaccttaaccaacctggaggagtttgtttttggggaaaaacaaaattactaaacttcagaacctggatgcgctcaccaacctgacagtcctcagtatgcagagcaaccggctgaccaagatcgagggtctgcagaacctggtgaacctgcgggagctgtaccttacccacaatggcatcgaggtcatcgagggcctggagaacaataacaaactcacgatgttggacattgcatcaaatagaatcaaaaagattgaaaatatcagccatctaacagagctgcaagagttctggatgaacgacaatctccttgagagctggagcgacctcgacgagctgaagggagccaggagcctggagacagtgtacctggagcggaaccccttgcagaaggacccccagtaccggcggaaggtcatgctcgccctcccctccgtgcggcagatcgatgccacgttcgtcaggttctgagtccttcttggctcctcatgtggtccctctcctcggaagaactgcccagccacgggtttttaacccacctgttgctcctgaggtcgtcactatatcaacagtcacaaacccaatggcaataaaggcactgacgatagctggcgcgcgcgacgccacacaccattttcagatgccgttgcaattaaatcttgccacactgtcctcctgggtgattgttgacagttattgtagccacagagagaacataagacacgttgcgttcattcgctagaaatccctgtttccttctctcagaaggcattcacagtccctacctgagtcgtgtgaaacacagggcctgagaatgctttacaggcattcacgtgctgtccgagtggcattcgggggctggcctagctggccctagtcctggtgtgcagggttcaggcagtcttgacctgcaacaaccgaggttttttagtcttttaacccagccattttcaattttttaaaaattaggtaagttaaaaaagctgggtaaaagctgactcagccctgtgtgcttgtgttccttagagctctccttcaaagagcgccgggcagggctgactgttttcacgtgtgcccgtcagttctcgccacatcccttgcctgtgggtgaaagctcaggtgtggggagggtgtcctgtgtcccacacggtgctgtgctgctgccagaatacgagtcccattgagcctctccaaagacggcctccaaggatctgaactcttggccactggtatagtggcctcctgttctcaccccattgttattttggcttttttaatataaaacgcacattgacagac

SEQ ID NO: 259864 - DNA, 964 bp, Homo Sapiens
gggaagagcagccaacatggcggcggaacgcggcgcggggcagcaacagtcgcaggagatgatggaggttgacaggcgggtcgagtctgaagaatccggcgatgaagaagggaagaaacacagcagtggcatcgtggccgacctcagtgaacagagcctgaaggatggggaggagcggggggaggaggacccagaagaagaacatgagctgcctgtggacatggaaaccatcaacctggacagagatgcagaggatgttgatttgaatcactatcgcatagggaagattgaaggatttgaggtactgaagaaagtgaagactctctgcctccgccaaaatttaattaaatgcattgagaatctggaggagctacagagtcttcgagagctggatctttacgacaaccagatcaagaagattgagaatctggaggcgctaacagagctggagattctagatatttcttttaatctgctgagaaacatcgaaggggttgacaagttgacacgactgaaaaaactcttcttggtcaacaataaaatcagtaaaattgagaacttaagcaacttacatcaactacagatgctagagctgggatctaaccgcatccgggcaatcgaaaatatcgacaccttaaccaacctggaaagtttgtttttgggggaaaaacaaaattactaaacttcagaacctggatgcgctcaccaacctgacagtcctcagtatgcagagcaaccggctgaccaagatcgagggtctgcagaacctggtgaaactgcgggagctgtaccttagccacaatggcatcgaggtcatcgagggcctggagaacaatgtgcaggacagcctcacgtactgaggggaagtgtgtcacagagcccccaccctcctcagctgcctccagctcaccctctctgccccagtgcggtgttcaagacaaataaaagactttttctcattcaa

SEQ ID NO: 259865 - DNA, 1145 bp, Homo Sapiens
  misc_feature (719)..(719): n is a, c, g, or t
  misc_feature (1115)..(1115): n is a, c, g, or t
ggggatgacgccacggacatggtggccgagaccggcggggtgggggacgtgtcgcgcggccgggtggcctcggtcggtaccctgggcgcggagcagctgcctcattagtattcgtacccacgaggcggcgcagcgggccctcggggacagcgagcgtcgcggccatggcttatcactcgggctacggagcccacggctccaagcacagggcccgggcagccccggatccccctcccctcttcgatgacacaagcggtggttattccagccagcccgggggatacccagccacaggagcagacgtggccttcagtgtcaaccacttgcttggggacccaatggccaatgtggctatggcctatggcagctccatcgcatcccatgggaaggacatggtgcacaaggagctgcaccgttttgtgtctgtgagcaaactcaagtatttttttgctgtggacacagcctacgtggccaagaagctagggctgctggtcttcccctacacacaccagaactgggaagtgcagtacagtcgtgatgctcctctgcccccccggcaagacctcaacgcccctgacctctatatccccacgatggccttcattacttacgtgctcctggctgggatggcactgggcattcagaaaaggttctccccggaggtgctgggcctgtgtgcaagcacagcgctggtgtgggggtggtgaatggaggtgctngccctgctcccggggcctctacctggccaccgtgcgcagtgacctgagcacctttcacctgctggcctacagtggctacaaatacgtgggaatgatcctcagtgtgctcacggggctgctgttcggcagcgatggctactacgtggcgctggcctggacctcatcggcgctcatgtacttcattgtgcgctctttgcggacagcagccctgggccccgacagcatggggggccccgtcccccggcagcgtctccagctctacctgactctgggagctgcagccttccagcccctcatcatatactggctgactttccacctggtccggtgaccccctggccccagatggcactgagtttttcattcattgaagatttgatttccgtaaaacccaancccccataaaaaacccaaaccctgtcggcc

SEQ ID NO: 259866 - DNA, 461 bp, Homo Sapiens
  misc_feature (48)..(49): n is a, c, g, or t
  misc_feature (82)..(82): n is a, c, g, or t
  misc_feature (426)..(426): n is a, c, g, or t
gtcgcgcggccgggtggctcaggtcggtaccctgggcgcggacagctnncctcattagtattcgtacccacgaggcggcgangggccctcggggacagcgagcgtcgcgaccatggcttatcactcgggctacggagcccacggtcaaagcacagggcccgggcagccccggatccccctcccctcttcgatgacacaagcggtggttattccagccagcccgggggatacccagccacaggagcagacgtggccttcagtgtcaaccacttgcttggggacccaatggccaatgtggctatggcctatggcagtcttccattcgcattcccatgggaagggacatgggtgcacaagggagcttgcaccgtttttgtgtcttgttgagcaaattcaaagtattttttttgctgtgggacaaagctnagttggccaagaagttaagggttgttggtttttcc

SEQ ID NO: 259867 - DNA, 874 bp, Homo Sapiens
  misc_feature (833)..(834): n is a, c, g, or t
  misc_feature (843)..(844): n is a, c, g, or t
tccgcagggcggctgcagagagaggcgccgtggagctgaagaagaacgagttccagggagagctggagaagcagcgggagcagcttgacaaaatccagtccagccacaacttccagctggagagcgtcaacaagctgtaccaggacgaaaaggcggttttggtgaataacatcaccacaggtgagaggctcatccgagtgctgcaagaccagttaaagaccctgcagaggattacggcaggctgcagcaggatgtcctccagtttcagaagaaccagaccaacctggagaggaagttctcctacgacctgagccagtgcatcaatcagatgaaggaggtgaaggaacagtgtgaggagcgaatagaagaggtcaccaaaaaggggaatgaagctgtagcttccagagacctgagtgaaaacaacgaccagagacagcagctccaagccctcagtgagcctcagcccaggctgcaggcagcaggcctgccacacacagaggtgccacaagggaagggaaacgtgcttggtaacagcaagtcccagacaccagcccccagttccgaagtggttttggattcaaagagacaagttgagaaagaggaaaccaatgagatccaggtagtgaatgaggagcctcagagggacaggctgccgcaggagccaggccgggagcaggtggtggaagacagacctgtaggtggaagaggcttcgggggagccggagaactgggccagaccccacaggtgcaggctgccctgtcagtgagccaggaaaatccagagatggagggccctgagcgagaaccagcttgtcatccccgacggacagganngaggagcanngaagctgccgggggaaaggggagaaaccag

SEQ ID NO: 259868 - DNA, 262 bp, Homo Sapiens
cagaaggaaggaaaccatggggagtccccagaccccaggatcagggaggtgtaagtaggatggagacagtaaaagaaagcaaaacctatcccacgacactgctggacttgggaaacagaaatcaggctgagagggcggggctaagctcaaaggggaggaggcaggaggcagatgggagaacaaaaagtagaaccagcacacggaaccagggccaagcttgggcagcagaacaaggacccagctggctaggcgcagtggccca

SEQ ID NO: 259869 - DNA, 1239 bp, Homo Sapiens
  misc_feature (1058)..(1084): n is a, c, g, or t
  misc_feature (1110)..(1110): n is a, c, g, or t
gggaggcgccgcttcgaggcccgcggaaaacgcgcgccgagacccgctcctgcagtattagttcttgcagctggtggtggcggctgaggcggcatggatctcagcgagctggagagagacaatacaggccgctgtcgcctgagttcgcctgtgcccgcggtgtgccgcaaggagccttgcgtcctgggcgtcgatgaggcgggcaggggccccgtgctgggccccatggtctacgccatctgttattgtcccctgcctcgcctggcagatctggaggcgctgaaagtggcagactcaaagaccctattggagagcgagcgggaaaggctgtttgcgaaaatggaggacacggactttgtcggctgggcgctggatgtgctgtctccaaacctcatctctaccagcatgcttgggcgggtcaaatacaacctgaactccctgtcacatgatacagccactgggcttatacagtatgcattggaccagggcgtgaacgtcacccaggtattcgtggacaccgtagggatgccagagacataccaggcgcggctgcagcaaagttttcccgggattgaggtgacggtcaaggccaaagcagatgccctctacccggtggttagtgctgccagcatctgtgccaaggtggcccgggaccaggccgtgaagaaatggcagttcgtggagaaactgcaggacttggatactgattatggctcaggctaccccaatgatcccaagacaaaagcgtggttgaaggagcacgtggagcctgtgttcggcttcccccagtttgtccggttcagctggcgcacggcccagaccatcctggagaaagaggcggaagatgttatatgggaggactcagcatccgagaatcaggagggactcaggaagatcacatcctacttcctcaatgaagggtcccaagcccgtccccgttcttcccaccgatatttcctggaacgcggcctggagtcagcaaccagcctctagcagctgcctctacgcgctctacctgcttccccaacccagacattaaaattgtttaaggagaaccnnnnnnnnnnnnnnnnnnnnnnnnnnnaacttgtcggccgcctcggcccctcngagaagcttttctagacccattcgtttgggcgcgccgggccccattagggtaaagtgaacatgggccattaacttgttttcccaagggaaaatcccggggccaattgaacaaagggcctttgggaattt

SEQ ID NO: 259870 - DNA, 613 bp, Homo Sapiens
  misc_feature (594)..(594): n is a, c, g, or t
attttttccctatcacaatatcataaagaggtccaggagcaggcctaagagaaggaccaacaaaagccaaagtgtctgagaacaacataatactgacttttctttgttggtaacagtccatgaaacgtgcacccctctctcctgagacacggtgaggcatgaggggaggcggcagaggagttgtgggtaggacattgtaccgtgtgacatcacgatcatgcagccagtgccgaacgggacaagagatgtgaagaacaagcaacgcagggctcccaggctcacccgggagggaggtgggcggtttcccagctaagtgcccagcctctcaggaacactgtctgtccagttcagccagggccatcccctggggctcgccatctgggctcgcacctttagccctcatcttccctcagctcggtgggtaaaaacttatactgctgctggcggatttgggccagttttttccttgcttcttccagttctcgctctttctttagcatttcttcctgggcggcgatgatctgagcaatgccccccacaaacttggttttcactacaacatcgtcgtcatcagctttgccaaaagctgccttnctgggctgcacggtacaag

SEQ ID NO: 259871 - DNA, 3026 bp, Homo Sapiens
  misc_feature (319)..(319): n is a, c, g, or t
  misc_feature (335)..(335): n is a, c, g, or t
  misc_feature (756)..(764): n is a, c, g, or t
  misc_feature (1477)..(1477): n is a, c, g, or t
  misc_feature (2731)..(2848): n is a, c, g, or t
  misc_feature (2869)..(2895): n is a, c, g, or t
gaagagaccaccagtgacaacaacaatacctcgataaccacgccaactcttagtcccagccagcagccgcttccgacagaactgaatgtaacttcaccgagtaaagaggagtgtggaccatgcacagacacagctcatgtctcattaatcacaccaacaaaaagatcctgctggtacagcattcacagtctgagaatgaggcttcaccagtaaaacggccacgcactacttgagaatacggaacggtccgaggaaaccagtcgactctaacacagacagagtcgacgtcggtgctctccagctgccaaaccaaactggnagctggtgcagcaggnaattggggatcgtgtcgctgcggttatgtgtctctgctatgttacatcgcctccccgagcagcacgactgcacattcgacccacatgggccgtggccgggaggaagccatcatgaaacatggtgaagctggaccggaaacgtggggcgctcctgccagcgcatcggggaggggtgctcctgaagcccaggcatggccaccacgtgacgctgttcttagttcactaatgttagccttatttaggacaaagtcagccagacaccttgtactgggcacgcgtcagactgcagccagtccgtttcctttctttagccagccatcctggtactgtagtttaggggttgatggtggttgaaattgatttctggctggttactaaggtgcctgctagccattgtataaaattaaaacatgaagaatannnnnnnnngagcatggctagtggatttaaaacaacacatacctgtcactgctggagtcaaacttataaaaagccttaagtggaaagtgttccagacggagactctgagttaatagaggagtagaagctggtgttaaagttcccacgacgcacatggctttgccagaaactctgtttaatgatcggcctttcacctcttcacttatccttagtcccagtagccaagatacctgatggccacgtgtgccttggccacgggaggctgctgagattggccacgtggctgggctgggtggtggcctcactctcccacagagctggaaatggggggtgggggacagattcttacggaaatttttttacctgacttgctatgaaaaaactcatcacacaagaagagaaacagtaacctcactttgaaaattagctccactcaagactagtccacgaacgagacccgccttttctacacaggatccaaggtcacgagaagcagccagagtgccccgcctccgccggctctggtctgccattcgccagtgcagggatctggcacggaccagatgtggcgaatggcagcacagcgcggtggctgggtctgcacactggcctctgcagccagatttctatagtgggagttttttaaaaagacatttcatagccaacaagaatcagtagaagtgctgggagcagcagctggggaagctgccgcccacgggctnctgccccttccagctggagccgcccgtgcctccagggggccaagaggatgatgttcgtgggcctccattcttcgtttctatgcagccccatagtccaaggacacccagtccacatctaccatatagcaagtttagtaagggaaggcagcatacgtcccaggacagtgggttcggatctgtctagaacagcggtttgtggctgtggcccagctccgagagtgatatttgctctggtaggtgagggcctgagggtacatttctccacctgtgccccctcatgttcacagaggatttcagcagctgcaactgcgcacgccaggtggggaacggtgggggtgggcctggttgccccatgttaggaaatcactaccagtcaggtggggctggggctgggtggacaggatcaggattcccttgaaagcccaggcagggtgagcagtcccagtggtcctagtgccgcatcagatccaggtgggtgagggcaggaggcccctgcggaggcagcgtggatctgcccacacataggctactggaatagtttaacccagcaactttcctttttataaaacaacaaatggttcaactctgtctgcaaattaacagctgaacacctgcaactgcaaatgttttttgatccgacgtactgaaataggaagtcatgctcttcccaccctccacccaccaagagtggaaacccggctgcaaaatccccagccttaattcttgcttcaggacccagaccggtgtcttgctctagggcaacccagggcagaggggcaaggtctgccaagcgtttacaactgctgtcaagccaaagcccttggcaccatacgggccatcctcagtgaggcagccccccataggcttccgccaagctctggtcccgaagaggctgtgcgaacccttcccggccactccccgagggccccccgccccctcctctgcctgctgcgtggaggcagccatgggaaggagcccaggggagctggcctgggggagcgaagcccatgttcgcttcctgacttagagctggggggcgtggggggtggggcttgttcccctgcagtatctgttctgtgaagtttgttaaatgtaaggaaagcttaaattcttgtatctttaaaagagaaaatcttatttaacccttttgtgttctagatttacttacacacatagcctagagctcagttttagttttaacattgtgaaaatattaaaagaatcttgtaactttattcttttttctcctgctgnnnnnnnnnnnnnnnnnnnnnnnnnnnnnnnnnnnnnnnnnnnnnnnnnnnnnnnnnnnnnnnnnnnnnnnnnnnnnnnnnnnnnnnnnnnnnnnnnnnnnnnnnnnnnnnnnnnnnntcctaagttcagaatgttttnnnnnnnnnnnnnnnnnnnnnnnnnnngttttttggggcccgccccccccacaaaaaaattttttacaactttttgttggggccggggccccccaagagaaaagaaaaaacgagcccatcctttttcccccaaaaaaccccgtggcctacataaaagg

SEQ ID NO: 259872 - DNA, 764 bp, Homo Sapiens
ctctctcatgaccccgctccgggattatggccgggactgggctgctggcgctgcggacgctgccagtgcccagctgggtgcgaggctcgggcccttccgtgctgagccgcctgcaggacgcggccgtggtgcggcctggcttcctgagcacggcagaggaggagacgctgagccgagaactggagcccgagctgcgccgccgccgctacgaatacgatcactgggacgcggccatccacggcttccgagagacagagaagtcgcgctggtcagaagccagccgggccatcctgcagcgcgtgcaggcggccgcctttggccccggccagaccctgctctcctccgtgcacgtgctggacctggaagcccgcggctacatcaagccccacgtggacagcatcaagttctgcggggccaccatcgccggcctgtctctcctgtctcccagcgttatgcggctggtgcacacccaggagccgggggagtggctggaactcttgctggagccgggctccctctacatccttaggggctcagcccgttatgacttctcccatgagatccttcgggatgaagagtccttctttggggaacgccggattccccggggccggcgcatctccgtgatctgccgctccctccctgagggcatggggcccaggggagtctggacagccgcccccagcctgctgaccccccagctttctacagacaccagatttgtgaataaaggttggggaatggacagccctgaaacaccacca

SEQ ID NO: 259873 - DNA, 455 bp, Homo Sapiens
cagctagcctgggggccggggtcttctcctccgagttgctggctgcagtggcttgactggctggctctgaggctggggtcagggcagcgggcactggggccagggtctgtgctgccccacagcccactagcggcaggctcccctgaaggatgaactggaccgtgggctggctgaccagtgcgcagggtgggatgcttgagggctgggccggggcaggcggcaggccggggctgtaaacctgagaggggtctgtgtctgggaacccgggttccggaagcacgtgactgggaaaggccagatcggagaacacctgcctgacccctgtgggggccacatcctccatgtcccaggctccttctcggggcttctgtggcctgtgaagtggtgcccggggggctgtcctcggcgggggcgctgctctccgactcctgcaggttccaggtgacccgcttcac

SEQ ID NO: 259874 - DNA, 606 bp, Homo Sapiens
ccttccagggccggggaaccccaggaggaagctgctgagccatgggcgcctacgcgcgggcttcgggggtctgcgctcgcggctgcctggactcagcaggcccctggaccatgtcccgcgccctgcggccaccgctcccgcctctctgctttttccttttgttgctggcggctgccggtgctcgggccgggggatacgagacatgccccacagtgcagccgaacatgctgaacgtgcacctgctgcctcacacacatgatgacgtgggctggctcaaaaccgtggaccagtacttttatggaatcaagaatgacatccagcacgccggtgtgcagtacatcctggactcggtcatctctgccttgctggcagatcccacccgtcgcttcatttacgtggagattgccttcttctcccgttggtggcaccagcagacaaatgccacacaggaagtcgtgcgagaccttgtgcgccaggggcgcctggagttcgccaatggtggctgggtgatgaacgatgaggcagccacccactacggtgccatcgtggaccagatgacacttgggctgcgctttctggaggacacatttggcaatgatgggcgac

SEQ ID NO: 259875 - DNA, 1469 bp, Homo Sapiens
  misc_feature (157)..(170): n is a, c, g, or t
  misc_feature (370)..(456): n is a, c, g, or t
ggtggcggggggtttggttgggcctgtgtcacccggagtgtttgcaagggcgtggtgccgggggtacgcgtcgccatattgggagcgtggaacgggggcgggatagtatcggagagcgggcaaggggaatcggggagcgggaaggcgtacggcatannnnnnnnnnnnnntggtccagcgggtgcgtcgggtcgggtgcaggcgggggttgggggaaagagtggcgaaggggtagcgacgacccggagtgggggttgtaagcgggcggggggaccgtaaacgcagttcatttggcacctcgggggtagtgggcgcgagcgtgagcgtgaggggagattgggcgggttgttgcgcgtaggtgggcgcgtcnnnnnnnnnnnnnnnnnnnnnnnnnnnnnnnnnnnnnnnnnnnnnnnnnnnnnnnnnnnnnnnnnnnnnnnnnnnnnnnnnnnnnnntcagggggatatattggcgggggaggggctcgctggtggggtggggggtcgtgcgcttctgaggctccagaagcagggggggctggaagattactcacgggttcctccttcaggcaggggtctgcctttgagatgcggctgctctgtgtctgtgtccagggccgtgaacaccagcctcaggctctcaccaggtgtctggacaggagtccaggctccctgcaaagtcctgtggtacctggggcacccggcagcccggctcatggatgcttccaccgcgtgtgtttctgcagtgtgttctgctccataaagcggcgagggcagtgtggacactgaaacgggcgttccccagagtgcacccggctgtgctgggccagctcacccgcatcccggaagcggcgagggcagagcgggcagccgtggggccgcccaccacccgccaggtgaatggaatggtgccgtgccaagtggctggcgcgcttgaatgccttcccacagatgtcacactcgaagggctttacctccgagtgggtgatgctgtgtcgctgaaggtaggacatgtactcgaagacccttgagcacacggggcagctgtagcactttttctggcctggagccccactggcccctggctccctctgtgactcctcgtccaccagcactgtgtaggggacaacctgagtgtcaataagcaggtagtggttgggcattggaggagatgaagcctggggagatccgatggaggaggaaggtccaggttctggggagcggcaagtccgacggggagggccctccatggtctcaacggaggaaaatgccagaggctgagggcagggggatggcagcaccagcatccggagggctggctgaggcccagtgcagcagcctctcaggtccgggcgactccaagcggccccgggctaccatcgcagttgcaggcggcggcgagaaggggacatctgggtgtgccacaggaactggcggcgccggccgaaagagagaagccgaagggagag

SEQ ID NO: 259876 - DNA, 2112 bp, Homo Sapiens
gcacatttcgttccccgacgccatagatcctgggtggcgcaacaaccagatcggcttcaccaccgaccctcggatggcccgctcctccccctaccccactgacgtggcccgagtggtgaatgcccccattttccacgtgaactcagatgaccccgaggctgtcatgtacgtgtgcaaagtggcggccgagtggaggagcaccttccacaaggacgtggttgtcgatttggtgtgttaccggcgcaacggccacaacgagatggatgagcccatgttcacgcagccgctcatgtacaagcagatccgcaagcagaagcctgtgttacagaagtacgctgagctgctggtgtcgcagggtgtggtcaaccagcctgagtatgaggaggaaatttccaagtatgataagatctgtgaggaagcttttgccagatctaaagatgagaagatcttgcacattaagcactggctggactctccctggcctggcttcttcaccctggacgggcagcccaggagcatgtcctgcccctccacgggtctgacggaggatattctgacacacatcgggaatgtggctagttctgtgcctgtggaaaactttactattcatggagggctgagccggatcttgaagactcgtggggaaatggtgaagaaccggactgtggactgggctctagcggagtacatggcgtttggctcgctcctgaaggagggcatccacattcggctgagcggccaggacgtggagcggggcacattcagccaccgccaccatgtgctccatgaccagaatgtggacaagagaacctgcatccccatgaaccatctctgggccaatcaggcccccctatactgtgtgcaacagctcactgtctgagtacggcgtgctgggccttttgagctggggcttcgccatggccagtcctaatgccctgggtcctctgggaagcccaatttggtgacttccacaacacggcccagtgtatcatcgaccagttcatctgcccgggacaagccaagtgggtgcggcagaatggcatcgtgttgctgctgccccatggcatggagggcatgggtccagaacattcctccgcccgcccagagcggttcttgcagatgtgcaacgatgacccagatgtcctgccagaccttaaagaagccaacttcgacatcaatcagctatatgactgcaattgggttgttgtcaactgctccactcctggcaacttcttccacgtgctacgacgccagatcctgctgccattccggaagccgttaattatcttcacccccaaatccctgttgcgccaccccgaggccagatccagctttgatgagatgcttccaggaacccacttccagcgggtgatcccagaagatggccctgcagctcagaacccagaaaatgtcaaaaggcttctcttctgcaccggcaaagtgtattatgacctcacccgggagcgcaaagcacgcgacatggtggggcaggtggccatcacaaggattgagcagctgtcgccattcccctttgacctcctgctgaaggaggtgcagaagtaccccaatgctgagctggcctggtgccaggaggagcacaagaaccaaggctactatgactacgtgaagccaagacttcggaccaccatcagccgcgccaagcccgtctggtatgccggccgggacccagcggctgctccagccaccggcaacaagaagacccacctgacggagctgcagcgcctcctggacacggccttcgacctggacatcttcaagaacttctcgtagatgctgcctagggttgcttgggccactgccctctccacacccatgactgccccttgcttctcaactaaagaatagtgcctcagcgctgcccacaccaccgcccctcctcgctgtgccaccacccctccctctgctctcataggaagttaggctgtcggtccccctccagtgcttggctgccccacaggccacacgctgccccagctctgctgaacttctgagcaagtttcccagaggcgggggagcccgaggaggaaggtgcccccgaaggatttcctgggggaaggggtagtctgggccaaacctccccccatgtttcca

SEQ ID NO: 259877 - DNA, 713 bp, Homo Sapiens
gtgtgaacgtgtgtaaatgtgcgtgtgaaagggagcaccccttcccgacttctagaaacaaaattccttttggggcgctttccctgtgtgtccccagagaggcctctagccaggagccttcagttgggatagtttcatttgtgactttaccaataccctcccagttcttgatagacagctgtaagttgctgggttcaagaatatgggtgggatatggaatgctctttcaatgtctagcttcagttttcattcatcctcctgctcagcactgtcagccaagagcttactcagcagacaccacatactgcagcagttcctagtgagaaaatctgtgccactagaaaatgcttcacttccatttcctcacctgggcagttctctgtttaaaattgtgggctgatttggtcttcctctcctcctcccactgttactgccctgcagcccttgttcaggtgtacagacccttattctggcctctagtgtccttgtctgtcatgacacacccttccgcccaaatacctctgaccccaaggctggaatggggctggtaggagataagtttgcttactcatagtcatgtcctttctcttggcacctgcttccctgcggtgtcctcaaatggatttctgtgtggcagtggagtgattgcatgaatttttctgtaacacattaactttgtattattattaaggggagtttgagaaagctttgct

SEQ ID NO: 259878 - DNA, 552 bp, Homo Sapiens
catcttataaatttatgagataatggaacataaaggacctggcaaagcagtaaatgtcagctaatattatttctgctgctactatagatttaacaccattcaaggtgctatggagatgtgaggccatttaatataagccagcagtccaaaaaggtgacaaaggctcctattccacatgtggaacttaggccacattaactccccagttaaggtaaatctggaattcatcagcctggcatatccaagcccacttatccatgttaaggcctggatcctatgcagtcaatctaatgagagcacgctcttcaaatcaaaacttcacagttgacacacccctccaggcattctccaatgagtgttcagtttgtttgccaccaccacctcatatttaccaccactactaatagaaactcaagatcatttccagctttcctggccagtgagttaagcaaagaattgaaagctgcgtaagttccctgatcagaactgcctactggaccaacacaactgaaaacttcagagactataattcagaagtcaaacataaatgta

SEQ ID NO: 259879 - DNA, 1590 bp, Homo Sapiens
  misc_feature (247)..(276): n is a, c, g, or t
tgagcgagaggccgggggtgccgagccgggcggggagagctgggccgggagagcagaacagggaggctagagcgcagcgggaaccggcccggagccggagccggagccccacaggcacctactaaaccgcccagccgatcggcccccacagagtggcccgcgggcctccggccgggcccagtcccctcccgggccctccatggcccgggccgctgccctcctgccgtcgagatcgccgccgacgccnnnnnnnnnnnnnnnnnnnnnnnnnnnnnncctggaaaccggagcccaggatgtgcgagttcaagtgctacccgaggtgcgaggccagctcgggggcaccgtggagctgccgtgccacctgctgccacctgttcctggactgtacatctccctggtgacctggcagcgcccagatgcacctgcgaaccaccagaatgtggccgccttccaccctaagatgggtcccagcttccccagcccgaagcctggcagcgagcggctgtccttcgtctctgccaagcagagcactgggcaagacacagaggcagagctccaggacgccacgctggccctccacgggctcacggtggaggacgagggcaactacacttgcgagtttgccaccttccccaaggggtccgtccgagggatgacctggctcagagtcatagccaagcccaagaaccaagctgaggcccagaaggtcacgttcagccaggaccctacgacagtggccctctgcatctccaaagagggccgcccacctgccccggaactcctgggctctcatccctggactgggaagccaaagagactcaggtgtcagggaccctggccggaactgtcactgtcaccagccgcttcaccttggtgccctcgggccgagcagatggtgtcacggtcacctgcaaagtggagcatgagagcttcgaggaaccagccctgatacctgtgaccctctctgtacgctaccctcctgaagtgtccatctccggctatgatgacaactggtacctcggccgtactgatgccaccctgagctgtgacgtccgcagcaacccagagcccacgggctatgactggagcacgacctcaggcaccttcccgacctccgcagtggcccagggctcccagctggtcatccacgcagtggacagtctgttcaataccaccttcgtctgcacagtcaccaatgccgtgggcatgggccgcgctgagcaggtcatctttgtccgagagacccccaacacagcaggcgcaggggccacaggcggcatcatcgggggcatcatcgccgccatcattgctactgctgtggctgccacgggcatccttatctgccggcagcagcggaaggagcagacgctgcagggggcagaggaggacgaagacctggagggacctccctcctacaagccaccgaccccaaaagcgaagctggaggcacaggagatgccctcccagctcttcactctgggggcctcggagcacagcccactcaagaccccctactttgatgctggcgcctcatgcactgagcaggaaatgcctcgataccatgagctgcccaccttggaagaacgg

SEQ ID NO: 259880 - DNA, 416 bp, Homo Sapiens
ttctccagttgcctttggaagttccagaggcaaaactgtgtccctttagcacaggtacctgtgttgctaagggggcagtgggctcagagtatgggtttgctttggggttataattttccccattataaaaggaagatatgtgtagaaaatttagaccagagaatagctctgaagttgagggtcaagaatcagagaccttgtctccgtgcctgtgtgttgggctttgacttggcaccacactgcttgttccctgcctaactcactgagtgctgctctgggctacagcgcatcctcatggggctcttggctgcctcctctctgcacagcctctgcttccttagatagcagtgtgaggactgtggagaaggatctttggtctgagctcaaatgattggctcctgattgtcctgtggtct

SEQ ID NO: 259881 - DNA, 1656 bp, Homo Sapiens
  misc_feature (773)..(773): n is a, c, g, or t
  misc_feature (850)..(850): n is a, c, g, or t
  misc_feature (1508)..(1508): n is a, c, g, or t
cttcataaagtcctggcctcgggacagcctgcacagctgcctagcctgtggagacgggacagccctgtcccactcactctttcccctgccgctcctgccggcagctccaaccatgggaggccgcgtctttctcgcattctgtgtctggctgactctgccgggagctgaaacccaggactccaggggctgtgcccggtggtgccctcagaactcctcgtgtgtcaatgccaccgcctgtcgctgcaatccagggttcagctctttttctgagatcatcaccaccccgacggagacttgtgacgacatcaacgagtgtgcaacaccgtcgaaagtgtcatgcggaaaattctcggactgctggaacacagaggggagctacgactgcgtgtgcagcccgggatatgagcctgtttctggggcaaaaacattcaaaaatgagagcgagaacacctgtcaagatgtggacgagtgcagctccgggcagcatcagtgtgacagctccaccgtctgcttcaacaccgtgggttcatacagctgccgctgccgcccaggctggaagcccagacacggaatcccgaataaccaaaaggacactgtctgtgaagatatgactttctccacctggaccccgccccctggagtccacagccagacgctttcccgattcttcgacaaagtccaggacctgggcagagactccaagacaagctcagccgaggtcaccatccagaatgtcatcaaaattggtggatgaactgatggaagctcctggnagacgtagaggccctggcgccacctgtcccgcacctcatagccacccagctgctctcaaacccttgaagatatcatngaggatcctggccaagagcctgcctaaaagcccccttcacctacatttccccttcgaacacagagctgaccctgatgatccaggagcggggggacaagaacgtcactatgggtcagagcagcgcacgcatgaagctgaattgggctgtggcagctggagccgaggatccaggccccgccgtggcgggcatcctctccatccagaacatgacgacattgctggccaatgcctccttgaacctgcattccaagaagcaagccgaactggaggagatatatgaaagcagcatccgtggtgtccaactcagacgcctctctgccgtcaactccatctttctgagccacaacaacaccaaggaactcaactcccccatccttttcgccttctcccaccttgagtcctccgatggggaggcgggaagagaccctcctgccaaggacgtgatgcctgggccacggcaggagctgctctgtgccttctggaagagtgacagcgacaggggagggcactgggccaccgagggctgccaggtgctgggcagcaagaacggcagcaccacctgccaatgcagccacctgagcagctttgcgatccttatggctcattatgacgtggaggactggaagctgaccctgatcaccaggggtgggactggcgnctgtcactccttctgccctgctgctgtgcatcctcactttccctgctggtgcgggcccatccaggggctcgccgcaccaccataccacctgcaccctctgcatctgccctcttccgtgggctcccaccatccttcctggccgcaattc

SEQ ID NO: 259882 - DNA, 1008 bp, Homo Sapiens
  misc_feature (939)..(947): n is a, c, g, or t
  misc_feature (986)..(986): n is a, c, g, or t
ttcgctctagctgggaggctgacggcccgcgggcgtaagcggactgcagccgcgagctcctggaggcggcgggatggaggcggcggccgagcctggaaacctggccggcgtcaggcacatcatcctggtcctctcaggaaaggggggcgttgggaaaagcaccatctccacggagctggccctggcactgcgccatgcaggcaagaagcgctgataaagcagtttgtgtccgacgtggcctggggggagctggactacctggtggtggacacgcccccggggacctccgatgagcacatggccaccatagaagccctgcgtccctaccagcccctgggggccctcgtggtcaccacgccccaagcgggcgtccgtggggggacttgaggcgtcgagttgcccttctgtaggaagacgggctttgcggtctgacgccaactcgtggaaaatacgcacgggcttcaccttgccccccactgcaccggattgtatccagccgtcttcctcaagtggccgttggttaaggaacctggccccagttccgccgggggtgcccctttttttaggctcccgtgccccttggaccctgcccctccatgatggacccctggaaggaagggcccctgaactccattccaggaagtttcccccgggagtccccggccttccgtttgccccttatcctcccataagcctcataaacatttttggaaccccacgcgccctttcttgccctcccccgtggatatgggccaccttttgcgactcggctttctccggggggccactcaagggcctttggcctccctgcctcctttataataaactataggagcttgggggtttcggctttcctggcgcccctgacaggggtctcggcctcctaggcccttctctttccgtgggcgaaaaccttttcccgcctgaacatatttctannnnnnnnngggatgggtgttgttcatccccccacatctccctggctntggggtgtgagctctccccact

SEQ ID NO: 259883 - DNA, 1054 bp, Homo Sapiens
  misc_feature (103)..(103): n is a, c, g, or t
  misc_feature (987)..(1004): n is a, c, g, or t
cggggcggtgaataaaaacccattttggttcccgaaggtggcccttgggggggagccgggacttacctggttggggggaacacgccccccggggggccccttncgatgaggccccatgccacccatagaaggccttgggtcccctaccccagccccttggggcccctcgtgttcacccacgcccccagggcgggtccgtgggggacgtgaggcgcgagctgaccttctgtaggaagacgggcttgcgggtgatgggaatcgtggagaatatgagcggctttcacctgcccacactgcacggagtgcaccagcgtcttctccagggggcggcggagaggagctggcccagctcgccggggtgcccttcttaggctccgtgcccctggaccctgcgctcatgaggaccctggaggagggccacgacttcatccaggagttccccgggagccccgccttcgctgcactcacctccatagcccagaagattctggacgcgacgcccgcgtgcctcccctgactaaggccaccttgcagccgctttccagggccaccaagggctctgctccagcctctcagagaaacagaggcctgggctcggttcccgggccctgcaggggcaggcccaggcagcgtcagcgggagagcttctccccgaccagcccagccccaggatgtgtcgcaccagcagctctgcctggttggcctgcagtgccgtggtctgcgtgctctgcagctgtgagacgggggcggcctgggctctcttcccatccatgttgcctacctgtgcccctggcagccgcgtgtccacacagttagcggagcgcaggacttctgcagtcctcaggtgaccccgggcctccagcaccctgggtcgctgtcatctgtgtttagctcggggagtgccccctaagggggcgaactgacctcaggcatgtcttgtaactgtagaggcgcctgccattaaacgtgtccgctgctgtggcgacnnnnnnnnnnnnnnnnnnctcgagactagttcctcgtgccgaattcgccacccaggcctcgctaccgt

SEQ ID NO: 259884 - DNA, 507 bp, Homo Sapiens
ctgtttgtcgactataagcggagaagcggccatttcgatgtgaccactgtggcgtcaataaaggagatcacagaaaagaaccgacactgcctcctggacatcgctccgcacgctattgagcggctccaccacatgcacatctaccccattgtcatcttcatccactacaagagcgccaagcacatcaaggagcagagagaccccatctacctgagggacaaggtgactcagaggcattccaaagagcagtttgaggcggcacagaagcttgagcaggagtacagcaggtacttcacaggggtcatccagggaggagccctgtcaagcatttgcactcaaatcttggcaatggtcaatcaagaacaaaataaagtcctgtggattccagcctgcccgctctaggagaatgctgtgctgtggatgactgcagctggccgcctgaggggacgccagactcatctcttttctagcgactgaaagtagaagtctgtccgtctatgaacatgc

SEQ ID NO: 259885 - DNA, 866 bp, Homo Sapiens
  misc_feature (190)..(190): n is a, c, g, or t
  misc_feature (721)..(758): n is a, c, g, or t
taaaccaaaccggaacaaaagaaaagagattcaaagatctccacatgagtggagaattccagggcttttcccctctgggccctgggccccaggcctgggccttgtttttgctatttccacctaggcatctgccatgcagcagagttaggagcgtgtgggcggctgctgagactcacacaccaccagtacntggcatccttcaggggcagctggcatcagtggaatgagtgcggatccgaagaaaggtttcccagttccaaagctggacccacaggaatcctgtgaggatttgcaaagacattgatagtgttggttcttggagcatctttctgcctcccgggctttgtctggtctcagcctcggggctgcaatccagggctgtgctgagcagcaagaggagaggagaaatgccactgtcttgcacctcccagtaagtctcccttttcatgaacagcccttgtgccaggtacaatggtctctctgttctctcacaaaactcatccacaaaagatatacagagtcttttgacagacagtcccactgctctggagtcctttatgttcatttctgattgacaattttggaccaaggccaagaggccccctaattcatgttgcttcgtcatgagggttgtccttgtcatctgatgatgcatgaggcatgctaatggcaaggccgggatgccaccccaggcttcgaggctgttagaggtcttgagtgnnnnnnnnnnnnnnnnnnnnnnnnnnnnnnnnnnnnnntttgagctcccattaggtcacttgtaactttgcctagcaaaacaggctcccaagacataaggctcgccatcgttgtgaaaagttgtgatggtacagaataattttttt

SEQ ID NO: 259886 - DNA, 1049 bp, Homo Sapiens
  misc_feature (50)..(75): n is a, c, g, or t
  misc_feature (211)..(236): n is a, c, g, or t
aataaaataaaaacctgccaccaaattatttctggattctcttcactatnnnnnnnnnnnnnnnnnnnnnnnnnnccatttctgattccactttcaaagtcttggatatattctttgaaaaatgagtagtatggaatattaagattatgttccttatactcagaatactttttatgagctctcttgtttttttgttactattattcctttnnnnnnnnnnnnnnnnnnnnnnnnnntgtttatagtgttcatgtaattttttttgctgtttaccaatgaactttgccctgttgtggttttgggggatcagaaggattcctaaactgtcatttcatttattggtaggtcatgattgctgagggttttgctttggatttttcatacctataaagtcaatcttgagttgatcagagaaagggaaacttactcctaataaacagactcagaacagaagggacatatgcataaatcaggataccatctcattaatttacaaaggataatctttcttttcattgacaacacctacacccacctgttttccagtgttcttctctctaaacagcaaagccaaagcactctgcacaccaaatcacctgttcagaggtttaatgcatgagcatatttcttttaggccgtggtgaagttgataaaccacccctgctttgtaacaaaattattttaaagtgactggaattattctagtcccagattgatcatctcccctggcaacgtgactctgtttcttgtgtgtgttccatgctgactagtccctactgttatatcactactaattaggctataaccaggtctttcctggctgagaaatatctcttaaatgaccttggtctatcccatcaggaggtgatctttcacgggggcactttcctcaattgtctacccacacaaacaacctcatcataacaaaaaacgaaaaaggggccaatatgcgggcaatcaacttttaaggcgcaagttaaaacgggtcaaaagagaacggtgtgactttggagacaactcttgcgtgttctttcttactccattcactg

SEQ ID NO: 259887 - DNA, 986 bp, Homo Sapiens
ggcctgggtggcgaattcggcacgaggggcgcgccagtcccgagcagtgctcgctcctgctcggggcgctgcggccccgggcgtcgccatgaccagtgagctggacatcttcgtggggaacacgacccttatcgacgaggacgtgtatcgcctctggctcgatggttactcggtgaccgacgcggtggccctgcgggtgcgctcgggaatcctggagcagactggcgccacggcagcggtgctgcagagcgacaccatggaccattaccgcaccttccacatgctcgagcggctgctgcatgcgccgcccaagctactgcaccagctcatcttccagattccgccctcccggcaggcactactcatcgagaggtactatgcctttgatgaggcctttgttcgggaggtgctgggcaagaagctgtccaaaggcaccaagaaagacctggatgacatcagcaccaaaacaggcatcaccctcaagagctgccggagacagtttgacaactttaaacgggtcttcaaggtggtagaggaaatgcggggctccctggtggacaatattcagcaacacttcctcctctctgaacggttggccagggactatgcagccatcgtcttctttgctaacaaccgctttgagacagggaaagaaaaaactgcagtatctgagcttcggtgactttgccttctgcgctgagctcatgatccaaaactggaccccttgggagccgtccggggaggccccccactgacccccactcccagatggatgacatggacatggacttagaacaggaatttctccaggacttgaaggaactcaagggggctagtgggttgacaagggaccttttggaacctggcacaagagccctggggggggccctggctctccccgggaaaaacgtgagggtccttttttctggagatgggaaacccaccctttccaaaaacccctgtcccccggggggcgctgtggggaa

SEQ ID NO: 259888 - DNA, 2301 bp, Homo Sapiens
  misc_feature (1195)..(1208): n is a, c, g, or t
  misc_feature (1712)..(1712): n is a, c, g, or t
  misc_feature (2157)..(2157): n is a, c, g, or t
ggggaaggcggcgcgccagtcccgagcagtgctcgctcctgctcggggcgctgcggccccgggcgtcgccatgaccagtgagctggacatcttcgtggggaacacgacccttatcgacgaggacgtgtatcgcctctggctcgatggttactcggtgaccgacgcggtggccctgcgggtgcgctcgggaatcctggagcagactggcgccacggcagcggtgctgcagagcgacaccatggaccattaccgcaccttccacatgctcgagcggctgctgcatgcgccgcccaagctactgcaccagctcatcttccagattccgccctcccggcaggcactactcatcgagaggtactatgcctttgatgaggcctttgttcgggaggtgctgggcaagaagctgtccaaaggcaccaagaaagacctggatgacatcagcaccaaaacaggcatcaccctcaagagctgccggagacagtttgacaactttaaacgggtcttcaaggtggtagaggaaatgcggggctccctggtggacaatattcagcaacacttcctcctctctgaccggttggccagggactatgcagccatcgtcttctttgctaacaaccgctttgagacagggaagaaaaaactgcagtatctgagcttcggtgactttgccttctgcgctgagctcatgatccaaaactggacccttggagccgtcgactcacagatggatgacatggacatggacttagacaaggaatttctccaggacttgaaggagctcaaggtgctagtggctgacaaggaccttctggacctgcacaagagcctggtgtgcactgctctccggggaaagctgggcgtcttctctgagatggaagccaacttcaagaacctgtcccgggggctggtgaacgtggccgccaagctgacccacaataaagatgtcagagacctgtttgtggacctcgtggagaagtttgtggaaccctgccgctccgaccactggccactcagcgacgtgcggttcttcctgaatcagtattcagcgtctgtccactccctcgatggcttccgacaccaggcctctgggaccgctacatgggcaccctccgcggctgcctcctgcgcctgtatcatgactgaggtgcctcccaacgtccgcccacgctgacaataaagttgctctgagtttggnnnnnnnnnnnnnnccaaacaacacatcaacagagagaggcaataaaaacacacaaacagaaccttagaaggcttgccggccgccctcggccctccaaaaagcttcctagacctttcgtttgccccccgggcccaataggtaagtgaccctggctatacctgtttcctaagagaacctggccatgactagggctgggattccccacaacaaaaaccgcccgggcggcccacctacgcgcccggaacaaactcaaaatgggagtcccgaaggctcattaactggaccccaatcaaccgggaggcccagagcagtgcttaggattcgaaattacgcccccccgcccgtgggaagtcttaagtcggggcggaccgcgggcgcaaatttacccttaaaggcggtttggggccccggctttgcggaaatccctattcccctcaaaccggggcgattgaagcgcggacccttggacagttggccccacggacgcgaagttcctcgcggcccgccgtcgggggcnactcattatgtcccgtaatatggagataatagttccgtgccctcccttttggcggcggtgaaccaacaagcgcgggggtacgggtgtcgccgaaaagaaaataaacggttcttctctcccccccctcattatatttcggtggcgcccgcacgccggttttgtccccccgctctcggttacaccgcgcccctgtggtggggcgggttacaaatctctcacggcgtcctgggaggggggtacattatgcggcccgtgggcagaccaactgtacaaagcgacacgagaataaagttgggcccgagacagcgtgcaagagaccgctccttctttctgggggaggacagacactcaatgggccccacgtagggagttctttttacataccgcgacaacacaccaccccggcgcgtcgaagaactcatcttcccggcgactcacagttacntctcttgtgggttccagtattaaagaacttgcgggacgaaggcacaaatatcagttcccccgcggggagacatatttccccctctccccccggagagggatgacgggtgaatgccgacacgcccgctttctacaagccccccga

SEQ ID NO: 259889 - DNA, 1322 bp, Homo Sapiens
  misc_feature (385)..(409): n is a, c, g, or t
ggcctgagtggcgaattcggcacgaggcaggtttgttttttcatggtgtagggtatttatgacaaagtaaatgttgtgaaggttaaagataaattaagattatccaccaaatgctaaaaatactgatgtgtaaatcacctttatcgcctcacctcttctacaagcttttgtggcttgagggcttttgtttttggcttttgtctggatgaaagttttgcccagttgtgttttaaaaacaattcctcatgaacactaagattaattgtgtctgtatctctggaactgggtgctcatgttggttttaatgagcttgcaacccttccccgtttgctttgtttaaggaggtgcctctgttctttgtggaggagtgaaatggagctttaannnnnnnnnnnnnnnnnnnnnnnnnttgcacacacgcgtgtgttattgtagcaataacaaaaagtagccatctccttgttccagctgaaaacctgctgtgagagttttgacagagcactttattttcgtcaagtttcaagtctgagttcaaaaccagccctgatcccttatgaccaactgctactcgaccagtcgccactcagtggccacctggtgcccgtttagatttttgcttgggttttactgccacctctatagacgagagttgcaaagttgctttgagcagagagggaaagattaatttacactgctggccaccgaaggcaggtgtttcctgggtagtaatctcacggctcttgatctggaaacttcagagtacaaattggtggatggtggaaggcaggacacgtatctctgtctgacggaaaacagacctcggggctgggcgtaaaccctgctgccaggccctctccccacctgccccaaaccggcctagacacgaagaccaaagcagcctgcacagggcaaggcccccgcggaatcctgcagagcaaactcaggttaacttgggtccatgaccgtttgcattcgaaacacaatacactgcctcgttctctcagttagcagctgggcagcagcgcacccattccatcatttaaggcttgtggtttgttgtttactcctacccaatgttatgttgaaactgcattgtaaaaagagaagaaaatggcaggttttcccaggtccacggaaaggtttggcctgacgctggagtgcggtgatgaacttacgtgacaatgattgtattcctcagtagcactttaaacgccgaagacagccctgcagcaagcctgcacacgggcttgggtgggttcctttggagaagatgtggctggaacacaaacaatctttgtaagaaataaatgtgcacacagaac

SEQ ID NO: 259890 - DNA, 1709 bp, Homo Sapiens
  misc_feature (1482)..(1482): n is a, c, g, or t
  misc_feature (1666)..(1666): n is a, c, g, or t
  misc_feature (1678)..(1678): n is a, c, g, or t
  misc_feature (1684)..(1684): n is a, c, g, or t
tggcagctgacagacaccaaacagctggtgcacagtttcaccgaaggccgggaccagggcagcgcctatgccaaccgcacggccctcttcccggacctgctggcacaaggcaatgcatccctgaggctgcagcgcgtgcgtgtggcggacgagggcagcttcacctgcttcgtgagcatccgggatttcggcagcgctgccgtcagcctgcaggtggccgctccctactcgaagcccagcatgaccctggagcccaacaaggacctgcggccagcggacacggtgaccatcacgtgctccagctaccggggctaccctgaggctgaggtgttctggcaggatgggcagggtgtgcccctgactggcaacgtgaccacgtcgcagatggccaacgagcagggcttgtttgatgtgcacagcgtcctgcgggtggtgctgggtgcgaatggcacctacagctgcctggtgcgcaaccccgtgctgcagcaggatgcgcacggctctgtcaccatcacagggcagcctatgacattccccccagaggccctgtgggtgaccgtggggctgtctgtctgtctcattgcactgctggtggccctggctttcgtgtgctggagaaagatcaaacagagctgtgaggaggagaatgcaggagctgaggaccaggatggggagggagaaggctccaagacagccctgcagcctctgaaacactctgacagcaaagaagatgatggacaagaaatagcctgaccatgaggaccagggagctgctacccctccctacagctcctaccctctggctgcaatggggctgcactgtgagccctgcccccaacagatgcatcctgctctgacaggtgggctccttctccaaaggatgcgatacacagaccactgtgcagccttatttctccaatggacatgattcccaagtcatcctgctgccttttttcttatagacacaatgaacagaccacccacaaccttagttctctaagtcatcctgcctgctgccttatttcacagtacatacatttcttagggacacagtatactgaccacatcaccaccctcttcttccagtgctgcgtggaccatctggctgccttttttctccaaaagatgcaatattcagactgactgaccccctgccttatttcaccaaagacacgatgcatagtcaccccggccttgtttctccaatggccgtgatacactagtgatcatgttcagccctgcttccacctgcatagaatcttttcttctcagacagggacagtgcggcctcaacatctcctggagtctagaagctgtttcctttcccctccttcctcctcttgctctagccttaatactggccttttccctccctgccccaagtgaagacagggcactctgcgcccaccacatgcacagctgtgcatgggagacctgcaggtgcacgtgctggaacacgtgtgggtcccccctgggcccagncctcctctgcagtgcccctctcccctgcccatcctccccacggaagcatgtgctggtcacactggtttctccagggggtctgtgatggggggccctggggggttcagctttttgttccctcttgcctttctcacctcttttgtttcctttctttttcatgtattccatttcagttggatgtttnatttgaggcaantacagnagttcagcattgtgtttagggtgtt

SEQ ID NO: 259891 - DNA, 1959 bp, Homo Sapiens
gtaccggccggaattacgggatatcgtcgaacccacgcgtcgccccggtccaagatggctgcgtccatggcgcggcgcttgtggcctttgctgactcgtcgggggttccggccccggggaggctgcatctccaacgatagtccaaggagaagtttcactacagagaaacgaaaccggaacctcctgtacgagtatgcgcgcgagggctacagcgcactccctcagctggacatagagcggttctgcgcatgcccagaagaggccgcacacgccctggagctccgcaagggggagctgcgctcggcggacctgcccgcgatcatctcgacatggcaggagctgaggcagctgcaggagcagatccggagcctggaggaagagaaggcagctgtgactgaggcagtgcgggccctgctggcaaaccaggacagtggtgaagtgcagcaggaccccaagtaccagggtctgcgggcacgtggccgggagatccggaaggagcttgttcacctgtaccccagggaggcccagcttgaggagcagttctacctgcaggcgctgaagctgcccaaccagacccacccagacgtgcccgtcggggatgagagccaggctcgagtgctccacatggtcggagacaagccagttttctccttccaacctcggggccacctggaaattggcgagaaactcgacatcatccgtcagaagcgcctgtcccacgtgtctggccaccggtcctattacctggcgccggggctggagccctcctgcagcacgggcctggtcaacttcacattcaacaagctttctcccgccgggggcttcacccccatgacgggggccagaccttctccgcggagcagtgtttgaaggctgtgggatgacaccaaatgccaacccatcccaaatttacaacatcgaccctgcccgcttcaaagatctcaacctggctggaacagcggaggtggggcttgcaggctacttcatggaccacaccgtggccttcagggacctgccagtcaggatggtttgctccagcacctgctaccgggcagagacaaacacgggacaggaaccccgggggctgtatcgagtacaccacttcaccaaggtggagatgtttggggtgacaggccctgggctggagcagagctcacagctgctggaggagttcctgtcccttcagatggagatcttgacagagctgggcttgcacttccgggtcctggatatgcccacccaagaactgggcctccccgcctaccgcaagtttgacattgaggcctggatgccaggccgaggccgctttggagaggtcaccagtgcttccaactgcacagacttccagagccgccgcctccacatcatgttccagaccgaggctggggagctgcagtttgcccacacggtgaacgccaccgcctgtgctgtcccccgccttctcatcgcgctcctggagagtaaccagcagaaggacggctcagtgctcgtgccccctgccctccagtcctacctcggcactgatcggatcacagcccctacccacgtgcctctccagtacatcggccccaaccagccccggaagcctgggctgcctggccagcctgctgtaagctaagaacccacccacagcagccctcgggggtgtcactgcttcctggagttcaggagaccccggacacctgggacctgtgttcctgagcccgtcctgacatctgtgttcttcctgtcagctccacgcccgggcccctggaccacggggtccacctctcctctgtccttgctgcctcagagtcagtcactgaccctgttatcattgagggtcccagtgggaagcaggacgtctgggctttacggttctagggacaggagaagcagaggaagaggcttccatccctccttccttctttcctcctacagtgctgagcaaaaagtccccaataaatggtcaggacaaag

SEQ ID NO: 259892 - DNA, 336 bp, Homo Sapiens
  misc_feature (247)..(247): n is a, c, g, or t
  misc_feature (281)..(281): n is a, c, g, or t
  misc_feature (286)..(286): n is a, c, g, or t
  misc_feature (314)..(314): n is a, c, g, or t
  misc_feature (323)..(323): n is a, c, g, or t
catggtttgaaatagatccatttgcaaaacaatttctcagccaggaggctccacctcccatttccttgtagacagagggtgaggtgttgggatggtcacagtacaacccatagtccagatgagatgcaccaaagctcagggaaggcatgaggagggaaggtggctcagtagcctgggggttggtgcagagcgtccagagaggcaagggcataaagcgtggcagaagctgggggcaggtcccacactntcgctattccctgcctgccttcccacaggttctngcctngggccaccagcacagcaggggaaacttnggtccagtncctttcttttttg

SEQ ID NO: 259893 - DNA, 1219 bp, Homo Sapiens
  misc_feature (63)..(63): n is a, c, g, or t
cacgtagtagaggcactggagagagaaagctatgtagatggcaacagagccagtgactgtgcncaggcctaggaaggtgccggattcacttgacatcgaggcaggagacgacttcatggccacaggacttggtccgaaggggcaagaagttggagccatcccaggctgtgaggtagcagggagggggctggcgcaggcgcttgtggggaatttgcactgtgaagagtcgcaggccagcaggctggtctggaacctgcccaaacctgcaggcctggtagcggtaaggtgtgctggaaaaggtgggtccattttcttgccagtgcagctgtgtcaccagctgatccttctgccacacagaggccttaaggtcccggcccacggttaccaacttgccatcaggccctaaagccaggtcttcaatctccccttcgtgggctttgaactccagaaccttctccaggctgggcaccttccagacacggacgtagccatctgttcctccagtggcaagcagggtattatcgtggttgaagcacacaactttctgcagtggatcggagctaaagtctgtctgcaccgcctgcaaattatctaccctgagttcaagcccctcgtgcggggtttcccctccacattgcttctctgcgggggatgctcccttccttggtagaggcccctgctccttggaaccggccttctctgccttgttgccctgctgttgatgtgcctggaagcgcaggagctgacagtgggcatcctgccctgcagcaaggatgtcaccagccagtgccaagttcatggtggcccgtgtctctgtgtcatgggagtgcagcaaggaggcactcaagcgcccattaatcagctctagctgcagaaagtgcacgccattctttatgcctgtcttggcggcgcctcctccgcccgcagcgatgagcagcccagtgctggggtcgacctgaagcgcgtacaacgggaacggagcccggtacagctctggcgcccggcgccgacccatcccgcccggcgcgcgttcactgcccgcaccgcggcacccaggacatgccgcgccgggccttcgactactgccccggcggctggtgaactcggccccgtcgccgccgggagcactccctacccctctcacaccggggagttgccaaaaccctgaccatcagcaggaagccgagcctcagctcggctccgtccaagtcggtctccc

SEQ ID NO: 259894 - DNA, 1371 bp, Homo Sapiens
ggccagtactcctacggtttaaggtagcgaggctgggtggcgaattcggcacgagggaagacctggctttagggcctgatggcaagttggtaaccgtgggccgggaccttaaggcctctgtgtggcagaaggatcagctggtgacacagctgcactggcaagaaaatggacccaccttttccagcacaccttaccgctaccaggcctgcaggtttgggcaggttccagaccagcctgctggcctgcgactcttcacagtgcaaattccccacaagcgcctgcgccagccccctccctgctacctcacagcctgggatggctccaacttcttgccccttcggaccaagtcctgtggccatgaagtcgtctcctgcctcgatgtcagtgaatccggcaccttcctaggcctgggcacagtcactggctctgttgccatctacatagctttctctctccagtgcctctactacgtgagggaggcccatggcattgtggtgacggatgtggcctttctacctgagaagggtcgtggtccagagctccttgggtcccatgaaactgccctgttctctgtggctgtggacagtcgttgccagctgcatctgttgccctcacggcggagtgttcctgtgtggctcctgctcctgctgtgtgtcgggcttattattgtgaccatcctgctgctccagagtgcctttccaggtttcctttagcttccctgcttcctgggaatcaggagcctggacactgccatctctagagcagagtggaggcctggactccctttgctcactccattcgggtccaacagctgaggttgcctctgacaagatgaatgggcactgcctgcccttctagtgaaaaggcttggctatggccctgtgtgactccaggtcccaggaaccttgccttcgtcatctgtggatccatccagaacagcggtatctgaagcccaggccatactccctgcctcctttcttctgcctaccagaggctccagagttgagcttgtcctttatctagaaacatgtgaagatgcccaagagcctggaggcactgctgtccttcctgcagaaacagtttctcctcctcccctcagccttgtggccagttcctcttcacatgaagcccctggcatttgctggggaagggactggcctggtacttgctgttagggcaggaaggggcaaaaggaagacttgggtagtaatctgggggttcagatgggtagcactaagccagctggcctaaagatgcaataagttcctaggtagtctacccttaccttggaggaatgggaaaatgaacctcagcccattaggcaggaaaagttgatatttaataaacaaggaaagagtgaactgagacccc

SEQ ID NO: 259895 - DNA, 437 bp, Homo Sapiens
ggaagctgctccagcagatagatgagctggtctcgagccagcctcttcagcatggagaagtcaggcagctcaggggcgtccggccgatggggaaaagccatggcagcggtcacctgcgccgcggggtggaaggacgcccttcgttctgagaaggccggccgcagcacagggaagcgcaaggggggctatcattcaggcctgggcaccgacttccagagacccccagatgggccatcgctcatcagcagcactccaggaatgaatggccacatccaggcaagagagctactacatcggagcagcattgtctcagacatgcagccaccgtgtctcgaccctccctccctgatccactctgcccgtcagcaggattccggtctacaccccgcagagactccgcagcgtacagaggagaaccccgccttctgccagaaaaa

SEQ ID NO: 259896 - DNA, 448 bp, Homo Sapiens
gcgaagggcggacgtactcgccacggcacccaggctgcgcgcacgcggtcccggtgtgcagctggagagcgagcggccaccgggagcccccggcacagcccgcgcccgccccgcaggagcccgcgaagatgccccggcgcagactgcacgcggcggccgtgctcctgctggtgatcttaaaggaacagccttccagcccggccccagtgaacggttccaagtggacttattttggtcctgatggggagaatagctggtccaaaaagtacccgtcgtgtgggggcctgctgcagtcccccatagagctgcacagtgacatcctccagtatgacgccagccacacgcccctcgagttccaatgctacaatctgtctgccaacaagcagtttctcctgaccaacaatggccattcagtgaagctgaacctgccctcggacatgcacatcca

SEQ ID NO: 259897 - DNA, 464 bp, Homo Sapiens
  misc_feature (434)..(434): n is a, c, g, or t
catcattagtaagagtatcatcatgttgttattattgaaggctagtaatgagcccagcaattatgttcagcagacagaccatttgggaatctctttcccatgcattcatagataatgtggagtggagttggcttaaaccagctaagtgccagtttttaagtgggaacactgctatgggcgttggtccatgatcaaacggctggcatgactcatcatagtcacgaacagttattagccagccatggctgtggttgcttgccttagcagtcctgtgttagcattgctttactctgggcgcatttttcttattctctattctgggatagaagtagtttctgacttctagccacgttcagtccaggctggagagatctacacctgtttctagggattctcgttttcaaggtttctgaatatccccctactcccacttnacccccaaaataagcttttttacctggata

SEQ ID NO: 259898 - DNA, 506 bp, Homo Sapiens
aattaaagaaatccagtgtctcaaaaacttgtgaaaatgtgtttaaaaaacaaacggccagtgagcctgccacaccatttggcccatatgcctattgtaacttctgatgtcaagagacaatgcaaaagcctctgttttcacaggccctattatattaactctgacttacaactgtacctctctagagaaaaaacagaaaataaggaacaaagggaaggcagttttactagtgagaagatgcaaatcaaaagcaaactggaaagcaagagcaatagtaagggtgagatgagggactggagttgagactgcttgagaaatctggctgtgtagctttggtttgggggactgaggaagaggctggacatataaagtgcaatctacattggtaataaatggtcatccctttcttctgactcctcccccagctggtcatcccccacaccacgatatgctgcaggcacatttcgaggtttagaacggcagacaaagtcacagccatcctgtac

SEQ ID NO: 259899 - DNA, 781 bp, Homo Sapiens
  misc_feature (70)..(70): n is a, c, g, or t
  misc_feature (76)..(143): n is a, c, g, or t
gggcagacaaagatggggcaggcgccttcctagaagggatgacatgaggttgaggcccaagcttggccantggagnnnnnnnnnnnnnnnnnnnnnnnnnnnnnnnnnnnnnnnnnnnnnnnnnnnnnnnnnnnnnnnnnnnnccctaccacacaccacaacaattttccataccccaaatgctagacttggaaggacaccagtccctctagctagaaacaatttctaaaactgacccaacgtggcaagtctaactgttccaaataatcacacgcatatgctcaaaaggagcaaccagcaaagaagtgtgctcttgataagagaggtcaggaccactgcactagcccctcagcagcccaaggaactgtggacatggcaggctagtgggcgtgggtggaggacgcctggggggcttaacaatagctttgggatggcaggggctggcactgtttaagcccctgcccaggcaacctgaacaactctgccgcaggaggaagaaagggtgtttgcatgagcttgcagggcgtggatggcaggtgagaagtggagaacagcagagcctgtgaggctccaggagacctcaaccaagtgcagacatcagtgagggaaaggggcgagcagaagactgaactttgtttagaacactgcgaagatttacactgaaagcaaaataattttcttaaccaaaacattttgttgcttttaaataaacccagcctgatacagccccacttaaaagatggctgctctgctccaccacctctactggccactccagcat

SEQ ID NO: 259900 - DNA, 528 bp, Homo Sapiens
cagattaagttaatagaaactgagttattgcagctgacacagctggagttaaagaggaagtccctggacacagagtcactccaggagatgatctcggagcagcgctgggccctcagctccctgctccagcagctgctcaaagagaagcagcagcgagaggaagagctccgggaaatcctgacggagttagaagccaaaagtgaaaccaggcaggaaaattactggctgattcagtatcaacggcttttgaaccagaagcccttgtccttgaagctgcaagaagaggggatggagcgccagctggtggccctcctggaggagctgtcggctgagcactacctgcccatctttgcgcaccaccgcctctcactggacctgctgagccaaatgagcccagtggacctggccaaggtgggcgtctcagaagctggcctgcagcacgagatcctccggagagtccaggaactgctggatgcagccaggatccagccagagctgaaaccaccaatgggtgaggtcgtcacccct

SEQ ID NO: 259901 - DNA, 986 bp, Homo Sapiens
  misc_feature (844)..(844): n is a, c, g, or t
  misc_feature (847)..(847): n is a, c, g, or t
  misc_feature (889)..(889): n is a, c, g, or t
  misc_feature (966)..(966): n is a, c, g, or t
  misc_feature (972)..(972): n is a, c, g, or t
agaatgctgcctcgctggtccgaattcggtggcgccacgtccgcccgtctccgccttctgcatcgcggcttcggcggcttccacctagacacctaacagtcgcggagccggccgcgtcgtgagggggtcggcacggggagtcgggcggtcttgtgcatcttggctacctgtgggtcgaagatgtcggacatcggagactggttcaggagcatcccggcgatcacgcgctattggttcgccgccaccgtcgccgtgcccttggtcggcaaactcggcctcatcagcccggcctacctcttcctctggcccgaagccttcctttatcgctttcagatttggaggccaatcactgccaccttttatttccctgtgggtccaggaactggatttctttatttggtcaatttatatttcttatatcagtattctacgcgacttgaaacaggagcttttgatgggaggccagcagactatttattcatgctcctctttaactggatttgcatcgtgattactggcttagcaatggatatgcagttgctgatgattcctctgatcatgtcagtactttatgtctgggcccagctgaacagagacatgattgtatcattttggtttggaacacgatttaaggcctgctatttaccctgggttatccttggattcaactatatcatcggaggctcggtaatcaatgagcttattggaaatctggttggacatctttattttttcctaatgttcagatacccaatgggactttgggaggaagaaattttctatccacaccctcagttttttgtaccgctggctgccccagtaaggagaggaggagtatcagganttngtgtgccccctgctagcatgaggcgagctgctgatcagaatngcggaggcgggagacacaactggggccagggcttttcgactttggagaccagtgaaggggcggcctcggggagccgnttcctnttcaagtcacattt

SEQ ID NO: 259902 - DNA, 962 bp, Homo Sapiens
tcgagttgccattcaggccagggggagaagggcaggaagattggtcccatcgtttctgcttcatgtcccacactgcccaaggtcccccacccacgggggttccccagtgcacccccagctccggggccagaagaggcagcctgcagatcttttgctgccgggaaagagctcctaaagttgtggggtctggactccgctggggacagggccttccgcgagtctcccaacctctcgggggaactgcaaggaaaaggcgtctccagtgggcaaccttgggtcacttcccatagctccccccagcggccttctctgtggcagtgcggatggcgtcctcagagagcacgcggatgtcctcatggacagcttcgatgcttttggaagcatccaccatcttccagttcaaagtcgtgtctttcatgagctggtggaaacaccggagcgcccgctcctggaaagccccgttctcatagcgctcatggccaaacgctccccgcttggcagcatccgccagctgtaactggaggaacaggaccaggtcgggtttgggaaggcccacgtctggctgtttacaccaatctagggaaaaattctccttggcaccggtgaaggccacaccagaaaatgcgtatctgtccacgacgagggtcacgccctggctcaacttttccttaattaacggcacttgttcccagcgatttgcagaaaaaagcaggtgcaccgagtgatcctccacgtcacttttcttttgcaagtaggaactcagaagtttgccgatttcagttgatctttccgggaaccggagcagttcggcgcggtggcccgcggcgcacagcgcttccaccagcttgcggctctgcgtgctcttcccggcgcggtccacgccctccagcactatgagagccccgcgccgggccgccatgactgtccaccctcgtgccgaattcgccacccaggcctccttt

SEQ ID NO: 259903 - DNA, 610 bp, Homo Sapiens
gggagaacggggctttccaggagcgggcgctccggtgtttccaccagctcatgaaagacacgactttgaactggaagatggtggatgcttccaaaagcatcgaagctgtccatgaggacatccgcgtgctctctgaggacgccatccgcactgccacagagaagccgctgggggagctatggaagtgacccaaggctgcccactggagacgcctctccctgcagtcccccgagaggtgggagactcgcggaaggccccgtccccagcggagtccagaccccacaacttcaggagctctttcccggcagcagagatctgcaggctgcctcttctgccccggagctggggtgcactggggacccccgtggtggggaccttggcagtgtggacatgagcagagcgatggagcagtctcctgccctctcccctgtcctgatggcactctgttgtattttcttactgaagttcagtgataactctgagcagtttcattgtgatcactgtaaatggtaatcagttggaattctcctaaatgtcttccagacactagtaaaaaacgacctgaaaattcctctccaccctgccgagcccgttcaccttgcttggcggc

SEQ ID NO: 259904 - DNA, 507 bp, Homo Sapiens
gaggcagttgactgccccacaacgagctcgggcctcacccggatggcggctgcgacgcgcggctgccggccctggggctcgctcctcgggctgctcgggctggtctcggccgcggccgccgcctgggacctggcttccctgcgctgcaccttgggcgccttttgcgaatgcgacttccggcccgacttgccggaaggatctgaagagctgggtccaagggaacctcactgcctgtggccgctccctcttcctcttcgatgagatggacaagatgcccccaggcctgatggaagtcctgcggcctttcctgggctcctcctgggtggtatacgggaccaattaccgcaaagccatcttcatcttcatcagcaacacgggtggcgagcagatcaaccaggtggcattggaggcgtggcgcagccggcgggaccgcgaggagatcctcctgcaggagctggagccggtcatctcccgcgcggtgctggacaacccgcaccatggcttctc

SEQ ID NO: 259905 - DNA, 1974 bp, Homo Sapiens
  misc_feature (112)..(121): n is a, c, g, or t
  misc_feature (137)..(302): n is a, c, g, or t
  misc_feature (306)..(316): n is a, c, g, or t
  misc_feature (341)..(354): n is a, c, g, or t
  misc_feature (363)..(472): n is a, c, g, or t
  misc_feature (1904)..(1904): n is a, c, g, or t
  misc_feature (1912)..(1912): n is a, c, g, or t
  misc_feature (1917)..(1917): n is a, c, g, or t
  misc_feature (1922)..(1923): n is a, c, g, or t
aggggccaagggggtgattccccgggggattcaggtttctcaacccctttggggggggttccccgtggggcgaaagtttaaaaaattccaccccttttcccaaaaggggccnnnnnnnnnntaatttaaatttgaannnnnnnnnnnnnnnnnnnnnnnnnnnnnnnnnnnnnnnnnnnnnnnnnnnnnnnnnnnnnnnnnnnnnnnnnnnnnnnnnnnnnnnnnnnnnnnnnnnnnnnnnnnnnnnnnnnnnnnnnnnnnnnnnnnnnnnnnnnnnnnnnnnnnnnnnnnnnnnnnnnnnngggnnnnnnnnnnnaaaaaaagtttttaaaaattttttnnnnnnnnnnnnnncccccaaannnnnnnnnnnnnnnnnnnnnnnnnnnnnnnnnnnnnnnnnnnnnnnnnnnnnnnnnnnnnnnnnnnnnnnnnnnnnnnnnnnnnnnnnnnnnnnnnnnnnnnnnnnnnnaacatttattacaccgttaataatatttcaaaattattgataattcttttggatgtgataagctttgtaattatcttttaatgagctctcatctgggagagatacattctgaaatatttacagaagaaataatccgatgcctgagatcagcttcaaaagaactcaggatggggcagggacgggttgtaggtagtcggtagtcagggtactgggtacacggatgttctttgtactgttctttggtctgttgcgcaggttcgaaatgcttcctaattaaaaagcctaaaaagggacttggcaagctcccatccagacttcaaccccacaatatggagagcactcaggtccgaggcgttcctgctccccagctccctgcaaaaatagcgccaggcaaggtccgaggcgagggcgatgcttccatgagggtcccgccgactgcgtcgcgatcctcaatggctcagcgacttgcggcccttgagcattcggcgaaggatgacctgcacgccggccggcgtgctcaggcgccggacccagccgtgcttgttcttgcgtttgatgttgctcggctgatactcattcccgcgagccttgccccgggcctgctgcggggtggggaggccccaggcgtctgggaaccccagccaggcccggggctggagccacctgccacccagcaacgctgccgacctactcgtggggcccaacagggatccagccaagacagccatatccgcagtgggtcccgcagtaccggctgcgggcgattccggagcccagagccgctccagcccttgagccctgcgtcttctgcagatcctgctcctggcattcctgaagctcatcgacgagggcagccacatggtgatgctggaatgccctgagacggtcaacacgctgctccacgaattcctgctctgggagcccgagccctcgcccaaggctctaccggagccactgccggcgcctccagaagacaagaagtagccgctgggccggcggggcatcgcttggtgagcacagccgcagcaggaggaggcccgagcctgcgccaggtctgcagcgcagacaacctgggcgggccgttcgctccggtgggcggggccaggtcagggagacgcccccaggctgcctgggcggggcgtggcatccgagggagcccagcggacattccgctctccgcttccgtcccgcgaggcccatcggcgttttggggccgcagccgggaccctcacggaagatgaccttgtacagaagctctccctcaccttccccccaacgccacggccaaggcaggccccccaccccgctgtcttccgtgtcagccgtgcttgatcctgggacccacgagcccacagggaccctcgaggccccatcccgttatccgagacccttcctaccccccattcctcggcgctgggagctatttttgccnaggggggnggaanggggnnggtgccaccgaacctgcacatctcaacttgtaactcaataaacagaagtga

SEQ ID NO: 259906 - DNA, 1647 bp, Homo Sapiens
gtagcgaggcctgggtggcgaattcggcacgaggcattaaaaagaaaaagaacctggcttactgaacagtaacaataaggagcaggatggacggaatgatttctactgctgggtttgtcaccgggaaggccaagtcctttgctgtgagctctgtccccgggtttatcacgctaagtgtctgagactgacatcggaaccagagggggactggttttgtcctgaatgtgagaaaattacagtagcagaatgcatcgagacccagagtaaagccatgacaatgctcaccattgaacagttatcctacctgctcaagtttgccattcagaaaatgaaacagccagggacagatgcattccagaagcccgttccattggaacagcaccctgactatgcggaatacatcttccatccaatggacctttgtacattggaaaagaatgcgaaaaagaaaatgtatggctgcacagaagccttcctggctgatgcaaagtggattttgcacaactgcatcatttataatgggggaaatcacaaattgacgcaaatagcgaaagtagtcatcaaaatctgtgaacatgagatgaatgaaatcgaagtatgtccagaatgttatctagctgcttgccaaaaacgagataactggttttgtgagccttgtagcaatccacatccctttggtctgggccaaactgaaggggtttccattctggcctgcaaaagctctaagggataaagacgggcaggtcgatgcccgattctttggacaacatgacaggggcctggggttccaataaataattgcctacctcatgtctaaagaaattccttttttctgtgaaaaagactaagagcatcttccacagggccatgcaagagatggaggtttacgtggagaacatccgcaggaagtttggggtttttaattactctccatttaggacaccctacacacccaacagccagtatcaaatgctgctcgatcccaccaaccccagcgccggcactgccaagatagacaagcaggagaaggtcaagctcaactttgacatgacggcatcccccaagatcctgatgagcaagcctgtgctgagtgggggcacaggccgccggatttccttgttcggatatggccgcgctcccccatgagcacaaactcttctgtgcacacgggctccgacgtggagcaggatgctgagaagaaggccacgtcgagccacttcagtgcgagcgaggagtccatggacttcctggataagagcacaggtcagctccgtgcgggggagcggggaggaggccccttggacacgggggtttcccatgggtgcacacttggtgggcccaagcaggtgagcatcaagcaatcgtggggaactgtagggggccacagagcagattttcaagaagtcaccagtggagttcttgctgctagtaacccagaaatgagaaaagtgtccccaaaaggccaccttggaggttatacctagaagtagatggagatggccagaaatcttgtggagttctgttcagatgtcgctgcattttggattattgactttccataacacaaataattttgttttagttgaaattgtatttttctgtcaaaaccctacattcatattaaacagtgcaaatcttagagaaaaa

SEQ ID NO: 259907 - DNA, 374 bp, Homo Sapiens
  misc_feature (178)..(223): n is a, c, g, or t
  misc_feature (355)..(355): n is a, c, g, or t
tcccctcccaaatttagttcctcatcacaaaagaacaaagataaaccagcctcaatcccggctgctgcatttaggtggagacttcttcccattcccaccattgttcctccaccgtcccacactttagggggttgggatctcgtgctcttctccagagattacaaaaatgtagcttctnnnnnnnnnnnnnnnnnnnnnnnnnnnnnnnnnnnnnnnnnnnnnncccaatctataggagcagtggactgcttgctggtcgcttacatcactttactccatgaagcgcttcagtggggttatcctagtggctcttgtgggaagtgtgtcttagttacatcgagatgttgaaaatctnaccccaaaatggcagacag

SEQ ID NO: 259908 - DNA, 1078 bp, Homo Sapiens
  misc_feature (773)..(818): n is a, c, g, or t
  misc_feature (998)..(1006): n is a, c, g, or t
gataaataaaaccaaacgtttatttacaccaaagaattccaacactggatctttcacatatgaaggacaaagtattatatatatacacacagcaaggggtggcggggctgtaacaagagagtttatagttttcccacaattacaggtctaccatttcagcttcaatggagatagtggctctgctcctacctctcaagatacatttacaagactgaggagcaggtcttctcactggatggcatgtgagggaaggggacggtcggaggaaaagaaggtagaaagcttaaaatggaagtcagtgtggccacatctcccattagctctagcatgaaacctgtacagacaatgtttgtttcttttgtaaaaagcagtaagttatgcccagtaactaaatgaattcaaaatggccaagacaaagaaaactaagaaagattttgccttccctctcctaccagctatggagcacagcatgttcgggagatgaacagggaaaagaccaaggtaaggagcctgggagggaagggtatcaacattttaaactgaactaaaaataaaagtataaatgaggttggatttagggttagatcagtaagacatgattcttactgaacagaagtttttagtatctgtctgcattttgggtagattttcaacatctcgatgtaactaagacacacttccacaagagccactaggataaccccactgaagcgcttatggagtaaagtgatgtaagcgaccagcaagcagtccactgctcctatagattgggnnnnnnnnnnnnnnnnnnnnnnnnnnnnnnnnnnnnnnnnnnnnnnagaagctacatttttgtaatctctggagaagagcacgagataccaaccccctaaagtgtgggacggtggaggaacaatggtgggaatgggaagaagtctccacctaaatgcagcagccggggattgaggctggtttatctttgttcttttgtgatgaggaactaaatttgggaggggagnnnnnnnnntttgtccatgaaatattccacctgcaggtaatttttcagggaatcccctgagttatgaaaagttcgagttaa

SEQ ID NO: 259909 - DNA, 529 bp, Homo Sapiens
  misc_feature (440)..(440): n is a, c, g, or t
  misc_feature (494)..(494): n is a, c, g, or t
  misc_feature (507)..(507): n is a, c, g, or t
aagaccttgccagagcctgtgggcacccaagtcagcatggaagagattcagaatgagtcggcctgtggcctagatgtgggagaatgtgaaaacagagcgagagagatgccaggggtatggggcgccgggggctccctgaaggtcaccattctgcagagcagtgacagccgggcctttagcactgtacccctgacacctgtcccccgccccagtgactccgtctcctccacccctgcggctaccagcactccctctaagcaggccctccagttcttctgctacatctgcaaggccagctgctccagccagcaggagttccaggaccacatgtcggagcctcagcaccagcagcggctaggggagatccaggcacatgagccaagcctgccttcctgtccctgctgcccgtgccccgggacgtcctgggagacagagggatnagggagccttccaccaagggcgctgggtgcaacacctggccagctgttattaanatgggggggactngattccaaaaacggcagggcaa

SEQ ID NO: 259910 - DNA, 476 bp, Homo Sapiens
ataaacaaaccggctctgcccggcggccggcagcacgatgtcccaatgccctcaagagcctccctgagcctccagaaggagcggcagtgttggcacccgcagaagcccaggaggtcatgtctgcctgcgctgtctaatgccactgtctgtggtcattcgttccagcaacaacaggaaacccaggcccaggcaacccaagctcagtgagaggatggctggggacaggttaatacccacaggtaacttcctccacaaagaaagctggaaaacgcatgcacgcgccatcctcaaacacaccagccaccgagaaacacaataggcacgtgctgtggtgtggacgtgtccccaagttcaccatcggaaacctgatccccaacgcaacactgctgaggtcgtgagggctccgtcctcaccaaagcgttctcgctgttagcacaggagtggctcctgataaaaggcaggatctctggtgccca

SEQ ID NO: 259911 - DNA, 986 bp, Homo Sapiens
tcaccttggcccgtcctgttgctttcccagtccctgtagacccgttgcagtgccttgcctgtgagttgtggttgtcaattctaaggccagagtcccacgagtccctgcggtgccagggagctccttggctgcagccttacctgccctggacccctgcttcaggccacatcagtcacccctcccaggaagcctggcccctcttgtaagcccccacacttgctcctaagagctgagctgcctccccgcgacccgggacacccagcgtggcatgtgcattcctcccccgttcagcctgtggtgtttcctcagcagcctgaccgcctcctcccccattctctcctgaccctctggctatctcgatagcaggtcacctgtgagtctttacactcaaaggaaatagaacagcagggaagggaactgaaaagcagtagaagaaacagtcagagatgcctcactgatagacaggaggccgaacaggtaaaccccagaagtggagattcccaaacggaaaattccagaaatgggcgctccagctctgtgctaagctggggacgagtgtgagtgtgtctgcttgtccaacatttgcacaggcagcaaggcaaagcaggtgtgctcccaaaggcggagtctgaggaggggccggcagcggcaaacggcagcatcaaacagaccactgctgccgcggcaacccagggcctcttcagagctttcaaggcgatggagcgaagaccaagggtgcacatgcatgcaggcaggctgggaaggaagagcgggtggaggaagactgaggggaggctgccaggagaccgccatctgggagcagggccaagagagaagctggcagcagttacacagcgcaaaataaaaggccttgggctggactcaggcggaaagaaagtgctggaggaaatgaaagaacaaagcgggctgtctgtgtgcccacgccgggccggtcactaccttttctgcctgacaagtgtacataa

SEQ ID NO: 259912 - DNA, 898 bp, Homo Sapiens
aaagggttttttaaagagggagaaaaaaatgcacacaaagcagtgaatagtaggctagactcattggggggtaattaccctagactcctaactttccaggctagttgaggaaactaaggaatgcctcccaatattccaaccctcaaagctcacactgcccccagaaaaacaaaacactcacccccaatccaatgaatcatctgcatagaaaaccagagccagcaggcctagggaaggagcggatgtttgtgccctcctctagcacatactagttcagtggtatgttctgccaggcagtgtggaggccctcagaggcctcactagggaataaaatcactgaggttctccttccacatctcgtttaattttcacaaatttgtgtgtggcaaaagtctcaaactttaccatcagcaccattcttagctcagaaaagcagaaataaggtcacttataatgccttaaggtttgtcccctgtggctattcccccccttctgcccatcattattttttggttcctattaacttaggatgctctcctttaaaacaataataacagaaagataaaaagataatgattatatagcattatcccatagaagcataagacaaagcaaaaaactgcaagagagcaaaaatggtaaagacatagcatgctaaagttgacaggacctgcagagaaactgtcagcttactcccacaccaggacaggggagatgcaggttattttaaggatgaccagggcacactgtcactacaggtttccccttgagtgttggctgaggacccaacacaaaaagtgtcagagagaggggtggtaagaggagtggggaggcacgggacacgtgcttggagctgtgagaagaaaaatcctgaaagaaacccaagaaagttgaggaa

SEQ ID NO: 259913 - DNA, 1151 bp, Homo Sapiens
gtgcgtacgtgcgtcgtctctatggtggcggcggatttggagggaccctacgaaccaggagtcaggcgagccgatctggggctgcaggatgttccgctgggagcgctccattcccctgcgaggctcggccgccgccctgtgcaacaacctcagtgtgctgcagctgccggctcgcaacctcacgtattttggcgtggttcatggaccaagcgcccagcttctcagcgctgctcctgagggtgtgcccttggcccagcgccagctccacgctaaggagggtgctggagtgagtcccccacttatcactcaggtccactggtgtgtcctccccttccgagtgctgctggtactcacctcacatcgaggaatacagatgtacgagtccaatggctacaccatggtctactggcatgcactggactctggagatgcctccccagtacaggctgtgtttgcccggggaattgctgccagtggccacttcatctgtgtgggaacgtggtcaggccgggtgctggtgtttgacatcccagcaaagggtcccaacattgtactgagcgaggagctggctgggcaccagatgccaatcacagacattgccaccgagcctgcccagggacaggattgtgtggctgacatggtgacggcagatgactcaggcttgctgtgtgtctggcggtcagggccagaattcacatcattgacccgcattccaggatttggagttccgtgcccctctgtgcagctgtggcaggggatcatagcagcaggctatgggaaaggacaagtgcatctatatgaggccactacaggaaatctacatgtccagatcaatgcccatgcccgggccatctgcgccctggaactggcttctgaggtgggcaagctactctctgcaggtgaggacacctttgtgcatatctggaagctgagcagaaacccagagagtggctacattgaggtggaacactgtcatggtgagtgtgtcgccgacacccagctgtgtggtgctcgattttgtgattcctcaggcaactcctttgctgtgactggctatgaccttgcggagatccggagattcagcagtgtgtgagaagagcagccttcctttgtccctgtggtattcataaaagtacccgctccacccgaaa

SEQ ID NO: 259914 - DNA, 982 bp, Homo Sapiens
  misc_feature (940)..(940): n is a, c, g, or t
atgaccgccttgagcgcgaggatgctgacccggagccggagcctgggacccggggctgggccgcgggggtgtagggaggagcccgggcctctccggagaagagaggctgcagcagaagcgaggaaaagccacagccccgtgaagcgtccgcggaaagcacagagactgcgtgtggcctatgagggctcggacagtgagaaaggtgagggggctgagcccctcaaggtgccagtctgggagccccaggactggcagcaacagctggtcaacatccgtgccatgaggaacaaaaaggatgcacctgtggaccatctggggactgagcactgctatgactccagtgcccccccaaaggtacgcaggtaccaggtgctgctgtcactgatgctctccagccaaaccaaagaccaggtgacggcgggcgccatgcagcgactgcgggcgcggggcctgacggtggacagcatcctgcagacagatgatgccacgctgggcaagctcatctaccccgtcggtttctggaggagcaaggtgaaatacatcaagcagaccagcgccatcctgcagcagcactacggtggggacatcccagcctctgtggccgagctggtggcgctgccgggtgttgggcccaagatggcacacctggctatggctgtggcctggggcactgtgtcaggcattgcagtggacacgcatgtgcacagaatcgccaacaggctgaggtggaccaagaaggcaaccaagtccccagagggagacccgcgccgccctggagggagtggctgcctagggagctgtggcacgaggatcaatggactcttggtgggcttcggccaacagacctgtctgcctgtgcaccctcgctgccacgcctgcctcaaccaagccctctgcccggccgcccagggtctctgatggccgcatggctctggccgangtgccgctgtggccaccgtctgtgaagtggctttacgcttca

SEQ ID NO: 259915 - DNA, 2197 bp, Homo Sapiens
  misc_feature (1484)..(1776): n is a, c, g, or t
  misc_feature (1859)..(1893): n is a, c, g, or t
aattgcaggcgagcaggcgaggaatcgccgtggcgtcttggtgttctccacgctggttcgcaggtgaagagatggcgtttgtgaagagtggctggttgctgcgacagagtactattttgaagcgctggaagaagaactggtttgatctgtggtcggatggtcacctgatctattatgatgaccagactcggcagaatatcgaggataaggtccacatgccaatggactgcatcaacatccgcacggggcaggaatgtcgggatactcagcccccggatggaaagtcaaaagactgcatgctccagattgtttgtcgagatgggaaaacaattagtctttgtgcagaaagcacagatgattgcttggcctggaaatttacactccaagattctaggacaaacacagcgtatgtgggctctgcagtcatgaccgatgagacatccgtggtttcctcacctccaccatacacggcctatgctgcaccggcccctgagcaggcttatggctatgggccatacggtggtgcgtacccgccaggaactcaagttgtctacgctgcgaatgggcaggcgtatgccgtgccctaccagtacccatatgcaggactttatggacagcagcctgctaaccaagtcatcattcgagagcgctatcgagacaacgacagcgacctggcactgggcatgctggcaggagcagccacgggcatggccttagggtctctattttgggtcttctaggggcctcaaggtcttgatgtgcatagcttctgataaccctgtgtgcaataatatgatttgcagggcatttctgtttgtgacaaaagtttttaataatagttttaatcattcctttgaaagtagtgatgtcataattgtactaatccacataagtaccacagaagaagggtttgaactgtgctattttgttcaaatgttgactctccgggggcactggctcattccaagactgttcttgtgcaactctcagaataccttatttgagcatacctgtttttgaaaggcattttctttttagagttaagtggtagtgcttaaggggtaattttattttcatgttatgccagtaatatagggttgaatgccctattgagtgattgggccaagaaaagctacagcttcctttgcgtttaactttttcaaaccacagaccagaaactggttgcatgttactttaggagttgtgggttggtaagctcccaggtacttcccgaggctatggtgtgagagcccccgtcctgccctctggggctccacaggcccctggcaaggccgatggctcaggatgatggggcacagcccgcctttgaacaatcatgcttcagaaatctgcctgaccctagctgctgctgctgctcactttattcttgtatggctttggtaggcatacttggagaacatatcccacattaggaattgatttaagcctgagagtttgagggctttaatcctttaaaacttggnnnnnnnnnnnnnnnnnnnnnnnnnnnnnnnnnnnnnnnnnnnnnnnnnnnnnnnnnnnnnnnnnnnnnnnnnnnnnnnnnnnnnnnnnnnnnnnnnnnnnnnnnnnnnnnnnnnnnnnnnnnnnnnnnnnnnnnnnnnnnnnnnnnnnnnnnnnnnnnnnnnnnnnnnnnnnnnnnnnnnnnnnnnnnnnnnnnnnnnnnnnnnnnnnnnnnnnnnnnnnnnnnnnnnnnnnnnnnnnnnnnnnnnnnnnnnnnnnnnnnnnnnnnnnnnnnnnnnnnnnnnnnnnnnnnnnctacaatacaaccccgaggcctccatgcccgccctgcctaaaccgtaactcctcgtgacgcccacccggcccccttcctcggnnnnnnnnnnnnnnnnnnnnnnnnnnnnnnnnnnnacctttctcgcctcgcatgtcgggcccgtcgactccttactgcccctactctttccccacatccgcctcgtcctcgcacgcatctccagcgatcctctccccgttcacctccccatccctactcccctcctgaacccgcgccttgccaaagatttgagcttcggcccgcacacctccctccccgccggcttccgattttcccccctatgcgacggccacgcgtctttacgcaatctgacctacatatgtaccccgcgccttctccttccagcccgccctcccttcgatcccagcactgcacccc

SEQ ID NO: 259916 - DNA, 900 bp, Homo Sapiens
ttataacaacgaggcctgggtggcgaattcggcacgaggaggaatcgccgtggcgtcttggtgttctccacgctggttcgcaggtgaagagatggcgtttgtgaagagtggctggttgctgcgacagagtactattttgaagcgctggaagaagaactggtttgatctgtggtcggatggtcacctgatctattatgatgaccagactcggcagaatatcgaggataaggtccacatgccaatggactgcatcaacatccgcacggggcaggaatgtcgggatactcagcccccggatggaaagtcaaaagactgcatgctccagattgtttgtcgagatgggaaaacaattagtctttgtgcagaaagcacagatgattgcttggcctggaaatttacactccaagattctaggacaaacacagcgtatgtgggctctgcagtcatgaccgatgagacatccgtggtttcctcacctccaccatacacggcctatgctgcaccggcccctgaggtagggagaaccctgagcctccaggcttatggctatgggccatacggtggtgcgtacccgccaggaactcaagttgtctacgctgcgaatgggcaggcgtatgccgtgccctaccagtacccatatgcaggactttatggacagcagcctgctaaccaagtcatcattcgagagcgctatcgagacaacgacagcgacctggcactgggcatgctggcaggagcagccacgggcatggccttagggtctctattttgggtcttctaggggcctcaaggtcttgatgtgcatagcttctgataaccctgtgtgcaataatatgatttgcagggcatttctgtttgtgacaaaagttttttaataatagtttttaatcatttcctttg

SEQ ID NO: 259917 - DNA, 542 bp, Homo Sapiens
aatcaagctgcccaaagtcccccaatcactcctggaatacacagagagaggcagcagcttgctcagcggacaaggatgctgggcgtgagggaccaaggcctgccctgcactcgggcctcctccagccagtgctgaccagggacttctgacctgctggccagccaggacctgtgtggggaggccctcctgctgccttggggtgacaatctcagctccaggctacagggagaccgggaggatcacagagccagcatgttacaggatcctgacagtgatcaacctctgaacagcctcgatgtcaaacccctgcgcaaaccccgtatccccatggagaccttcagaaaggtggggatccccatcatcatagcactactgagcctggcgagtatcatcattgtggttgtcctcatcaaggtgatcctggataaatactacttcctctgcgggcagcctctccacttcatcccgaggaagcagctgtgtgacggagagctggactgtcccttgggggaggacgaggagcactgtgtcaagagcttccc

SEQ ID NO: 259918 - DNA, 571 bp, Homo Sapiens
acagtttctccaatggacaacactagggtggcattcacgaaagacacaatgatgtaggcatcaaactcatctgtggtgatcagcaccttcaccagccaccttcaatgtgtcgacgcactgtccagacagcgttggggttaccaggtagctcagaaacagccatttctgacacctcaagtccatgtcttaggactctcagagatgatcggggtcccctaccacaggccacatacaactgtggagtatcttcattggccagatcagctatctggcaaaacagaatgggagagaggctgtccaactcatcaaccagcacaaggtttttaagtggtcttggctgaaaaaagaatgtgtctccttcttccagaggcatggctgatgaaaactcaggttcttcatcatcatctccaggatgtgcaatttgatataagtaatggtttccaaattctgatgctacaaaaaggaaccctgttttaagcacacacatggcagcagcaacgggtacagtatcaaaatatttgagccggatctcagtaacctggtgagaaaagaaacattctggctgtgccga

SEQ ID NO: 259919 - DNA, 1743 bp, Homo Sapiens
  misc_feature (185)..(185): n is a, c, g, or t
gcgaattaaaccactcttccccttggaatggggccaatacccggcaggggccttttccccagggagtctgtgcaaaaactccagtttttccccattgttcccaagctggtaagtatagacgaaagcccccctcccacagatcggggggttaagtatcaggtccctgggccacacccaccagcacnataccagtcttcaccagtgttggaaaacctgcacacagccacactaaaagctgcctcattctgttccagctggacaaggtccagtgtgttcccttgaatgggattcatcactcggatcacagaggcccactgcccattgccagccttgggagctccaaagatggattcagggaggttttcattgaggaatgctgctgccatctctgcggccagctcccgctcatcctcccctgctgcttccaccatttcctctgccatctgctgctttctctgagctttcgtggcctcagtgtaggcattgtggtccgtttcaatgataataaggttgttactctcagggtggatgacaaatttcctgggtgtgtactgcagtgggaaggctacttgattgaagacagcaccgagcttctctaatgccaaaatccgtagggtgttggtggagatggccacaatgccctcgggacactgttccgaggcaaaacccgatgcaaattccagtgtctcgtaagacagtggggtgagatggaagcgagattggtaagaatagctcaaccatgagcggcttgacatggccaatactgcctcctggccttgcattcggactcggaagagcttcacaggacgggaccccaggtaccgagtgcgagtatcagacaaatccccagtgacagggtccaagacagtcctcagcagcacaccgttctgtagcccaatattcaggtataggaagccaatcgagcccctctcacccagctcatcctgcttctcagtcccacccatttccacgatacacaaggactcaggctgggctgggagagcctgcatgcttagaggttgcaaacagtctgagggatccagggagatgattctgacagtgttgtccacaagccccacagccaggaagcgagaccgctgctctccagggggtacattggccagactcatgcacaccacatctgctgacatctccttccgttctgtgtactcattcagctgtcctgaaggatccatctcgaaatagaccagctctcctcctgtcagggcaatcaccactagtcgctggttcactgcacacttcacaattgttttctttccaggggtcttccactcattgactctcttgtcggctcgtatgtgccgaatgccatctggatagacctgcaccaaggcatcatctcctaataaggagcaggaccaaggtcgggctggtccccaggaacccagagtcagtcacttcttctacagtttctccaatggacaacactagggtggcattcacgaaagacacaatgatgtaggcatcaaactcatcttcaatgtgtcgacgcactgtccagacagcgttggggttaccaggtagctcagaaacagccatttctgacacctcaagtccatgtcttaggactctcagagatgatcggggtcccctaccacaggccacatacaactgtggagtatcttcattggccagatcagctatctggcaaaacagaatgggagagaggctgtccaactcatcaaccagcacaaggtttttaagtggtcttggctgaaaaaa

SEQ ID NO: 259920 - DNA, 1087 bp, Homo Sapiens
  misc_feature (609)..(609): n is a, c, g, or t
agaggcgaaagtaccaacatcgtcaaacaagtccagctgcgagcgagaggattttgcactcactggggtttcctgctcaatcacctgcatctcagacagcacggagtgggagacagagcttcgggataccaagcccatgcccaacctttctgcctgctctcgcttcttcccttccagattctgtagcttcttttcctctttcttacgatcaatctggagctcctggtaggccagacgcatggaggcgaccatggactcctccgcctgcttcttggcatcggctgcctgctgctcacggagcttctctgccacctgagcctgccgctcaatctcactgaagctctggctgctcaccttctgggcccctaggcctttcttggcacccagccctttcttagctgctgctggcttcttcttgccaatgatggagcttttcagttccagtgaggctttgggtgaggtgccaagcaggtctgtgttggggccatgctccggctgtgccaggccactgctctctgtagacggggctggctgctgggtccctgaaggctcagtggctgggcatcccaggcagggggttgagtgtgttctgtgaagaaatcagagtcnttcttctctggggagtgattaggaacggcactactcatgttgtctatccaaagatcagtgccatgcctagccagggccgcactccccagctgcccgatcttctcccggtacatctgggcagctcggctattatatttggtgttggcatcattggctgtgcatccatgttggcgaaaaaaagccgtcgcattggcattcccgccgacctgcatacacctcagctggaaccagttccagttggaatccaactctgtggacctgatgaagctcagatggacgcccagggagcggtgcaccccggaacagtcaatgcacaagaaaacaccgtacgtgatgctggcccaactcggattcttggcgccgcagtcgaaacaggccttgttggttggaactgcgcgaagcctcttaaaaagagtctggatttcggtcttgttcggctccgccgccattttctctccttcccagacacaaccgcccc

SEQ ID NO: 259921 - DNA, 1985 bp, Homo Sapiens
  misc_feature (908)..(924): n is a, c, g, or t
gtagcgaggcctgggtggcgaattcggcacgagggtccatggtcgcctccatgcgtctggcctaccaggagctccagattgatcgtaagaaagaggaaaagaagctacagaatctggaagggaagaagcgagagcaggcagaaaggttgggcatgggcttggtatcccgaagctctgtctcccactccgtgctgtctgagatgcaggtgattgagcaggaaaccccagtgagtgcaaaatcctctcgctcgcagctggacttgtttgacgatgttggtactttcgcctctggacccccaaagtacaaggacaatcccttttccttaggggaaagctttggctcccgctgggatacagatgctgcctggggtatggacagggtagaggagaaggagccagaagtgaccatctcaagcatccggcctatttcagaaagagccacaaaccggagggaagtggagagccggagctcaggcctcgagtctagtgaggcgcgtcagaaattcgcaggagccaaagccatctcatctgacatgttctttgggcgggaggtggatgcggagtatgaggccaggtctcggctgcagcagctctcaggcagcagtgccatcagctcttcagacctctttggggacatggatggagctcacggagcaggaagtgtatctctggggaacgtgctgcctacagcggacattgcccagtttaagcagggtgtcaagtctgtggctgggaaaatggctgtgctggccaatggtgtgatgaattccttgcaggatcgctacggttcctactgatccgagctctgtgactcaggcttacgatggtgacggcaacaagaactccacagttcccaggctggggatgctttgccttgtggaagctggggaggatttgttacttcgtannnnnnnnnnnnnnnnngggtggcctttgaggcgctcactcctgtgaggggaatggtcagtaccagcccttgtcctctgcctgtggactgagccctttattccctctcacaccaccctccgtgtgttagactcttgtccttctgtcctgcccccacagctgctgctcacttatcctgccatactgggaaagggggttccccccacgatggcttattctgggtccagactttccccaggtagggaaagcggaaggtagaaggctttttttgctggctctagggttcttctagttcgaggccttgggtccccatcctctggaaccagggggaggcctggaaggagttcactgtagacccgtcccatggggaaagaggctgcggacttgctgctgctgctgctaccaggtggcgtcttctgggtgccaggagaggggaaggacctttgtctgggcgttaccaagagctagaaacgttacctggtacctaaaaggtctcatttggtatcagaacggagaacctggggttctcccgtctcaccacccctttctacagtaagcacttgggaagattgtttcagggtgtctcagggtccctctgtaccatctgctgtggaatgcaggaccctctgtgacattctttatcccttcttccccgggttggtggccatggagggtcttgtctgctgtgattcgactctggatgctgtgagcttgatgctggccagggaagcagaggatgtgagaggcagaggcaggctcctggggctgagctccttcctctgcatcattctgggcttggcctggacagcacccgccagtgagagctgtgggcctcaccctctggcagctgagccaagcactgtcattcttggtgccatcttcgccctgccgcaccggcagtctcagcccagcccccacctttgggttgtaggttgggctcccaagcaacacagaccactcttccccttgcccctcccccagagggacttgactttctttctggactgtttgtattgaaacaaagtggtgtcaaaataaagaccctgcagggcctggctccctgttggtctgagtgaaaa

SEQ ID NO: 259922 - DNA, 445 bp, Homo Sapiens
  misc_feature (167)..(183): n is a, c, g, or t
ttgtcttggccaatggtgtgatgaattccttgcaggatcgctacggttcctactgatccgagctctgtgactcaggcttacgatggtgacggcaacaagaactccacagttcccaggctggggatgctttgccttgtggaagctggggaggatttgttacttcgtannnnnnnnnnnnnnnnngggtggcctttgaggcgctcactcctgtgaggggaatggtcagtaccagcccttgtcctctgcctgtggactgagccctttattccctctcacaccaccctccgtgtgttagactctttgtccttctgtcctgcccccacagcttgcttgctcacctatcctgccataattggggaaaggggggttccccaacggatgggcttaatccttggggtccagaattttcccccaggtaaggggaaaagcggaaaggtagaaaggg

SEQ ID NO: 259923 - DNA, 997 bp, Homo Sapiens
ggggcggcgtcactgagccgcgccagctgagccaggtagggccctaccctcttctgttgctttctccctgtggctcgcgccgtcccccgccgcccgtcgaccccgcttccatgtccctggcggacacagctccccaggaacctccaccgcccatggccactatggcagagggaatcctctatcacctcctgctgttccacctcgagctgcgacgcagacgacgagggcgtgcgcggcacctgccgaagatggctttcccctgtgcaagagaactccaataagcagcgcccgacagcactcacctcctcacagaacaacactgtggtggaaaatctctaaagagaggaaccaccctgaaaggctcaacagtgaggacattcttcctacagcccatggaaacctgttgcagtcacctgggtttgcggagtgggaggaggtttgcagtaagcattggctactggcatgacccttacatacagcactttgtgagactgtctaaagagaggaaagcccctgaaatcaacagaggatattttgctcgagtccatggtgtcagtcagcttataaaggcatttctacggaagacagaatgtcattgtcaaattgtcaaccttggggcaggcatggataccaccttctggagattaaaggatgaagatcttctcccaagtaaatattttgaggttgactttccaatgattgtcacgagaaagctgcacagtatcaaatggacacatactggattcaaagagatatgccgttattggagcagatctccgagacctgtctgaactggaagagaagctaaagaaatgtaacatgaatacacaattgccaacactcctgatagctgaatgtgtgctggtttacatgactccagagcagtccgcaaacctcctgaagtgggcagccaacagttttgagagagccatgttcataaactacgaacaggtgaacatgggtgatcggttttggcagatcatgattgaaaacctgc

SEQ ID NO: 259924 - DNA, 1063 bp, Homo Sapiens
ttctccgccccgatgcgcgccctcccccggtttgggtggcgaattcggcacgaggctcgcgccgtcccccgccgcccgtcgaccccgcttccatgtccctggcggacacagctcccaggaacctccacgcccatggccactaggcagagggaatcctctatcacctcctgctgttccacctcgagctgcgacgcagacgacgagggcgtgcgcggcacctgcgaagatgcttccctgtgcaagaggtttgcagtaagcattggctactggcatgacccttacatacagcactttgtgagactgtctaaagagaggaaagcccctgaaatcaacagaggatattttgctcgagtccatggtgtcagtcagcttataaaggcatttctacggaagacagaatgtcattgtcaaattgtcaaccttggggcaggcatggataccaccttctggagattaaaggatgaagatcttctcccaagtaaatattttgaggttgactttccaatgattgtcacgagaaagctgcacagtatcaaatgcaagcctcccctatccagccccattctagaactgcattcagaggacacacttcagatggatggacacatactggattcaaagagatatgccgttattggagcagatctccgagacctgtctgaactggaagagaagctaaagaaatgtaacatgaatacacaattgccaacactcctgatagctgaatgtggggctggtttacatgactccagagcagtccgcaaacctcctgaagtgggcagccaacagttttgagagagccatgttcctaaactacgaacaggggaacatgggctgatcggtttggggcagatcatgattgaaaacctgcggaagacgccagtgtggacctggcgggaaggggaaacctgcaagttcattagagtcacaaaaagaacggctcccgtcgaatggggggggaaacagcatcggccgtcgacatgatggagttgtacaacaggtttacctcgaagctgaaagtgagcaaggatagaaatcaccttggaattccctgggaatgaaa

SEQ ID NO: 259925 - DNA, 801 bp, Homo Sapiens
atcgccctccaaaaagcccccacagttgtgtcctttaaaactgcccgaaaatgaaaagaaaacttgaatgaagtaaaatgtgaatagttgttaacattgcccccccaaaagtgcccacccaggtgaagtaccacggagaaatcatattggaaagttactacttagccatctgacttgacttccttggttatcaaataattacatattctgacccttcagaaggacaccaaaagctacaattttatgtttcaatccatctgtaccttcatttgcaatggctcagctagtttactcaagggttttgggaccagacataactcacgtcctgcaggaaggagaagcaaaaggagccggtgaagagtacgtgtctgtgtcttggtgtcatctagctcctcacagcaaacagcctgttttgttcaggcctgaagcctggaaaaggccgccgagcctagccagagcatccacaacgaaccaatctgagatccgagtggaagatgagagccccggagctggctgaggtcccccaggaagcttcccactctgcagtggcaggaaggccatgcctctgcaggacgctcgcactgattctggaaggggcccaggccagagaatacacttgggctcagttcaccagcccaaaccacaggggaaggagccggacaccggcctctcaccattttacacccaaagacaggaggtcagggctctgatgctactcttctgtttgtaaaatatggaaccactttctttgtactgtttgaggtgagcagtggctccaaactgagcaagtggttaaaaaat

SEQ ID NO: 259926 - DNA, 1145 bp, Homo Sapiens
aggctcagtgtggctcggtcatattcgaacacccggatggctggattgttggccccattgaccactccaggtaatgtggttttccatggggtgactccaggtgtgatgaacatggcgcttatggggacacctgcatcatcatagagcatccgaaagctgtcggtgtggtggtgcccgaagaactgccctgctatgacgcgatgatgcttccgggccaccttcaggtatttttcattgaagccctcccggaaccatgccttgttttgcgtcttctcaaagaaccccgggggcacgtggccgacaatgtacaccatgtccccagctttggatgcatcggtcagcacatcttccagccactggaactgctggccagggtccgccatgtctgctgtcagcgcattgctggtatagtacagattggtgttgaggaccacaattcgcccagccccgctgggacccggcagcttctcacagtagaaggcaccttttttgaagagagcgatggactcattactaagccagggtttccatagttctgctatctgattgtagatgttgttacttccagctgggaactggtttttggggtgaaaatcatgatttcccaaagcagcatagactttagtatctggaaagacctctctgatgagcttggtcaggcgttccacaatttccagtacagctgcctctcccagtttctcatcgggcacatgaggcgtgtcatcaccagtccagagaatgaagtctggctctggctcaatctccttcatggcatagatggaggagttgatgagggcccagggagaatcacagaggtagtcaccccaggggcctgcgtcgggcactggctgggatccagctgatgggcacacctggaaggggtctttggataccttgtagtcagggtcaaggtgcaggtcagcgatgtgccagaacttccctggttcagccctggcacctccccagttagccaggaaaatcagccaggcgagcagcctcatcctcggggctcacttccccagagccgtgggattctcaggcactgttgttgttctcaccacaggcttcctaagtagttttctgtggccacgtgcctgagcagaactccttgtcctgttacaggtgttccaagtcctccaaggcgt

SEQ ID NO: 259927 - DNA, 1535 bp, Homo Sapiens
  misc_feature (41)..(41): n is a, c, g, or t
acgagggaaaagctattggatttaagttggacagagtcatngtaaaccaacagcaactgaaccactatttaagaaagtcagtccatgggaaacatctacttctagcttttttcctattttggctccggccgttggttcctatcttaccccgactgcccgcgctcacagtcctgcttccttgtcttttgcctcatatcgtcaggtagctagtttcggttcagctgctcctcccagacagtttgatgaatctcaattcagccaaggccctgtgcctggcacttgtgctgactggatcccacagtcggcgtcttgtcccacaggacctccccagaacccaccttctgcaccctattgtggcattgttttttcagggagctcattaagctctgcacagtctgctccactgcaacatcctggaggctttactaccaggccttctgctggcaccttccctgagctggattctccccagcttcatttctctcttcctacagaccctgatcccatcagaggttttgggtcttatcatccctctgcttactctccttttcattttcaaccttccgcagcctctttgactgccaaccttaggctgccaatggcctctgctttacctgaggctctttgcagtcagtcccggactaccccagtagatctctgtcttctagaagaatcagtaggcagtctcgaaggaagtcgatgtcctgtctttgcttttcaaagttctgacacagaaagtgatgagctatcagaagtacttcaagacagctgctttttacaaataaaatgtgatacaaaagatgacagtatcccgtgctttctggaagtaaaagaagaggatgaaatagtgtgcacacaacactggcaggatgctgtgccttggacagaactcctcagtctacagacagaggatggcttctggaaacttacaccagaactgggacttatattaaatcttaatacaaatggtttgcacagcctttcttaaacaaaaaggcattcaatcctctaggtgtaaaaggaacagaatgtctcctggaactaatttgccacaatgctggtactacagtttattcgcaccaggttggaaaaagagggaatagtgttcaaatcactgatgaaaatggatgacccttctatttccaggaatattccctgggcttttgaggcaataaagcaagcaagtgaatgggtaagaagaactgaaggacagtaccccatcctatctgcccacggcttgaactggggaacgactgggactctgccacccaagcagttgctgggactccagcccataagcactgtgtcccctcttcatagagtcctccattacagtcaaggctaagtcaaatgaaactgaattttaaactttttgcatgcttctatgtagaaaataatcaaatgataatagatacttataatgaaacttcattaaggtttcattcagtgtagcaattactgtctttaaaaattaagtggaagaagaattactttaatcaactaacaagcaataataaaatgaaacttaaaataaa

SEQ ID NO: 259928 - DNA, 405 bp, Homo Sapiens
tctttttccaacctggtgcgaataaactgtagtacccagcattgtggccaattaggtccaggagacattcgcttccttttacaccctagagattgaatgcctttttgtttaagaaagctgtgcaaaccatttgtattaagatttaatataagtcccagttctggtgtaagtttccagaagccatcctacaaaattaaggaaacaaaaataagttatgttattcacattttatcacataagaagttacgtagtgggggaaggagtggggcaagggttgaaaaacatattttcactacttgggcaacaagacaattagaagcccaaacctcagcaccacacggtatgcccatgtaataaacctgtacgtgtacctctgcatctaaaataaaactttaacaaattaaa

SEQ ID NO: 259929 - DNA, 401 bp, Homo Sapiens
tcccaccaaagttgagagttcccaaatgctttctcctcaaatactgacggcgaaggaccaatggtttaaacagcagcatccaaggtacacacagtagtgcaaccactaccaggaaacactgaattcctttctgtccagaatacaacattgaataaccagactctgggtaggaaaagaggaacaagtttatgaaatggatcagaaggcttggtgcattctcagaggtatgagcatcataggccgtccaaatgtaaaaaataaggataaccaaatagccaaacaaagaggtcatgaagattatttcaggaataaatccaaagtagatattcaggggcttcttgaaatagatatggttgaacagactcaggctgactccaaacagcatatggatgataccaagg

SEQ ID NO: 259930 - DNA, 956 bp, Homo Sapiens
  misc_feature (811)..(811): n is a, c, g, or t
ctaccggtccggaatcccgggatatcgtcgacccacgcgtccgggaagatggcggacgaggagaagctgccgcccggctgggagaagcgcatgagccgcagctcaggccgagtgtactacttcaaccacatcactaacgccagccagtgggagcggcccagcggcaacagcagcagtggtggcaaaaacgggcagggggagcctgccagggtccgctgctcgcacctgctggtgaagcacagccagtcacggcggccctcgtcctggcggcaggagaagatcacccggaccaaggaggaggccctggagctgatcaacggctacatccagaagatcaagtcgggagaggaggactttgagtctctggcctcacagttcagcgactgcagctcagccaaggccaggggagacctgggtgccttcagcagaggtcagatgcagaagccatttgaagacgcctcgtttgcgctgcggacgggggagatgagcgggcccgtgttcacggattccggcatccacatcatcctccgcactgagtgagggtggggagcccaggcctggcctcggggcagggcagggcggctaggccggccagctcccccttgcccgccagccagtggccgaaccccccactccctgccaccgtcacacagtatttattgttcccacaatggctgggagggggcccttcccagattggggggccctggggtccccactccctgtccatccccaggttggggctgcgaccgccagattctcccttaaggaattgacttcagcaggggtgggaggctcccagacccagggncagtgtgggtggggaaagggtgtttccaaagaaaaaggccctgggccagcaaaagccgcccccgtggtccccccaaggtggctggaaggccaaactcgaaggggcccaaatttgtttccaagttaaggcccaccgcttcctctgc

SEQ ID NO: 259931 - DNA, 559 bp, Homo Sapiens
ggagctctgcagggcagccctcgagagcctccatggtgctcctgcagtcctccggctttcccgagattctggatgccaataaacagccagccgaggctgtcagcgctacagaacctgtgacgtttaaccctcagaaggaagaatcagattgtctacaaagcaacgagatggtgctacagtttcttgcctttagcagagtggcccaggactgccgaggaacatcatggccaaagactgtgtatttcaccttccagttctaccgcttcccacccgcaacgacgccacgactgcagctggtccagctggatgaagccggccagcccagctctggcgccctgacccacatcctcgtgcctgtgagcagagatggcacctttgatgctgggtctcctggcttccagctgaggtacatggtgggccctgggttcctgaagccaggtgagcggcgctgctttgcccgctacctggccgtgcagaccctgcagattgacgtctgggacggagactccctgctgctcatcggatctgctgccgtccagatgaagcatctcctccgcca

SEQ ID NO: 259932 - DNA, 1020 bp, Homo Sapiens
atattggggccggcggcgggtgggagagttctacgagggaggggaagcggttggacgtgttcgcttgggttcctgctgcggcagccacctcgcaatctctctgcatcgatcgccgctcgcaagctactgaccgtactcgggcgtattaggagccgcgttccagcctcacaccccacggtgctgttttcgacttcagaaaggatctagcctcagcacagaagcgcctcaggcgcggcgcaaagctcgagcggacggcgggggcggccggagcctctctcgggggagccgcgcctgaggaggcggaagaacccccctgacgcgactggcgtgtgcttctgcccgccaccgcccctcccgctctcacccgggccgtccctggccactgcccctgccgcggaggcagcggcggcagcggctctcctttccacagccggcgctccgcgacccgcttggctcctgagcccgtcgggtaggctctcctcgagttcccgctcttcaccccttccctcaccctcttctttcgtcacccgtccccgaccccacccgagcccggcgcctcagctgcccccggccatggcgtgcggagccactctgaaaaggactctggatttcgacccgctgttgagcccggcgtccccgaagcgcaggcgatgtgcgccattgtcggcgcccacctcggccgctgccctccccgttgtcggggggcgcgggcaccgccggctccttctccgctgcggccggctcggcgcagaagtatctcccgatggagccatcccccttcggggaagtctccttccgcctcaccacagaaccaattctgggcaacctaaaccagagtattaacggattgccgaagagaaaaccttttacaaaccaggtttcccacggaaagaatccgggggtggacttccggagggacacgcccttgggtttcttcctcaggggggacaaccttcccccaggggacttttttttggagggatccctcacccattaaaaaaacgaaacaggcctttattc

SEQ ID NO: 259933 - DNA, 1179 bp, Homo Sapiens
tataacccttggagcatgaaatgtcaccagcaacagttacagagaatgaaggagaatgcaaagcatcggaaccagtacaaatttatcttactggaaaacctgacttcccgctatgaggtgccttgtgtccttgacctcaagatgggctctttacaacatggtgatgatgcttcagaggagaaggcagccaaccagatccgaaaatgtcagcagagcacatctgcagtcattggtgtgcgtgtgtgtggcatgcaggtgtaccaagcaggcagtgggcagctcatgttcatgaacaagtaccatggacggaagctatcggtgcagggcttcaaggaggcacttttccagttcttccacaatgggcggtacctgcgccgtgaactcctgggccctgtgctcaagaagctgactgagctcaaggcagtgttggagcgacaggagtcctaccgcttctactcaagctccctgctggtcatttatgatggcaaggagcggcccgaagtggtcctggactcagatgctgaggatttggaggacctgtcagaggaatcagctgatgagtctgctggggcctatgcctacaaacccatcggcgccagctctgtagatgtgcgcatgattgactttgcacacaccacctgcaggctgtatggcgaggacaccgtggtgcatgagggcccaggatgcctggcttatatcttcgggctccagagcctgataagacattgtcccacagaataatcgaagacagtgggggagtgagcctttgctaacttgctccaagtactttgaaagcgaactcctgtgtccccaaggtacaagctggtgcctgccctcaagggaaggaaaacccaactatggggcccggtgggtgggctccctgcaaccctgggaactgaatgtgccactgggccttcctgtgaacccccaggcctggaacccattccaccagctggtgcctgggaccccttttatcttatttttaacctatttccttctcccatttcccaaaatttggaggaatgacaacctccttttccttccctgaagggtattatgttccaaaatacaaaacctcttttgggtctcttacgccgaccgaccctcccaatgctttcaacctttttctgtattgcccccgtcttttttcccccccgagaacccttttcaaaacacttt

SEQ ID NO: 259934 - DNA, 903 bp, Homo Sapiens
ggggcgcgactacgctcataaaaggaaaaaaagcgtgtgcggttctcgacgtgccgccaatcttcgaacgcaggtctgtgatcatccgcagactccgaaaaagggttcgaggaacgcgcctgctcccctcgtcgcagtttccagcccgacgagcttgttttgtcccggactcggtgcccctgtagacaatggccctcgtgtctgccgattcccgcattgcagaacttctcacagagctccatcagctgatcaaacaaacccaggaagagcgttcgcggagcgaacacaacttagtgaacatccagaagacccatgagcggatgcagacagagaacaagatttctccctattaccggacaaagctgcgtggcctctacacaaccgccaaggccgatgcagaggctgagtgcaacatccttcggaaagctctggacaagatcgcggaaatcaagtctctgttggaagagaagcggattgcggccaagattgccggtctctacaatgactcggagccaccccggaagaccatgcgcagaggggtgctgatgaccctgctgcagcagtcggccatgaccctgcccctgtggatcgggaagcctggtgacaagccccccacccctctgtggggccatcccctgcctcaggagactacgtggccagacctggagacaaagtggctgcccgggtggaagcccgtggatggggaccagcagtggatcctggccgaggtggtcagttacagccatgccaccaacaagtatgaggtagatgacatcgatgaagaaggcaaagagagacacaccctgagccggcgccgtgtcatcccgctgcccccagtgggaagccaaccccggagacggacccctgagccttggttccaaaaggagcagctcggtgctgggc

SEQ ID NO: 259935 - DNA, 520 bp, Homo Sapiens
tcctcggccaggatccactgctcatccccatccacggccttcacccgggcagccaccttgtctccaggtttcctcggccaggatccactgctcatccccatccccggccttcacccgggcagccgccttgtctccaggtctggccacagtagtctcctgaggcagggatggccccacagaggggtgggggcttgtcaccaggcttcccaatccacaggggcaggggcatggccgactgctgcaccagggtcatcaccacccctctgcgcatggtcttccggggtggctccaagtcattgtagagacccgcgatcttggccactgggctggaggcgggacctgaggtgaccaggtgcagggggcgtgccttcaggcagttgcggggccagggctcggctgaagctgggagtgaggaccccgttctccggtgggataggaggggacccgcgaagggccagggctcggctgaagctgggagtgaggaccccgttctccggtgggataggaggggacccgcgaa

SEQ ID NO: 259936 - DNA, 686 bp, Homo Sapiens
caggggactgtgctgcaagtggagggctggagggtgccacttcctgtccatcgacattgggctcctccttcacactgcagctgagctggacagacccctctattctggtgtcctggggaccttccccaggggactccactgtccctgaggggtgggggctcccaagtggttcctctgtcttctgggctgcagggagcacctcctgcttcaggacatgggctgtgatccagcccaacagttgcccagggtcatgctgcagtccttcgactagggcagcggcctcctcaggactgcctggccgctgaccgcgcacccaggcctggatctcgggaggcagtgtgcccaggaactgctccagcaccagcatatccagcatctgctccttggagtgtgcctcaggctgcagccactggcaacacagctcacgcagccgggccagggcttctcggggacctgccacctcctggtagcagaaccctcggaagcggaggcgggcagtctcaggctcctcaagggtggtctctgggtccatgacgggcaggcatgggggacccagaggggatggcattcttgctcaagggggtggtcttggaatcgtcaagatgggcctggacgggcctgagagaccaggcctgacacccggcctatccgagggatgctcgaacttcgggatctgtccccaaaag

SEQ ID NO: 259937 - DNA, 768 bp, Homo Sapiens
tcactataagacttcctcatgctaatgtgctcccttgcaatgaactgtgtcatattgcagaaaccatgcctagaggattggcatatttacatgaggatatacctggcctaaaagatggccacaaacctgccatctcacagggacatcaaaagtaaaaatgtgctgttgaaaaacaacctgacagcttgcattgctgactttgggttggccttaaaatttgaggctggcaagtctgcaggcgatacccatggacaggttggtacccggaggtacatggctccagaggtattagagggtgctataaacttccaaagggatgcatttttgaggatagatatgtatgccatgggattagtcctatgggaactggcttctcgctgtactgctgcagatggacctgtagatgaatacatgttgccatttgaggaggaaattggccagcatccatctcttgaagacatgcaggaagttgttgtgcataaaaaaagaggcctgttttaagagattattggcagaaacatgctggaatggcaatgctctgtgaaaccattgaagaatgttgggatcacgacgcagaagccaggttatcagctggatgtgtaggtgaaagaattacccagatgcagagactaacaaatattattaccacagaggacattgtaacagtggtcacaatggtgacaaatgttgactttcctcccaaagaatctagtctatgatggttgcgccatctgtgcacactaagaaatgggactctgaactggagct

SEQ ID NO: 259938 - DNA, 902 bp, Homo Sapiens
ggggagcaagatggccaccaccaagcgcgtcttgtacgtgggtggactggcagaggaagtggacgacaaagttcttcatgctgcgttcattccttttggagacatcacagatattcagattcctctggattatgaaacagaaaagcaccgaggatttgcttttgttgaatttgagttggcagaggatgctgcagcagctatcgacaacatgaatgaatctgagctttttggacgtacaattcgtgtcaatttggccaaaccaatgagaattaaggaaggctcttccaggccagtttggtcagatgatgactggttgaagaagttttctgggaagacgcttgaagagaataaagaggaagaagggtcagagcctcccaaagcagagacccaggagggagagcccattgctaaaaaggcccgctcaaatcctcaggtgtacatggacatcaagattgggaacaagccggctggccgcatccagatgctcctgcgttctgatgtcgtgcccatgacagcagagaatttccgctgcctgtgcactcatgaaaagggctttggctttaagggaagcagcttccaccgcatcatcccccagttcatgtgccagggcggtgatttcacaaaccacaatggcactgggggcaagtccatctatgggaagaagttcgatgatgaaaactttatcctcaagcatacgggaccagggtctactatccatggccaactctggcccaaacaccaatggctctcagttcttcctgacatgtgacaagacagactggctggatggcaagcatgtggtgttttggagaggtcaccgaaggcctagatgtcttgcggcaaattgaggccccaggcagccaagacgggaagcccaaaccagaaagtgatcatcgcccaaa

SEQ ID NO: 259939 - DNA, 883 bp, Homo Sapiens; identical to SEQ ID NO: 174906

SEQ ID NO: 259940 - DNA, 510 bp, Homo Sapiens
gggactgcggggcaggagaaggaaactgatgcttctgagggtgagtctgatgagataacatgcctgtgtgtgggcctcaggttagacagtgctgaggtctcccgtcactgggcatccagctgggtgctacggccgtggctcctgccttctgcagccctgtcagggcccaaggccttccccatcagcacttgctccagcctactcactggagttgtgttctgggtgggtgtgtagaatactcgcactcctacttggggcatcagggagctctctagcaatttcttctgcacctagggagagcccactgctaaaaaaggcctagtcaaatcctcaggtgtacatggacatcaagattgggaacaagccggctggctgcatccaaaccctcctgcgttccgacgtcgtgcacaggaccacagagaattttctctacatgtgcacccatttaaaggactcggcttcaagggaagcagcttccaccgcattatcccccagttcatttgcccaggg

SEQ ID NO: 259941 - DNA, 856 bp, Homo Sapiens
catcattgaattcaaccccatgtaccccaaagacaatgacatcgccctcatgaagctgcagttcccactcactttctcaggcacagtcaggcccatctgtctgcccttctttgatgaggagctcactccagccaccccactctggatcattggatggggctttacgaagcagaatggagggaagatgtctgacatactgctgcaggcgtcagtccaggtcattgacagcacacggtgcaatgcagacgatgcgtaccagggggaagtcaccgagaagatgatgtgtgcaggcatcccggaagggggtgtggacacctgccagggtgacagtggtgggcccctgatgtaccaatctgaccagtggcatgtggtgggcatcgttagctggggctatggctgcgggggcccgagcaccccaggagtatacaccaaggtctcagcctatctcaactggatctacaatgtctggaaggctgagctgtaatgctgctgcccctttgcagtgctgggagccgcttccttcctgccctgcccacctggggatcccccaaagtcagacacagagcaagagtccccttgggtacacccctctgcccacagcctcagcatttcttggagcagcaaagggcctcaattcctgtaagagaccctcgcagcccagaggctcccagaggaagtcagcagccctagctcggccacacttgggtgctcccagcatcccaggggagagacacagcccacctgaacaaggtcctcagggggtattgcctaagcccaaggaagggaaccttttccccaacacctacctggaaatgggaaagccagggcctgttcctttggtaaaaaaggcccccat

SEQ ID NO: 259942 - DNA, 1344 bp, Homo Sapiens
  misc_feature (1126)..(1126): n is a, c, g, or t
  misc_feature (1223)..(1223): n is a, c, g, or t
  misc_feature (1287)..(1287): n is a, c, g, or t
aggctggaccggtccggattcccgggatgatggggccaatgggatgatgactgtaatacctgccagtgcctgaatggacggatcgcctgctcaaaggtctggtgtggccctcgaccttgcctgctccacaaagggcacagcgagtgccccagcgggcagagctgcatccccatcctggacgaccagtgcttcgtccacccctgcactggtgtgggcgagtgtcggtcttccagtctccagccggtgaagacaaagtgcacctctgactcctattaccaggataactgtgcgaacatcacatttacctttaacaaggagatgatgtcaccaggtcttactacggagcacatttgcagtgaattgaggaatttgaatattttgaagaatgtttccgctgaatattcaatctacatcgcttgcgagccttccccttcagcgaacaatgaaatacatgtggccatttctgctgaagatatacgggatgatgggaacccgatcaaggaaatcactgacaaaataatcgatcttgttagtaaacgtgatggaaacagctcgctgattgctgccgttgcagaagtaagagttcagaggcggcctctgaagaacagaacagatttccttgttcccttgctgagctctgtcttaactgtggcttggatctgttgcttggtgacggccttctactggtgcctgcggaagcggcggaagccgggcagccacacacactcagcctctgaggacaacaccaccaacaacgtgcgggagcagctgaaccagatcaaaaaccccattgagaaacatggggccaacacggtccccatcaaggattatgagaacaagaactccaaaatgtctaaaataaggacacacaattctgaagtagaagaggacgacatggacaaacaccagcagaaagcccggtttgccaagcagccggcgtacacgctggtagacagagaagagaagccccccaacggcacgccgacaaaacacccaaactggacaaacaaacaggacaacagagacttggaaagtgcccagagcttaaaccgaatggagtacatcgtatagcagaccgcgggcactgccgccgctaggtagagtctgagggcttgtagttctttanactgtcgtgtcatactcgagtctgaggccgttgctgacttagaatccctggtgttaatttaagttttgacaagctggcttacactgggcatggtagntttctgtggttggctggggaaatcgagtgccgcatctcacagctatgcaaaaagctagtcacanggtaccccctggttggtgtggtccccttgcagccgacacgggggtcttcgggatcag

SEQ ID NO: 259943 - DNA, 1266 bp, Homo Sapiens
aagtccgcgcgggttctcgcacggagaaggggtgcgagcagcggcggcggcggaggctgccatggacgacgaggaggagacgtaccggctctggaaaatccgcaagaccatcatgcagctgtgccacgaccgtggctatctggtgacccaggacgagcttgaccagaccctggaggagttcaaagcccaatttggggacaagccgagtgaggggcggccgcggcgcacggacctcaccgtgctggtggcccacaacgatgaccccaccgaccagatgtttgtgttctttccagaggagcccaaggtgggcatcaagaccatcaaggtgtactgccagcgcatgcaggaggagaacatcacacgggctctcatcgtggtgcagcagggcatgacaccctccgccaagcagtccctggtcgacatggcccccaagtacatcctggagcagtttctgcagcaggagctgctcatcaacatcacggagcacgagctagtccctgagcacgtcgtcatgaccaaggaggaggtgacagagctgctggcccgatataagctccgagagaaccagctgcccaggatccaggcgggggaccctgtggcgcgctactttgggataaagcgtgggcaggtggtgaagatcatccggcccagtgagacggctggcaggtacatcacctaccggctggtgcagtagctaccgcctgacagcccctagaggcggacacacagcgacccccatccctgcaggacaaacgcccctgccctgccagaatccggcccccacagctctcacggctgctgctcctctggactccccaaggcaggtggcctccacccacgttctcccgtcctggggtgaggcttcctgtggcccagcccgccccattcacctgtggatttgtgcgagatgcagcctcagaaggaacaaggcccccagagggaggtcacctgggggcagctggtgccgggtcttcacccagaccacgctgggtcccctctgttgggggtttggggtccgggtctcccaccagccactgcttcctcctgggccctcggccttccacccctcgtcttccctccctcgggggccctgatgcgtggcggcccccgcccggcctcggctctttactccattcacagccgtgcacgcgctcaagccaccagggtgcgagatgccagctctggagttctcggttgttgtaggaggttgggtgttttcaaatggtaaagatgttttgagcaaataaatttgcttgatacagaaaa

SEQ ID NO: 259944 - DNA, 460 bp, Homo Sapiens
  misc_feature (294)..(313): n is a, c, g, or t
  misc_feature (332)..(391): n is a, c, g, or t
  misc_feature (444)..(444): n is a, c, g, or t
aagcatttgtgcctatagtaaaacctcattaattgtgacttggttaacgcagaatgcaaactttgggccacagtgggactgacactaccctgcactaaagaaaggcagatgcagaatgaaaccaggtgagcagacttaattctagaaaacaaaagaactttctgtgctctcacaatcatgagcagcattatctaacctaagggaaaagatttaaagaaaacagacaagttgtttaagtacactaaaatctatacttttcctcaggctcacagttaacaaccctatttgtcagannnnnnnnnnnnnnnnnnnngagaggcagggtcttgttnnnnnnnnnnnnnnnnnnnnnnnnnnnnnnnnnnnnnnnnnnnnnnnnnnnnnnnnnnnntgggactcaaggcaatcctctcacctaaaacctcctgagtagctaggactacngggtgtgttgccacca

SEQ ID NO: 259945 - DNA, 1389 bp, Homo Sapiens
gaagcgaggcctgggtggcgaattcggcacgaggcaaactactttcaggagaaatttttcccaggtcatgagtctcgggctacagaagctttgtgctgggcagaaggacagcgactctttagtgctgggctcaatggcgagattatggagtatgatttacaggcgttaaacatcaagtatgctatggatgcctttggaggacctatttggagcatggctgccagccccagtggctctcaacttttggttggttgtgaagatggatctgtgaaactatttcaaattaccccagacaaaatccagtttgaaagaaattttgatcggcagaaaagtcgcatcctgagtctcagctggcatccctctggtacccacattgcagctggttccatagactacattagtgtgtttgatgtcaaatcaggcagcgctgttcataagatgattgtggacaggcagtatatgggcgtgtctaagcggaagtgcatcgtgtggggtgtcgccttcttgtccgatggcactatcataagtgtggactctgctgggaaggtgcagttctgggactcagccactgggacgcttgtgaagagccatctcatcgctaatgctgacgtgcagtccattgctgtagctgaccaagaagacagtttcgtggtgggcacagccgagggaacagtcttccattttcagctggtccctgtgacatctaacagcagtgagaagcagtgggtgcggacaaaaccgttccagcatcacactcatgacgtgcgcactgtggcccacagcccaacagcgctgatatctggaggcactgacacccacttagtctttcgtccctctcatggagaaggtggaagtaaagaattacgatgccgctctccgaaaaatcacctttccccaccgatgtctcatctcctgttctaaaaagaggcagcttctcctcttccagtttgctcatcacttagaactttggcgactgggatccacagttgcaacaggcaagaatggggatactcttccactctctaaaaatgcagatcatttactgcacctaaagacaaagggtcctgagaacattatctgtagctgtatctccccatgtggaagttggatagcctattctacagtttctcggttttttctctatcggctgaattatgaacatgacaacataagcctcaaaagggtttccaaaatgccagcattccttcgctctgcccttcagattttgttttctgaagattcaacaaagctctttgtagcatcaaatcaaggagctctgcatattgttcagctgtcaggaggaagcttcaagcacctgcatgctttccagcctcagtcaggaacagtggaggccatgtgtcttttggcagtcagtccagatgggaattg

SEQ ID NO: 259946 - DNA, 989 bp, Homo Sapiens
  misc_feature (964)..(964): n is a, c, g, or t
ccccacgtggggccggggcggagagaggcgagcaccgggaaggggagcgtggggccgctggaatgggtgaatttaaggtccatcgagtacgtttctttaattatgttccatcaggaatccgctgtgtggcttacaataaccagtcaaacagattggctgtttcacgaacagatggcactgtggaaatttataacttgtcagcaaactactttcaggagaaatttttcccaggtcatgagtctcgggctacagaagctttgtgctgggcagaaggacagcgactctttagtgctgggctcaatggcgagattatggagtatgatttacaggcgttaaacatcaagtatgctatggatgcctttggaggacctatttggagcatggctgccagccccagtggctctcaacttttggttggttgtgaagatggatctgtgaaactatttcaaattaccccagacaaaatcccagtttgaaagaaattttgatcggcagaaaagtcgcatcctgagtctcagctggcatccctctggtacccacattgcagctgggtccatagactacattagtgtgtttgatgtcaaatcaggcagcgcctgttcataagatgattgtggacaggcagaatatgggcggtgtctaaacggaaatgcatcctgggggggtgtccccttcttgtccgatggcactatcataagtgtggactctgctgggaaggtgcagttctgggactcagccactgggacgcttgtgagagccatctcatcgctaatgctgacgtgcagtccattgctgtagctgaccaagaagaacagtttcgtggggggcacagccgagggaacagtcttccattttcacctggtccttgggacatcaaacgcaatggagaaacagggggtgccggacaaaaccggttcagcatcacactcatgacgggcgcactgggggccacaagcccaacggngctgaaatctgggaggacctgacct

SEQ ID NO: 259947 - DNA, 781 bp, Homo Sapiens
gggacgtggggccggggcggagagaggcgagcaccgggaaggggagcgtggggccgctggaatccgctgtgtggcttacaataaccagtcaaacagattggctgtttcacgaacagatggcactgtggaaatttataacttgtcagcaaactactttcaggagaaatttttcccaggtcatgagtctcgggctacagaagctttgtgctgggcagaaggacagcgactctttagtgctgggctcaatggcgagattatggagtatgatttacaggcgttaaacatcaagtatgctatggatgcctttggaggacctatttggagcatggctgccagccccagtggctctcaacttttggttggttgtgaagatggatctgtgaaactatttcaaattaccccagacaaaatccagtttgaaagaaattttgatcggcagaaaagtcgcatcctgaggtctcagctggcatccctctggtacccacattgcagctggttccatagactacattagtgtgtttgatgtcaaatcaggcagcgctgttcataagatgattgtggacaggcagtatatgggcgtgtctaagcggaagtgcatcgtgtggggtgtcgccttcttgtccgatggcactatcataagtgtggactctgctgggaaggtgcagttctgggactcagccactgggacgcttgtggaagagcatctcatcgctaatgctgacgtgcagtccattgctgtagctgaccaagaagacagttttcgtggtggggcacagccgag

SEQ ID NO: 259948 - DNA, 1508 bp, Homo Sapiens
  misc_feature (902)..(990): n is a, c, g, or t
  misc_feature (1143)..(1225): n is a, c, g, or t
  misc_feature (1276)..(1276): n is a, c, g, or t
  misc_feature (1383)..(1383): n is a, c, g, or t
aaggagcgaggcctgggtggcgaattcggcacgaggatcaaacagagacctcctcctcccaagtcaaggacaataagcctctggttgaacggtttgagacattctgcctggacccttcccttgtcaccaagcaagccaaccttgtgcacttcccaccaggcttccagcccattccctgcaagcctttgttctttgacctggccctcaaccatgtggctttcccaccccttgaggacaagttggaacagaagaccaagagtggcctcactggatacatcaagggcatctttggattcaggagctaaccaggctcttcctcgggggcgggggagattctgactcttaatctgtattgtgagaaaatcccagcaagttccatgatattaaatccaggtctgcattggcccggggcaagagtttaacatcttcggccctgcattcctacatcttgtgtctgtacacgttcttaagcagcgtgtcaggagagcaccctgttgtcttctggtaaatgtgtgcagggtcatcctgtctcctgtacctcctgggaaaggggccgctgctgtctggtgccctgtgagctgtgattgattgcctttggtcagtaatgcgttcaggagtccacaccaggcacagatggggccttgaaacgctttgtcatgcttcttcagtaccatggatttgaaatgaactcatccttgctgtgagcatccaggagcccttgagaagtttatctatgactatgaaactggcaacgtcaccccagaattacggtcagccttattccccttcacctcccagtgaacgctaagaagtttcagacaagcagagagctctatttttagaagaaatatgttacactcagaaatgatgaaaccaaatcttatattaaaaggcaaagatgnnnnnnnnnnnnnnnnnnnnnnnnnnnnnnnnnnnnnnnnnnnnnnnnnnnnnnnnnnnnnnnnnnnnnnnnnnnnnnnnnnnnnnnnntgtcgcgaactagggacctaagcttttttgttccccccctggagccctggcttggaattatccacttcaaaaaggcgggggggtggggacaaaaaccttagaaaaagctgatccggggggggcacattttagaaaacgttccggggggcccgnnnnnnnnnnnnnnnnnnnnnnnnnnnnnnnnnnnnnnnnnnnnnnnnnnnnnnnnnnnnnnnnnnnnnnnnnnnnnnnnnnnccccttgcgggggttttttataagattttaaaaaataaccaatccctcggnccacttttagggcaacagcccccaatgtaagacccccaaattctttttttgggaaaagcgcaaaaaagcggggagcccgtattcctttgtgaaatgcccgggggaanaaaaaaacacaaccctctctccttcggttaaaagaacacgcgggagaaaaaaccccacgtgcgcccgcaacataaaaaaaatttgccggtggccgagacacccagcccctacgggaacacattaa

SEQ ID NO: 259949 - DNA, 2242 bp, Homo Sapiens
  misc_feature (44)..(105): n is a, c, g, or t
  misc_feature (675)..(675): n is a, c, g, or t
  misc_feature (2116)..(2116): n is a, c, g, or t
  misc_feature (2216)..(2216): n is a, c, g, or t
ggggcggcgcaggggcaagatggctgctgagaagcaggtcccannnnnnnnnnnnnnnnnnnnnnnnnnnnnnnnnnnnnnnnnnnnnnnnnnnnnnnnnnnnnntggacgtggtgccggaggggaagaaaataaagaaaacgaacgcccttcggccggatcgaaggcaaacaaagaatttggggatagcctgagtttggagattcttcagattattaaggaatcccagcagcagcatggtttacggcatggagattttcagaggtacaggggctactgttcccgtagacaaagacgtcttcgaaaaacactcaacttcaagatgggtaacagacacaaattcacagggaagaaagtgactgaagagcttctgaccgataatagatacttgcttctggttctgatggatgctgaaagagcctggagctacgccatgcagctgaaacaggaagccaacactgaaccccgaaaacggtttcacttgttatctcgcctacgcaaagccgtgaagcatgcagaggaattggaacgcttgtgtgagagcaatcgcgtggatgccaagaccaaattagaggctcaggcttacacagcttacctctcaggaatgctacgttttgaacatcaagaatggaaagctgccatttgaggcttttaacaaatgcaaaactatctatngagaagctagccagtggctttcacagaggagcaggctgtgctgtataaccaacgtgtggaagagatttcacccaacatccgctattgtgcatataatattcggggaccagtcagccatcaatgaactcatgcagatgagattgaggtctgggggcactgaaggtctcttggctgaaaaattggaggctttgatcactcagactcgagccaaacaggcagctaccatgagtaaagtggagtggagagggagaacggttccagtgaagattgacaaagtgcgcattttcttattaggactggctgataacgaagcagctattgtccaggctgaaagcgaagaaactaaggagcgcctgtttgaatcaatgctcagcgagtgtcgggacgccatccaggtggttcgggaggagctcaagccagatcagaaacagagagattatatccttgaaggagagccagggaaggtgtctaatcttcaatacttgcatagctacctgacttacatcaagctatcaacggcaatcaagcgtaatgagaacatggccaaaggtctgcagagggctctgctgcagcagcagccagaggatgacagcaagcgctcaccccggccccaggacctgatccgactctatgacatcatcttacagaatctggtggaattgctccagcttcctggtttagaggaagacaaagccttccagaaagagataggcctcaagactctggtgttcaaagcttacaggtgttttttcattgctcagtcctatgtgctggtgaagaagtggagcgaagcccttgtcctgtatgacagagtcctgaaatatgcaaatgaagtaaattctgatgctggcgccttcaagaacagcctaaaggacctgcctgatgtgcaagagctcatcactcaagtgcggtcagagaagtgctccctgcaggccgcagccatccttgatgcaaacgacgctcatcaaacagagacctcctcctcccaagtcaaggacaataagcctctggttgaacggtttgagacattctgcctggacccttcccttgtcaccaagcaagccaaccttgtgcacttcccaccaggcttccagcccattccctgcaagcctttgttctttgacctggccctcaaccatgtggctttcccaccccttgaggacaagttggaacagaagaccaagagtggcctcactggatacatcaagggcatctttggattcaagagctaaccaggctcttcctccggggcgggggagattctgactcttaatctgtattgtgagaaaatcccagcaagttccatgatattaaatccaggtctgcattggcccggggcaagagtttaacatcttccgccctgcattcctacatcttgggtctgtacccgttcttaaacagcgggtcaggagagcaccctggttgtcttctggtaaatggnggcaagggcatcctgtctccctgtcccccctgggaaaaaggggcccctgctgttctggggcccctgtggacctgtggattggattgccctttgggccaanaaatggcggtccgggaagtcccaccc

SEQ ID NO: 259950 - DNA, 950 bp, Homo Sapiens
gggtggcgaattcggcacgaggatcatcttacagaatctggtggaattgctccagcttcctggtttagaggaagacaaagccttccagaaagagataggcctcaagactctggtgttcaaagcttacaggtgttttttcattgctcagtcctatgtgctggtgaagaagtggagcgaagcccttgtcctgtatgacagagtcctgaaatatgcaaatgaagtaaattctgatgctggcgccttcaagaacagcctaaaggacctgcctgatgtgcaagagctcatcactcaagtgcggtcagagaagtgctccctgcaggccgcagccatccttgatgcaaacgacgctcatcaaacagagacctcctcctcccaagtcaaggacaataagcctctggttgaacggtttgagacattctgcctggacccttcccttgtcaccaagcaagccaaccttgtgcacttcccaccaggcttccagcccattccctgcaagcctttgttctttgacctggccctcaaccatgtggctttcccaccccttgaggacaagttggaacagaagaccaagagtggcctcactggatacatcaagggcatctttggattcaggagctaaccaggctcttcctcgggggcgggggagattctgactcttaatctgtattgtgagaaaatcccagcaagttccatgatattaaatccaggtctgcattggcccggggcaagagtttaacatcttcggccctgcattcctacatcttgtgtctgtacacgttctttagcagcgtgtcaggagagcaccctgttgtcttctggtaaatgtgtggaggggcaatccagcctctgtacctcctgggaaagggggcgcctgcttgtctggtgccctggggacctgggaattgattgccctttgggcccgaaatggggttcaggagtccccccccagg

SEQ ID NO: 259951 - DNA, 683 bp, Homo Sapiens
gtcaatcagtaattccatagccctctcgtcaatgtctcggatcactacttctgtctgacggctctctgccaattctcctgtaaacatagctcggaagtagggactacaggctgacaaaatgactcgatgggcatatatcttcttggcgcccacaactagcaccacatcacatagctcccggtgctttctcagaaggttaatcacttccaaggtttgtcgagggtgcttgtctgagatatagggcatgcgggcaggttggggaaccccttctggcagtttgttggggtctccaagggtgcagcggcttgttacatccattccagtctctcctggtcgaatgttggtacacctgcgcattggctttccttccatgcaccatgaaaagtacccttcaccacactctaaagccgaacctgatagatcacatagggtacacgaggctttaataacgaatctgaagattgttaacttgtcccgaagtgacaggaggaggaggcgtctgcatttgcctttacaaacaactccgcttccgacagtccagggagcggctctgacactttcttctctgcagcagcctcctccgtctactccgccctccactcctctctgcctcctcctccaccgccgctaacgcaggcaggatgccgctcgtagagctatttcctttcccttcaccggcccat

SEQ ID NO: 259952 - DNA, 869 bp, Homo Sapiens
agccaggaggcggaggcgcgcgggccagcctgggccccagcccacaccttcaccagggcccaggagccaccatgtggcgatgtccactggggctactgctgttgctgccgctggctggccacttggctctgggtgcccagcagggtcgtgggcgccgggagctagcaccgggtctgcacctgcggggcatccgggacgcgggaggccggtactgccaggagcaggacctgtgctgccgcggccgtgccgacgactgtgccctgccctacctgggcgccatctgttactgtgacctcttctgcaaccgcacggtctccgactgctgccctgacttctgggacttctgcctcggcgtgccacccccttttcccccgatccaaggatgtatgcatggaggtcgtatctatccagtcttgggaacgtactgggacaactgtaaccgttgcacctgccaggagaacaggcagtggcagtgtgaccaagaaccatgcctggtggatccagacatgatcaaagccatcaaccagggcaactatggctggcaggctgggaaccacagcgccttctggggcatgaccctggatgagggcattcgctaccgcctgggcaccatccgcccatcttcctcggtcatgaacatgcatgaaatttatacagtgctgaacccaggggaggtgcttcccacagccttcgaggcctctgaaaagtggcccaacctgattcatgagcctcttgaccaaggcaactgtgcagggctcctggggccttctcccccgcagctgtgggcatcccgatcgtgtcctccatcccattctctggggacccatggacaccccggccctggtcgcccccaaaaaccccggttgttt

SEQ ID NO: 259953 - DNA, 1189 bp, Homo Sapiens
  misc_feature (103)..(103): n is a, c, g, or t
aacgcctccggtccctgctgcatactctggagatcaccgaccttgctgacttctccccgctcaccctccttgctaactttgccacccttgtcagcacctacgncaaaggttcaccatcatcatcgagccctttgacgacagaaccccgaccattgccaaccccatcctgcacttcagctgcatggacgcctcgctggccatcaaacccgtatttgagcgtttccagtctgtcatcatcacatctgggacactgtccccgctggacatctaccccaagatcctggacttccaccccgtcaccatggcaaccttcaccatgacgctggcacgggtctgcctctgccctatgatcatcggccgtggcaatgaccaggtggccatcagctccaaatttgagacccgggaggatattgctgtgatccggaactatgggaacctcctgctggagatgtccgctgtggtccctgatggcatcgtggccttcttcaccagctaccagtacatggagagcaccgtggcctcctggtatgagcaggggatccttgagaacatccagaggaacaagctgctctttattgagacccaggatggtgccgaaaccagtgtcgccctggagaagtaccaggaggcctgcgagaatggccgcggggccatcctgctgtcagtggcccggggcaaagtgtccgagggaatcgactttgtgcaccactacgggcgggccgtcatcatgtttggcgtcccctacgtctacacacagagccgcattctcaaggcgcggctggaatacctgcgggaccagttccagattcgtgagaatgactttcttaccttcgatgccatgcgccacgcggcccagtgtgtgggtcgggccatcaggggcaagacggactacggcctcatggtctttgccgacaagcggtttgcccgtggggacaagcgggggaagctgccccgcttggatcccaggagcacctcacagatgccaaacctcaacctgaccgtggacgagggtgtccaggtggccaacgtacttcctgcggccagaaggcacagcccttccaccgggaggatcagctgggcctgtccctgctcagcctggagcagctagaatcagaggagacgctgaagaggatagagcagattgctcagcagctctgagtggggcgggtggggccataaacggttcctg

SEQ ID NO: 259954 - DNA, 578 bp, Homo Sapiens
ctgttcgccccgcgccaccggcccgcgccccgccatggaggacctggatgccctgctctctgacctggagactaccacctcgcacatgccaaggtcaggggctcccaaagagcgccctgcggagcctctcacccctcccccatcctatggccaccagccacagacagggtctggggagtcttcaggagcctcgggggacaaggaccacctgtacagcacggtatgcaagcctcggtccccaaagcctgcagccccggcggcccctccattctcctcttccagcggtgtcttgggtaccgggccctgtgagctagatcggttgcttcaggaacttaatgccactcagttcaacatcacagatgaaatcatgtctcagttcccatctagcaaggtggcttcaggagagcagaaggaggaccagtctgaagataagaaaagacccagcctcccttccagcccgtctcctggcctcccaaaggcttctgccacctcagccactctggagctggatagactgatggcctcactctctgacttccgcgttcaaaaccatcttccagcctctgggccaactcagc

SEQ ID NO: 259955 - DNA, 482 bp, Homo Sapiens
attcctgcgctggaggccgcctctgacgccaccggctgggctccgccatgagttcggcgccggcctcaggctccgtgcgcgcgcgctatcttgtgtacttccagtacgtgggcaccgactttaacggggtcgcggccgtcaggggcactcagcgcgccgtcggggtccagaactacctggaggaggccgccgagcggctgaattccgtggagccggtcaggttcaccatctccagccgcacggacgccggggtccacgccctgagcaacgcggcgcacctggacgtccagcgccgctcaggccggccgcccttcccgcccgaggtcctggccgaggccctcaacacacacctgcggcacccggccatcaaggtcctgcgggccttccgagtgcccagcgacttccacgctcgtcacgcagccacgtcccggacctacctgtaccgcctggccactggctgtcaccggcgtgatgagctgccg

SEQ ID NO: 259956 - DNA, 576 bp, Homo Sapiens
  misc_feature (407)..(434): n is a, c, g, or t
caccaccaagtgcccttgggacgggtaccacagatggcccaaaatagagaaaagttggggccagcacttttggggggccttttcaggagagggaagctgggaaatgcaaccgttactcccggaggggtccttcctgatgcaatgaggtgagctccaagggacccaatggccctcactgcccaggggcttggtgaaaaaaacccactcagcccaactgggcagagcaggggcacacacaggaccccatccccaggagtcagtgggccaggggtccccaactggccaaccttccaacacactatcagactcagtgagatagtgacagaaatgcacgccctgaaaaccaaaagtacctacaaaatttaaatagccctattactattttccagctttttcctcaagaattnnnnnnnnnnnnnnnnnnnnnnnnnnnncaggtttgcaattaaattacttaaaattctacggcgctcccatttcacagagaattctacttggtttagaggtggcagctgtcctggtggatagtttctctttctccagtgatcatcagttcagcaacttggacatttggtt

SEQ ID NO: 259957 - DNA, 1148 bp, Homo Sapiens
cttaaaaccgagggcccgcaggggtccccgcggccgccgcgatgcagaaatacgagaaactggaaaagattggggaaggcacctacggaactgtgttcaaggccaaaaaccgggagactcatgagatcgtggctctgaaacgggtgaggctggatgacgatgatgagggtgtgccgagttccgccctccgggagatctgcctactcaaggagctgaagcacaagaacatcgtcaggcttcatgacgtcctgcacagcgacaagaagctgactttggtttttgaattctgtgaccaggacctgaagaagtattttgacagttgcaatggtgacctcgatcctgagattgtaaagtcattcctcttccagctactaaaagggctgggattctgtcatagccgcaatgtgctacacagggacctgaagccccagaacctgctaataaacaggaatggggagctgaaattggctgattttggcctggctcgagcctttgggattcccgtccgctgttactcagctgaggtggtcacactgtggtaccgcccaccggatgtcctctttggggccaagctgtactccacgtccatcgacatgtggtcagccggctgcatctttgcagagctggccaatgctgggcggcctctttttcccggcaatgatgtcgatgaccagttgaagaggatcttccgactgctggggacgcccaccgaggagcagtggccctctatgaccaagctgccagactataagccctatccgatgtacccggccacaacatccctggtgaacgtcgtgcccaaactcaatgccacagggagggatctgctgcagaaccttctgaagtgtaaccctgtccagcgtatctcagcagaagaggccctgcagcacccctacttctccgacttctgtccgccctaggccccgggacccccggcctacaggctggggcctggcctatttaagccccctcttgagaggggtgagacagtgggggtgcctggtgcgctgtgctccagcagtgctgggcccagccggggtggggtgcctgagcccgaatttctcactccctttgtggactttatttaatttcataaattggctcctttccccgggaacccaaaccactcacaatgatttcccttgttg

SEQ ID NO: 259958 - DNA, 467 bp, Homo Sapiens
  misc_feature (296)..(296): n is a, c, g, or t
  misc_feature (365)..(365): n is a, c, g, or t
  misc_feature (405)..(405): n is a, c, g, or t
  misc_feature (419)..(419): n is a, c, g, or t
  misc_feature (432)..(432): n is a, c, g, or t
ggatgacgatgatgagggtgtgccgagttccgccctccgggagatctgcctactcaaggagctgaagcacaagaacatcgtcaggcttcatgacgtcctgcacagcgacaagaagctgactttggtttttgaattctgtgaccaggacctgaagaagtattttgacagttgcaatggtgacctcgatcctgagattgtaaagtcattcctcttccagctactaaaagggctggggattctgtcatagccgcaatgtgctacacagggacctggaagccccagcaacctggctaatnaaacagggaatgggggagctggaaattgggtggattttgggcctggggttcgagccttttggggatttncccgtcccgctgtttacttcagcttgaggtgggttcacantgttggttacccgnccaccggatgttncttttttgggggccaagttgttatttccacgtttt

SEQ ID NO: 259959 - DNA, 529 bp, Homo Sapiens
gagtctgcagcggatgcccccctgcagtcctctacaaaccctgagggactttctgagacaagtgtgtaaattgctcacatcagacctgattgaactgactctggcaaagggagccgtgagtgagggaattctctcaggggaattctacccccagtgagatcacagtcaggagaaactgaagagaggctgtgccaccttcactggcatcgctgggtgtggccctctgagtggaaggggctcgaaggaacaccccactctgtgcacacagacttccgcccaatgtagactaagccaaataacaaaacggccaagcgcagagtgagtaaagaaggcagcgtggggacctgtagatgaggctctgcaaacagacggatgaggtgggggctggtgggagcactgtggcaaaggctcctgggcagaggccacccctgaagtactccagaaacagaaaagattttcagggaggttgcacatctcccaatgcactaggcttttgctgttgatattaacaaaaattctgtgccgaact

SEQ ID NO: 259960 - DNA, 962 bp, Homo Sapiens
  misc_feature (576)..(576): n is a, c, g, or t
gggcgaggcctgggtggcgaattcggcacgaggcgctatcagcggccagcgcgggcgcggccggagaccgtggggcccccggttgccgccccctcgggagccaccatgttggtgataccccccggactgagcgaggaagaggaggctctgcagaagaaattcaacaagctcaagaaaaagaaaaaggcattgctggctctgaagaagcaaagtagcagcagcacaaccagccaaggtggtgtcaaacgctcactatcagagcagcctgtcatggacacagccacagcaacagagcaggcaaagcagctggtgaagtcaggagccatcagtgccatcaaggctgagaccaagaactcaggcttcaagcgttctcgaacccttgaggggaagttaaaggaccccgagaagggaccagtccccactttccagccgttccagaggagcatatctgctgatgatgacctgcaagagtcatccagacgtccccagaggaaatctctgtatgagagctttgtgtcttctagtgatcgacttcgagaactaggaccagatggagaagaggcagagggcccaggnggctggtgatggtcccccctcgaagctttgactggggctatgaagaacgcagtgggtgcccactcctcagcctcccctccccgaaaccccagcccgggaccgcagccatggagaggaacccgggacagaaaccgagatccgggagcgggatcgagacccggatcgaaacagacacagagagcgggacagggatcggggatcggggatcgaggatcgagaaccgggaacggggacagggatccgggagcgggatccaagacgaaaaccgaaaggggccttttcgccaggtcgggattcctttccctgaaacggggagccccctaaggaaaggggatacctcccccatggaaatggggggagaaaatgaacacccaccctttttcggg

SEQ ID NO: 259961 - DNA, 781 bp, Homo Sapiens
  misc_feature (217)..(217): n is a, c, g, or t
  misc_feature (719)..(719): n is a, c, g, or t
cctgtctcactcttctgtcttgtccccacccatgcgccttcgtgcctgagaccagggtggccacacaggcagggcctggcctccagtctcatcctcccattgcccagtgagccctgctcttctctccccagccccctcccaccgctgcctcgtagagtgacctcggacagagcccccctagcaatacagggaggctcccggggcctggacaggcggngctcggaggctacccgctgtggccggtgccagctgcccttgcagggtgggtgagctctcaggccgagagccttatttacctagtgcaaaaactgtaaaagtgtacagactcttcacagatttttatcttaattgcaagtctgccgattttgtaaatgttcttggtgtttgactgtaatgtaactatctcacctaatggttgtacatatcctttggtcctggtgctgccgagggctggccgggactgctgctctcccaacggttttattttatttctgaatctagagaacagtattgggcaggaggaaaaggcttggtgtctgcgggggggtgtcttccctgcctgtggcatttgtgtgttggctttgcagctgctgtctgagtagtggccactggggtgccttcactgggccagtcaacggggggctcctgcccaggccacagagaacctgagtacccgggagctgggccctgcctgcagccagggcttggggttgccagangccctggagggaaggacagtccctgctggggaagaacagccccggggccccctggtcaccga

SEQ ID NO: 259962 - DNA, 428 bp, Homo Sapiens
cgggccttcgtggacaactacggagttgccatggaaatggctgagaagtgctgtcaggccaatgctcagtttgcagaaatctccgagaacctgagagccagaagcaacaaagatgccaaggatccaacgaccaagaactctctggaaactctgctctacaagcctgtggaccgtgtgacgaggagcacgctggtcctccatgacttgctgaagcacactcctgccagccaccctgaccaccccttgctgcaggacgccctccgcatctcacagaacttcctgtccagcatcaatgaggagatcacaccccgacggcagtccatgacggtgaagaaaggagagcaccggcagctgctgaaagacagcttcatggtggagctggtggagggggcccgcaagctgcgccacgtctttctgttcaccgacct

SEQ ID NO: 259963 - DNA, 1044 bp, Homo Sapiens
  misc_feature (912)..(921): n is a, c, g, or t
  misc_feature (925)..(967): n is a, c, g, or t
gagaaaaaaaagggaaaatatttatccccaaacagaaacctgtacagacttttacagaagaaaaagtgtctcttgatccagaattagaagaagctttgacaagtgcttctgatacagaattgtgtgacctcgcagcaattcttgggatgcacaatttgataacgaatacaaagttctgtaatataatgggaagtagtaatggtgttgaccaagaacatttttcaaatgtggtcaaaggtgaaaagattcttccggtatttgatgagccaccaaatccaaccaatgtagaagagagtttgaagagaactaaagaaaacgatgctcatcttgttgaagttaatttgaataatataaagaatatcccaattccaaccctaaaagattttgcaaaggctttggaaaccaacacacatgtgaaatgtttcagtcttgcagccacccggagcaatgaccctgttgctactgcttttgcagaaatgctgaaagtgaacaaaactttgaagagcttaaatgtggagtccaactttatcacgggagttgggattctggcactgattgatgcgttaagagataatgaaaccctggcagagctcaagattgacaatcagaggcagcagttggggacagctgtagaattggaaatggccaagatgcttgaggaaaatacaaatatccttaaatttggatatcagtttacacagcagggaccacgaaccagagcagctaatgctataacaaaaaacaatgacttagtgcgtaagagacgagttgaaggagatcaccagtaagtctgcaaaggtgtaatctttggaagacttcagaagatcaccaagggctcatgttggtgacatcatgtaaaattttcctgggtagaagggaaaagactggaaaaatttttttagtgacatgcannnnnnnnnnagtnnnnnnnnnnnnnnnnnnnnnnnnnnnnnnnnnnnnnnnnnnngaaacatttctactttctgctaaaatcaattttaatttagtttaattgaatgacctacgatgaatcttgggcaaaaa

SEQ ID NO: 259964 - DNA, 477 bp, Homo Sapiens
tctcaaaggcatgctcttcctgctttgggttcatcctctgctgcagagatgccctgtactcagacacaactcggaagaactccacattccccagaaagagcgtgctgtttaaaagggtgagaacccagcagaatggcagcaaatacagcatgcagactgtgcccagaagagccccatagaactgtgaggacacgacggggttctcccagtgcagcacgcggtaggcggcttcacatgtgcagcacaggcggctcaggaaggcctccagctggatcaagaagctcttcacctcagccacggcctcgggacgagacaggcgaactctatgcaggtcctcctgcctcacgctatgatacttcctccgcatcagctcggaatcaggcagccgtgcccggcaaacctcctgaaggtagcccagcagggcgggcactgaaatcatcagggcacctactgagtaccatgcactttgggagcata

SEQ ID NO: 259965 - DNA, 904 bp, Homo Sapiens
  misc_feature (650)..(650): n is a, c, g, or t
atggagccaggctgagtctagatggccagggcaggctgagctggcctgtgctctttctgtacccagagtatgcccagtcggacttcatctctgcttttcatgaggactccaggtttattgatcatctaatggtgatgtttggtgaaacaccctcttgggacctagagcaaaaatattgccctgataatttggaggtctactttgaggatgaggacagggcagaactataccgggtgcctgccaagagcaccttgctacaggttctacagcaccagaggtactttgtaaaagccctgacaccagcatttttggtctgtgtaggatcctctcctttttgcaagaattttctccgggggagaaaggtgtaccagatacgatgactaagccagggcccctggatctcctccctcaccctcctctgctgggaacctagcacacctgaatcaactggacatactgctggagtccagtgcttttctttccgtcaccctggggatagtccttcctggcatcgcggtgggggaggagcctctggcttccctaaactgcagcctctctggctggtcttcactttcctcagttgatataaaactctgggtcttggccatgatgtccttggactccatcgctaagggaccatctgctgcagntaccacagcacctgacctgagcggcaccctggtctgggggagatggactcaggatccagggacatgattctgaacttttggtggagtttgaccccttaagagaagctaccccttcaaacggcccattctaccccaaacaaacaatgcataaggatccccaaggcttttaaaggctgaaagaacccctggccctccaagttatttccttggcccaccagaggggaagcccattgtgggggggttgcttgaaaaaa

SEQ ID NO: 259966 - DNA, 474 bp, Homo Sapiens
ggagctcagcggcatcaacgggggcctcggcggagacggcagtcggagcggagcgggcgcggcggggacccaggctcatggcgttcagggccggcgggggtcggcggcggcagcggttctcggccttcatggcgacatttttccctgtttccttccttggcttctcaaactaggaagagaagcggcggacggggctgttaagcccggcggcagcggcgaccgaggacgaggaggccggggctcgggagtccgggccgggcctggcggggcggaggctgcgggggaaggggaggcgagggaggttgcgcgagccccgccggccggccggccggacacgctctcccgccgcgaggcaggggagagggctggctgtctcggtgtcggggactagtgtctccgacacagcaacggatactcgcccctgggccgaggccgacctgctccgggaatggcgacgagtcgccaaacagcatc

SEQ ID NO: 259967 - DNA, 1630 bp, Homo Sapiens
  misc_feature (1394)..(1394): n is a, c, g, or t
  misc_feature (1492)..(1537): n is a, c, g, or t
ctccacagctggcacgccgagagctgctacgagaagtcttcatttctgtgtaaaagaagtcaaacatgtgttgacatcaaggacaacgtggtggatgaagggttctacttcacccctaagggggacgacccatgcctgagctgcacctgccatggaggggagcctgagatgtgtgtggctgctctctgtgagaggccccagggctgccaacagtaccgcaaggaccccaaagagtgctgcaagttcatgtgtctggacccagatggcaacagtctgtttgactccatggccagcgggatgcgcctggtcgtcagctgcatctcctccttcctcatcctgtcactgctgctcttcatggtccaccggctgcgccagcggcgccgggagcgcatcgagtccctgattggagcaaacttgcaccacttcaacctcggccgcaggatccctggctttgattacggcccagacgggtttggcacgggcctcacgccgctgcatctttctgacgacggagagggtgggactttccatttccacgaccctccacctccctacacggcatacaagtacccggacatcagccagcccgacgaccctccgccgccctacgaggcctccatccacccggacagtgtgttctatgaccctgcagacgatgatgcttttgagcctgtggaggtcagcctgccagcccctggggatggtggggagtgaaggtgcattactccggcgcctggagcagcctctgcccactgcgggggcctctctggcagacctggaagactctgccgacagcagcagcgccctgctcgtgccccctgaccctgcccagagcgggagcaccccagctgcagaggcactgccagggggtggccgccacagccgcagctccctcaatactgtggtgtagacggcctggcctgtaccccaacggtctgggagcacctgtctgttgtagaaaacaccggtccctggggagacttgaaaggcccctgtcccagcctggacgccacgcactgccgcacgtcactggcgggctcgcgtgtgtacatagagaccacagcccgccttctgccaaaagaagtgatggcctgcaccgagcttccttgagggcttcagaaacatgcatagctttggatcactgtcttctcctttataaatggcagaagagtgacaaaattcattcagaccgcacatgttagaggcagggaatgaagaaggtactgtgggccatggccacacctgatgcgtttttggtgggcctacttggtgcagtgtgctgtccagagagacctgctgacccagtctgggacaggcacagtgggagctgccacagtgcccccttgctgggccgcccctcaggagggggcctctggaccgtcagtgtggcgtangcagtgggtctgcctcagggaggcaccctcttgactttggtcccaacggttgcactgaaaaatgggcccccacaaccccaagttgtgaaaaattaaannnnnnnnnnnnnnnnnnnnnnnnnnnnnnnnnnnnnnnnnnnnnncttctgggaaacctgaaaacccccttgaaaaaggagaaaactttgtaaaaaaggaagggtttaaaccctctctctcccgcggggggggctctc

SEQ ID NO: 259968 - DNA, 1082 bp, Homo Sapiens
  misc_feature (38)..(38): n is a, c, g, or t
  misc_feature (585)..(585): n is a, c, g, or t
gttgcctctctggaccatggcaagatttcctcattcancaaacagactccaggccctgacaaagcagttggatttggcatgtgtgatgaaaacaattagccatccatgtacaacattatgcttactgcatcccatggaaacttaattccctcctagcacatatttgcatactgaaaggtccgaaaagggcatccacggcagcttgagccccttagcaccatgtaaggagcacagcatccaaacggcttcttgagaaccattggggaatgtctttctttttcgcatccaattgtttagtgtctatttattcttgggtggccagttttgaaacctaaaaatgggacaataaagcaaaaagtatcagtaaggataggtggctgagacccactgccctgagctactagtgtggctgtgcctgtgggtctctagaaccatctgcattggacgtgaagccacagcaggtggctggactgctggcctgttcctaatgagctacgctgggctttgaggtagaggttggggtttatgaaccccaacttctggcttaaagatcttgctgtggctctgttatgttctgaggccttngggattagcctcttcctcattacggagctgattttctagtctgtggatcagctatgcctttggacacttctcttttccattgtgccttttgaatgttgtcttctcactcagcatcagcacttcgatctaaatgcagactaggtagttgggaggaggaaccaaagtgaaccatccttcatttattcagtcattcgttcatctgtcaaacacgtatttggacatcaaggttgcagagatgaacaatgcatggatttcatctttgaggagttcaaaacctagtggagagaacacatggtacaatcgtaacacatgaaggacaagtaagtgctgcagtaaaggtactaataacatgttccttggaacagaggaagaaaaaccacgaaaccatggaaattagggaagcctttacagagggtgtgacaaaactcaatttgacattttcaagctatgtacaatgatgtgcaccttgcagatgctcaataaagtaattactgaca

SEQ ID NO: 259969 - DNA, 1945 bp, Homo Sapiens
tgccaggtggatgtgaagaaaacagcattggccttgcatctaacagactcagagctgtcagatgaggaggcttctatcttggagagtggtggcttctccgtatcccgggccacaactccgcagctgactgatgtctccgaggatttggaccagcagagcctgccaagtgaaccagaggagaccctaagccgggacctaggggagggagaggagggagagctggcccctcccgaagacctactaggccgtcctcaagctctgtcaaggcaagccctggactcggaggaagaggaagaggatgtggcagctaaggaaaccttgttgcggctctcatcccccctccactttgtgaacacgcacttcaatggggcagggtccccccaagatggagtgaaatgctcccctggaggaccagtggagacactgagccccgagacagtgagtggtggcctcactgctctgcccggcaccctgtcacctccactttgccttgttggaagtgacccagccccctccccttccattctcccacctgttccccaggactcaccccagcccctgcctgcccctgaggaagaagaggcactcaccactgaggactttgagttgctggatcagggggagctggagcagctgaatgcagagctgggcttggagccagagacaccgccaaaaccccctgatgctccacccctggggcccgacatccattctctggtacagtcagaccaagaagctcaggccgtggcagagccatgagccagccgttgaggaaggagctgcaggcacagtagggcttcctggctaggagtgttgctgtttcctcctttgcctaccactctggggtggggcagtgtgtggggaagctggctgtcggatggtagctattccaccctctgcctgcctgcctgcctgctgtcctgggcatggtgcagtacctgtgcctaggattggttttaaatttgtaaataattttccatttgggttagtggatgtgaacagggctagggaagtccttcccacagcctgcgcttgcctccctgcctcatctctattctcattccactatgccccaagccctggtggtctggccctttctttttcctcctatcctcagggacctgtgctgctctgccctcatgtcccacttggttgtttagttgaggcactttataatttttctcttgtcttgtgttcctttctgctttatttccctgctgtgtcctgtccttagcagctcaaccccatcctttgccagctcctcctatcccgtgggcactggccaagctttagggaggctcctggtctgggaagtaaagagtaaacctggggcagtgggtcaggccagtagttacactcttaggtcactgtagtctgtgtaaccttcactgcatccttgccccattcagcccggcctttcatgatgcaaggagagcagggatcccgcagtacatggcgccagcactggagttggtgagcatgtgctctctcttgagattaggagcttccttactgctcctctgggtgatccaagtgtagtgggaccccctactagggttaggaagtggacactaacatctgtgcaggtgttgacttgaaaaataaagtgttgattggctagaactgctgcctccctgactgtgagctgccttccacaccctgcactgcactgtgttctctcctcacccttaacctgcttcactccagtctgttctggctgtttattaccttgttgcaaaacagggccgaagcacaggattaccttgacaacctctagcttctccttagccatcttccttgacagtgtgatctgtttagtgagatttagcatgtgtgaataaagtatatgcaggaggaaattgctttgtcttcccaatcggtagaaattcgggaccataaaaattgtgttttaccatgtggcctacaaccttaacactgctttctt

SEQ ID NO: 259970 - DNA, 475 bp, Homo Sapiens
caactttaaaaattttcccccttggccttgtggtccctttcctgcctttaatttcccctgctgtgtccctgtcccttaagcagctcaaacccccaaacctttgcccagctccctccctatccccgtgggcactggcccaagctttagggaggcccccctggtctgggaagtaaagagtaaaccctggggcagtgggtcaggcccagtagttacactcttaggtcactgtagtctgtgtaaccttcactgcatccttgccccattcagcccggcctttcatgatgcaggagagcagggatcccgcagtacatggcgccagcactggagttggtgagcatgtgctctctcttgagattaggagcttccttactgctcctctgggtgatccaagtgtagtgggaccccctactagggtcaggaagtggacactaacatctgtgcaggtgttgacttgaaaaataaagtgttgattgat

SEQ ID NO: 259971 - DNA, 1061 bp, Homo Sapiens
ccccccaaagggctgcacagaggatctcggagttgaatcgcttcttgtacttccggatctcaggggtctcactgtgggcccgggtgttggtgggattcacgttgaccacagaacccttcctcacgtcgtactgcagctggtcgagccgagtgccctctccacccactagggctgtgatggggatgctgtccccactgcctccaggctggtagatccctagatccacaaacatcgtgaaaacgagctcttgccaggggcctttacccagccccacgagactggtagtcacccactcccattcctttcgagggtgggctttggcctttgctgttctcggtgggtgagtggctgggctggaccacgtcaggcaggtttgtgtacccattgctgtcagcatgcagcaggttccgctcctcttcaggggtgcgctggaccaccatggtgccgcccccgtatgggggctgggtcccggtgatctcctcgacgtcgtggaccaccatggtgctgacgctgtctgtatccccatcgcggcccccaggggtatctctgctcccctctgctggcccgccttcgccttcctcctcgtcgtcctcactgctttccacctcctcgctggacgacgagtagtccatggccttcttgggaggccgaggggcctcgtccagagtccgctctttcagcaacacaaagtctgcgggccggcctggccgtgagcggtggtcgtcgggcttggctttattcccaggggagagcacaggggagctgtccggtttggaggagactcccacgcggttccgctccagtgagccagcctgggggaggtgcccgtgagaggctggaaggacgctgtccgagcgttcccagccagggtcgctcctcctgaggtcggggttactagaggcgttgggcgggccagggggctgagcagggggccctggaggctttggggtgccccgctctgcccgcctttgcagatagatttgccaggcggagttgctgcgaggtctggcacggactgcctgggctggccgggaccctccggccccactggtgttaagggc

SEQ ID NO: 259972 - DNA, 846 bp, Homo Sapiens
gggcccttcgatagctcatctttgcgcgtcgcagtcgcgcggagcccggcttccgacgtgcagcctggcagtgcagtgagctgtctggccttttgtccttgatccttggttaaggaaatgaccaaccagtacggtattctcttcaaacaagagcaagcccatgatgatgccatttggtcagttgcttgggggacaaacaagaaggaaaactctgagacagtggtcacaggctccctagatgacctggtgaaggtctggaaatggcgtgatgagaggctggacctacagtggagtctggagggacatcagctgggagtggtgtctgtggacatcagccacaccctgcccattgctgcatccagctctcttgatgctcatattcgtctttgggacttggaaaatggcaaacagataaagtccatagatgcaggacctgtggatgcctggactttggccttttctcctgattcccagtatctggccacaggaactcatgtcgggaaagtgaacatttttggtgtggaaagtgggaaaaaggaatattctttggacacgagaggaaaattcattcttagtattgcatatagtcctgatgggaaatacctagccagtggagccatagatggaatcatcaatatttttgatattgcaactggaaaacttctgcataccctggaaggccatgccatgcccatttcgctcccttgaccttttccccggactcccagctccttgtcactgcttcagatgatggcctacatccaagatctatgatggtacaacatggccaaatttgggctgggcacccttgaacggccctggcctccttggggggctgaacgttgc

SEQ ID NO: 259973 - DNA, 456 bp, Homo Sapiens
catatgtggccccaaaatttcaataaaagctgtataggaaagcactttgtaaaatagtaaagcaaatacaaataaatgttacctcacaattgttgaacagtatctcggcttcattaagtcgtatgcaagaagactttataaatgaagcactttccattctagcccatgatgatgccatttggtcagttgcttgggggacaaacaagaaggaaaactctgagacagtggtcacaggctccctagatgacctggtgaaggtctggaaatggtgagtgcctctcccctaacatacagccttggaaaattgggggctgaggttttgcttctgaactctccagttgcagtccgggaaatacttttttctaggcaagaaagcaatagcaatatggtggtataaaacagcagcttatttttcccacttgttttcctgttactctgtattaaagccctaaagtt

SEQ ID NO: 259974 - DNA, 994 bp, Homo Sapiens
  misc_feature (124)..(168): n is a, c, g, or t
aaaagggcccggcccctggccggcggctacttaagacagaggggcggcggcgggcagcagctgcgctgcgactgctctggaaggagaggacggggcacaaaccctgaccatgaccccccacagnnnnnnnnnnnnnnnnnnnnnnnnnnnnnnnnnnnnnnnnnnnnncagcccaggaggcgccttggcgcggtgcccaggctgcgggcaaggggtgcaggcgggttgtccagggggctgcgtggaggaggaggatggggggtcgccagccgagggctgcgcggaagctgagggctgtctcaggagggaggggcaggagtgcggggtctacacccctaactgcgccccaggactgcagtgccatccgcccaaggacgacgaggcgcctttgcgggcgctgctgctcggccgaggccgctgccttccggcccgcgcgcctgctgttgcagaggagaatcctaaggagagtaaaccccaagcaggcactgcccgcccacaggatgtgaaccgcagagaccaacagaggaatccaggcacctctaccacgccctcccagcccaattctgcgggtgtccaagacactgagatgggcccatgccgtagacatctggactcagtgctgcagcaactccagactgaggtctaccgaggggctcaaacactctacgtgcccaattgtgaccatcgaggcttctaccggaagcggcagtgccgctcctcccaggggcagcgccgaggtccctgctggtgtgtggatcggatgggcaagtccctgccaaggtctccagatggcaatggaagctcctcctgcccactgggaataacggcttaatcttgggggaaacaggggctttaaaggcccctggaaagaaacctggcacctgccctccatcccgcaataacccaggtcccccaatccccgcttatggcccctccccattggcgtcccactcccgcttgcctggaaaccaccctttggcgcccgcctttgaaa

SEQ ID NO: 259975 - DNA, 385 bp, Homo Sapiens
tgctgagcccccaagtgcaggctgtgccaagacagcatggtccatggggtattggggcctctgagagtggggctcttctctctgggccttttaggaggtggcctccttcagagagggccaggtggggccactcttggcctcccctctcactcaggcccatcccccagccccatcccctcctcaggacccctcatcggggcccatcctgggcacggtcagctgctcgtaggtgggcaaggtgttgctgggcaggaagagctcagggtcgacggagccgccactgccgcagggctgggtgatgtgggccccgccctctctgggggggccgccgctgccgggggtgctgccaccgtgcaaggagagcagctggtgaagcatgtcggtg

SEQ ID NO: 259976 - DNA, 991 bp, Homo Sapiens
  misc_feature (42)..(80): n is a, c, g, or t
actgctgcgggccagccaagatggcggcctcatgcttggtcnnnnnnnnnnnnnnnnnnnnnnnnnnnnnnnnnnnnnnnggaggatggaagcgctggcgccgggggcgggcggcccggcatgtagtagcggtggtgctgggcgacgtgggccgcagcccccgtatgcagtaccacgcgctgtcgttggccatgcacggcttctcggtgaccctcctggggttctgcaactccaaaccccatgatgagctcttgcagaacaacagaattcagattgtggggttgacagaacttcagagtcttgcagttgggccccgagttttccagtacggagtcaaagttgtacttcaggctatgtacttgctgtggaagttgatgtggagggagccaggtgcctatatctttctccagaaccccccaggtctgcctagcattgctgtctgctggttcgtgggctgcctttgtggaagcaagctcgtcattgactggcacaactatggctactccatcatgggtctggtgcatggccccaaccatcccctcgttctgctggccaagtggtacgagaagatctttgggcgcctggcccacctgaaccgtggctgctagcaatgctatgccacaacacctggcggagacctggcaactgcgagggattgagcggaaatcttcaaggcggaatctttattttaagagacccctgatagcccccccaggacagctactccttttaaaggcggagagattggaaaacttgctttggggcggccgttcaacacctttaagtacccccggaaggattcccgattgggacaagaaacgcatttccttgtgggggccagagtgggcagaatatttttctttttcatgtacaagaacttttcccagaaagtcctcggaactttctcacatgtgggacctaaagaagaagccactcgctcgcttttagaattcccactgtaaagggggttttgggctctctctctccccca

SEQ ID NO: 259977 - DNA, 585 bp, Homo Sapiens
atgaagaagcagcagcggctagggcggcggtagctgcaggggtcggggattgcagcgggcctcggggctaagagcgcgacgcggcctagagcggcagacggcgcagtgggccgagaaggaggcgcagcagccgccctggcccgtcatggagatggaaaaggagttcgagcagatcgacaagtccgggagctgggcggccatttaccaggagatccgacatgaagccagtgacttcccatgtagagtggccaagcttcctaagaacaaaaaccgaaataggtacagagacgtcagtccctttgaccatagtcggattaaactacatcaagaagataatgactatatcaacgctagtttgataaaaatggaagaagcccaaaggagttacattcttacccagggccctttgcctaacacatgcggtcacttttgggagatggtgtgggagcagaaaagcaggggtgtcgtcatgctcaacagagtgatggagaaaggttcgttaaaatgcgcacaatactggccacaaaaagaagaaaaagagatgatctttgaagacacaaatttgaaattaacattgatctctga

SEQ ID NO: 259978 - DNA, 495 bp, Homo Sapiens
atcaaaggcaggctctgcctgtggccactagcagagaagctgctgtccttccaccaccagcaccggaccacctgctccaagaccagcctcctggggggaccaggcacccggccttcactggcacccagggagccgtcctcagcagcgtcaacatgtcaaggcccagcagcagagccatttacttgcaccggaaggagtactcccagaacctcacctcagagcccaccctcctgcagcacagggtggagcacttgatgacatgcaagcaggggagtcagagagtccagtggcccgaggatgccttgcagaagctgttcgagatggatgcacagggccgggtgtggagccaagacttgatcctgcaggtcagggacggctggctgcagctgctggacattgagaccaatgaggagctggactcttaccgcctagacagcatccaggccatgaatgtggcgctcaacacatgttcctacaactccatcctgtccatca

SEQ ID NO: 259979 - DNA, 1139 bp, Homo Sapiens
ctgttttaagttgctcaggagcctgatggaaccatgaaccgagactcttctctgtttcctgccaagacctcatctgcactaatgccttctccctgaccttgacacttccccctttagctataaaagcacttaccagccgaacgtggaacagtatcacaaaagattccatctcccaacgatttcagaactctgagctcagagagactccagattttaaaaaataatttgagtgcttggaaactattagctttttaagttccttccaaatatgttagtacctaccctttactttttccccaagaccatctcagggtggagcattctgtctaagagaagaaagataaggaggctcccacccacctctcccaagagcagacattaaacatctttgtgctttgaagagagtgaattttggatagtcttgtgattctcagactaacttccagaattatactttaacccctcccagatatggtccgcctttggcattgtgtgtacatctgcagttttgcatggtgggttgttaatatttcaaatgtgtggtttatgaatacgtctgtataatcggcttctggagtgaaacagcaaaccccaaatcttcaaagttggaaggaactttaaaaatcatccggtccaatctctttcctctttctgccacctcccaaggcagaaatcccctcttcagcttcttttgtaggtgggaatccagcctctgttagatatgtccagagatggaaactcactcccctacaaaagatggagcttaatggagaaattgcaactttcattaaaaaacaaattcagatgaaatatcagtaactgtcttggacagtgctgaaatcaggtggttaaacgggtaaacaaaatatactgtattttgagaaatggcacaaaaacaggcagtcatctttaagggctatgcctaggcaaactactaacatgcattgtgagaatgccgtgtatacctcacgtactgtgtactttgtacatatattttaccttttatacctatgttcgattttgttctgttatgttatgttctggctttgaggcttgttttgttgtctgtgtctgtctgaataacctgcgtgtctaaaaccacgtgaaatgtgaatgattattggcaatattaccttgac

SEQ ID NO: 259980 - DNA, 539 bp, Homo Sapiens
  misc_feature (37)..(37): n is a, c, g, or t
  misc_feature (66)..(94): n is a, c, g, or t
  misc_feature (216)..(216): n is a, c, g, or t
atcagggactcacatacattgcctagattggtctcanactcctgggctcaagcaatcggcctcttnnnnnnnnnnnnnnnnnnnnnnnnnnnnngtgtgcgccaccacgcccagcttgaaaaattttttaatgcatgtggtaatccacaggagatcacatttagtatatgaccaagttaattaagaagtcaaaaaacacgttaaatttaagcagantaaggctgggttcggtggccaatgttagtttttatccttaaaattgcctgagttcttagaacacagaaaaaacaaatttgaatgcatttctaacagcttaataatttatatgtcccattatgattttagcggaatgttttaaagcaaagcataattcactgcaaagataaacctgaaaaagcaaacaaacttacaaatggtatgttatgacctagacaaaactgattatcaactagtaatactcataattagcacatgcaacagattgagaaattaaatcctgtgctatatactcttaagtattttgtcagatatatctttaa

SEQ ID NO: 259981 - DNA, 538 bp, Homo Sapiens
cttggagatcagagccatggtcctcacccacagcacatgggtctctaaacctggacctcaactcgcccatctgtaaaatgagggacttacattaaattcctacagctcctttcagcttgaacattatccgagtctattaggatcatcctatgaggcatcttctctttccctgcccctgataccctagacctgggagatttactcacctggtcccaggggatctatttctcccactctacctgccaggggctgagttctctgcctcacaagcccacattgccaagaagatgagaaacacggctggaaacctccctgtcctggcacccatctcttcctactgccatgaacaccaagacaggttcacaccaaaggtgttctgttcctcatggcaggctctgccacctgattaagagaaacatctaatctcctgctggttccctctcttcttaagaggagaggcctgaggacctgctgaaagctttatctctgcttgtcctccgggtgaggctaatgagtggggccaacgggtggggcagtg

SEQ ID NO: 259982 - DNA, 493 bp, Homo Sapiens
tcgaaggggaaggcgcctgaagaggacgaagaggagaggagacgccgtgagcgggacgaccagatgtaccgagagcggctgcgcaccttgctggtcatcgcggttgtcatgagcctcctgaatgctctcagcaccagcggaggcagcatttcctggaacgactttgtccacgagatgctggccaagggcgaggtgcagcgcgtccaggtggtgcctgagagcgacgtggtggaagtctacctgcaccctggagccgtggtgtttgggcggcctcggctagccttgatgtaccgaatgcaggttgcaaatattgacaagtttgaagagaagcttcgagcagctgaagatgagctgaatatcgaggccaaggacaggatcccagtttcctacaagcgaacaggattctttggaaatgccctgtactctgtggggacgacggcagtgggcctggccatcctgtggtatgttttccgtctggccgggatgactggaa

SEQ ID NO: 259983 - DNA, 895 bp, Homo Sapiens
  misc_feature (97)..(320): n is a, c, g, or t
agacaaagctgcagagcacattccatgccagacgctctggccaggaagctgaggccgggcttgagaggagagcgctggccatgccaggagagaaccnnnnnnnnnnnnnnnnnnnnnnnnnnnnnnnnnnnnnnnnnnnnnnnnnnnnnnnnnnnnnnnnnnnnnnnnnnnnnnnnnnnnnnnnnnnnnnnnnnnnnnnnnnnnnnnnnnnnnnnnnnnnnnnnnnnnnnnnnnnnnnnnnnnnnnnnnnnnnnnnnnnnnnnnnnnnnnnnnnnnnnnnnnnnnnnnnnnnnnnnnnnnnnnnnnnnnnnnnnnnnnnnggcgcaggctgcccgcctcctggagagcgctcttcagctgaaacagtaaagcctgatgggtgcaaatggaacctggatgtgtgcacgtgtgtcccaggtagggacggcacaggagggtgcatggggcgtgggggagctgagcaagggtcgctcacttagaaatgtctttggaatggtgtttaactaatgctgctggcggacatcctaaaaccagatgcatcctcagaggacgagtctactaattattgcctttgttgttgtattacaaatctgcataaaatacctcatttcaaatcaaatcttacaaatttagaagagagatatgttttccgaaaacagtggaagccctttgttccttcccgggtttgtcctgagcctgcactgtcctcgcctgcagcctcagaggggcaggcatccccgcacagacttgactggcagggcggtcacgggacctgcgggctggctccgagtggcagcccatgccttctgcagggtatgggttgacacttgacaggttgaaaccagtgcctctatgggacggctgctgtggcccctttcagacaatggggcagtgc

SEQ ID NO: 259984 - DNA, 1752 bp, Homo Sapiens
ctggaccggtccggaatttccgggatgttgattcggagtgtcaagaagtgtggggagtggaaggtgcttatcatggatcacccaagcatgcgcatcttgtcttcctgctgcaaaatgtcagatatcctggctgagggcatcaccattgttgaagacatcaacaaacggcgggaacccattcccagtctggaggccatttatttgctgagccccacggagaagtcggttcaggccctgatcaaagacttccaggggaccccgactttcacctacaaagcggcccatatcttcttcaccgacacctgccccgagcccctgttcagtgagctaggccgctctcgtctggcaaaggtggtgaagacgttgaaggagattcaccttgccttcctcccctacgaggcccaggtgttctccctcgatgctccccacagcacctacaacctctactgccccttccgggcagaggagcgcacgcggcagctcgaggtgctggcccagcagattgccacgctgtgcgccaccctgcaggagtacccggccatccgctaccgcaagggcccagaggacacagcccagttggcccacgccgtcctggccaagctgaacgccttcaaggcagacactcccagtctgggcgagggcccagagaaaacccgctcccagctgctgataatggaccgggcagctgaccccgtgtccccactactgcatgagctcacgttccaggccatggcgtatgatctgctggacatagagcaggacacatacaggtatgagaccaccgggctgagcgaggcgcgggagaaggccgtcttgctggacgaggacgatgacttgtgggtggagcttcgccacatgcatatcgcagatgtgtccaagaaggtcacggagctcctgaggaccttctgtgagagcaagaggctgaccacggacaaggcgaacatcaaagacctatcccagatcctgaaaaagatgccgcagtaccagaaggagctgaataagtattctacgcacctgcatctagcagatgattgtatgaagcacttcaagggctcggtggagaagctgtgtagtgtggagcaggacctggccatgggctccgacgcagagggggagaagatcaaggactccatgaagctgatcgttccggtgctgctggacgcggcggtgcccgcctacgacaagatccgggtcctgctgctctacatcctccttcggaatggtgtgagtgaggagaacctggccaagctgatccagcatgccaatgtacaggcgcacagcagcctcatccgtaacctggagcagctgggaggcactgtcaccaaccccgggggctcggggacctccagccggctggagccgagagaacgcatggagcccacctatcagctgtcccgctggaccccggtcatcaaggacgtaatggaggacgccgtggaggaccggctggacaggaacctgtggcccttcgtatccgaccccgcccccacggccagctcccaggccgctgtcagtgcccgcttcggtcactggcacaagaacaaggctggcgtagaagcccgggcgggcccccggctcatcgtgtatgtcatgggcggtgtggccatgtcagagatgagggccgcctacgaggttgaccaaggccaccgagggcaagtgggaggtgctcattggctcctcacacatcctcaccccgacccgcttcctgtgatgacctgaaggcactggacaagaagctggaggaacattgcc

SEQ ID NO: 259985 - DNA, 1013 bp, Homo Sapiens
aggtagcgaggcctgggtggcgaattcggcacgagggcccctcggggaagatggcgccctcggggctgaaggcggtggtgggggaaaaaattctgagcggagttattcggagtgtcaagaaggatggggagtggaaggtgcttatcatggatcacccaagcatgcgcatcttgtcttcctgctgcaaaatgtcagatatcctggctgagggcatcaccattgttgaagacatcaacaaacggcgggaacccattcccagtctggaggccatttatttgctgagccccacggagaagtcggttcaggccctgatcaaagacttccaggggaccccgactttcacctacaaagcggcccatatcttcttcaccgacacctgccccgagcccctgttcagtgagctaggccgctctcgtctggcaaaggtggtgaagacgttgaaggagattcaccttgccttcctcccctacgaggcccaggtgttctccctcgatgctccccacagcacctacaacctctactgccccttccgggcagaggagcgcacgcggcagctcgaggtgctggcccagcagattgccacgctgtgcgccaccctgcaggagtacccggccatccgctaccgcaagggcccagaggacacagcccagttggcccacgccgtcctggccaagctgaacgccttcaaggcagacactcccagtctgggcgagggcccagagaaaacccgctcccagctgctgataatggaccgggcagctgaccccgtgtccccactactgcatggagctcccggtcccaggccatggcgtatgaactgccggaactaaagcaggaaccataccgggatgaaaacccccggttgaaccaggcccggaaaaagcccctcttgcctggacaaggaacgagaatttgggggggtgaacttccccccaagccaaaccgcaaatgtggcccaaaaagggcccgggaaccccctgagggaccttcctgtgaaaaaaacaaagcgggaa

SEQ ID NO: 259986 - DNA, 989 bp, Homo Sapiens
ggcggggcccggcaggcgccgaggaggaagagcgagcccggacggcgcctctcgaacgagtgtgggcgcgaggcaggatgacgacctcaggcgcgctctttccaagcctggtgccaggctctcggggcgcctccaacaagtacttggtggagtttcgggcgggaaagatgtccctgaaggggaccaccgtgactccggataagcggaaagggctggtgtacattcagcagacggacgactcgcttattcacttctgctggaaggacaggacgtccgggaacgtggaagacgacttgatcatcttccctgacgactgtgagttcaagcgggtgccgcagtgccccagcgggagggtctacgtgctgaagttcaaggcagggtccaagcggcttttcttctggatgcaggaacccaagacagaccaggatgaggagcattgccggaaagtcaacgagtatctgaacaaccccccgatgcctggggcactgggggccagcggaagcagcggccacgaactctctgcgctaggcggtgagggtggcctgcagagcctgctgggaaacatgagccacagccagctcatgcagctcatcggaccagccggcctcggaggactgggtggggctgggggccctgactggacctggcctggccagcttactgggggagcagtgggcctccagggagcagctcctcctccagctcccggagcccagtcgcagcggtcaccccgtcatccaacaccttcttccacccgtgccaccccacccccttctggtccagcagctggcctcacaactaaccccgagcccccccgccccaagttccgggaattggagcccagcccagcaaggccaagcccgaacccaggccccctgcacgcgtgaagcggacctcccagaagcaatcctctgggccccacatgaaacggtacccaccccgcgggccaaacacaggcgggggcccacgaaaatgggcaccccctgggc

SEQ ID NO: 259987 - DNA, 963 bp, Homo Sapiens
  misc_feature (45)..(45): n is a, c, g, or t
gggcctcaacttgaatgggcgtgggttcgggccgggcgtctgttncggggctcccattccccggaaattgggcgcgggggttcggggctagtttgctgaggccagcctctggagccagaaaggggctggggtggccacgggtggaaaaggtgggggatgacggggtgaccgctgccgactggctccgggagctggagggaggagctgctcccttggaggccccactgctcccccagtaagctggccaggccaggtccagtcaggggccccaggccccaccccagtcttccgaggccggctggtccgatgagctgcatgagctggctgtggctcatgtttcccagcaggctctgcaggccaccctcaccgcctagcgcagagagttcgtggccgctgcttccgctggcccccagtgccccaggcatcggggggttgttcagatactcgttgactttccggcaatgctcctcatcctggtctgtcttgggttcctgcatccagaagaaaagccgcttggaccctgccttgaacttcagcacgtagaccctcccgctggggcactgcggcacccgcttgaactcacagtcgtcagggaagatgatcaagtcctggcaagccaggggaagagagagtcagtggcgcagatggcatcactgtgcccagtctcaggagagcgtactgagccctgggtctaaccgggtggggtgcgcaaggggcagctaagccgccagacccctcgctggcagggtctccacaaggcagagaagccagggtcagagacagcccatgaaaggcaaggccgggggagagagcagggaaaggggcctttcagatggcaacggggtttctgagacgtgctggaaacaacattcccagagtagttaaaaagtcaacgctgaactgctctcaaatgtaacaaagaacaactaagagtttgcctcgtgccgaattcgccacccaggc

SEQ ID NO: 259988 - DNA, 597 bp, Homo Sapiens
tggacctgcacactgaaaaattccaaaatacctattatgttgtgctttttgtgatatatattcatattattatttgtcataacaaggtgaacttttttaaaatggtaaacatgtattagttacataatcaggaaaaaagtcatcttttataatgagaaaaattaggtcaaggatatttcaagttttatccaattagatttcttgtaaagttatgtgttttcttttatctcagtgcttatttgctttgcaaggatgaaggttagagattcctttcagtagttaatgaaagctacagacttgtcttgccgaaaaatgtacataaacacataaactattttccaagcagtttcacagtgtttgcaaagttcagattgaaaacccagttttacaaatcccatctacaaatttgcattgtcattaagatatattaaaaataatttttcaaagcaacagcacagatgcactttaaaactgtagcttaaaaataaaaattagtaatataacttgtgtaaacctacacaaaagataaaagatatcttattgcaaaaataaggcaacattttgttttaaagaccaaatagtgaattgaatttaatg

SEQ ID NO: 259989 - DNA, 1033 bp, Homo Sapiens
  misc_feature (630)..(630): n is a, c, g, or t
atggctggcggcgctgcgggacggctagcggccctgcgtggggactcattggcgccccctgaggtggactttgacaggctgctggccagcctgcaggatcttagtgagctggtggtagagggtgacacccaagtgacaccagtgcccggcggggcacggctgcgtaccctcgagcccatcccgctgaagctctaccggaatggcatcatgatgttcgacgggcccttccagcccttctacgatccctccacacagcgctgcctccgagacatattggatggcttctttccctcagagctccagcgactgtaccccaatggggtcccctttaaggtgagtgacttgcgcaatcaggtctacctggaggatggactggaccccttcccaggcgagggccgtgtggtgggcaggcagcggatgcacaaggccttggacagggtggaggagcacccaggctccaggatgactgctgagaaatttctgaacaggctccccaagtttgtgatccggcaaggcgaggtgattgacatccggggccccatcagggacaccttgcagaactgctgcccattgcctgcccggattccaggagattgtggtggagacgcccaccttggccgctgagcgagnagaggagccaggagttcacccaacacgccggcacccccgctctccatgctgcgcatcaagtctgagaatggggaacaggccttcctactgatgatgcagcctgacaacaccattggggacgtgcgagctctgctagcgaaggccagggtcatggatgcctctgcctttgagatcttcagcaaattcccgcccaccctctaccaggacgatacactcacgctgcaggctgcaggccttgtgcccaaaaaagcactgctgctgcgggcacgccgagccccgaagtccagcctgaaattcagtcctggtcccctgtcccggtcccggtcccggccccaagtcccggtcccggtccccggctccagtcccttgtcccggacccagtcccagcccccaataaagcacc

SEQ ID NO: 259990 - DNA, 865 bp, Homo Sapiens
ggggagctgcgcctgcgcaactcattggcgccaagatggcgatggagatgaggcttccagtggctcgcaagcctcttagcgagagactgggccgcgacactaagaaacatctagtggtgccgggggatacaatcactacggacacaggattcatgcggggccatggaacgtatatgggagaagagaagctcattgcatctgttgctggctctgtggagagagtaaacaagttgatctgtgtgaaagctttgaaaaccagatacattggtgaagtaggagacatcgtagtgggacgaatcacagaggttcaacagaagaggtggaaggtggagaccaactccaggctggattcggtcttgctgctctcgtccatgaaccttcctggaggagagctgaggagaagatctgcagaagatgagcttgcaatgagaggtttcttacaggaaggggaccttatcagtgctgaggtccaggcagtgttctctgacggagctgtctctttgcacacgaggagcctgaaatatggaaaactaagtcagggggttttggtccaggtttccccctccctggtgaaaacgcaaaagaccccctttcatgatttgccatggggtgcctcagtgattctcgggaaacaacggccttcatctggaatttacccaacacctggagcaccaaagaagaaggaaaccggggggccttcatttgccaaacctgggaagccggcctcctcctggctgatccgagaaggggaaaatcccgggcttccggaactggcactcctcttcggttgggaaacctcccaggaatgatgctggtaatgaataccagccatcctggaactgctattgagaacattccccttcca

SEQ ID NO: 259991 - DNA, 1811 bp, Homo Sapiens
aagggtcggcggcctggggtcggcgccggcgccggcggccgaggaggcggcaggaaccgcagggcgctcggggaagcaaacggagtgtggaaatacgacctgacccctgcaatccagaccacaagcaccctttatgagcggggctttgagaatatcatgaagcggcagaataaggagcaggtcccaccccctgctgtggaacctaagaaaccaggaacaagaagcagccaaagaaggtggcaactcctcccaaccaaaaccagaagcagggccgcttccgcagcctggaggaagcactgaaagctctggatgtggcagacctgcagaaggaactggacaagagccagagtgtgttctctggaaacccatccatatggttgaaggacctggccagctatctcaactacaagctacaagctcctctaagtgaacccacgctgagccagcatactcatgattatccctacagcctggtgagccgggagctacgtgggatcatccgagggctgctggcgaaggcagcagggtctctggagctcttttttgaccactgtctgttcaccatgttgcaagagctggataagacaccaggggagtcactacatggttaccgcatctgtatccaggccatcctgcaagacaagcccaagattgccacggcaaacctaggcaagttcctggaactgctgaggtcccaccagagccgaccagcaaagtgtctcaccatcatgtgggccctgggtcaagcaggttttgccaacctcaccgagggactgaaagtgtggctggggatcatgctgcctgtgctgggcatcaagtctctgtctccctttgccatcacatacctggatcggctgctcctgatgcatcccaaccttaccaagggcttcggcatgattggccccaaggacttcttcccacttctggactttgcctatatgccgaacaactccctgacacccagcctgcaggagcagctgtgtcagctctacccccgactgaaagtgctggcatttggagcaaagccggattccaccctgcatacctacttcccttctttcctgtccagagccacccctagctgtccccctgagatgaagaaagagctcctgagcagcctgactgagtgcctgacggtggaccccctcagtgccagcgtctggaggcagctgtaccctaagcacctgtcacagtccagccttctgctggagcacttgctcagctcctgggagcagattcccaagaaggtacagaagtctttgcaagaaaccattcagtccctcaagcttaccaaccaggagctgctgaggaagggtagcagtaacaaccaggatgtcgtcacctgtgacatggcctgcaagggcctgttgcagcaggttcagggtcctcggctgccctggacgcggctcctcctgttgctgctggtcttcgctgtaggcttcctgtgccatgacctccggtcacacagctccttccaggcctcccttactggccggttgcttcgatcatctggcttcttacctgctagccaacaaagcgtggtgccaagctctactcctacagtctgcaaagctacagctggctgggggaaaaaactggcgcctctgggggctccccacctggctaaccggggggtgccggcccaacttggcaggtgggcctggggctcccacccaatgcccaaaggcaagctttccctttcttgcccactgtggcctccctcccccttggcgggggtgttggggggaaagatcttcacccagattccttcctccaaaagggttacaaaatccaggctccccccgaatttc

SEQ ID NO: 259992 - DNA, 845 bp, Homo Sapiens
gtgggagtgatggtaacgagtccctcgccagcctccagcaagactctcaggatcacaaaccgggcctgcatatgggcctgtcgccagttgaaggcctcaggtgtgtagaactccagagcgagcagcccggcccgaaccatgttgagccagttcacgtagatcacgtcctccgcatcagccccctcaaagccaaagatctccagcacttgcgggtggagacagaggtagagacccacgctctcagcccggcactcttcgtagctggaggcgatggtgctgaacttgctatcacaggtctccccgctccgataccagctctgaatctgctcgcccgtctctgggttgatcactgtttcctggtcaaagttgaatgctcctttttcgtcctgtacgaagagcttgccactgccatggcccagcagctcgtgcaggcccacctgcacatcgaaggagggcccattccagaggatgtacaggtccttgtcatcctcctccagaaaggtaagcttctcccgctgcgtggcgtaggccacagccagcacattccccagcgacacgttcttaaagccttccgtctgcctcagatcatcgtagttggggatgttgatgccggcagggatgccggagccagcgaaggtgagaacatccagggaggtgaagtcaggggtgaggaacttgtccttctcaaaggttgggggccagggcagctccttcagcagctgctctgcgctcgccaccagccgctcaaacttggcactcatggccttgttcaccacagctacgaaaccttcaaattctcctcgggaaccaaaggggtcgcggtagctcgcgatgaacccgatgta

SEQ ID NO: 259993 - DNA, 1445 bp, Homo Sapiens
  misc_feature (1349)..(1349): n is a, c, g, or t
  misc_feature (1425)..(1425): n is a, c, g, or t
cgcgcgctgttccgcacttgctgccctcgcccggcccggagcgccgctgccatgcggctggcgctgctctgggccctggggctcctgggcgcgggcagccctctgccttcctggccgctcccaaatataggtggcactgaggagcagcaggcagagtcagagaaggccccgagggagcccttggagccccaggtccttcaggacgatctcccaattagcctcaaaaaggtgcttcagaccagtctgcctgagcccctgaggatcaagttggagctggacggtgacagtcatatcctggagctgctacagaatagggagttggtcccaggccgcccaaccctggtgtggtaccagcccgatggcactcgggtggtcagtgagggacacactttggagaactgctgctaccagggaagagtgcggggatatgcaggctcctgggtgtccatctgcacctgctctgggctcagaggcttggtggtcctgaccccagagagaagctataccctggagcaggggcctggggaccttcagggtcctcccattatttcgcgaatccaagatctccacctgccaggccacacctgtgccctgagctggcgggaatctgtacacactcagacgccaccagagcaccccctgggacagcgccacattcgccggaggcgggatgtggtaacagagaccaagactgtggagttggtgattgtggctgatcactcggaggcccagaaataccgggacttccagcacctgctaaaccgcacactggaagtggccctcttgctggacacattcttccggcccctgaatgtacgagtggcactagtgggcctggaggcctggacccagcgtgacctggtggagatcagcccaaacccagctgtcaccctcgaaaacttcctccactggcgcagggcacatttgctgcctcgattgccccatgacagtgcccagctggtgactggtacttcattctctgggcctacggtgggcatggccattcagaactccatctgttctcctgacttctcaggaggtgtgaacatggaccactccaccagcatcctgggagtcgcctcctccatagcccatgagttgggccacagcctgggcctggaccatgatttgcctgggaatagctgcccctgtccaggtccagccccagccaagacctgcatcatggaggcctccacagacttcctaccaggcctgaacttcagcaactgcagccgacgggccctggagaaagccctcctgggatggaatgggcagctgcctcttcgaacggctgcctagcctaccccctatggctgctttctgcggaaaatatgttttgtggagccggngcgaagcagtggtgactggtggctttcctggggatgactggcggtcgatcccctggctgtggatttctttggaccntgcccagctgaaggccaggg

SEQ ID NO: 259994 - DNA, 2203 bp, Homo Sapiens
  misc_feature (35)..(35): n is a, c, g, or t
  misc_feature (57)..(57): n is a, c, g, or t
  misc_feature (159)..(159): n is a, c, g, or t
cactaaataacagctggtactgaccccagaaaccnccttcatctccattcggagcanggtgacacaccccttcagaaggtgccctgggttgccgagtgtcagaatatactcaggactccagaggtgtcacacgtggaactgacaggagacccgccaccngtggaggcagggggcaagaaactcaagaacagatcaagagcaccagccctgggccagggaagacaggctcttcctgcagtttctcgtggacactgctggcttgcgggcagtcggtctccaggggtacctgttgtctcctttcccatgtaataactactttgaccttacactatatgttgctagtagtttattgagctttgtatatttggacagtttcatatagggcttagagattttaaggacatgataaatgaacttttctgtcccatgtgaagtggtagtgcggtgcctttcccccagatcatgctttaattctttcttttctgtagaaaccaacagtttccatttatgtcaatgctaaatccaaagtcacttcagagtttgttttccaccatgtgggaatcagcattcttaatttcgttaaagttttgacttgtaatgaaatgttcaagtattacagcaatattcaaagaaagaaccacagatgtgttaaccatttaagcagatcatctgccaaacattatattactaataaaacttaaccaacacttacaattcagtcatcaaagtaagtaaaaattagatgctacagctagctaactgtatccctaggaaacgatgaataatttgccatttgggacagttaacatccaggtgttacaaagtcagtgttaattctaaagatggatccatttctgccctttagaatggcttgtcccatcagcagatgaatgtgttaagcacaaagcatccttcccttaaagcacaaagagagggacctaactgatgcctgcatcctagaaaacacctttaagttgcctttcctctttgtagttagcgttcaggcaggtgacgtgtggaaagtctagggggtttccattctggccatgcgagcccagctcctaccaacgtcggtaacttgagcagtccctgttgctggccagagactgcctggtcgccagcgctcaccatgggtgccaggatgcttcgcagaggcactgtgctcacggttggacttggtgtcagtgggaaagggcagtgtggggactgtcatttttgtgatttaataacacacagtgaaaatccaggaagaatgaattaagcttcttctgggaggtgtttattcctgctcgtgcttaagattgatgatttcgtgaaataaagaacatcatttcatttaagagatcatttcattaagatctctaatctgttttgagtctttacaaaatagccagttataaaatggggcttgatttgtttagactgaaggaagacgttttcccaaaatattactacagaagtgcctacaatatttgcgatattaaaatgcctgcagattcaaaatgggggccactcatttcagaactgcaggaatggtgtagttacagatcgacataaactcctgccccccaacaatgccatgagctgcttagccccaggagacctgggagctatggcaggacggttaggccagccgatgagggactgcagagaggctactggaaggttaaggacccagagagaaatcgagaggtgccctacagcagccaggcctatcaggatccgtcacacacggcagcggcgtggacaccggcctgatgcagagcgtgacccctcctgctgggacctgtgttgtaagctcctatttgcttatcttgtttatttcaagcagaaatcaataaattccataaccctctgtattgactgcaatgtaagctgctgaggagactggttctgttggtcagtcaggtgtttgctcagccctgtctgatcacctgtgctgctctgtccctaactagtgacccatggaagcttccaagcagttttctcttcatcactactaacaaacgaaacactaagaaggcttagtatcgctctttttctgcggggctactctgaagtactgacttgctttccagtctgattcacgttagcagtgtgtacactactgtatcatcatcagcttcatcaccctgtaaaccaggctcctctgaagagactttggtgagatgaacgtgaggtaaaaatttcgttcggcaaaaaa

SEQ ID NO: 259995 - DNA, 452 bp, Homo Sapiens
aggccgtcggaagcctggaggccatagtttcctccttctcaatgtgtctctggtggaagtgggcagagtcccggcgcgcgccgcacaatggcgcccgtcggccggcggcgaagtgcgtcagcccgccgtcccgaactacaactcccagacgcccccgcggcgcgccagcttgcctcacccagcggcggccatcttgactggccggttaggggcggcaggcgaagccggggacagcaggaggaggatactcgtcgatgtccctcggcggtccagctaggcaaggggaggcctctggtgagggacgctaggccgcagggccccacactaatgtgggcggcgacccgagctgggagagagtcgtgccctgccacgaaggcgaccactcttggggcagagcagaagctggagaaaggaaaggcgctggacaggggtcaggccggaagtgctggaat

SEQ ID NO: 259996 - DNA, 477 bp, Homo Sapiens
  misc_feature (263)..(281): n is a, c, g, or t
cttgcactggggatcagcagtgcacaaaacggacaggatcccctgtcctcccagagcctgtgctagcagaggggaaacaatgtgcggaagagaagagatttttactttttttgaatacttgggttcaaaccttccttataggatgcatgacccaaaggtatgcccttccctgcttcttcctccttaactttcactggcccctgacaggtcagagggaagccaggaaactttataatagtcagaatgtggcccaaaaaaatgcnnnnnnnnnnnnnnnnnnntttcaaattcatgagtctaggatttattcattacatagaataataagcaggaaagagaggggtgaccccacactccacaggccgtctagcttatgtgaagacaggcatccagggggtcagcactgttgaccccctccttgtcatatggacagggctctgtccctcttgctgccacaaaggttgagaatctagggag

SEQ ID NO: 259997 - DNA, 937 bp, Homo Sapiens
cttgagccattactcagtataaagcactgagttctatctttaggatttatctttaagagcaaatttctggtcagctgtgcttctgcaacctaaaatatttaaagggaggtaggtgtgggcaggaggaggaatgataaattgggccagggcaagaaaaatctagcttcatataatttgtctgggactatacaccctatataatgttagttttacagaagtaatatgacttttgattgctacataccacaaagagtttatgaactgagatcataaagggcaactgatgtgtgaagaaagtagtcagtacatcctggctcatgctctgaaagaatatccagagaggctctctcaaagatcagggagatgtattcccatgccatgcaccctgcttcccagcatttctgcatggtcaagtgagctttatgctcatgagctttaagtataataatttatccgaggatttttaaatcctccacttggcctaagcttgtgatccctccaagttgggtcctaacgctcagtgctagataccacaaattttcactctttcccctgaatcagaagagaccgacctttaataaccaatatatatgaataaaggaaaatcttttcaccctggcagccttctttagtatgggaacaaattgttcttggccaaaaactattgtttccccttattctcctccccttttttccttttaacccacataccccttccttaactccctttgccaacagggggacccattgcatttccctttcgcccggaaaaaaggtccacacaattttaagggtcctttattttgccctgcggggcagcgttgaacccacaccctatacgagaaacgcccacacccctgggcgaggggcgaaaggaaaaccctgggacaaacaggggggtatccacctcaccccttcatcccccccgacctggatg

SEQ ID NO: 259998 - DNA, 519 bp, Homo Sapiens
agagccgctggcgacggcaggtgagcggcaccgtgcgggagaagtttgtgctgctggacggcgagagggtcatctcaggatcctacagcttcacgtggagtgacgcacgcctgcaccgaggcctggtgaccctgctgactggtgaatttgttgacgccttcagccttgagttccggacgctgtacgcggcctcctgcccgctcccacctgcgcccccccagaaaccctcggtcataggtggcctgcagcggggccgcagcctgcaccgcgtgtcccgccgccgctccgtggcccccgcgtcgcctccgccgcctgacggcccgctggcccaccgcctggccgcctgccgcgtctcccctgctaccccggggccggcactcagtgacattctaaggagtgtgcagcgcgcccggacccccagcggccccccggcccggcccagccgctccatgtgggacctaagccgcctgtcccagctgtctggctccagtgatggggacaacgagctcaagaaatcct

SEQ ID NO: 259999 - DNA, 871 bp, Homo Sapiens
ttctagagtgttgacaaagaccagagacttgccccgaatcaatgacagcttgagcagggcatacagcaggaggaatttgtcttcctcagtctcacgagaccaccctgaaactgctgtaactggtctggccccaggcagctgggactcctgtaacttaagggtaaccgggttatgtaatatcagctccttgagtgcttgtacgtcctcgttaaaagtagctgacatgagaaaagcctggtaaatccggggcaagtgacagaggagactcttgagctcttcttcaaagccaaaggaaaaaagaaggtcagcttcgtccaccaccaaaagctccagggagtcacgaagtttcaggctgtcttgctgcaagtggcttaatatgcgagatggggtccctactaccacatctggcttctccatcagcacagctctctgagagactgagtcttcagcagctgagacattggccactcggacatcccgagcacagtaggtagccagctgctgaatcatggactgtgcttgccgtgccagctccttggtaggaacaagaacaaggcctctcactgcctgttctaccaccggacctgtcgccttcctatggagcaacagctgcagcatcggaatagcataagcggccgtcttcccggagcccgtgcgggcccgagccaggaggtccttcccttctagggccagtgggatggccttctcctggatcagcgtaggtcgcgaccagcccagatcggtgacagcctgaaggagccggggatcgaggcccatgtgttcgaagcccagtgcttcagagtcctccatggcgctgctcagtagcgcagcacgcacgcgctgcaggaaaaacgccaccgacgcgagcggg

SEQ ID NO: 260000 - DNA, 1302 bp, Homo Sapiens
  misc_feature (1236)..(1244): n is a, c, g, or t
gggacacaggccttgatgatgatattgaaaatgaagctgacatctccatgtatggcaaagaggagctcctacaagttgtggaagccatgaagacactgcttttgaaggaacgacaggaaaagctacagctggagatgcatctccgagatgaaatttgcaatgagatggtagaacagatgcaacagcgggaacagtggtgcagtgaacatttggacacccaaaaggaactattggaggaaatgtatgaagaaaaactaaatatcctcaaggagtcactgacaagtttttaccaagaagagattcaggagcgggatgaaaagattgaagagctagaagctctcttgcaggaagccagacaacagtcagtggcccatcagcaatcagggtctgaattggccctacggcggtcacaaaggttggcagcttctgcctccacccagcagcttcaggaggttaaagctaaattacagcagtgcaaagcagagctaaactctaccactgaagagttgcataagtatcagaaaatgttagaaccaccaccctcagccaagcccttcaccattgatgtggacaagaagttagaagagggccagaagaatataaggctgttgcggacagagcttcagaaacttggtgagtctctccaatcagcagagagagcttggttgccacagcactgggggcaggaaaaacttcgtcaagcccttgaccacttgtgatgacatcttaatcaaacaggaccagactctggctgaactgcagaacaacatggtgctagtgaaactggaactccggaagaagccagcatgtattgctgagcagtatcatactgtgttaaaactccaagaccaggtctctgccaaaaagcgcattggtaccaaccaggaaaatcagcaacaaaaccaacaaccaccagggaagaaaccattccttcgaaatttacttccccgaacaccaacctgccaaagctcaacagactgcagcccttatgcccggatcctacgctcacggcgttcccctttactcaaatctgggccttttggcaaaaagtactaaggctgtggggaaagagaagagcagtcatggccctgaggtgggtcagctactctcctgaagaaataggtctcttttatgctttaccatatatcaggaattatatccaggatgcaatactcagacactagctttttttctcacttttgtattataaccacctatgtaatctcatgttgttgnnnnnnnnnatttacttatatgacttctatgcacacaaaaacagttatattaaagatattattgttc

SEQ ID NO: 260001 - DNA, 471 bp, Homo Sapiens
  misc_feature (40)..(40): n is a, c, g, or t
  misc_feature (56)..(56): n is a, c, g, or t
  misc_feature (74)..(74): n is a, c, g, or t
  misc_feature (101)..(101): n is a, c, g, or t
  misc_feature (106)..(106): n is a, c, g, or t
gggtgttccgggtgggaatgtcccactctcccacaacccntggaattgtggatggngaggaaattgttacggtngggaccaaaggccattttctacggcangcttnaggatatcaccattaatccctttcatccatggttttcattaggatgctctaaaagaggctgctgcctattatacagccagtccaggcaagcccaggatagaggtaacaaaatttctccagttataactagtaattcaaatgaatcaaaaataaatatagcttatactagagagcaacacagtctctattattcacatggtaatatattcaagaattgcaacaatattcacaattctctaaggtcaacatatttccctccaagcagaaaatcctgaatggaagggagtgtataacatcaataactcctgtttgtctcacataatatcagggctcagaaagctcattatagataaccaatgccaaat

SEQ ID NO: 260002 - DNA, 572 bp, Homo Sapiens
aaccaaaaaccaaaacaaaacagatccaggcatggccaagcgattcatggctgggcagggccagtcccgtcccgctgcacgctgaccaccgtgccctgcgctcacgcctgcaagccactcagctggaacctggcctcctcggatatgccgaactgttccagggggtccttgcccgtcaccttccggatttcgttcctgtagaagatgaggcttctccgcatgaactcgtagctggcccgacgcagagcctccatccactcctgacactgctcctcgctgctgcactcaaagtgatacttcctctcagggtcctcaatgaagctgatggagaaggtgccgggctcttcccggacgactctgcagcgctccagcagcagggctccgacgggctcggcctcgtcgctgcccttcttggggcccctcatgcccagctcggccgccatctcggccggctgccgggacagagcctgcagctccttctcgttgtaccgcatggctccgcggggaacgggaacccgggccgcgccctcccggccgccgtccccgctcaggctggggccggcgccaaaaat

SEQ ID NO: 260003 - DNA, 900 bp, Homo Sapiens
taaagtagcgaggcctgggtggcgaattcggcacgaggcccagcctgagcggggacggcggccgggagggcgcggcccgggttcccgttccccgcggagccatgcggtacaacgagaaggagctgcaggctctgtcccggcagccggccgagatggcggccgagctgggcatgaggggccccaagaagggcagcgtgctgaagcggcggctggtgaagctggtggtgaatttcctcttctactttcggacagacgaggccgagcccgtcggagccctgctgctggagcgctgcagagtcgtccgggaagagcccggcaccttctccatcagcttcattgaggaccctgagaggaagtatcactttgagtgcagcagcgaggagcagtgtcaggagtggatggaggctctgcgtcgggccagctacgagttcatgcggagaagcctcatcttctacaggaacgaaatccggaaggtgacgggcaaggaccccctggaacagttcggcatatccgaggaggccaggttccagctgagtggcttgcaggcgtgagcgcagggcacggtggtcagcgtgcagcgggacgggactggccctgcccagccatgaatcgcttggccatgcctggatctgttttggtttggtttttggttttggggccagggtttcactgggcttgcccaggctagagcgcagtggtggccacagcttcactggggaccttggaccttctgggctccaagggatccctccctgccttcagctttcccaaggtagcgggggaattcaaagggcattgaggccgccaccaccccggggccattacaacctgggaattttctcgggggggaggggtttttgggtttggggaaaaactttcccaaaagcctgtcaaacccca

SEQ ID NO: 260004 - DNA, 582 bp, Homo Sapiens
accaatctgcttattgtcatgcgcttgttcttgggctgcagttccgagccaccctcaccgtcagccggggctgaactttcgttttcatcttttctgggtctcttgtttttgagggctggtgatgctgggagagcttgagtaggaagaaccagatccttctggtccagttttgcaaaggctgcctcagaatcctgtgcaccagacagagtcttgaaagctgctttcagagtcatcattccaatggtggttggaggattccgtagctgccttgcgggttctctgggtggcttttccacaggccctggtgctggctgtttatcttccttccctgtacttgaggcagcggactcagatttcaaagcctttttggccatcgtgaggaggtagggctcggcgtcatccaggtggctctccaggaagcgcagcatcttctgctggaaggtctcatatgaaaagttctggataacaggatgggccaagttcttttctcgaataatattcaggagatcatttctcagcttctgagttgtggggtccttggacatatgttttttcaaaatttttgaagccttttcaaattct

SEQ ID NO: 260005 - DNA, 938 bp, Homo Sapiens
gcaggcggatggactccatgttaaagtacttgcagaggaagatcgatgagttctgagtgtcgggctgcccactggtgacaccgggatcgggctgagcaggagaacatcaccggctccagttcccctgatccattctcacagcctgaaacaaagctcacccgtagcttacgcttggaagcaggactgggaacatccacgctatttattatcgaggagttttaaagtactgtaactttaaaataaataactacaaagcttctttgtccaaacgtcattattttatacttatatacacgcaggtgtaaaagtataaaggtgagcactagactgctcttagaagctctaatttttgttttctttggctagtactgtataaaaaacagaattgtgttttattggttttggatgacagaaaagtctggaataatgtttgttttcctcatttcttccttctagaacacagaatctaaaggggtgttagccagcctcgcctccctgccccacgtagagacacagagtgatgtgaggcgttggctttttctccaagaaggtacagatacctcagattcgggaaactcaaaatcaaaagacttagcttctaggataaatacttctgatgaaaaatccgctgaggagcataccccaaaccagacatatgcttaggattcatgctgagatatcaattggtttccccttctttttaaatacgtccagttcttacccagttaacatgaagaaaccactgtctctagaagaaaagcttgttttggcagtattagtgaatcactgaatagcttaagtatgactatctaagttataagtaagccctttaggggggttttaaataattttttctgaccctttctgaaaaataactacctaagtgcctcctgggtgcctggggggaaaaatactactttataaaaaagggttttggg

SEQ ID NO: 260006 - DNA, 541 bp, Homo Sapiens
ttgagtaggtcgcatctctgtgtgccacacagaacttttagacaagagtagaggggaaaaggttctgcaattcctcacagtaaagtactcacacagtaaatccttaacgaaaactactgaactgtgagtatatgctttataatcttatgcacagaaatgtatctattagtacagaaagttggaaaacaccaagattaaaaacagtgctgtaggaaaaattcacaacagtaaacaaattttgctcactcattttcctacaaatcttcagtttattaattcaagagaaactatattaggaatattcggctgatacccctatttcaccacctcatctaagctacactgtattataccaagaatggtggcaattttttccccatctatacaggcactgccatctagtggcaagttttcaccagcaattttaaaagatagtggcccaactctggtaacaaatagtggacactgatggtttgtcaaataagcaaatgcatttatttgatacacaaattccatgccaccagtcaaactatggtctggc

SEQ ID NO: 260007 - DNA, 1122 bp, Homo Sapiens
  misc_feature (580)..(580): n is a, c, g, or t
ctgccaccctgccgccctgccgccctgccgccggtggtcgctgcccgtggtgctccgtcgcccccgccacctcacgtcctcccgtgcgtcgggagcgtctcggctacaacatgttgggcatgatcaagaactcgctgttcggaagcgtagagacgtggccttggcaggtcctaagcaaaggggacaaggaagaagttgcctatgaagaaagggcctgtgaaggcggcaaatttgccacagtagaagtgacagataagcctgtggatgaggctctacgggaagcaatgcccaaggtcgcaaagtatgcggggggcaccaatgacaagggaattgggatggggatgacagtccctatttcctttgctgtgttccccaatgaagatggctctctgcagaagaaattaaaagtctggttccggattccaaaccaatttcaaagcgacccaccagctcccagtgacaaaagcgttaagattgaggaacgggaaggcatcactgtctattccatgcagtttggtggttatgccaaggaagcagactacgtagcacaagccacccgtctgcgtgctgccctggaggnacaagccacctaccggggggacatctacttctgcacgggttatgaccctcccatgaagccctacggacggcgcaatgagatctggctgttgaagacatgagtgacccactgaaccaagaacttactggaagtgtgcctctgtgtctccttcctcgggggtaaggaggggacagtgcttcccaagttccagctgcaagtccaacttaaccaactttccttcaaagtcagttactgccaattttctgaaaaaagcatgttccatatactaagtctcttttctcacggtaggaaataatacagccaagatatgcagcatccttctcattgatgtagaaaattctgcgatagaccagaaaaatcctggcagcttttctccaggcatctgggtcactaaaaactgattttctaaaattattggatttgtattttgttattaagggggaaaatgtgatttgtgcctgatctttcatctgtgattcttataagagctttgtcttcagaaaaactaaaaataaaaggcattgacttaaacagctgagaca

SEQ ID NO: 260008 - DNA, 434 bp, Homo Sapiens
  misc_feature (16)..(16): n is a, c, g, or t
  misc_feature (36)..(36): n is a, c, g, or t
  misc_feature (87)..(87): n is a, c, g, or t
  misc_feature (95)..(95): n is a, c, g, or t
  misc_feature (374)..(374): n is a, c, g, or t
  misc_feature (413)..(413): n is a, c, g, or t
acccaagaaccttacngggaagtgtgccccctgtgncccccctccctcgggggtaaggaggggacagtgccttccccaagttcccgnctgcaagncccaaccttaacccaactttcccttcaaagtcagttactgcccaattttcctgaaaaaagcatgtccccatatacctaagtccccttttcctcacagtaggaaataatacagcccaagatatgcagcatcccttcctcattgatgtagaaaattctgcgatagaccagaaaaaaccctggcagcttttctcccaggcatctgggtcactaaaaactgattttctaaaattattggatttgtattttgttattaagggggaaaatgtgatttgtgcctgntctttcatctgtgattcttataagagctttgtcttcagnaaaacttaaaattaaaggcat

SEQ ID NO: 260009 - DNA, 373 bp, Homo Sapiens
cactccggagactgagccatggggggaaagcagcgggacgaggatgacgaggcctacgggaagccagtcaaatacgacccctcctttcgaggccccatcaagaacagaagctgcacagatgtcatctgctgcgtcctcttcctgctcttcattctaggttacatcgtggtggggattgtggcctggttgtatggagacccccggcaagtcctctaccccaggaactctactggggcctactgtggcatgggggagaacaaagataagccgtatctcctgtacttcaacatcttcagctgcatcctgtccagcaacatcatctcagttgctgagaacggcctacagtgccccacaccccaggtgtgtgtgtcct

SEQ ID NO: 260010 - DNA, 539 bp, Homo Sapiens
agcatttactactattaccaagtcggccgaagacccaagaaggcctagttgcccgctgggcctggggccctgcccatgcctgggccagagtggcgctggggcctcggcttccctttggctcctggaaggcaggagggtcccctgccctgccccagtcctgccccagggaggcagggggtggggggccttcctttcctcctgggcaccccgtgtgctgtgatctcctgggctttcaggcttgacatgctggtctggggagagacagggcctctgctgccctgttcttcaccctcacagtgatacctcctttccttgggtctcttggcctccagaccccctcaatagacactgactaaagtcaagctggagtcatgagggtagtgggctaagtcgagggtccagcctcttctgccaggaagcccttcttgcttttgagagaggctgtgaccaccccccatccttctccctacactcccagccaacctagtgcccaaacagctaaacttggcttccttctaatcctggaaaaccctgtaccc

SEQ ID NO: 260011 - DNA, 1199 bp, Homo Sapiens
  misc_feature (1006)..(1006): n is a, c, g, or t
  misc_feature (1148)..(1148): n is a, c, g, or t
agaacaggagcatggagggcgggctggggcgtgctgtgtgcttgctgaccggggcctcccgcggcttcggccggacgctggccccgctcctggcctcgctgctgtcgcccggctccgtgcttgtccttagcgcccgcaacgacgaggcactgcgccagctggaggccgagctgggcgccgagcggtctggcctgcgcgtggtgcgggtgcccgccgacctgggcgccgaggccggcttgcagcagctgctcggcgccctgcgcgagctcccccggcccaaggggctgcagcgactgctgcttatcaacaacgcgggctctcttggggatgtgtccaaaggcttcgtggacctgagtgactccactcaagtgaacaactactgggcactgaacttgacctccatgctctgcctgacttccagcgtcctgaaggccttcccggacagtcctggcctcaacagaaccgtggttaacatctcgtccctctgtgccctgcaacctttcaaaggctgggcgctgtactgtgcaggaaaggctgctcgtgatatgctgttccaggtcctggcgctggaggaacctaatgtgagggtgctgaactatgccccaggtcctctggacacagacatgcagcagttggcccgggagacctccgtggacccagacatgcgaaaagggctgcaggagctgaaggcaaaggggaagctggtggattgcaaggtgtcagcccagaaactgctgagcttactggaaaaggacgagttcaagtctggagcccacgtggacttctatgacaaataagcccatgtttttggcttcctgaacctttttgcccccacttttagacataccccagagccctgtggctccccacacccctgccataggggcagtcctgccttacacatagaagcattcatgcctgctgccctgccctcaagcacagccagctgtgagctcccaggtcattggccttaccagttgtcaggagtctgtgctgtgcaccctgngttataaagaggcttaagagagaggttatgggtattggtgtctctatccccaggaatagaactaaaggggtgggaaaaacaggaaaagaagctggaacacagaagaagaggagggttgtgtctcttgctcatagcaagcctngtgggtagaggaaaagaagtgatctgggtggtcgaataggaaggacccatg

SEQ ID NO: 260012 - DNA, 909 bp, Homo Sapiens
  misc_feature (180)..(188): n is a, c, g, or t
  misc_feature (473)..(487): n is a, c, g, or t
gacatgttaatataatttattataaacttcaacccaatcagtcttaaatgtttttgactctatgactaagcgttaattatggacactgttaccttttttacaccacttgatagccctttttgaattctgccaaaccaaagacatacctttttaaaataaaaataaagcaaccatttacannnnnnnnnaaaaacaaaaatttacttcaaattgtagtatagggcttttcaatcacaaaaagaaagaaaagaacagtgatctgacagtggtcacatcctgtgcaaaaaacttgatacaaaaatgatagcacatggtatctgagctgcttacattacaagaaaaaggaaatacagtagctgaaatatggcactcctgggaatcaacttctaaaccaaatagaatgcctttgaaatgattaaatttatttgtgtattagtaagaaagccccaccaccataaatagtacaatatttnnnnnnnnnnnnnnntatatctatctaagatagatagtgtatttgtactgttagacttctttaagtgcagaaggtggttcaggttttgcctttttaattaaataactgaccatatgctttataaagtttcactcaatcacaaaagccaatttaaatcaaggaatatgatatcaaagttgcataatttcatttgggactgccagcaggttaaagtcttaagtctttaacattaatgttcatttttagtcaatgaatagttaaaaagttctcaaatcttcatatcctcttgaacttgcccttctaaatgatcctcagactgcaattcctagtttgcaaataaaataatgcaatatgcatcatacttcaagaaaagatgatgatgtcgaactaacatgcttctggatcttttccctgctcctttcaaccttctttataat

SEQ ID NO: 260013 - DNA, 782 bp, Homo Sapiens
ccccggaatttcgggatatcgtcgacccacgcgtcgcgcgcttgcccgctcccgcagcagcagcctcccgcgtcgctgtcgctgttgcctccgccacctcctccgccgccgcgcgcccctcggagttcgcgcgccccaccatgcccaacatcgtgctgttcagcggcagcttcgcatcaggacctatcccagcgcgtgaccgaccgcctgggcctggagctgggcaaggtggtcactgaagaagttcagcaaccaggagaccagcgtggagattggtgaaagcgtgaggaggggaagatgtctacatcatccagagcggctgcggggaaattaacgacaacctgatggaactcctcatcatgatcaatgcctgcaagatagcgtcatcatcccagagtaactgccgtgatcccgtgtttcccatacgcccgaacaagataaaaaggacaagagttcgtgccccaatttctggcaaaacttgtggcccaatatgcttgtcgggtgggctggggggcggattcacaattcatccacccatgggaccttggcaattgctttcttcacaatacaccgggcttctttttgatattcccctgtggcatacattacgtattgcgggaggcccccgcccgtctgacagcggacttcaggaaaaacattggccgaaggggacagacacgtgttccgtggtttcccctctacccaggggaaccacaccggctacccttacttggccgcacgttgaccgtgactcccttaacccccaagaacaaaggcactac

SEQ ID NO: 260014 - DNA, 978 bp, Homo Sapiens
tggcattaggtggatactggagtggactagttgaattggaaaacttgaaagcagtgacaactgaagatagagaaatgaggaaaaagaaggaagaatatttaacttttagtcctcttacagttgtaatatttgtggtcatctgctgtgttatgatggtcttactttatttcttctacaaatggttggtttatgttatgatagcaattttctgcatagcatcagcaatgagtctgtacaactgtcttgctgcactaattcataagataccatatggacaatgcacgattgcatgtcgtggcaaaaacatggaagtgagacttatttttctctctggactgtgcatagcagtagctgttgtttgggctgtgtttcgaaatgaagacaggtgggcttggattttacaggatatcttggggattgctttctgtctgaatttaattaaaacactgaagttgcccaacttcaagtcatgtgtgatacttctaggccttctcctcctctatgatgtattttttgttttcataacaccattcatcacaaagaatggtgagagtatcatggttgaactcgcagctggaccttttggaaataaggaaaagaatgatggaaaacttggtggaagccactggtcaacccctcagctccccatggagaaattgccagtaatcatcagaagtaccaaaaactgatctattttctcagcaatgagtggtgtgccctcatggccggtttcaaaaattggggtttttggaagaaatttattggcacccaggtccggctcggattgcctaacggggaagaagacaattggatggttcaagaactgggcttccttctttacattattacctaaggttctccgcccaccagggtggccctaagggttattgggcagggaaacccttcaccttttgtgttgccccagtggggccgtcgatgaaactaacggggtcaacccctgttcttctcctccattaa

SEQ ID NO: 260015 - DNA, 735 bp, Homo Sapiens
gagatgcctgtgtaatccaggcccagtgtgaggaagaggcttgcaagggcgctcaggacggtctgtccagattttgtcaacgaggttctccttgacaggaatgaggtgatggccggcacttctcagaactttggccattttcttccaataatctgtaggaatgatcaaggggtccacaccaaccctggatccttcaggaagcacactcaccagccagtcttcctgagttggtgtgtccttcagacccatcttcataagtgtccagttgctgtccatttgcttggcagcctggagaaagtagcgcccgtcagtccacatggctgcatgctcttctgtgatgatggctgtgcccgcagagccatcgaatccagagacaaaagcccgccgacagtcacatggagcaatatactcactctgatgagcatctcccgatgggatgatgtaggcctggatcggttcggtcacatactcagagttcctcatggcttgtctcagctgccgaagcagctctgaagtcacctttggaggcattctgccgtctgtttccacacctgtgtctcctgagtgtgtcacctcgttaggttcaattattcttaaatttctcagttgaaaatcctggtgattcacccttactcgcggtggctttctggaggctgccattcggcggtgacgtgccccagcccacgtcaggggagcgcagaccagctgatcacccgcggaagggccggcgcgaag

SEQ ID NO: 260016 - DNA, 1681 bp, Homo Sapiens
  misc_feature (1635)..(1639): n is a, c, g, or t
ggggacggaagtgcggtgttgagcgccggcggctcgcgcccacgctgggccgggagtcgaaatgcttcccggtgccgggagtgagcgatgagctggcctctgttcctggcccacagagtcgccttggccgccttgccctgccgccgcggctctcgcgggttcgggatgttctatgccgtgaggaggggccgcaagaccggggtctttctgacctggaatgagtgcagagcacaggtggaccggtttcctgctgccagatttaagaagtttgccacagaggatgaggcctgggcctttgtcaggaaatctgcaagcccggaagtttcagaagggcatgaaaatcaacatggacaagaatcggaggcgaaagccagcaagcgactccgtgagccactggatggagatggacatgaaagcgcagagccgtatgcaaagcacatgaagccgagcgtggagccggcgcctccagttagcagagacacgttttcctacatgggagacttcgtcgtcgtctacactgatggctgctgctccagtaatgggcgtagaaggccgcgagcaggaatcggcgtttactgggggccgggccatcctttaaatgtaggcattagacttcctgggcggcagacaaaccaaagagcggaaattcatgcagcctgcaaagccattgaacaagcaaagactcaaaacatcaataaactggttctgtatacagacagtatgtttacgataaatggtataactaactgggttcaaggttggaagaaaaatgggtggaagacaagtgcagggaaagaggtgatcaacaaagaggactttgtggcactggagaggcttacccaggggatggacattcagtggatgcatgttcctggtcattcgggatttataggcaatgaagaagctgacagattagccagagaaggagctaaacaatcggaagactgagccatgtgactttagtccttgggagaacttgagccagcggctgtcttgctgcctgtacttactggtgtggaaaatagcctgcaggtaggaccattgcagtgatgggcagatgcgtctttcacacggaatcaggcacagtggccttctgtgacatgtgtttataaaaaatggttaagtatataataaattgaacatctttgagattggagaattatgtgagatttccacattatgtttactgggttcaatactgtccttgcttgttttattgcaggcaagcaaggcaaatggcctaaaatgctgtggcttatattttgataagaaatcaaaaaaccattggttaaaagatgcaactcagaagtctggaagtattctgaaagcatccatttaccgtccagttgacaggtttgagtctcctgcttgtataggtgacttgtgcccatgggtacattaaaggaacatgctgcccagggcctgggcggacagctcagtgggcaggatgtgtgctgggtctcagccccatgtgcctgcttgctgggcagttagtatagggcaaagcctgccctgcggcgaccctggctgctaagccattctccaagaacagctgcgactcattaaagaccaagaagcataaataaactttcaaaaaattatttggctccttcctttaaaaactgggccaatccnnnnncccgacccaccgacaacaaaacacccctgttccggccgcccc

SEQ ID NO: 260017 - DNA, 577 bp, Homo Sapiens
ttttgcctgaaattgtgtaattttttttcctcttgattgtataaggcattttgaactggaaaaacgtctttcctacacactcttccaaataatcacagggaatataattgctgattcagaatacaaataagacctctttcatctttctccccactcccccgcaaaatcattctaacacaccccaagccccataaagtacaaggcaggcaattgctttgcgagttagcaggcaaaaccgtgtcccacttgggggatgaggtcgctgtgccaaggtcccttctgatcctgcccttctcaggcctcaaggggtaagcatccatcttcggtgaggttttatgtcccatcggggagcccgccactgcctcctgggcagtgggaggtcagggccctcctggctttcccatgcatcccccaccaggtgtccagactattccatccacgcacagcgtcatgtctcactcagttagtagaatgggcacagcgcgagacagcgccctctacattagtcatgccagacagacagcagagagaaaccagaggccagagaagtgattttaaaaggaaaagagagcagctt

SEQ ID NO: 260018 - DNA, 801 bp, Homo Sapiens
tcgatattggggggaaggtaggaagggttggcttgaaggcaaaaagtaaaaaggggctttagagccatcttccaaaaaagaggggttggccaaaaggcggtgatttgggacctcccaagtaatgggacattcctagagggcccctgggggcaccttcaagcccctgaaatgggtcagcaggtccccattcccggagagcaaagggcaggcaccactggaaccccggaaatctgtctgtagcgtgtgaaccacagagacttggctcacatccaccaggctcagcttctgggcctcatactccagcaacagccccaccttctctggctgcccaataccctcaactggggctttctcgttggccaacatggtgtaccacttgcgctgggcataggtgaacacccaggaacgatcatcaacaccaatgcagctatcccgggacatgtccacatctgccactcctatccggaactgctgggagcgcttcactgtcacttcccagtagtgtctgccactggtgaccgctgtgtctgccagcaccactgcccactcccggaagcgctccacattcaaggccaccttggtgggctccaatcccaccaagccatatttgacacccgtatcatctctgaagagtgccaggctgctgtgggcggttttttcttccagtttgaaactgacgcctctctgggcctctgtggaggcaactcccaatcgtttggctccccagcggcacaagcgcaaagaacgtgcaaaaagcagcgccatcttgcgccttggatgaaccgggcacgcctcccgctt

SEQ ID NO: 260019 - DNA, 436 bp, Homo Sapiens
  misc_feature (34)..(34): n is a, c, g, or t
  misc_feature (53)..(53): n is a, c, g, or t
tggggcttttctcgttggccaaacatggtgtacnacttgcgatgggcaatagntgaaacaccccaggaaggatcatccaaacaccaaatgcaagctaatcccgggaaaatgtccaaaatctgccaactcctatccgggaactgctgggagcgcttcactgtcacttcccagtagtgtctgcaactggtgaccgctgtgtctgccagcaccactgccaactcccggaagcgctccacattcaaggccaccttggtgggctccaatcccaccaagccatatttgacacccgtatcatctctgaagagtgccaggctgctgtgggcggttttttcttccagtttgaaactgacgcctctctggcctctgtggaggcaactcccaatcgtttggctccccagcggcacaagcgcaaagaacgtgcaaaaagcagcgccat

SEQ ID NO: 260020 - DNA, 741 bp, Homo Sapiens
  misc_feature (414)..(423): n is a, c, g, or t
ttggaaataggtgacccaagtagggggagaaagtattattgttgatagcttctgactaggtgttaagggatcttcattatgaacaagatgaatttttttctggaaacactagatgttatcaatcaaacactaaaatgtaccatacaaatcccttaagcctctcaaatattgagctttagtacaatcatggatagacattctggtgatgatttaggggctttttatacaccacatactagcttctttctctataagagtgcctctttcataaaaccaaatgcttgtctgctagcatacttttcaaagggaatccactgttttctcactttcctcccatatctccgtccttcatccaaaaccttcccagaatccatcagcaagcatgtttgaggcctgtggtgtaggggactgaannnnnnnnnnaacttctattccattttaattgtaggatatctttgtccatatacccaggtgtcctgatttgaatgtactatttgatcctcattgtgttcaggcaaaaaataggaaatgagtaattttgagtttgaaatctctcccagaagacaaactacttcagtgagtaaaagctttgacattttatgttttattcataaagggggttaattatttgctacaaagaagcacgatctattttcatcatcgatttgaaaatatctgtaactcctatagatcctataggcagagagttttcctttctgactttttccctttgctttcgtg

SEQ ID NO: 260021 - DNA, 638 bp, Homo Sapiens
atcgcgcccgggaggcgccggagcccagcggctggcgccagatccaggctcctggaagaaccatgtccggcagctactggtcatgccaggcacacactgctgcccaagaggagctgctgtttgaattatctgtgaatgttgggaagaggaatgccagagctgccggctgaaaattacccaaccaagagaaatctgcaggatggactttctggtcctcttcttgttctacctggcttcggtgctgatgggtcttgttcttatctgcgtctgctcgaaaacccatagcttgaaaggcctggccaggggaggagcacagatattttcctgtataattccagaatgtcttcagagagccatgcatggattgcttcattaccttttccatacgagaaaccacaccttcattgtcctgcacctggtcttgcaagggatggtttatactgagtacacctgggaagtatttggctactgtcaggagctggagttgtccttgcattaccttcttctgccctatctgctgctaggtgtaaacctgttttttttcaccctgacttgtggaacccaatcctggcattataacaaaagcaaatgaattattatttccttcatggttatgaatttgatgaagtgatgtttcc

SEQ ID NO: 260022 - DNA, 962 bp, Homo Sapiens
agcagtgtttccccccaaccccaagggatggtcgaaacggtgcacacaccaggtaccacacactccagtgcttggatcgagctggtttccctaaatcacaagtagagcacctcacgttctttggaaacatcacttcatcaaaatcataaacatgaagaaataataattcatttgcttttgttataatgccaggattggttccacaagtcagggtgaaaaaaaacaggtttacacctagcagcagatagggcagaagaaggtaatgcaaggacaactccagctcctgacagtagccaaatacttcccaggtgtactcagtataaaccatcccttgcaagaccaggtgcaggacaatgaaggtgtggtttctcgtatggaaaaggtaatgaagcaatccatgcatggctctctgaagacattctggaattatacaggaaaatatctgtgctcctcccctggccaggcctttcaagctatgggttttcgagcagacgcagataagaacaagacccatcagcaccgaagccaggtagaacaagaagaggaccagaaagtccatcctgcagatttctcttggttgggtaattttcagccggcagctctggcattcctcttcccaacattcacagataattcaaacagcagctcctcttgggcagcagtgtgtgcctggcatgaccagtagctgccggacatggttcttccaggagcctggatctggctcctgggcgggcctggtcggagatttccctgggggctggagccctggtagggggacgtggagtgcagcaggctcggaggggacaccggggccgccccggactccggcgaggtgggggtgggacggcggcccgccagccgctgggctccggcgcctcccgggcgcgatacgagacttcctgcgggctcgtgacatcagcacggcgcccctgagggcctcgtgccgaattcgccacccaggc

SEQ ID NO: 260023 - DNA, 1018 bp, Homo Sapiens
  misc_feature (544)..(583): n is a, c, g, or t
ggctgccaccccgactgaagaacctgcacaatgtgtcgccatccctgaagggcttcctggaccgcctgctggtgcgagaccctgcccagcgggccacggcagccgagctgctgaagcacccattcctggccaatgcagggccgcctgccagcatcgtgcccctcatgcgccagaaccgcaccagatgaggcccagcgcccttcccctcaaccaaagagccccccgggtcacccccgccccactgaggccagtatggggccaggcctcccactcctcccagcccgggagatgctccgcgtggcaccaccctccttgctgggggtagatgagaccctactactgaactccagttttgatctcgtgacttttagaaaaacacagggactcgtgggagcaagcgaggctcccaggacccccaccctctgggacaggccctcccccatgttcttctgtctccaggaagggcagcggccctcccatcactggaagtctgcagtgggggtcgctgggggtggagagaacactaagaggtgaacatgtatgnnnnnnnnnnnnnnnnnnnnnnnnnnnnnnnnnnnnnnnncaaaggtccagccaccccgtcctccagcccgcaaggggtgtctggcgccttgcctgacacccaagccccctctcccccctgagccattgtgggggtcgatcatgaatgtccgaagagtggccttttcccgtagccctgcgccccctttctgtggctggatggggagacaggtcagggccccccaccctctccagcccctgcagcaaatgactactgcacctggacagcctcctcttttctagaagtctatttatattgtcattttataacactctagcccctgcccttattgggggacagatggtccctgtccctgcggggtggccctggcagaaccactgcctgaagaaccaggttcctgcccggtcagcgcagccccagcccgcccacccctgcctcgaggtagttttacaattaaaacattgtcttgtttaa

SEQ ID NO: 260024 - DNA, 943 bp, Homo Sapiens
  misc_feature (851)..(851): n is a, c, g, or t
  misc_feature (874)..(874): n is a, c, g, or t
  misc_feature (917)..(917): n is a, c, g, or t
  misc_feature (928)..(928): n is a, c, g, or t
tggatcatcctcagtgtctttgccattattctcggggctttcatagcagctgggtctgaccttgcttttaacttagaaggctatatttttgtattcctgaatgatatcttcacagcagcaaatggagtttataccaaacagaaaatggacccaaaggagctagggaaatacggagtacttttctacaatgcctgcttcatgattatcccaactcttattattagtgtctccactggagacctgcaacaggctactgaattcaaccaatggaagaatgttgtgtttatcctacagtttcttctttcctgttttttggggtttctgctgatgtactccacggttctgtgcagctattacaattcagccctgacgacagcagtggttggagccatcaagaatgtatcccttgcctacattgggatattaatcggtggagactacattttctctttgttaaactttgtagggttaaatatttgcatggcagggggcttgagatattcctttttaacactgagcagccagttaaaacctaaacctgtgggtgaagaaaacatctgtttggatttgaagagctaaagagtctgcagcaggattggagactgacttgtgactgcgggctgggggggcattcccagtaggaatgtgaagccagaggtttcggattcgtgacatccaccccctgggcaagtgagagcatctgcaaaatgcaaagagaactacctcatatgcaggatgagccaatggcagttcttcaaggaaatgtaattcggggcgacacctttacctgtgggaaaggcaaatctttttcaaaataaggccactgggactcggtagggtggagccccagntgctctttcttaggggacctatnggggcctttcgtgggcttttctgttgctgttgttgcttggggnagggaggtttnatgttaattgggtga

SEQ ID NO: 260025 - DNA, 457 bp, Homo Sapiens
  misc_feature (17)..(17): n is a, c, g, or t
  misc_feature (416)..(416): n is a, c, g, or t
gaaaccacataagtganttatcaagcacaagtaaattaagcctaccgatgttcaccgtgctcaggaaattcaccattccacttaccttacttctggaaaccatcatacttgggaagcagtattcactcaacatcatcctcagtgtctttgccattattctcggggctttcatagcagctgggtctgaccttgcttttaacttagaaggctatatttttgtattcctgaatgatatcttcacagcagcaaatgggagtttataccaaacagaaaatgggacccaaagggaggctaggggaaatacgggagtaacttttttctaacaatggcctggctttcatggattattccccaacttctttatttatttaggtggttcttcccactggtagggacctggccaaccagggcttacngggaatttccaacccatgggggtgggattgttggtggtttt

SEQ ID NO: 260026 - DNA, 707 bp, Homo Sapiens
tacaggaagcagtattcactcaacatcatcctcagtgtctttgccattattctcggggctttcatagcagctgggtaagactttggactgtttctgctcaataacttctttgtgtctttgacaataggcccagccccatcctcagtttttcattttccatctggctgctgttgaattgagcaggcaagagacaaatctgttgaagttagtggaatccccatgtgttcctatgaaagtcaaagtgggtcccacattggccagaaaatttctgagaatatatgaagagagcattgcaagatattaatatagcttttcttcacaaaaagcagtgaactgtttacatttcttactgaatgtttgtcttcattataacaactttacttgagaagttcttagggcatttgattaataataacagacttacaaagcctttgtctgctgatttattttattattccatgataccttagcagttgctgtttccgatggtagaatgcttaaatatatttgtacgtttgggatatgagccaacactggtgcatgactactactttaataattattttgcaaaaggaataacgaggactccaagtcttcgtgggcaggcaggtgctcagatttctgctatagcatggtggatagtgcatgtgaatagttacatccctgggttcaaaacttagctccaggctgggtgtggtggctcaccc

SEQ ID NO: 260027 - DNA, 496 bp, Homo Sapiens
  misc_feature (390)..(390): n is a, c, g, or t
ccggtgggggcagggaggctgaaagggaggttggctacaggaagtggagggccgccccaccctaggggacctggaaggtggtgtggggagggagtgtccaaggtttctgctgtcatcacctccccggaggcaggctccaggggctaggtttgcttacctgcttcttccccaaggcagcctatggagtcatcctggctcctggcagcctctctcccttgcagagtggggccgagctcttgtctcccatatcccccggtactataagattgctgttgagcagtgtcagaaaatgacctcgggtctgaaaactggacctctggctgtttacagccctctgcctcctaggcccaaagtggaaagatctgtgcacctggtttctgttgggcatangagctatttatggaataagatgtgggggaggaggacctgtctctaacctactgtacatcaagcacagcgccctgcactttcgcatgcattcttattaaatcctcta

SEQ ID NO: 260028 - DNA, 1242 bp, Homo Sapiens
ctataaagtgcatcaggtcaacttgaataaaaacactatgacagacaggtttgccagtttgcagaaactaactcttttctcacatcaacatttgtaaaattgatgtgttatagtggaaaataacatatagattaaacaaaatttttatcttttttcaagaatatagctggctatctttaagaaagatgatatatcctagttttgaaagtaattttcttttttctttctagcatttgatgtctaaataattttggacatctttttcctagaccatgtttctgtcttactcttaaacctggtaacacttgatttgccttctataacctatttatttcaagtgttcatatttgaatttctttgggaagaaagtaaatctgatggctcactgatttttgaaaagcctgaataaaattggaaagactggaaagttaggagaactgactagctaaactgctacagtatgcaatttctattacaattggtattacaggggggaaaagtaaaattacactttacctgaaagtgacttcttacagctagtgcattgtgctctttccaagttcagcagcagttctatcagtggtgccactgaaactgggtatatttatgatttctttcagcgttaaaaagaaacatagtgttgccctttttcttaaagcatcagtgaaattatggaaaattacttaaaacgtgaatacatcatcacagtagaatttattatgagagcatgtagtatgtatctgtagccctaacacatgggatgaacgttttactgctacacccagatttgtgttgaacgaaaacattgtggtttggaaaggagaattcaacaattaatagttgaaattgtgaggttaatgtttaaaaagctttacacctgtttacaatttggggacaaaaaggcaggcttcatttttcatatgtttgatgaaaactggctcaagatgtttgtaaatagaatcaagagcaaaactgcacaaacttgcacattggaaagtgcaacaagttcccgtgattgcagtaaaaatatttactattctaaaaaaatgagaattgaagacttagccagtcagataagttttttcatgaacccgttgtggaaattattggaattaactgagccaaagtgattatgcattcttcatctattttagttagcactttgtatcgttatatacagtttacaatacatgtataacttgtagctataaacattttgtgccattaaagctctcacaaaaa

SEQ ID NO: 260029 - DNA, 1107 bp, Homo Sapiens
  misc_feature (823)..(838): n is a, c, g, or t
gaaagaaaacatttattgaatcaaaatcaatactttctttttagtatctacaagccaacacagaactcattttattcaagaatgaacacaatgtacaaaaaaagtatgcttatattataaaaatatgtcaattttatcttctgggtgcttagcagaagtcattttaaacaaaatcaaggcaaacttgttctctataatgagtctgctataatttaacaacaaagtgaaagctaatgtacttacgaagtatttttaaaggcccactgataatgctgcactggaaatgctaaacccaatgttaactaaagtcaacatttccgctctacgcttactggcaccacttcatgcctacatcatgggaaagtacctcttttacagaatgcagatcactgctaacaatccacatgactaagtcttcagtttcccttgcttaacatttgttagcatatatttcagcaaagattaacagtataatgaatgttgagtagtaaaatcctatttaattcgcttcaatttaaaaatgagatatgctgctatggggaacaaatgacctcttgagatttacaaccccctttataaaagtgggaaagctgcctccctaaaaaaaattatgtccaaggttaataccgtatctttttttgtagttttcttatttcttgattttattggcacctcccaggcactttggcatgtgctcctgtataaagtgtagttactgtgcctgtagagttagtggcagctgcagagtagttataggctgacaagtccacttttggcttaccatggagatctgctccaacacatgctggtcgttggagcagcnnnnnnnnnnnnnnnncagcgatttggaaaaagactaaaatcatgagtcagggaaaaggatcacggcttcccgtactattgttccaggagttatatgacaagtagaaaaattgtactaatttaaagagtcagtcaaaatagaagtagactaaatagcatgagtgctgataatgccaagaaaatccaatctctcttctaaagagcttgcacacagcacatagcaatgtccctggccaagaaactgaccgtgcctggctgagcagaatgacaacagtactcaggcaa

SEQ ID NO: 260030 - DNA, 524 bp, Homo Sapiens
  misc_feature (13)..(13): n is a, c, g, or t
  misc_feature (33)..(33): n is a, c, g, or t
  misc_feature (41)..(41): n is a, c, g, or t
  misc_feature (69)..(69): n is a, c, g, or t
  misc_feature (74)..(74): n is a, c, g, or t
  misc_feature (91)..(91): n is a, c, g, or t
  misc_feature (107)..(107): n is a, c, g, or t
  misc_feature (119)..(119): n is a, c, g, or t
  misc_feature (129)..(129): n is a, c, g, or t
aaaagggatttancaccacaacaaccataaacngtaaaccntgccgaaaaaataggctaaacaaaggtnaaccnagggaaactgaagaccnaagaccatgaggaatngttagccagtgnaccgccatanctgtaaaaagaggtaactttcccccagaatgtaggccatgaagtggtgcccagtaagccgtagagcggaaatgttgacctttagttaacattgggtttagcatttcccagtgcagcattatcagtgggcctttaaaaatacttcgtaagtacattagctttcactttgttgttaaattatagcagactcattatagagaacaagtttgccttgattttgtttaaaatgacttctgctaagcacccagaagataaaattgacatatttttataatataagcatactttttttgtacattgtgttcattcttgaataaaatgagttctgtgttggcttgtagatactaaaaagaaagtattgattttgattcaataaatgttttctttcaatcctga

SEQ ID NO: 260031 - DNA, 387 bp, Homo Sapiens
  misc_feature (263)..(274): n is a, c, g, or t
agagcataacgaaactgtgaaactttctgaagccttgtcagtggttaaaagtatttaacactctactgttaatgacagatgttctgtttttataacctaccaaaaggaaactagaggcttcttggtgaagagcatttttgtgaagtgggttctgcaaggagcctataaagccaagggtggtgtccatttctgggaatggttaaacacaaaaggctgatagctggtatcacatagttggagtcagtgcataattccaagtggcnnnnnnnnnnnngggcacggggactgatcaggaagatatattcctgcataactcaatctgaaccaaggattggtagttaagttttcctccttgccttcccttctgtgtgaccgacccctgtggcc

SEQ ID NO: 260032 - DNA, 1413 bp, Homo Sapiens
taggatcgcgacgggaactggagcccgaggtccccgcgcggcccgggcctggcgccctgaggggaagagcggcccggcccgaggacctccagcaggtgatggtgtcaggacccaacctcaatgaaaccagcattgtgtctggtggctatgggggctctggtgatggactcatccccacagggtctggccgccatccatctcacagcaccactccttctggccctggagatgaggtggctcggggcattgctggagaaaagtttgacatcgtcaagaaatggggcatcaacacctataagtgcacaaagcaactgttatcagaacgatttggtcgaggctcacggactgtggacctggagctagagctgcagattgagttgctgcgtgagacgaagcgcaagtatgagagtgtcctgcagctgggccgggcactgacagcccacctctacagcctgctgcagacccagcatgcactgggtgatgcctttgctgacctcagccagaagtccccagagcttcaggaggaatttggctacaatgcagagacacagaaactactatgcaagaatggggaaacgctgctaggagccgtgaacttctttgtctctagcatcaacacattggtcaccaagaccatggaagacacgctcatgactgtgaaacagtatgaggctgccaggctggaatatgatgcctaccgaacagacttagaggagctgagtctaggcccccgggatgcagggacacgtggtcgacttgagagtgcccaggccactttccaggcccatcgggacaagtatgagaagctgcggggagatgtggccatcaagctcaagttcctggaagaaaacaagatcaaggtgatgcacaagcagctgctgctcttccacaatgctgtgtccgcctactttgctgggaaccagaaacagctggagcagaccctgcagcagttcaacatcaagctgcggcctccaggagctgagaaaccctcctggctagaggagcagtgagctgctcccagcccaacttggctatcaagaaagacattgggaagggcagccccagggtgtgggagattggacatggtacatcctttgtcacttgccctctggcttgggctcctttttctggctggggcctgacaccagttttgcccacattgctatggtgggaagagggcctggaggcccagaagttgctgccctgtctatcttcctggccacagggcttcattcccagatcttttccttccacttcacagccaacggctatgacaaaaccactccctggccaatggcatcactcttcaggctggggtgtgctccctgaccaatgacagagcctgaaaatgccctgtcagccaatggcagctcttctcggactcccctgggccaatgatgttgcgtctaatac

SEQ ID NO: 260033 - DNA, 951 bp, Homo Sapiens
  misc_feature (916)..(916): n is a, c, g, or t
atttttccgccgagtccctcacctgctgctaggatcgcgacgggaactggagcccgaggtccccgcgcggcccgggcctggcgccctgaggggaagagcggcccggcccgagccatgacggacgggatcctagggaaggcagccacaatggagatccctatccacgggaacggcgaagccaggcagcttcctgaagatgatgggctggagcaggacctccagcaggtgatggtgtcaggacccaacctcaatgaaaccagcattgtgtctggtggctatgggggctctggtgatggactcatccccacagggtctggccgccatccatctcacagcaccactccttctggccctggagatgaggtggctcggggcattgctggagaaaagtttgacatcgtcaagaaatggggcatcaacacctataagtgcacaaagcaactgttatcagaacgatttggtcgaggctcacggactgtggacctggagctagagctgcagattgagttgctgcgtgagacgaagcgcaagtatgagagtgtcctgcagctgggccgggcactgacagcccacctctacagcctgctgcagacccagcatgcactgggtgatgcctttgctgacctcagccagaagtccccagagcttcagcccacagggagaaccccttcagggtgggcccagccctacccccagcagcactcacctgtggaggcagcctaagggaggaatttggctacaatgcagagacacagaaactactatgcaagaatggggaaacgctgctaggagccgtgaacttctttgtctctagcatcaacacattggtcaccaagaccatgggaagacacgctcatgactatgaaacagtatgaggctgcccagctggaatatgatgcctaccgaacagacttanaggagctgagtctaggccccccggggatgcaaggt

SEQ ID NO: 260034 - DNA, 909 bp, Homo Sapiens
  misc_feature (788)..(788): n is a, c, g, or t
ccgaggtccccgcgcggcccgggcctggcgccctgaggggaagagcggcccggcccgagccatgacggacgggatcctagggaaggcagccacaatggagatccctatccacgggaacggcgaagccaggcagcttcctgaagatgatgggctggagcaggacctccagcaggtgatggtgtcaggacccaacctcaatgaaaccagcattgtgtctggtggctatgggggctctggtgatggactcatccccacagggtctggccgccatccatctcacagcaccactccttctggccctggagatgaggtggctcggggcattgctggagaaaagtttgacatcgtcaagaaatggggcatcaacacctataagtgcacaaagcaactgttatcagaacgatttggtcgaggctcacggactgtggacctggagctagagctgcagattgagttgctgcgtgagacgaagcgcaagtatgagagtgtcctgcagctgggccgggcactgacagcccacctctacagcctgctgcagacccagcatgcactgggtgatgcctttgctgacctcagccagaagtccccagagcttcaggaggaatttggctacaatgcagagacacagaaactactatgcaagaatggggaaacgctgctaggagccgggaacttctttgtctctaacatcaacacattggtcaccaagaccatggaagacacgctcatgactgtgaaacagtatgaggctgccaggctggaatatgatgcctacccgacagacttanaggagctgagtcctaagcccccggaatgcaggggacacgtgggtccgactggagagtgcccgggcccacttttccagggcccatcgggaacaaggtatggaaaagctcgccgggggagatg

SEQ ID NO: 260035 - DNA, 821 bp, Homo Sapiens
aggtagcgaggcctgggtggcgaattcggcacgagggtccagccttagctgaccctgctggacccccagatcaaggtgatgcacaagcagctgctgctcttccacaatgctgtgtccgcctactttgctgggaaccagaaacagctggagcagaccctgcagcagttcaacatcaagctgcggcctccaggagctgagaaaccctcctggctagaggagcagtgagctgctcccagcccaacttggctatcaagaaagacattgggaagggcagccccagggtgtgggagattggacatggtacatcctttgtcacttgccctctggcttgggctcctttttctggctggggcctgacaccagttttgcccacattgctatggtgggaagagggcctggaggcccagaagttgctgccctgtctatcttcctggccacagggcttcattcccagatcttttccttccacttcacagccaacggctatgacaaaaccactccctggccaatggcatcactcttcaggctggggtgtgctccctgaccaatgacagagcctgaaaatgccctgtcagccaatggcagctcttctcggactcccctgggccaatgatgttgcgtctaataccctttgtctctcctctatgcgtgcccattgcagagaaggggactgggaccaaaggggtggggataatggggagccccattgctggccttgcatctgaataggcctaccctcacccacccacccagtttaattgtgcttagagcccaagaagattgggatctagcactaggaataaacctttcataaaaggcag

SEQ ID NO: 260036 - DNA, 728 bp, Homo Sapiens
aagctgcggggagatgtggccatcaagctcaagttcctggaagaaaacaaggtgccaaccccacccccttgaccctagcccacctttccatctgtaacactaaccttcccctcagaccctccccattattgaatgaggaaatgcagcctagctggggagtagagtgttcaccccctcaacccctgggcctttccagatcaccctccctccaattcctggccctttcctgttggaggatttggctgctggtcccaggaacataactgggaaaaatcaccccctgagctggggtacaaaaaccctagggcccacaaatccagtgaggtttcttccatcatactgacccttctcctttgactccctgggtagagttcagcccctaccccaaaagcaccatcagagcagagtccttgtgcccctggtctgtgcctgggctcaggctcatagaccctcaagaagggcgcctgagtccagccttagctgaccctgctggacccccagatcaaggtgatgcacaagcagctgctgctcttccacaatgctgtgtccgcctactttgctgggaaccagaaacagctggagcagaccctgcagcagttcaacatcaagctgcggcctccaggagctgagaaaccctcctggctagaggagcagtgagctgctcccagcccaacttggctatcaagaaagacattgggaagggcagccccaggggtgtgggagattgg

SEQ ID NO: 260037 - DNA, 1003 bp, Homo Sapiens
  misc_feature (755)..(755): n is a, c, g, or t
  misc_feature (789)..(789): n is a, c, g, or t
cccagatcaggaagccagctgagagacagggctacgtttcagggagggaaacagattcagcagcggcagcagctggagaaggtcgtggagcagcaccttgcctgcagggtgttctgagaatcagccatgtcatccctgtacccatctctagaggacctaaaagtggaccaagccattcaggcccaggtcagagcctcacccaagatgccagccctgccagtccaggcaacagccatttccccaccaccagttttgtacccaaacttggcagaactggaaaattatatgggtctttccctctccagccaagaagtccaggagagcctgcttcagattccagagggtgacagtacagcggtctcgggccccgggcccggccagatggtggcaccggtaaccgggtacagcctgggcgtgcggcgagctgagatcaagcccggggtgcgcgagatccacctgtgcaaggacgagcgcggcaagaccgggctgaggctgcggaaggtcgaccaggggctctttgtgcagttggtccaggccaacacccctgcatcccttgtggggctgcgctttggggaccagctcctgcagattgacgggcgtgactgtgctgggtggagctcgcacaaagcccatcaggtggtgaagaaggcatcaggcgataagattgtcgtggtggttcgggacagggcgtttcagcggactgtcaccatgcacaaggacagcatgggccacgtcggcttcgtgatcaagaaggngaagattgtctctctgggtcaaggggagtctgcngcccgcaacgggctccctcacaccactacgtgtgtgaggtaaacgggcagaaatgtatcgggctgaaggggacaaagatcatggagattctgggcaccggctggggacgttgtcaccctgaccatcatccccagtgtgatctacgagcacatggtcaaaaagttgcctccagtcctggctcaccacacatggaaccactccatcccagatgctg

SEQ ID NO: 260038 - DNA, 979 bp, Homo Sapiens
  misc_feature (116)..(116): n is a, c, g, or t
cgcgatagcatctggaagacccattcctgggatgtcaccgagggccatcgtgagtaaccagcagagagctggtagctggtcacgctgcatggcttccggcacttggtgaaacagcncaggtggtctgaggaggagtcaacctggagcttatagtagcagtacccccaggaactgtgctttctgtagtcacagtactccacgttctggggccgcggatagaagatgtaggcacagccacactccttgatcatgctctcctggaagcaggagtgaatacacacctgctgtgtgtactttgaagggtaaaggttctcaacaggaacatcactgccattcttggtgcagtcgccataatcgcccccaagtctgtccagggtttccttcctcatgctgatggaggtctccacgccaggccgcaagttaaagccaccatcatccataaagacaggttcatcctgcccgtgcaccattacccgggccccagtcactgtggacagcaggggaatgaagtcattctgctctgcgcgcagcatcagggacagaccgttgttgattccaggcatggaagacatccagaggttggagttgttcttgtcattgaaagtatagcagtttccatacatcgggtggtggaagtgagagtaattcgcctggttgcaggagacctggttgaagcggcaggcgaagatgaagttgcccagcgtgtcctcctccagggatggcagagtctctggcagcctcgacaggatgttgatgtagtggaagcggtaccactccctcaccgcatccacccctgatgagtatgtctggtagaagcagtccgatttgttcatggttgcacagctggaagccgatcttccagtccttccagtccacctgggggttgttgtcccgcaagagtggaggccacgctacgggctcgacgggccccgtgaggcgggggcgggaccctcaggcgctgcaaggggtgcggcagagt

SEQ ID NO: 260039 - DNA, 1461 bp, Homo Sapiens
ttgggagaaggagaaggagaagcactgacacgggggtggtaatagtgggccccaactggcgcagccttcctgacttcccatgcgccaccccccagggcctcaacagtcacaacagtcagccaggacccaagccacccgcagaggcaggccccaggtggagcagtgaggggtggggtccggtggagggtcaggcatgctcttgcttcccctttcatagtcagggcagctcgattctgccagggtcacgcagagtgccccggcaccggccagaagtcctcgcccaggtgagcgcagagccacatccattcgcgcccacataatttccatggagagcccatgccgcccatgcacctcctcagggcacgagctaatggcctgctcaacgcccactctaaaggcttctcccaggtgagcaacgcccaccgcccttgcagactgactcccagaattcctgttcccagtgccacacagagtgccttgtggtgcatctgtgaccctcctggcccgggacacgtccacgtcttctgcctcctggctgagccccgcacctgtctgggcacccttgtctcccttgtttctctcccggtcaccagctccagcagcaaaccacagagacacaaatgctcctctcaccgcaacacgcagggcctgggagagacagaggcggccccgggatctgccagctttggagccctccacgaagtgtccagcctgccgggtgaacatgagcaacgagtccctgtccccaagggggacagactggtggaggtggaaggtcaggaaggacacaccacggagacaatgacaccaggagggagactgttccaggcagaggcaacagcgagtgcagagacctatcgggagagctggggtgtatgtgacgcagattctgagggccatgagccgagggaaggagccagacgctgtcctaagtgccaggggaagttgttagaggtgttaagcgtggcatgacgtggctggatttagggtctgagatgaactttcctgctcctgaatggactctgctcagatcccaccaagaaccggccacctcactccagataaactccagactcttcactgagcccaaaggcaacgagcagaagcgtccagaaatcacacagagctcagcaggtggtgaggcacctggacccgagtcacccagcagctgaacaggccatccctgaggccatgcacgccccggccctgcaggtgtgacggccgaggcttccacgacggggggtgagtgggagctaatatggctggtgaaagcactgggttcagtggggatggcatctcccgccctctgtccaaggtggggaaaaagtcagcttcaggtgagggagaccctggacgcctggctttgggctgattccccactcacttggcctctcccaagcatactttcctgctttgtagggatgtgggttcgcgggacagtaacaggagaatcaaggcaag

SEQ ID NO: 260040 - DNA, 1277 bp, Homo Sapiens
ctgttactgtcccgcgaacccacatccctacaaagcaggaaagtatgcttgggagaggccaagtgagtggggaatcagcccaaagccaggcgtccagggtctccctcacctgaagctgactttttccccaccttggacagagggcgggagatgccatccccactgaacccagtgctttcaccagccatattagctcccactcaccccccgtcgtggaagcctcggccgtcacacctgcagggccggggcgtgcatggcctcagggatggcctgttcagctgctgggtgactcgggtccaggtgcctcaccacctgctgagctctgtgtgatttctggacgcttctgctcgttgcctttgggctcagtgaagagtctggagtttatctggagtgaggtggccggttcttggtgggatctgagcaggacggcgtctggctccttccctcggctcatggccctcagaatctgcgtcacatacaccccagctctcccgataggtctctgcactcgctgttgcctccgcctggaacagtctccctcctggtgtcattgtctccgtggtgtgtccttcctgaccttccacctccaccaggtgccgacacttccctgaccccagtaacctcttctcttgggtgggtgaatgccacctgctgatgtctgatttattcatcggttttcttgtctgtagtctgtcccccttggggacacggactcgttgctcatgttcacccggcaggctggacacttcgtggagggctccaaagctggcagatcccggggccgctctgtctctcccaggccctgcgtgttgcggtgagaggagcatttgtgtctctgtggtttgctgctggagctggtgaccgggagagaaacaagggagacaagggtgcccagacaggtgcggggctcagccaggaggcagaagacgtggacgtgtcccgggccaggagggtcacagatgcaccacaaggcactctgtgtggcactgggaacaggaattctgggagtcagtctgcaagggcggtgggcgttgctcacctggggagaagcctttagagtgggcgttgagcaggccattagctcgtgccctgaggaggtgcatgggcggcatgggctctccatggaaattatgtgggcgcgaatggatgtggctctgcgctcacctgggcgaggacttctggccggttgccggggcactctgcgtgaccctggcagaatcgagctgcctgactatgacagggggaagaagagcatgcctgaccctccaccggcaccc

SEQ ID NO: 260041 - DNA, 1178 bp, Homo Sapiens
  misc_feature (250)..(250): n is a, c, g, or t
  misc_feature (521)..(606): n is a, c, g, or t
  misc_feature (676)..(718): n is a, c, g, or t
agcgcacgtagctctcgagtcgaccaccaccctgatggacttagcgactccctcctccactcgctgagttgtcgctgcgccctgggaggagcgctgggcgggtcggcgcggcgagcgcccgccgaaccacgccgacgcgcgcttcgaggctccgggggggcctgttccgctatagcgtcgagtcaatggctggtaacacgggtctctgctcaggtctgcgtaccaactgcagagcgcccacctcatttangcggatgggggcacggtgtgcgaccgcctcgaggtggcaacaccgcactgggcgctatcggcagtcatgtgcgagggatatacggcgactacacagttggggccggtactggcgcccgtcctccccaggccgcgcggcggacgcatcagtggaccgcggcgatgtgtgtcgcgtaccggcgggctgcgcgggaaagatatggactggctcgcgggcggccgaggcgaccagcaggccgcccactctgccacaccattcgctcggctcctcnnnnnnnnnnnnnnnnnnnnnnnnnnnnnnnnnnnnnnnnnnnnnnnnnnnnnnnnnnnnnnnnnnnnnnnnnnnnnnnnnnnnnnttcgcgtccctggaaggggggaggccgccggtcaattgacggcccacacccaccaggcacaccctattgnnnnnnnnnnnnnnnnnnnnnnnnnnnnnnnnnnnnnnnnnnngggtgtgacagcccaggacccacaccctggacccctggaatgtctctggaccagaaccgaacagctggatccacagtacgcggggctgctcagggggcgggtcctctgtgtcgctactgattggccgcctcgcaggcgtctatccaatcactgtacacatccacgggttctgacagatacgttatgggcgtctggaattcctctaggcacacggtacaagagatgactccggtgttgcgggcacggtccattttcacatcacaggatttctcgtggttgcagaaggggcaggtgaactgggtctcgagggtgcctgtcatcttcttcttgggaggcggctttcgttttgactttctgcgccccatgtctgcaggtggatgagccttctccagctgcgaaagctccgttcacccgggagatagtgaccctcgtgccgaattcgccacccaggccctctacc

SEQ ID NO: 260042 - DNA, 928 bp, Homo Sapiens
gggaagaagagagaaacactattcacccctcccttcaagttttaatagacaacaggaatctgggctctgaaaagtcacaaacacctttcccaagatgatgagcaactgcaacaactggccaaatgtgttagcagcagaaaagctgggcattacctgtgtgagaggcgctcagcatgggcagtgaatggccgtgagcagcgcaccagctacatagcctccacaccggaagggtgctgctgctctgcaggtccgtttcaggcgggatccagccatccacaggaccaaggggctggagtgttgggaacagatgattctgtgttccacagataatggtacaaagtgactgttcatagataaggtgtaagcacagcatttgaagacagctcctccagatggtctgtctgttagtgaattcttaagcacttagagccttgaagattgagaaattctaaagaaattttttaaaaggaggagggtggtagatgtcaaagacacaaaagctctttgtaggtgctgactggctcactttgtccccaggttcatcttagagctcaagcagattcaagacatgaggcagagatgctagcttgcgtcaggggcaaaaacttctggtagtagctcttggtgacgtcaatcatcagctcctgagtgcactccgggagctcccctgagaagagtcctgggcagcctgagaagacagtgaatggtggaaccacagtttccggaggtaatactgtgttgtcaagaattttgcagcagtctttcaacacacatcggcgcccaatcacacagttcttcccaacatgaacataggaaccaatctgtgctgcgttgaccacacaatcttcctcaataaagacatggtctccaatatgtaaaggaaagaatgcaacacctttgctgaacttcttgaatggtggccttatga

SEQ ID NO: 260043 - DNA, 653 bp, Homo Sapiens
gaataacagctaaacaaatcgaataacagctaaacgaatcgaataacagcttttgtacatcaacatcaagaaggaatacgcctgagagagatcagagtatatagatgaatatgaacaagaatggaacattcacttgtcaacgcactttctaaatctagatcagcagagatgggagtgattttctggaaagagatgtgatcatggattaaacaccagctcattggaaactcattggatgagatcagaaaacgttcatgaaaaatcatattcaggaaataaggaagaggaatataaatgctctagagttaacatgtaaaatatatacgtactgaggtttgtaaactgtcctttttaaatcaaactgaaaacaaaaagctttaacctttcaacagaatttttaaaaaggcagttagttctaaattattcctatctcaatagccaagaggctgatcaagcgtcatttattgaggaagcatcttagaaaatgcctctgaatgttttcataggagccgtgacctttggttcttcatctctaccattcatttacttcactgtgtaattagttacaaccactcagttattaagagacgtaacgcttcaaactttttaccaagtctgtgttctgtttaatctgtccatacaagttattactg

SEQ ID NO: 260044 - DNA, 631 bp, Homo Sapiens
ggcaaatcgaatggaacgtaggcctgaagctgccaggccttccagcacatgcaggccttcctcacagatctcccccacggccgctgtgcgaggttggtctcctgaggccaggttttcactctctttcagttcaaccttttcctcctcttgctctgacaagtccacgaccactttttgcgtgtccttctctcctggaaccttgatctggattcctttggccccaagctgaatgcgagcaaactcggtgatcacagcacatgtcaggtcccgattgaattcctgcaccgggttataaaagacctcgttggcactgggaaaggcgattttggcagccccctcggtgactgtcgtctcctggacttcacgtggacgttcttctccgtagggcccggtgccgttctccatcgctgctgtattcggcagccctggagactgccactcgaaaaaccgggctctagagagcacccgggcggagcggaaagtgaggcttagccacagagacgatccttgcatgagacatccgctggcgcctccgcccgccaagcctgctctcgtagccacagaaaaccgaattagtcaaggtgcacgtttcccgaattaggacctgggcgccgccatgtggcacagtggg

SEQ ID NO: 260045 - DNA, 2374 bp, Homo Sapiens
agctgttcttaggtacatattttaggatttttattgctgattacagatttgaaactatgaaatgtgcactgcttggcaagtaacacaagtaattctttacttattcacatttccaataaaagcgtaaataaacagacaaaaaatataaaggacaagagaaatacaaatagcaacagcttcaaaacaaaaggatttagtaacagaaagtctccacagtgtccgtcaaaatttaagattatccaaaccgtgcaaacgctcaacacaaaccaacgccatacactgaactattaatacttgtcccttgaagttgcaaactagaagccacccacataactgtatgatcacacaaaccaactaatttgctcaaggttcaggttaaagcaacatttaatatcctttacaagatggaattcgtgacaagttcaaaaggagaacttcctttgttttaatgcagctgtgctcagaagcctgtgatttcctaggaaaccatctgggtttagcccattagaaaaatgcagtttaaagcagtgtcacactggctgcctgaaggtacccttggagatactggagcgcttctgcattcaggctggtgctcaccattgatggaacccttcctggacaggcggtagacaacttgtgaagtgactgtgccaggtgaattttggggttattcaccatttgacctacaggatcatgctcttttttcccagcaaatgccaactgtgagaaggcagtctgatatcctggtgtatcttctatgtcaataaaatgttcctcatcaggaatggtatcatcttcgggtaactcaaaaagaccaatcaaagactgtaataatggagtccacagtttggtatactcagtgtccatcattgggggacattctgttagtaatttggttatgccaaccgcacagatctttttctctacatttccagataccttctgaatttcaggaataataattttttccaaaaccattccaaacatttttggttgtataccatcaaatatttcttgtagtgctagtgccccatattttatgcaatacaaattaataaagactaaaaaactcttgataaacttggttgttttggaattctgaagtctctggaatagcagaatgaagatttgtttcctatattggtcaactgattcaggaggcatgtgctctattatactgtttagaagataaaaaccttggtggtcatttgctttggatgcaatcagcttctgaaagacacctagtaacccaggaattttgtcagctgcagcacttgctattgtgtttgaaccgcgttctaagaatgcttgaagaagcctcactagagcaggaatatttcctgttctttcccaaagcactggctgaaggagatgaggaaataaggccatataggaagacgggatgtcatttttgtgtgtttccagaagcaaagacatcacttgaaagacgtatggaataaattcttgcacatcattttgtaagatttcagtaaacaccaaaaacaaagcctcctcaaaatttacaacagcagcagggttagctttgcaagttattcttatggataaacatattgcttcaaacatgtagtgattaaagtgaggtttgcttgggttcttactaacagctaatagcttctgtgtaagctgagtgatgagagtagggatgtaggggattatggcttcttgtaggagagaaaaacttctcatgatagctttcataatatattcattttctgaagagccaggaagtgtgagagctttgaaaaggtttgttagcagaatctcaacaaacggtgcgatttctgcagctgtaaagagagtggcattgttaggccctcgcatagtaaagagccgttcaagagcatgagctgcgtaagtatgaacaacaatactttcagcttgaagatgattaatcaagagaggaatcgagactaaaagatgttcttttggcacttgatttctaaaaatcataatatatttgataccgtcagctttaaggacaggaaattcattcacattagctgattttaaatcagggaggatgtgattcacaaagaactcagttaggtttacaagttcatttgcttgtgtaattccatgcttctgtgtttgggcttttgatgccaaagatgtcactaggtagatggctgcatctttgtgtttccagttgacagatggattttttgcgtattcctgcagcatggaattaacataaccagagaagattcctgtcacaggtccctcaaaaaacttgcataatcctcgtaccagatcacaagcagccctgcgtctagtatcaatatcagatccttccaaatctctccttatgtactcctcagaattatcttcaaatgcttcttcatcagcagctcta

SEQ ID NO: 260046 - DNA, 652 bp, Homo Sapiens
  misc_feature (546)..(546): n is a, c, g, or t
  misc_feature (571)..(571): n is a, c, g, or t
  misc_feature (582)..(582): n is a, c, g, or t
  misc_feature (604)..(604): n is a, c, g, or t
  misc_feature (618)..(618): n is a, c, g, or t
  misc_feature (632)..(632): n is a, c, g, or t
  misc_feature (638)..(638): n is a, c, g, or t
gggtacggtccggaattcccgggatatcgtcgacccacgcgttcggagtataacaaactgtggactccattattacagtctttgattggtctttttgagttacccgaagatgatacccattccctgatgagggaacattttattgaccatagaagatacccccggatatccagactgccttctcacagttggcatttgctgggaaaaaagagcatgatcctgtaggtcaaatggtgaataaccccaaaattcacctggcacagtcacttcacaagttgtctaccgcctgtccaggaagggttccatcaatggtgagcaccagcctgaatgcagaagcgctccagtatctccaagggtaccttcaggcagccagtgtgacactgctttaaactgcatttttctaatgggctaaacccagatggtttcctaggaaatcacaggcttctgagcacagctgcattaaaacaaaggaagttctccttttgaacttgtcacgaattccatcttgtaaaggatattaaatgttgctttaacctggaaccttgnggcaaattagttgggtttgtgtggntcatacagttntgtggggtgggcttctagtttngcaacttcaggggncagttttattgttncgtgtntgggccttgggttt

SEQ ID NO: 260047 - DNA, 398 bp, Homo Sapiens
  misc_feature (373)..(373): n is a, c, g, or t
ccctataatgggtcaaactgattacaggaggcatgtgcctcctattaatactgtttaagaagataaaaaccttggtggtcatttgctttggatgcaatcagcttctgaaagacacctagtaaccccaggaattttgtcagctgcagcacttgctattgtgtttgaaccgcgttctaagaatgcttgaagaagcctcactagagcaggaatatttcctgttctttcccaaagcactggctgaaggagatgaggaaataaggccatataggaagacgggatgtcatttttgtgtgtttccagaagcaaagacatcacttgaaagacgtatggaataaattcttgcacatcattttgtaagatttcagtaaacacnaaaaactaaagcacctgtgccgaat

SEQ ID NO: 260048 - DNA, 551 bp, Homo Sapiens
  misc_feature (41)..(41): n is a, c, g, or t
agtccccacagtttgggtaataccccagtgtccccatccantgggggggaaaatccggttaagtaaatttgggttaaggcccaaccgccacagacctttttcctcctacatttccccagataccctcctgaatttccaggaataaataattttttcccaaaacccattcccaaacatttttggttgtatacccatcaaatatttcttgtaagtgctagtgcccccatattttatgccaatacaaattaataaagactaaaaaactcttgataaacttggttgttttggaattctgaagtctctggaatagcagaatgaagatttgtttcctatattggtcaactgattcaggaggcatgtgctctattatactgtttagaagataaaaaccttggtggtcatttgctttggatgcaatcagcttctgaaagacacctagtaacccaggaattttgtcagctgcagcacttgctattgtgtttgaaccgcgttctaagaatgcttgaagaagcctcactagagcaggaatatttcctgttctttcccaaagc

SEQ ID NO: 260049 - DNA, 587 bp, Homo Sapiens
  misc_feature (38)..(38): n is a, c, g, or t
  misc_feature (44)..(44): n is a, c, g, or t
  misc_feature (54)..(54): n is a, c, g, or t
aacacaaaacccaaggccaaacactgaaaccaattaanacctgnccccttgaanttgccaaaactagaagccaccccaacataactgtaggaaccacacaaacccaactaaattgcctcaaggttcaggttaaagcaacatttaaaatcctttaacaagatggaattcgtgacaagttccaaaaggagaacttcctttgttttaaatgcagctgtgctcagaagcctgtgatttcctaggaaaccatctgggtttagcccattagaaaaatgcagtttaaagcagtgtcacactggctgcctgaaggtacccttggagatactggagcgcttctgcattcaggctggtgctcaccattgatggaacctacaagagatgggaaacacacactggctgttggagatcttggtgcgccaatacaaaccccatcttctacgggagagctgccacagctctgggaagagcagccagtcaagtcattaatcaccatccaaaaattctccagaaactcaactgcttttatgccttcaaaaatagggtccttctggggcaggcggtaggccaactttttgaaggtgacttttccc

SEQ ID NO: 260050 - DNA, 448 bp, Homo Sapiens
ttgcgtatctctttctgaaatcttcttgcccctctcctgggaagctccccgattcttcttggcccttccttcccttccacagtccctctccaccctaagcccagcgggcccgcctcccccctccttcccggcaggtgacggcggaatcccgctgtaagctgctcagctggctgatcccggtgcaccgccaattcggcctctccttcgagtcgctgtgcctgacggtgaacactctggaccgcttcctcaccaccacgccggtggctgcagactgcttccagctgcttggggtcacctcctttgctcatcgcttgcaaacaggtggagtgtgcacccgccgcgcgtgaagcagcttctggccctctgcttgcggcgccttcttcccggcagcagctctgcaacctcgagtgcatcgtgctgcacaagctgcacttcaccctgggtgcgc

SEQ ID NO: 260051 - DNA, 585 bp, Homo Sapiens
agaaaacttgttaccatttgtgggactgaataatctcggcaatacttgctatcttaatagtatacttcaggtattatatttttgtcccggttttaaatctggagtaaagcacttatttaatattatttcaaggaaagaaagaagctctaaaggatgaagccaatcaaaaagacaagggaaattgcaaagaagattctttggcaagttatgaattgatatgcagtttacagtccttaatcatttcggttgaacagctccaggctagttttctcttaaatccagagaaatatactgatgaacttgccactcagccaaggcgactgcttaacacactgagggaactcaaccctatgtatgaaggatatctacagcatgatgcacaggaagtattacaatgtattttgggaaacattcaagaaacatgccaactcctaaaaaaagaagaagcaaaaaatgtggcagaattacctactaaggtagaagaaatacctcatccgaaagaggaaatgaatggtattaacagcatagagatggacagtatgaggcattctgaagactttaaagagaaactcccaaaaggaaatg

SEQ ID NO: 260052 - DNA, 567 bp, Homo Sapiens
gtgacactcgttttatagcatcaggctggtgaccagaatgtcatggcttctgggcagaggccagcttccatgccgtgtcctgtcttcctagtgcagatgtccccagctgcagtgagtaccagtgtgagggaatgggctccagactcccagaggggccacagggatggccacgccaagctctggggagtagccgattccccagcacctgcctgcccatgcacctttggggtgactcatgagacagggtggggctccaacctccactctcccaaaagacaatcagctataaaggactctcagaagcccaaacagccccaggtaatcaaacaaacaccagttccatggcaaccattatacccattcatcaaggagacgaagaaggaggtgcttcctggttcaccccaccctcagcagagacagaccccagatctgggcccaggactttgtgcagggaggggaaatgcaggtgactcagcccctattcctccatcaaaccagccttgaagatgggttaaatcagagcttttcattccacaaaagagaaattttaatggggtcagaacattg

SEQ ID NO: 260053 - DNA, 1356 bp, Homo Sapiens
  misc_feature (309)..(309): n is a, c, g, or t
  misc_feature (325)..(382): n is a, c, g, or t
tggccctcgtcctgcaccagaagcgcaagcgcctcttcctggacagcaacggcctcttcctcttctcctccttcgcactgaccctcttgcttgtggcgctctgggtcgcctggctgtggaatgaccctgttctcaggaagaagtacccgggtgtcatctacgtccctgagccctgggctttctacacccttcacgtcagcagtcggcactgagtccctggcaccaggctctggcgctctgctgggtgggagggtgggccatggagggcatctgaatacaggagtagggggggtgtgggtgtgtaaccanagaccgaaagcatgannnnnnnnnnnnnnnnnnnnnnnnnnnnnnnnnnnnnnnnnnnnnnnnnnnnnnnnnncgcaaagtgcatcattttcagactctactatttccgtcaagtttctgtttgatttggatcatctcaggatcggattctgttttagagtgtttctgggccaggatccgggcccctgccctcctctgcacctgaccacactccctactcagggctagcctggtcttcccggaacatcttctggtaaccgtgcaggagagggctgggtggggcagaggccaggaggggacctggtgtgtcacctgcccaccacctggctcatccctcaggcccaccctgaccctacattacataggttacgtcagcctactgtggctgttgagcaaagcatttctcctttctgggcctcatttgcactagatgggcctgtggtcccaaagtaggtcagtaggttggggttgctgacaccccttgggtgcagctttgggacagatgagtggctctgtcctgtcactgccctctccctgcctgggggctatgtgcactccagacccctgcccaggctcaggcccatgaggtatggagacaccctggcccccaggagctggaggcaccgcccactcccctggcattccagctttgcaggtgaccctcctctacccaaagctctgtccccctgctcccactccagaagaactgcggcacgtgcttcgggcagcctagccacaggctttgagcgcctgcattcctgggggctggagggtggggtgccaaaggccctgagcaaaagccagagctcctctcatcaaagcctttacaaggtgctgggcccagaggctttgccttgacagagtggcccagggtttcaagggaggaggaacctccccctacctaggacccttccctgtggggggtctacagagtcagggacagaagggaagggacccacaggaagtcacagtggtgcccagggatgtgtcagcccccagccacggggacgcgggattcaagaatgaagtaaatccagtcccagcccc

SEQ ID NO: 260054 - DNA, 429 bp, Homo Sapiens; identical to SEQ ID NO: 32878

SEQ ID NO: 260055 - DNA, 942 bp, Homo Sapiens
ggaggttgcctggtatgtggcatcagcaggccgagcagcggtcgctcttttcagccagcccagccccggtgccagggctgcggcgcagtatgtctttcagggagccatcctgctcactcagcagcttgttgatctcattctgcttgtattcaggtgagaggcggtggccgaagcccgagccattgcgggaaggtggattggagcggcgctgggctcggcgggcacaggcccgaatgatgaggtacaccacctcggccacattgaggatgatgcagatgccagaggcagctagcatgaagacggtgaagacggttttctcggtggggcgggacacgaagcagtccactgtgttggggcaggggtagacgtcgcacttgaccagccgcaccatggcatagccagggtagagcagataaaagacatacatgaagacggcctcaaacaacagccggaacaccacgctgatgacataggtccaccacagtgtccctgagatgtggaccttgtgcctcttcacctcctccaggtgtagggggtccccatggccctcaagccgtagcattttcttctctatgtgttgctggtgagccacgtgcatggccacgaggagagctggggtggaaactaggatgagctgcagggaccacagccgcacatgggagatggggaagaattggtcatagcaaacgctgttgcagccaggctggagtgtgttgcagatgaaggaagatttctcatcaccccacacactctctgcagccaccaccagcaccatgattctgaagatgaagatgaccgagagccatactcggccaatggcagtagaatgccggttcacgccactgagcaaggtgtacaaacctgtccagttcatcctgcctcattcacacctccctgtcactgccacacctggctgctgctgccctttcccagagaatgtct

SEQ ID NO: 260056 - DNA, 676 bp, Homo Sapiens
tgaaaccgggaggaaagaagacaagagagaacgcaaacagtttgaagctgaggattttccgtctttaaatcctgagtatgagagagaaccaaatcacaataagtctttagctgcaggtgtgtgggaatatcctccgaatcctaaatctagagctccaaggatgctggtcattaagaaaggtaatacaaaagacttacagctatctggattcccagtagtaggaaatcttccgtcacagccagttaagaatggaactggtccaagtgtttataaaggtttagtccctaaacctgctgctccacctacaaaacctacacaatggaaaagccaaacaaaagaaaataaagttggaacttctttccctcatgagtccacatttggcgttggcaactttaatgcttttaaatcaactgccaagaactttagtccatctacaaattcagtgaaagagtgtaatcgctcaaattcctcttctcctgttgacaaacttaatcagcagcctcgtctaaccaaactgacacgaatgcgcactgataagaagagtgaatttttgaaagcattgaaaagagacagagtagaagaggaacatgaagatgaaagccgtgctggctcagagaaggatgacgactcatttaatttacataacagcaatagtactcaccaagaaagggatata

SEQ ID NO: 260057 - DNA, 463 bp, Homo Sapiens
ctgaaagggcagcgtccgagcttgccagtaagttgtcacccacactgggggctgcaggtgggctaggcacaggtggcagggcagccgcgggtgccatggacgcctggatgcgccgcagagtgttcacgaccagcaccaggtgccgcaggtccggctcactctgctgcaggctgtggtggagcttgagcactgagaggtcaaagagggagctagaggccacggccgggggtgcatgtgccaccgctgtgtggccaggatctagccaccaggagtcgactgccagaggttcattctcctcatcctcctcccgtttccaaaacagaccattgctcagcatcttgctcactagcggccaatcagaacgaagaggtagccacccacaaccaatcaggaaacggcggcggcagcatcgcttgttggctgtcctccggaaacccgcgcctgggtcgcgagacgcagttct

SEQ ID NO: 260058 - DNA, 847 bp, Homo Sapiens
ttgtcaggtttgccagcgaggacataggtctggcagacccgtctgcgttaacacaagcggttgctgcctaccaaggctgtcattttataggcatgcctgaatgtgaggtgcttctggcccagtgtgtggtctactttgccagagccccaaagtccattgaggtgtacagcgcctacaacaacgtcaaagcctgcctgaggaaccaccaggggccactgccccccgtgcccctgcacctgaggaacgcgcccactaggctgatgaaggatttgggctatggcaaaggctacaagtacaaccccatgtacagcgagcctgtggatcaggagtacctgcctgaagagttgaggggggtagatttcttcaagcagaggaggtgctgactcctcagggcacgacagcagaaggatgttgcttttttaagggagggccagaaagaaagttagtggattgcaaagttggttgcctggtggaagttagaacagaccaacattttgtgccagaaatttaagagttccataggtggaggcgcagttctttcgaataaatgtgtaactttgaaattgtgttcatttgcactcggtgcagcggttatgcttatgaaaatacctggcagctttgtgcaatgaattaatgttataaggaattatctattttgtcatagtatttaagtcataatgtcatttcagaattcagttctgtaggattttcttttctttaaaaaatgtatattctgggtagttttaattggtaaaaaaatgtaattgtgatttaatactgcatagtgttttgggtattttttttatatgcaaaggtcttacgagccaataaaaactatttcaaacta

SEQ ID NO: 260059 - DNA, 1075 bp, Homo Sapiens
  misc_feature (173)..(173): n is a, c, g, or t
  misc_feature (634)..(644): n is a, c, g, or t
tcttgcataagttcatgggatcagagactagagctaagtcaggctgttttgctacatgggattgttttggtcaccaagtgtacaagcagtggtggtctgtggtcgcctgcacataggccaggaggacagtgtgtgtcatgactgaaactctcctttgtctctgtgtgtggcanggcctggcagaccccatctgcgttaacacaagcggttgctgcctaccaaggctgtcattttataggcatgcctgaatgtaggtaaagtaatcagctcatttcttgcaaatcacttcttttctctctcgtgctctgtccctttgtagatttgaataaatgtccctccttcaccattggtgtattggacccactgagtatgcctgcttggctttggaattccaattgtagactcttagactcctagagagggaaaccttctgtgtcaacgaggtcatgtttcaaactgttctcgggattccggggttcagagcacatgctccatatgttccagggagcagaaaggttaaaggagctgaacagcaaagcctctgcaagttcgcccccagagcagcttcatattcatctcttttatatattgggggcttaagaaaaatttaatgtagtaaaaagtccttcagttnnnnnnnnnnntgaaaaccactcacctggtttgcctctcgtttcacctcatgagaatttcttctgtctgtcgtaggtggttatccagactgtaggcgcaaaagggggataataaaagcatgtggggatcttctcagaattacctagagctgtgtatcagaaggggctctgcagaacagaagcttggcatcttgctagtaaaatgtgtcctctgtgtcgttggtaggtgcttctggcccagtgtgtggtctactttgccagagccccaaagtccattgaggtgtacagcgcctacaacaacgtcaaagcctgcctgaggaaccaccaggggccactgccccccgtgcccctgcacctgaggaacgcgcccactaggctgatgaaggatttgggctatggcaaaggctacaagtacaaccccatgtacagcgagcctgtggatc

SEQ ID NO: 260060 - DNA, 980 bp, Homo Sapiens
  misc_feature (873)..(903): n is a, c, g, or t
  misc_feature (941)..(941): n is a, c, g, or t
aagtgccgaatggggaccaagatggcggaccttgattcgcctccgaagctgtcaggggtgcagcagccgtctgagggggtgggaggtggccgctgctccgaaatctccgctgagctcattcgctccctgacagagctgcaggagctggaggctgtatacgaacggctctgcggcgaggagaaagtggtggagagagagctggatgctcttttggaacagcaaaacaccattgaaagtaagatggtcactctccaccgaatgggtcctaatctgcagctgattgagggagatgcaaagcagctggctggaatgatcacctttacctgcaacctggctgagaatgtgtccagcaaagttcgtcagcttgacctggccaagaaccgcctctatcaggccattcagagagctgatgacatcttggacctgaagttctgcatggatggagttcagactgctttgaggagtgaagattatgagcaggctgcagcacatattcatcgctacttgtgcctggacaagtcggtcattgagctcagccgacagggcaaagaggggagcatgattgatgccaacctgaaattgctgcaggaagctgagcaacgtctcaaagccattgtgggcagagaagtttgccattgccaccaagggaaggtgatttgccccaggtggagcgcttcttcaagatcttcccactgctgggtttgcatgaaggagggattaagaaagttctcggagtaccttttgcaagcaaggtggccagtaaagctgaggagaatctgctcatgggggctggggacagacatgagtggaccggagaacttgcattcttcttttgcagaaacaccttacctcttccggtttggaagggattgnnnnnnnnnnnnnnnnnnnnnnnnnnnnnnnataaacggggagcacccactttatgggcccaccgccanaatactaaaaccccggggacccaacactcccgccaggga

SEQ ID NO: 260061 - DNA, 456 bp, Homo Sapiens
tgttgtatttaaaacaaatttcatggtctgaattgtatatgtaaatgcatatctgtgtaagtatatgcaagtgtatattcttctactgattcagtcagacacgaaatccaactgaattacccggtagactgaatatctgacgggatttctatatggacatagcacagatgaaccaaaaatgtatttatattcacctgagttttaatgtttttaaacaaagttttctcctgcagtgcttttctatatgaaatagttgagtcaagcttgggcttttttcttcgttgttcccaagtcatgtaatgtatagtgaatttatccaaaacgccattgtaacgttttttactagagtgtttttgcacatttgggcgctaaagggattaaaacaactgatgccacaatgactattgaaggagggaaaattctcaaggttccatagtatcttttacaaaatggatt

SEQ ID NO: 260062 - DNA, 981 bp, Homo Sapiens
atggtcagctgaagatgctagctgcgttgtgaccttcaaaggtcacaaaggaggtatcctggatacagccatcgttgatcgggggaggaatgtggtgtctgcttctcgagatgggacagcacgactttgggattgtgggcgctcagcctgcttgggagtccttgcagattgtggttcttctatcaatggagtggcggtgggtgctgctgacaactccataaaccttggctcccctgagcagatgcccagtgttcctctttattggctcagacgctttcaactgctgtacttttctctctggcttcttgctattggctgggactcaagatggaaacatttatcagctggatgtaataattccaagggctccggtacaagtcatccacagatcagtagcaccagttctatccctgctaagtgtcagagatggattcattgctagccaaggtgatggaagctgttttattgtccagcaagacttagactatgtcactgagctcactggggctgactgtgaccctgtgtacaaggtagccacatgggagaagcagatctacacatgctgtcgagacggtcttgtacgacgctaccagctttctgacctctgacttcttggaaagagcagtcccggttagtgaaaaggtttgaccctgatcaacaatgagcagaaacatcatcagtccttcccaaggaccatggcgtttaatgtcttgggcaccccttggaaatcacagaaagtcagctgtactggccgtgtggaactctcatcccaagacctactttgaactgagtaagaaggtcattgtgcccactgcatttgttccaacttctccttgtataaactcaccccagcaacacagggcaaggatatagatgcttttagtttgttcttaaaccagttttgttaaatgtttacaaggacctcagtactaaagcctgttctctggaggaaataaagaaaatatgtttggaggtgcctga

SEQ ID NO: 260063 - DNA, 1024 bp, Homo Sapiens
ggggcagcggcagggaggggctcttcacccagtccggcagttgaagctcggcgctcgggttacccctgcagcgacgccccctggtcccacagataccactgctgctcccgccctttcgctcctcggccgcgcaatgggcacccgcgacgacgagtacgactacctctttaaagttgtccttattggagattctggtgttggaaagagtaatctcctgtctcgatttactcgaaatgagtttaatctggaaagcaagagcaccattggagtagagtttgcaacaagaagcatccaggttgatggaaaaacaataaaggcacagatatgggacacagcagggcaagagcgatatcgagctataacatcagcatattatcgtggagctgtaggtgccttattggtttatgacattgctaaacatctcacatatgaaaatgtagagcgatggctgaaagaactgagagatcatgctgatagtaacattgttatcatgcttgtgggcaataagagtgatctacgtcatctcagggcagttcctacagatgaagcaagagcttttgcagaaaagaatggtttgtcattcattgaaacttcggccctagactctacaaatgtagaagctgcttttcagacaattttaacagagatttaccgcattgtttctcagaagcaaatgtcagacagacgcgaaaatgacatgtctccaagcaacaatgtggttcctattcatgttccaccaaccactgaaaacaagccaaaaggtgcagtgctgtcagaacatctaaggcatttctcttctcccctagaaggctgtgtatagtccatttcccaggtctgagatttaaatatatttgtaaatcttgtgtcacttttgtgttttattacttcatacttatgaatttttccatgtcctaagtcttttgattttagctttataaaatcatccacttgtcccgaatgactgcagctttttttcatgctatggcttcactagccttagtttaataaactgaatgtttggatt

SEQ ID NO: 260064 - DNA, 1438 bp, Homo Sapiens
ggggcagagaagtttccgggactgaaacttgaactttacctgatttctgtatgttgtcatcttgcgtacgcccagtccccacgacagtccggtttgtagattccctgatctgcaattcttcccgttccttcatggatttgaaggctctcctttcttccttgaatgactttgcatccctctcgtttgctgagagttgggacaatgttggattactggtggaaccaagcccaccacatactgtaaatacactcttcctgaccaatgacctgactgaggaagtgatggaggaggtgctgcaaaagaaggcagacctcattctctcctaccatccgcctatcttccgacccatgaagcgcataacctggaacacatggaaggagcgcctggtgatccgggctctggagaacagagtcggtatctactctcctcatacagcctatgatgctgcgccccagggcgtcaacaactggttggctaaagggcttggagcttgtacctccaggcccatacatccttccaaagctcccaactaccctacagagggaaaccaccgagtagaattcaacgttaactacacccaagacctggacaaagtcatgtctgcagtgaaaggaattgacggtgtttctgtcacttctttttctgctaggactggtaatgaggaacaaacacggattaatctgaattgtactcagaaggctttgatgcaggtggtagattttctttcccggaacaaacaactttatcagaagacggaaattctgtcactggagaagcctttgcttctacatactggaatgggacggttatgcacactggatgaatctgtctccctggcaaccatgattgatcgaataaaaagacacctaaaactatctcatattcgcttagcccttggggtggggagaaccttagagtctcaagtcaaagtcgtggccctgtgtgctggttctgggagcagcgttctgcagggtgttgaggctgacctttacctcacaggtgagatgtcccatcatgatattttggatgctgcttcccaaggaataaatgtcatcctctgtgaacacagcaacactgaacgaggctttctttctgaccttcgagatatgctggattctcacttggagaataagataaatattatcctatcagagactgacagggaccctcttcaggtggtataattgcagaaacatcaggataacacattctacaaatcagctggatgccaacttaaatttgtaacatgagtcagtgggactggtgtgcttccagagagtgtcttcgagggtatcatcatttccggtttgttaatcttattcaccaaatgttctatcgctcgtaaggtaaaactgtaatataactaccatattaaataacaaatgttcattataaactctaggaaagattgaataaaatctgtttacttaacattcaa

SEQ ID NO: 260065 - DNA, 523 bp, Homo Sapiens
  misc_feature (53)..(53): n is a, c, g, or t
gtttacatggctagatttaccaagcagtagaccattctgtgtattatctgaanaatgtatgaatcagtctttcttgtccaagtttttcagagatttaagaatcttttggaaaataattctgaaaataatttgattttgtatgtccatgccaaagccctagattatggggactggtgatgtatatctaagggatgtgtgtatgttatgtaagcatgagaatgaatctttttaaaaagtcatttcttagaaattttgcctataatagtttacttttaaatcttaatctctcaccccccaaaactcccattttcccacaatattttctcctaggagcttgtacctccaggcccatacatccttccaaagctcccaactaccctacagagggaaaccaccgagtaagaattcaacgttaactacacccaagacctggacaaagtccatgtctggcagtgaaaggaattgacggtgtttctggcacttctttttctgctaggactggtaatgaggaacaaacacggtt

SEQ ID NO: 260066 - DNA, 955 bp, Homo Sapiens
  misc_feature (849)..(849): n is a, c, g, or t
gtctgcatccggtggccacagagcaacttcctctagagggagctgattggagccgggtgccgctggcacctctatgatcactggagtctcgcgggtccctcgggctgcacagggacaagtaaaggctacatccagatgccgggaatgcactgacgcccattcctggaaactgggctcccactcagcccctgggagcagcagccgccagcccctcgggacctccatctccaccctgctgagccacccgggttgggccaggatcccggcaggctgatcccgtcctccactgagacctgaaaaatggcttcggggcaaggcccaggtcctcccaggcaggagtgcggagagcctgccctgccctctgcttctgaggagcaggtagcccaggacacagaggaggttttccgcagctacgttttttaccgccatcagcaggaacaggaggctgaaggggtggctgcccctgccgacccagagatggtcaccttacctctgcaacctagcagcaccatggggcaggtgggacggcagctcgccatcatcggggacgacatcaaccgacgctatgactcagagttccagaccatgttgcagcacctgcagcccacggcagagaatgcctatgagtacttcaccaagattgccaccagcctgtttgagagtggcatcaattggggccgtgtggtggctcttctgggcttcggctaccgtctggccctacacgtctaccagcatggcctgactggcttcctaggccaggtgaccccgcttcgtggtcgacttcatgctgcatcactgcattgccccggtggattgcacagagggggtggctggggtggcaacccctgnaactttgggcaatggtcccatcctgaacgtgctggtggtttctgggtgtggttctgttgggccagttttgtggtacgaagattctttcaatcatgaactcccaggg

SEQ ID NO: 260067 - DNA, 1057 bp, Homo Sapiens
  misc_feature (347)..(361): n is a, c, g, or t
  misc_feature (499)..(552): n is a, c, g, or t
ggtaccggtccggaatttccgggatatcgtcgacccacgcgtccggaaagtgttagtgatgggtgatttgagctacatctgtgggagcaaggggagtgaaaccacagaaactgttaaattgaacgtaaataacttggaaaacagtttgacactagaacaaggtcgcttctcttttcctcttctctcccaacctggttaacctagtgctagatagtcagctgctgttgcaggtagaaaagctcaccaatgccacattgttcattctgttcaacctgttttgacctcccaggcatctgaacaggatgacatcatcttattatatcttactttacacatacgtgtatgtnnnnnnnnnnnnnnnatacaagacatttttcctgttttagaaaatatagcccttgttggattactgctgtctgagcactagaaatttctaatggaaagaggcctctgaatggctaagggaacatctggaaaggaaggaaaatgagccctaaannnnnnnnnnnnnnnnnnnnnnnnnnnnnnnnnnnnnnnnnnnnnnnnnnnnnnaaatccttctctagtgactgaagaaatcgtgagtacataatatttaggtcatggttaaggaacattaaaataaacctgcagtttaacagaattttgtattaaatgggggagtgtcaatttgcatcatttgcatattgatttcaagtctcctaatttggaatgggtaaagtacaaatgttaatgcaacatagtacagttgtatttgtccttcatattcaggatgtgatatttacaaaatgcagaacagtttaaacttgttaagtcacattccagattaggagaaaatgggcaataatcatctctgttttgcccccattctactacccaccactgcccaccccacccccacatcacacactcttcgatgctttcccacagcccctgctccgctcctctccgtaagaaactcacttcactgtttttcacttttcacttctggcttttttgtggcccaaggccaatataggattaatatcctgtgttccagcttcagccagaacgatat

SEQ ID NO: 260068 - DNA, 852 bp, Homo Sapiens
tgtgctcatgttggccatctcgcccagccacctaggcgctgacctggtggcagctccgcatgcgcgcttcgacgacggcctggtgcacctgtgctgggtgcgtagcggcatctcgcgggctgcgctgctgcgccttttcttggccatggagcgcggtagccacttcagcctgggctgtccgcagctgggctacgccgcggcccgtgccttccgcctagagccgctcacaccacgcggcgtgctcacagtggacggggagcaggtggagtatgggccgctacaggcacagatgcaccctggcatcggtacactgctcactgggcctcctggctgcccggggcgggagccctgaaactaaacaagcttggtacccgccgggggcggggcctacattccaatggggcggagcctgagctagggggtgtggcctggctgctagagttgtggtggcaggggccctggccccgtctcaggattgcgctcgctttcatgggaccagacgtgatgctggaaggtgggcgtcgtcacggttaaagagaaatgggctcgtcccgagggtagtgcctgatcaatgagggcggggcctggcgtctgatctggggccgcccttacggggcagggctcagtcctgacgcttgccacctgctccctaccggccaggatggctgagggcggagtctattttacgcgtcccccaatgacaggacctggaatgtactggcttggggtaggcctcagtgagtccgcccggccagggccccccagccttcccccatccactccgggggcctcccattaagttggccaaacacgcccatgaaggggcccggttcccccggggccccgccctaa

SEQ ID NO: 260069 - DNA, 701 bp, Homo Sapiens
cgtggagctaaatcataagagtagtccaagcccagcttctgaactaacagtggatagccactccagttgtagattttttcatggaaaggaacattgtaggagggccaatatcctttccgtagaacatcagtttgttcagaatattctacatatgtaggaatttgctccacaatgtacagagtgcctttgtcaagactgtggttcagctttactttcttcaggtccagaaccatgtattgattgttataggtgccagagttgtattttgaaaagatgtctgcccacctcttgccactatctgccatcatattggccacacggactctttgccaggacaggagagtctcgggtattacctgctttagcagggttttattaaacacactgtttgtggtctgcagcaatatcaatccactgctaagaatgtaaaaatcatccagagactccaaaaaccctgggtaactgctgaaagagaggcgactactgctggtatctttatctatgatgttgaagtcccagtgtttatatatcctgagcatggctgcatacgtgtaccagcttgagtgagcaaaaaggatgttctcaaatccaggaagaaccttgataagagcggagcaatgtcccatgtcccatctcttaaaaacctttaggctgccgttttttgtgggagagagtgagggaatcagatccaatagatctcc

SEQ ID NO: 260070 - DNA, 529 bp, Homo Sapiens
aggggcgagctccagctccgcggcgtcactacccggggcattatccagctcctccagaagctgcggtccggctccgcggttccaccaccacggccgccatggaggcagcagccgcccggcctcaccgcggctcagcagccgctcgaaggcagctttttcgcccggcgccagccgctcccagagtcccgataggccgccgggcgccgggccggagctgaggcctgcttccccaggctcgtcctcggtctcgcgttgctgacgcagccggcgtagggcgcttgctaggcggctgggaggagcgctgcaaccgcggagctctcccagcacctggtcacggtagaagttttctgcgcaggtgccatgcgtccggtagcagcgcagcgagcagtagggcgcattacagcgagggcaggtgtaacgcgctggctggacctcccccgccgggcagaagccacagggcccggccggctccatggcaactggcaccgcgatctacctgcgaacgcacgccggtggtagttcgaaactt

SEQ ID NO: 260071 - DNA, 1209 bp, Homo Sapiens
  misc_feature (455)..(765): n is a, c, g, or t
ggcagtaactaccacggtgttaaggtagcgaggcctgggtggcgaattcggcacgaagggtttccaggcacagaatatgaatcgtaagttaggatggacattagatgtgattatgatgataaagcgaaggtctgcggtcctgtatctacagacacgtggtgagaaattagaacaaactggagacgggccattgacacatggactctgcctgggcatgttaggttaattctttgactccaagccttaaaatactcacatggagtcagcgctcacctcattcacacaattatcatagagctccctggacactgaacctctaaagggaaaaggtctaccctggagccaggagcatcagggttggcttgggagcatgagaggtgagcccagggctaggcctgggccaggccccggcagcactgctacttgggaggagccacttcacctttgtattagtnnnnnnnnnnnnnnnnnnnnnnnnnnnnnnnnnnnnnnnnnnnnnnnnnnnnnnnnnnnnnnnnnnnnnnnnnnnnnnnnnnnnnnnnnnnnnnnnnnnnnnnnnnnnnnnnnnnnnnnnnnnnnnnnnnnnnnnnnnnnnnnnnnnnnnnnnnnnnnnnnnnnnnnnnnnnnnnnnnnnnnnnnnnnnnnnnnnnnnnnnnnnnnnnnnnnnnnnnnnnnnnnnnnnnnnnnnnnnnnnnnnnnnnnnnnnnnnnnnnnnnnnnnnnnnnnnnnnnnnnnnnnnnnnnnnnnnnnnnnnnnnnnnnnnnncacatcacaccacacactcccaggagtttccatctcgcggtgccggacaacacgcggtagacggaaactgggcacctgggggccactagcgggtaccacgaaccaagggtagccttggcccacgtggtagagcttgacggcgcgaccaaaaagggaagcgccactactccggaaacagcagcgtcacccgttgctagagcaagacggcgaaaaaagacacagccccgacacagcctgacgcacgccaacaagagaacgcacagagaaagcaaaacgacacaagaacccagacaaacgaaggagagcaaagaccggacaaaggacaagtcaacaacaagaagaacacgaagcacgaacaaccgaaagaaaacgcagctagacataccaataccatgcagacagcgcacgagagacggcgcgagacaacgcacaaacgacgacaca

SEQ ID NO: 260072 - DNA, 634 bp, Homo Sapiens
  misc_feature (44)..(57): n is a, c, g, or t
  misc_feature (195)..(205): n is a, c, g, or t
tccatgctttaaactggccattaaacagtcccacatggttggannnnnnnnnnnnnngagttgtgctttcacaaaaccttgtcaaagacctcatgcaatatcactttgaaagttattttctgtttactacacaaacattgtaatataactgttaatactatttatatatttgaaaggtataaaaggtaggagttnnnnnnnnnnncctctatgtgtagatattaactcagaacttacaatatacagggagaagacatgttgcaatacaagctaattctagctgctcagtaacctctggagtttttaaagggacattttcctgtactttttcaaataatgatgtttaaaaattatcttgacataagcgtcatatacctttgcaaaaggatggttgtttgcagttagccctggccccatccttcctatttctgtagtatgctgcagctttaatcaaaaagtccatggttgctgcttcctgatctccgagttactctttccaaattgtcttcttacactgttgctgaaggtcactctgtacacgtaatggaaactgattttgccaagctcttacaaggtggttcatctatcgatggcatccgcatttggtatcttttacacttcaaccaaaaattta

SEQ ID NO: 260073 - DNA, 791 bp, Homo Sapiens
  misc_feature (524)..(544): n is a, c, g, or t
atgaaatggctcaccttccctattatgaactagaagaaaggatgaaggaaggttggcaggaccccagccttactctgtagtgacaacccagaggtacctttcccggaatgcagggtcaagtttatgtgtgaagggactctagaatagctggtaaaaatggctacatggtaaccattcttgacttagtccagtattcccataatttgtaattccataaatttattctcagctgtcccccagccatttctaatagaaggatgtgtaccccagttttgacaatgttcttgaaatcaagttagtgttacctgcattgcattataatggaactatatgtacatgttaaagggatccgtttgattcctttcggcaaggaattgcaaaaatagtttttaccaataccagttaaaataggataggttagactttgggggcagggtgagacagtgcagccttttcactctgaaatggcaaatcagctggactctttgagtctaccagagattcctatttgagtgtgaatgggnnnnnnnnnnnnnnnnnnnnnctcattcatcttcatgctttcttccatggtgttaattcaagctctcctaataaaggtatccaaagagtactgagaagtgaccataggtatttggcatgagtaaatgtagttccttttgccaaaaaaactctcaaaagttacaactggagttcttcgcgataaaaggttggggaaatcagccatggctttagccttgttcccaagtacacatcttcttatccacaagggatgaaactctgtagggctc

SEQ ID NO: 260074 - DNA, 1161 bp, Homo Sapiens
  misc_feature (47)..(56): n is a, c, g, or t
  misc_feature (808)..(808): n is a, c, g, or t
atgtcccactttaaaaataaaacccccaaacatcactactttaaggnnnnnnnnnntgtagtccaatattgatgctttcttatggctttttattttaatttggctggataagttgtttcaaataactgttaaagatattacttacaattgaatgtttgaaataagaaagtactttaagcaatagagttcatctcctgctgtgttatccaacctcgatgtatacttacagcatctcaggtcaccctttttatttcagttatttaattatgaaccataaagaagcatgtggaaatagtgtttattgctctttgaagaaaaaccaccaactatttctggatattttggctgtacctactactaaagtcattagtctttaatacataatacatatttgaaaagtaaacatattatatagattatgtgagggacttaatcatgaaaccagtttcacagtccaagtaccaactcttctggtagcaggtgcacaagcttgggtgtttaaaaacaacctgtgtagggtatgcccagcaaatgaggacaaatgtgtagacagtacttactggatcttatttaacttttagctacattaactaactttcttatttaaaaacaagaaagggagactaaacatctgcttaacttgtacacattttcagaattctttttaaaagtctagttaaagatgtttcttagaagttggagactgttaacaacttccataaaatagatccaggtttttcagttccctgaagcagcattcagtagcatctatataaataaaggcaccttctgagaataaaactatttntatggagtgtgtgaacacacttgttctgtcacctgggttcatcttgttgtgaagcacattaggtccaggtccttccctctgggagtctgactgtgaaactctttaacccaacaactcaattagcccctgtagataagacatgcttcccagagtgagatttttgaaatccccttttcatccagaactatatttacccacctattgtaactattcaaatagagcaaaattaggaggcttgataaatactaagaatttagtaccacagaaattatttattattttccctgtagtccacaattagtgataacgaatcctatttttgttaactgtgacataactttgatgtcatatgt

SEQ ID NO: 260075 - DNA, 1015 bp, Homo Sapiens
ggggacgcggacccgccatggcgcggaagaaggtgcgtccgcggctgatcgcggagctggcccgccgcgtgcgcgccctgcgggagcaactgaacaggccgcgcgactcccagctctacgcggtggactacgagaccttgacgcggccgttctctggacgccggctgccggtccgggcctgggccgacgtgcgccgcgagagccgcctcttgcagctgctcggccgcctcccgctcttcggcctgggccgcctggtcacgcgcaagtcctggctgtggcagcacgacgagccgtgctactggcgcctcacgcgggtgcggcccgactacacggcgcagaacttggaccacgggaaggcctggggcatcctgaccttcaaagggaagactgagagcgaggcgcgggagatcgaacacgtcatgtaccatgactggcggctggtgcccaagcacgaggaggaggccttcaccgcgttcacgccggcgccggaagacagcctggcctccgtgccgtacccgcctctcctccgggccatgattatcgcagaacgacagaaaaatggagacacaagcaccgaggagcccatgctgaatgtgcagaggatacgcatggaaccctgggattaccctgcaaaacaggaagacaaaggaagggccaagggcacccccgtctagaatgccagaaccagcgggtggccttaggggctgtgaggcagtggggaccttattgatgaaagaaaccgtctttgcgttacacccgagtctgcctctcggagcagggagctcaccttccgcgacgtgttctgagggtctgcatcttaggggggagggctggggcaaatcgccacctgtgcctttcctctggccctgctgcccccacacccaactccgagggcccacgctggggaaagcgggaagcgctcgctccctttcccccattagtgctctctctgcctggatcccggcagaagctatgaaagggaataaagagaaaagaagtccaacaaaccaacaac

SEQ ID NO: 260076 - DNA, 771 bp, Homo Sapiens
gggccggccggaccgctgaggacgcggacccgccatggcgcggaagaaggtgcgtccgcggctgatcgcggagctggcccgccgcgtgcgcgccctgcgggagcaactgaacaggccgcgcgactcccagctctacgcggtggactacgagaccttgacgcggccgttctctggacgccggctgccggtccgggcctgggccgacgtgcgccgcgagagccgcctcttgcagctgctcggccgcctcccgctcttcggcctgggccgcctggtcacgcgcaagtcctggctgtggcagcacgacgagccgtgctactggcgcctcacgcgggtgcggcccgactacacggcgcagaacttggaccacgggaaggcctggggcatcctgaccttcaaagacgccctcttttttcttcatcaggggaagactgagagcgaggcgcgggaagatcgaacgacgtcatgtaccatgactggccggctgggtgcccaagcacgaggaggaggccttcaccgcgttcacgccggcgccggaagacagcctggcctccgtgccgtacccgcctctcctccgggccatgattatcgcagaacgacagaaaaaatggagacacaagcaccgaggagcccatgctgaatgtgcacgaggatacgcatggaaacctgggattaccctgcaaacaggaagacaaaggaagggccagggcacccccgtctagaatgccagaaacagcgggtggacttaggggctgtgaggcagtggggacctta

SEQ ID NO: 260077 - DNA, 892 bp, Homo Sapiens
gggggagacaggtgagcgacgaacttctgagacagttgtgtccctgtggctttggtgcgcctgtgtgcactttctccctccacctggagcatgggctaacaccggaggaaaggaaaagacagagtcagacaggggacaatgaagcctttgaagtgccagtctatgaagaggccgtggtgggactagaatcccagtgccgcccccaagagttggaccaaccacccccctacagcactgttgtgatacccccagcacctgaggaggaacaacctagccatccagaggggtccaggagagccaaactggaacagaggcgaatggcctcagaggggtccatggcccaggaaggaagccctggaagagctccaatcaaccttcggcttcggggaccacgggctgtgtccactgctcctgatctgcaaagcttggcggcagtccccacattagagcctctgactccaccccctgcctatgatgtcggctttggtcaccctgatgatgatagtgtttttttatgaggacaactgggcccccccctttaaatgactcctccccagatttctctttttctcccacacccagaccctcggtctcattttgactaaacaatttttccagcggccccacttatgttgtcacaaaacaaggtggttttctggccttgggaaatccattaaaatggggggacttgggaacccctgaaggaaaaattcagggcccaccggtaaagcccctttccccacgcttaaaaatatgcgggggggcattaattttgaaggtccttctggggcaaccattttggggtggaccccaaccccccattttccaaaattttttctcccccccgttaaaatcttaagggaattaaggtaaagggaaggtgggaatcccc

SEQ ID NO: 260078 - DNA, 760 bp, Homo Sapiens
tattcgtacctggttccccaaggaaaatcttttcagcttccagacagcaaccacaactatgcaagcggtgttcaggggctacgcggagaggaagcgccggaaacgggagaatgattccgcgtctgtaatccagaggaacttccgcaaacacctgcgcatggtcggcagccggagggtgaaggcccagacgttcgctgagcggcgcgagcggagcttcagccggtcctggagcgaccccacccccatgaaagccgacacttcccacgactcccgagacagcagtgacctgcagagctcccactgcacgctggacgaggccttcgaggacctggactgggacactgagaagggcctggaggctgtggcctgcgacaccgaaggcttcgtgccaccaaaggtcatgctcatttcctccaaggtgcccaaggctgagtacatccccactatcatccgccgggatgacccctccatcatccccatcctctacgaccatgagcacgcaaccttcgaggacatccttgaggagatagagaggaagctgaacgtctaccacaagggagccaagatctggaaaatgctgattttctgccagggaggtcctggacacctctatctcctcaagaacaaagtggccacctttgccaaagtggagaaggaagaggacatgattcacttctggaagcggctgagccgcctgatgagcaaagtgaacccagagccgaacgtcatccacatcatgggctgctacattctggggaac

SEQ ID NO: 260079 - DNA, 1533 bp, Homo Sapiens
gggggggagggcatggcgggggccgtgccgggcgccatcatggacgaggactactacgggagcgcggccgagtggggcgacgaggctgacggcggccagcaggaggatgattctggagaaggagaggatgatgcggaggttcagcaagaatgcctgcataaattttccacccgggattatatcatggaaccctccatcttcaacactctgaagaggtattttcaggcaggagggtctccagagaatgttatccagctcttatctgaaaactacaccgctgtggcccagactgtgaacctgctggccgagtggctcattcagacaggtgttgagccagtgcaggttcaggaaactgtggaaaatcacttgaagagtttgctgatcaaacattttgacccccgcaaagcagattctatttttactgaagaaggagagaccccagcgtggctggaacagatgattgcacataccacgtggcgggaccttttttataaactggctgaagcccatccagactgtttgatgctgaacttcaccgttaagcttatttctgacgcagggtaccagggggagatcaccagtgtgtccacagcatgccagcagctagaagtgttctcgagagtgctccggacctctctagctacaattttagatggaggagaagaaaaccttgaaaaaaatctccctgagtttgccaagatggtgtgccacggggagcacacgtacctgtttgcccaggccatgatgtccgtgctggcccaggaggagcaggggggctccgctgtgcgcaggatcagcccaggaagtgcagcgctttgccccagggagaaagggcctgaagcccaggctcgaatcaaccaatgaccctggggaaaaccagtgtgccctccataccacgagggtctgacaggctctcggggccatgctgtccaaaggagcctgaaccctgctgacatcaccgtcctgttcaagatgttcacaagcatggaccctcctccggttgaacttatccgggtttccagccttcctggacctgtcatgcagtcactctttcaaccaagggctacggatcaaccaggaccacaagcacaaactacatccacatcttggcgtaacgcaggcacgcgtggttgagaccttggaaagaagaacaacgcgagtgagcatcacctcaagatgagctgaagtcaaacgtcaaaagctgtcgaagcgtcacaacttgtgtgcaccgagaaccaaggggctctgaactagtggcacgaattgagaactttatcaggtataggttccagtggtagcaatgggtgtgatgaaatgggtggatggactggatagaacaaggaattagtgagatggagatactgtaactgaggtgtgcaataagatgcacagatctgaccggacgaggtgtaaaaagaagaaaccactgcgtgaactgatacaaatggacatgcctggggaaaaacgagacaagtggaagaaaaaagaggaggtggattgaaacgaaaaaggtcacatcaactaaggggaaag

SEQ ID NO: 260080 - DNA, 973 bp, Homo Sapiens
  misc_feature (832)..(832): n is a, c, g, or t
  misc_feature (849)..(849): n is a, c, g, or t
gtctgcctccaggctttgtcatggcggctgctgctgcacgctggaaccatgtgtgggtcggcaccgagactgggatcttgaaaggggtaaatcttcagcgaaaacaggcggcgaacttcacggccggaggacagccgcggcgcgaggaggcagtgagcgccctgtgttggggcaccggcggcgagacccagatgctggtgggctgcgcggacaggacggtgaagcacttcagcaccgaggatggcatattccagggtcagagacactgcccgggcggggagggcatgttccgtggcctcgcccaggccgacggcaccctcatcacatgtgtggattctgggattctcagagtctggcatgacaaggacaaggacacatcctctgacccactcctggaactgagagtgggccctggggtgtgtaggatgcgccaagacccagcacacccccatgtggttgccacaggtgggaaagagaatgctttgaagatatgggacctgcacggctctgaggaacctgtgttcagggccaagaacgtgcggaatgactggctggacttgcgggttcccatctgggaccaggacatacagtttctcccaggatcacagaagcttgtcacctgcacagggtaccaccaggtccgtgtttatgatccagcatccccccagcgccggccagtcctagagaccacctatggagagtacccactaacagccatgaccctcactccgggaggcaactcagtgattgtgggaaacactcatgggcagctggcagaaattgaccttcggcaagggcgtctactgggctgtctgaaagggctggcaggcantgtgccgtgggttgcantgccaccctttcaaggctctactagcctcctgtggcttggacagagtcttgaggatacacgggatcagaaaaccacgggggtctgggagcataagggattatctcaagcctcaatttggactgc

SEQ ID NO: 260081 - DNA, 796 bp, Homo Sapiens
  misc_feature (110)..(162): n is a, c, g, or t
  misc_feature (465)..(465): n is a, c, g, or t
  misc_feature (626)..(626): n is a, c, g, or t
  misc_feature (723)..(723): n is a, c, g, or t
  misc_feature (750)..(750): n is a, c, g, or t
  misc_feature (758)..(758): n is a, c, g, or t
  misc_feature (780)..(780): n is a, c, g, or t
cattcaatactgggtaaaaatttcagacctatctcaggaacacagaaatatttggtgtcctgataagcactttctagactattgatgtggccaggaatttggaaagacgnnnnnnnnnnnnnnnnnnnnnnnnnnnnnnnnnnnnnnnnnnnnnnnnnnnnngttttttccttccctgtgatgaaaaaggctgtgaaaaccttaaagtatttgcttgcttcttgttttgtttagttgataatgaaatgtgtacaacctcaaatttgctgccagaatactaaaaatagaaaaatacccacaaaactgtcatgtctttagttctttccccccgaaaactcagtaaaaaggtgttcccaggatgaaaagatcattttttgctgcatgctaaatcttgcaggaaaaatgattttttagtacgattctgtagaaatgaatctttgatataatgtaaatgctggctgtttngttttcaagtgggtgaatgtgttgttaaaaattggctgtttgctttcattttggccaataagtaatcaagtttgtagaaaatgttagcattctgactacttaggcatctgtagtaatttctctatgtataggggataattttttagtggggcagagatccngttctagttgcctgttaagcaaaatctgccctcccaattggaaaaagccaaagaggattgttagaggggaaaagcctgttggccttgcagtccgccntgcgcccgcgttgtcccgagagtacangttagcantagctctaccgtgtgttgtggnctcggtgagtgttgtt

SEQ ID NO: 260082 - DNA, 1235 bp, Homo Sapiens
  misc_feature (12)..(12): n is a, c, g, or t
  misc_feature (28)..(28): n is a, c, g, or t
  misc_feature (34)..(34): n is a, c, g, or t
  misc_feature (60)..(60): n is a, c, g, or t
  misc_feature (1055)..(1093): n is a, c, g, or t
  misc_feature (1103)..(1103): n is a, c, g, or t
  misc_feature (1109)..(1109): n is a, c, g, or t
  misc_feature (1111)..(1111): n is a, c, g, or t
  misc_feature (1113)..(1114): n is a, c, g, or t
ggaacctttttncccctccccaaatggnaaaccnggcccaaaaaatggtaaccgccatgnggttgtgtaagacattggtttaataggaaaagttgtacccagcatcttcatattattgagaaaattttttcccagcatgggcaccttagaaaaagcacatggcaaatggctctttgttcctttcagatattatttcagtagaacctggcattctcctttcaccttaaaagatccatctaagtctcagatctggaaacgttttgtaccgattatccacagcaaaacaaaaataagcttttattttattaacaatttcgttcctcttgtgcccaatcaaatcttttaggaacaaactgcaagaaaagctaagaatgttttagagtgaactaaatacagacattgcttacttgttttgaagagggttttggttttggttattgtgtcttttaagttttctgatatgccccctttcaatatttagatatttatttgttgggaagaataccttaaaatgagggttcttattccagattctgggcagtggtctgtgagtagtttttttcctggatgaaaagggagcaagcccacttgtcactaaatgaattgtgtgaaatgtgctcacttggactccatcaacaatgtgctgctcccagattgccatgccagagggtcttcggattcttccatcacctctgctctaagcaaatcttgttagaagggcatgcctttgcttaggcagattgggaataccaattcactacagaataaagattttaaaaatgcaataaggtggcaaatgcattgtatgaagaatttctcagtgtttagtctgagaatttttgcatgttggttaattgtggccattctttaatttaaagttaaaactataatcttaggtagaacaacttttttataagaagtattatttgaccacttcaggtatacattcaatactgggtaaaaatttcagacctatctcaggaacacagaaataatttggtgtcctgataagcactttctagactattgatgtggccaggaatttggaaagacgnnnnnnnnnnnnnnnnnnnnnnnnnnnnnnnnnnnnnnngttttttccntccccngngnngaaaaaggctgtgaaaaccttaaagtatttgcttgcttcttgttttgtttagttgataatgaaatgtgtacaacctcaaatttgctgccagaatactaaaaatagaaaaatacccacaaaa

SEQ ID NO: 260083 - DNA, 344 bp, Homo Sapiens
  misc_feature (118)..(144): n is a, c, g, or t
  misc_feature (164)..(164): n is a, c, g, or t
  misc_feature (182)..(182): n is a, c, g, or t
agtattctggcagcaaatttgaggttgtacacatttcattatcaactaaacaaaacaagaagcaagcaaatactttaaggttttcacagcctttttcatcacagggaaggaaaaaacnnnnnnnnnnnnnnnnnnnnnnnnnnncgtctttccaaattcctggnccacatcaatagtctagnaaagtgcttatcaggacaccaaatatttctgtgttcctgagataggtctgaaatttttacccagtattgaatgtatacctgaagtgggtcaaataatacttcttataaaaaaggttttctacctaagattatagttttaactttaaattaaagaatggggcc

SEQ ID NO: 260084 - DNA, 1024 bp, Homo Sapiens
ctcggccgccctcgcgctgtggttcgctccgggcgcgctgcgctcgtgagttcccaggaggcctggcgggcaccgtaaccagcgccgcggacaccggcaccggcgccacggactccgcaggaccccgcgcccgccgccgccgctatgctggggctgctggtggcgttgctggccctggggctcgctgtctttgcgctgctggacgtctggtacctggtgcgccttccgtgcgccgtgctgcgcgcgcgcctgctgcagccgcgcgtccgtgacctgctagctgagcagcgcttcccgggccgcgtgctgccctcggacttggacctgctgctgcacatgaacaacgcgcgctacctgcgcgaggccgactttgcgcgcgtcgcgcacctgacccgctgcggggtgctcggggcgctgagggagttgcgggcgcacacggtgctggcggcctcgtgcgcgcgccaccgccgctcgctgcgcctgctggagcccttcgaggtgcgcacccgcctgctgggctgggacgaccgcgcgttctacctggaggcgcgctttgtcagcctgcgggacggcttcgtgtgcgcgctgctgcgcttccggcagcacctgctgggcacctcacccgagcgcgtcgtgcagcacctgtgccagcgcagggtggagcccccctgaactgcccgctgatctgcagcactggatctcctacaacgaggccagcaaccagctgctccgcatggagagtgggatccacagatgtcaccaagggaccagtgaactgccaccttctacaccgtctgcccctgggcaccatcctgggccatgggggcgtgccccacaagctgggccatcctcatctcaaaaaactgggccccccttgtacgtattacccctcggatacttccctgtgacaatctggagtctccaacaagcggacatcccaccaactcttactttatccccatagcgtccacacgcactccctcaccaaggcacacaatgtcgcggtgcgcaccaccccgtccac

SEQ ID NO: 260085 - DNA, 1402 bp, Homo Sapiens
tgggtggcgtcctcgggcacgaggccctcgcggggggcttgtgggtcctcctccccctcccactgacaactgccccaactgctcttcccgccccggtcacagtgaaaatgtagacggggtcgttgtccactatgttaggtcttaatggtgggaggacgcccgagtgctcggcccgtttcaccccgaggaggaaggacactgggtcatgacgccatcagagggcgccagagcagggaccggacgcgagttggagatgttggactcgctgttggccttgggcggcctggtgctgcttcgggattccgtggagtgggaggggcgcagtctcttgaaggcgcttgtcaagaaatctgcactgtgtggggagcaagtgcatatcctgggctgtgaagtgagcgaggaagagtttcgtgaaggttttgactctgatatcaacaatcggctggtttaccatgacttcttcagagaccctctcaactggtcaaaaactgaggaggcctttcctggggggccgctgggagccttgagagccatgtgcaagaggacagatcctgttcctgtcaccattgctctcgattcactcagctggctgctacttcgccttccctgcaccacactctgccaggtcctgcatgctgtgagccatcaggactcttgtcctggtgacagctcctcagtggggaaagtgagtgtgctgggcttgctacatgaagagcttcatggaccaggccctgtgggagctctcagcagccttgctcagactgaggtgaccctgggcggtaccatgggccaggcctcggcccacatcctgtgtcggaggccccgacagcgcccaactgaccagactcagtggttctccatccttccggacttcagcctggatctccaagaggggccctctgtagagtcccagccctactccgatcctcatatacccccggtggatcccacaactcatttgacctttaaccttcacctgtccaagaaagagagagaagccagagatagcctgatcctgcccttccagttcagttctgaaaaacagcaggctctcctgcggcctaggccagggcaggctaccagccacatcttctatgagccagatgcttatgatgacctggaccaagaagacccagatgacgacctggatatttgactggccagatttgattagattgtaattggagggggcgcgggaagactttgggcccagaaccatctttctattgtttgtgttagccttaccctgtccctgccccaccttggttccccttgtctatggagccccgccttgtgagccaggaagcagcgtctcatcaggacagaaggtaggatgaagacatggggtaatgtgagagagtagaacacccccgtacctaataaaaatctttatttttttatt

SEQ ID NO: 260086 - DNA, 557 bp, Homo Sapiens
ggggccagagcagggaccggacgcgagttggagatgttggactcgctgttggccttgggcggcctggtgctgcttcgggattccgtggagtgggaggggcgcagtctcttgaaggcgcttgtcaagaaatctgcactgtgtggggagcaagtgcatatcctgggctgtgaagtgagcgaggaagagtttcgtgaaggttttgactctgatatcaacaatcggctggtttaccatgacttcttcagagaccctctcaactggtcaaaaactgaggaggcctttcctggggggccgctgggagccttgagagccatgtgcaagaggacagatcctgttcctgtcaccattgctctcgattcactcagctggctgctacttcgccttccctgcaccacactctgccaggtcctgcatgctgtgagccatcaggactcttgtcctggtgagacccctccttcattgtttcccctcatacatctccctctgccaaggagtgtgccccttttcctttctaccctagaataaacatctgggttctccagtcagacccttaagaa

SEQ ID NO: 260087 - DNA, 842 bp, Homo Sapiens
aaaaggatccgggagctaagccagacccgggtggcggtggcagctgcgaaacccagggagccgatgccacgtgacccaatgtggacttcttttaaacctttctaatgcccataacccagcctcagacccatggagcccacgagagactgcccgctgttcgggggcgccttttccgccatcctccccatgggggccattgacgtaagcgacctccgaccggtcccggacaatcaagaagttttctgccatcccgtgacggaccagagcctgatagtggaacttctcgagctgcaggcccacgtacggggcgaagcggctgcgcggtaccactttgaggatgttggtggcgtgcagggggctagggctgtccatgtggagtctgttcagcctctcagtttggagaacctggccctgaggggccgctgtcaagaagcctgggtcctctctggcaagcagcagatagctaaggaaaaccagcaggttagcaaaggacgtgacacttcatcaggccttgctgaggctgccccagtaccagactgatctcttgcttaccttcaatcagcccccccctgacaacaggtcatctcttggccccgaaaatctgtcacctgcaccctggagcctgggtgactttgaacagctggtgaccagtctgacccttcacgatcctaacatctttggtccccagtaaaggcgctgaagcactgcatgatgttgctgagaacttggggactcggttctgtgagggggaaaagaggttgaaaagagggtttcctcttatttcttccctgtgcgtaaacataagacaatccctcttcagaataaacttgctttattaatca

SEQ ID NO: 260088 - DNA, 1272 bp, Homo Sapiens
ctgtgaggaaacaagaagagaggcccaagatggagacggcggcggctgtagcggcgtgacaggagccccatggcacctgcccagccccacctcagcccatcttgacaaaatctaaggctccatggagccaccacggggcccccctgccaatggggccgagccatcccgggcagtgggcaccgtcaaagtatacctgcccaacaagcaacgcacggtggtgactgtccgggatggcatgagtgtctacgactctctagacaaggccctgaaggtgcggggtctaaatcaggactgctgtgtggtctaccgactcatcaagggacgaaagacggtcactgcctgggacacagccattgctcccctggatggcgaggagctcattgtcgaggtccttgaagatgtcccgctgaccatgcacaattttgtacggaagaccttcttcagcctggcgttctgtgacttctgccttaagtttctgttccatggcttccgttgccaaacctgtggctacaagttccaccagcattgttcctccaaggtccccacagtctgtgttgacatgagtaccaaccgccaacagttctaccacagtgttccaggatttgtccggaggctccagacagcatgaggctccctcgaaccgccccctgaatgagttgctaaccccccagggtcccagcccccgcacccagcactgtgacccggagcacttccccttccctgccccagccaatgcccccctacagcgcatccgctccacgtccactcccaacgtccatatggtcagcaccacggcccccatggactccaacctcatccagctcacttggccagagtttcaacactgatgctgccggtagtagaggaggtagtgatggaaccccccgggggagccccagcccagccagcgtgtcctcggggaggaagtccccacattccaagtcaccagcagagcagcgcgagcggaagtccttggccgatgacaagaagaaagtgaagaacctggggtaccgggactcaggctattactgggaggtaccacccagtgaggtgcagcctgctgaagaggatcgggacgggctcgtttggcaccgtgtttcgagggcggtggcatggcgatgtggccgtgaaggtgctcaaggtgtcccagcccacagctgagcaggcccaggctttcaagaatgagatgcaggtgctcaggaagacgcgacatgtcaacatcttgctgtttatgggcttcatgacccggccgggatttgccatcatcacaca

SEQ ID NO: 260089 - DNA, 266 bp, Homo Sapiens
gtgtcagcctgggttctatcctttggtgcagccccattgccttttcccttcaggctctgttgctccctcctctgcagctgcacgaaggcgccatctggtgtctgcatgggtgttggcagcctgggagtgatcactgcacgcccatcgtgcacacctgcccatcgtgcacacccacccatggtgcacacctgtagtcctccatgaggacatgggaaggtaggagttgccgccctgggggagggtcccgggctgccattcattccaac

SEQ ID NO: 260090 - DNA, 1133 bp, Homo Sapiens
  misc_feature (41)..(42): n is a, c, g, or t
  misc_feature (44)..(45): n is a, c, g, or t
ctccttcccttttttccccttcaccctctccaccttccccnntnncgagtctgggtggcgaattcggcacgagggtggcctgatccgggcccgttggcggcgtcactgacgcttcgctccggtcctcggatcccgagcgcggggaggcagaccgactgtgagctgcttgtccccatcctgcggccgtcctggggacacagagccctccgtggtgcccggggattggattggagccaggacctcacttcctcctctgcccctgcccctgcccctcccagcacctggcccacaccctgcagcccgcccccatggtctggccctgggtggcgatggcgtccaggtggggtcccctcattggcctggctccgtgctgccctctggctcctgggggcagtccttctgatggacgcgtctgcacggcctgccaacccactcgtccactcgaagagagagtacccaacagggaggaaaatgagatccctgcccccagaccaccctgaacgggggtgaacctcgaaaatggacgggcaccctcaaatggcggctttccacccggagggcttccctaggcaagggacctgggtggggtttgaattgagggaccccgggaagccgccgggggaagccgggagggaagctggatgggcccatcttcttcccaggggggcattgtcacccctgaacccgggaaaaatcccgtgcccaaggaaaatgcagcgcttgccatcatgggagaaaaaacggccgaacccactttccaggaaggccccctgggggggaaaaacaagaacacccctttccccccgcccggggaacccctggagggccgccccggtccaccgtgttttttggggacgcaagtaataacggggggaagattttttggggggaaagaaagagggcccttaccccaataaagggggggctgctctgaattcccactccggggtctcccccgagggccaccctcccaagtggccacgccggaaaccccacacgggtaaattctttgggcgccaacccctgtaaagagacccgccccgggtactccccacccgggttacggcctacccctcccccacctacactttgggctggttcggaagaggagggagaggcgcgtctcccctggt

SEQ ID NO: 260091 - DNA, 1073 bp, Homo Sapiens
gttgaaagttatggtggagaattcagactttaccccctcacaagtaggatgtctctttaccttccttgctcggcagcttgcaaagcctgacaacaccttgtttgcaaacagaacactttttgatcaggtccttgaattcctttgtagtcctgacgatgactcccgacactctgaaagacagcaggtccttttagaattgctgcaggctggaggcatagttcaatttgaagagagtcgactcatccggatggcagaaaaagctgagttctatcaaatttgtgaatttatgtatgaaagagaacaccaatatgacaaaattattgattgctacttacgtgaccctctgcgagaggaagaagtctttaattacattcacaatatcttatccattcccggacacagtgcagaggagaagcagtctgtatggcagaaagcaatggatcatattgaggaactcgtgtccctgaagccttgtaaagctgcggagctggttgccacccacttttctggacatattgaaacggtcattaaaaaacttcagaaccaggttttgcttttcaaatttttgaggagtcttcttgacccaagggaaggtattcatgtaaatcaagaattactgcaaatatctccttgtatcacagagcagttcattgagctgttgtgtcagttcaacccaacccaagttatagagactctgcaagtccttgagtgctaccgtctggaagaaactattcagattactcagaagtatcaacttcatgaagtcaccgcttatctattggaaaagaaaggagatattcatggtgccttcctaataatgttagagagactacaaagcaaacttcaagaggtaacacatcaagggtgaaaataccaaagaggatccctcattgaaggatgttgaagatactatggtgggagaccattgctcctttgccagagaaattcacataatttgaaccagcagcaacgtgaaggccctttggtttccgttattggaggcaatgatggccccctcaaaaactgtccacgttcagccatttctcatctaacctctgaaactctgaaagcct

SEQ ID NO: 260092 - DNA, 1229 bp, Homo Sapiens
gggggccaagcggaagtggagatggcggagctgtacgtgaagccgggcaacaaggaacgcggctggaacgacccgccgcagttctcatacgggctgcagacccaggccggcggacccaggcgctcgctgcttaccaagagggtagccgcaccccaggatggatcccccagagtccccgcatcagagacttctcctgggcctcccccaatggggcctccacctccttcaagtaaggctcccaggtccccacctgtggggagtggtcctgcctctggcgtggagcccacaagtttcccagtcgagtctgaggctgtgatggaggatgtgctgagacctttggaacaggcattggaagactgccgtggccacacaaggaagcaggtatgtgatgacatcagccgacgcctggcactgctgcaggaacagtgggctggaggaaagttgtcaatacctgtaaagaagagaatggctctactggtgcaagagctttcaagccaccggtgggacgcagcagatgacatccaccgctccctcatggttgaccatgtgactgaggtcagtcagtggatggtaggagttaaaagattaattgcagaaaagaggagtctgttttcagaggaggcagccaatgaagagaaatctgcagccacagctgagaagaaccataccataccaggcttccagcaggcttcataatcctcggttccccagactcaccggacaccatctcctatgccttggagaccttctgtcacttggctcccttcttaccaccaccaagactgtcccactgggcctgacccacctatgagggaagaagtcccacctgggccagagggagttcatgtgttactcataacatgcatttcaataaaaacatctctgcggtgggccttgggtaggagagatgaacccttccggtgccaagctagtcccctctggtgtcctcgactgccctgctccctgtgtatctgcaaacctctgttctcccttctccattcatcaggaagggatctgctgggtaaagtcagactactgcctaccactttttcccaaagtagactgaagacacatcctgtgctgggcggagcagctgtgtttggatggtttcatttcagcatgagaacagactcaaatagaacggggagacttttccctcaacaaaaggaaagacagtcctatttgcactgtatcacccttgagatactactgttacagagattagaacc

SEQ ID NO: 260093 - DNA, 627 bp, Homo Sapiens
agggcgccccctgtgaagaccttgcccaaggccacattgagggtgagctcggcattatcatagtggcagcccagctccaggtcctggcccggtgcgtatttgaccacaaaggcccggtggctgtcgagccggcccccgccacagtcagggtacagcagggccatcagcggctgcaggaagcgctcccgcagtggtgtcatcagcggctcgtccagcccgagctcgtgcagcagcaccccgtagttgttcatggtgttgggcctccccttaggcatgtccgattgctcgaagtgctccagctcttccagcagggcctggcagaagggcgctgtgaaaacaggcacccggtagatgcgcttctcctccgatactgtacccagccgctggagaaggcccttgaggtctgcgtctggggacacgctgtactcagtcacggccaggaactcgggggccagagctgcatcctgcagtgagtcgtagacctcaggccgtgccgggtggtaggaactcgcgatgagggctttcctagctgctgactcctgccccagccgctgccgccgctccacctcctgctcaagctcagattgccccagtgagtgtctccaccaaaacgctccgtctcgcatt

SEQ ID NO: 260094 - DNA, 901 bp, Homo Sapiens
  misc_feature (693)..(693): n is a, c, g, or t
  misc_feature (699)..(699): n is a, c, g, or t
gcaacgggcggggcggggccgggcaagtttgttccccgagttcggaccctaggagccccccgcggctgcggcgcaggtgccctcggcctgagtcgggatggagctgcctgctgtgaacctgaaggtgattctcctaggtcactggctgctgacaacctggggctgcattgtattctcaggctcctatgcctgggccaacttcaccatcctggccttgggcgtgtgggctgtggctcagcgggactccatcgacgccataagcatgtttctgggtggcttgctggccaccatcttcctggacatcgtgcacatcagcatcttctacccgcgggtcagcctcacggacacgggccgctttggcgtgggcatggccatcctcagcttgctgctcaagccgctctcctgctgcttcgtctaccacatgtaccgggagcgcgggggtgagctcctggtccacactggtttccttgggtcttctcaggaccgtagtgcctaccagacgattgactcagcagaggcgcccgcagatcccctttgcagtcccagaggggcaggagtcaagatgccccgagggtactgaagccagccacgctgcgcccggccctgccccgggccttcctcgttgcctgggaggtcgttctagggatgctcctgacctccgtctcttggacctaagatggaatgtgtccccangctcanggattgcctgaaccaagaggccaggagcccccatgggccgcccagtaccatgcacactcctgtcccgaactccctgaggcctccccctcccttcagggcacccactgggttcccaggcctggaacccagggtctcctctttaactttcctacccccatgggtgggcacccacagagggcccctcaacccgagttcctggccc

SEQ ID NO: 260095 - DNA, 838 bp, Homo Sapiens
gcggttgaggggcctctgtggtgcccaccatggggttaggaagttaaagagagaccctggtttccagcccgggaacccagtgggtgccctgaagggaggggaggcttcagggagttcgggacaggagtgtgcatggtactgggcggcccatgggggctcctggcctcttgtttcaggcaatccctgagctggggacacattccatcttaggtccaagagacggaggtcaggagcatccctagaacgacctcccaggcacgaggaaggcccggggcagggccgggcgcagcgtggctggcttcagtaccctcgggcatcttgactcctgccctctgggactgcaaagggatctgcgggcgcctctgctgagtcaatcgtctggtaggcactacggtcctgagaagacccaaggaaacccccgcgctcccggtacatgtggtagacgaagcagcaggagagcggcttgagcagcaagctgaggatggccatgcccacgccaaagcggcccgtgtccgtgaggctgacccgcgggtagaagatgctgatgtgcacgatgtccaggaagatggtggccagcaagccacccagaaacatgcttatggcgtcgatggagtcccgctgagccacagcccacacgcccaaggccaggatggtgaagttggcccaggcataggagcctgagaatacaatgcagccccaggttgtcagcagccagtgacctaggagaatcaccttcaggttcacagcaggcagctccatcccgactcaggccgagggcaacctgcgcccagccgcggggggctcctaggctccgaactcggggaacaaacctcgtgcc

SEQ ID NO: 260096 - DNA, 1601 bp, Homo Sapiens
  misc_feature (42)..(42): n is a, c, g, or t
  misc_feature (1163)..(1396): n is a, c, g, or t
  misc_feature (1412)..(1420): n is a, c, g, or t
  misc_feature (1456)..(1468): n is a, c, g, or t
ggtacggtccggaattcccgggatatcgtcgacccacgcgtncgcgagttcggagcctaggagccccccgcggctgcggcgcaggtgccctcggcctgagtcgggatggagctgcctgctgtgaacctgaaggtgattctcctaggtcactggctgctgacaacctggggctgcattgtattctcaggctcctatgcctgggccaacttcaccatcctggccttgggcgtgtgggctgtggctcagcgggactccatcgacgccataagcatgtttctgggtggcttgctggccaccatcttcctggacatcgtgcacatcagcatcttctacccgcgggtcagcctcacggacacgggccgctttggcgtgggcatggccatcctcagcttgctgctcaagccgctctcctgctgcttcgtctaccacatgtaccgggagcgcgggggtgagctcctggtccacactggtttccttgggtcttctcaggaccgtagtgcctaccagacgattgactcagcagaggcgcccgcagatccctttgcagtcccagagggcaggagtcaagatgcccgagggtactgaagccagccacgctgcgcccggccctgccccgggccttcctcgtgcctgggaggtcgttctagggatgctcctgacctccgtctcttggacctaagatggaatgtgtccccagctcagggattgcctgaaccaagaggccaggagcccccatgggccgcccagtaccatgcacactcctgtcccgaactccctgaggcctcccctcccttcagggcacccactggttcccaggctggaaccagggtctctctttacctcctaccccatggtggcaccacagaggccctcagccgagtcctgcctgagtgttgcaagctcaggcctttaaggactgctgatgccccctcaggcctcccccaagtttgctgggctttggtggaagccctgagagcttcaggtcctgctcagcccgaggagcagtctggcatgggagtgaggccccgtccttctcactgcctggtcacatggtgcctagggatgcagggctggaggccagaggtgtcagcaacactgtgacccaccacaacctccagcctcccttttcagagcacagcattaaagtttggggaattctgtannnnnnnnnnnnnnnnnnnnnnnnnnnnnnnnnnnnnnnnnnnnnnnnnnnnnnnnnnnnnnnnnnnnnnnnnnnnnnnnnnnnnnnnnnnnnnnnnnnnnnnnnnnnnnnnnnnnnnnnnnnnnnnnnnnnnnnnnnnnnnnnnnnnnnnnnnnnnnnnnnnnnnnnnnnnnnnnnnnnnnnnnnnnnnnnnnnnnnnnnnnnnnnnnnnnnnnnnnnnnnnnnnnnnnnnnnggaccgggggtaaccnnnnnnnnnaaaaaaacccggcggggaatctggggtggttccccnnnnnnnnnnnnnccccgggggcaccccatttttttaaaaaacccccaaagggcgtttgagggttttattgtgttattccataaagggtccggccaccttgaaataaatttaaccccccccgcggacccctaaaagggaagggggg

SEQ ID NO: 260097 - DNA, 1217 bp, Homo Sapiens
tgaataccagcctgtctgcgagttagacgccagtcctggtggcccgggaagcccagatccgcatcagcggttctgcaccccacaccagcatgtgctcactgcctgtgccccgggagcccctgcgtcgcgtggctgtgactgggggcacgcatggcaacgagatgtcgggcgtctacctggcccggcactggctgcatgcccccgcagagctgcagagagccagcttctccgctgtgcctgtgctggccaacccggcagccacatccggctgccgccgctacgtggaccatgacctcaaccgcaccttcaccagcagcttcctcaattccaggcccaccccggacgacccatatgaggtgacaagagcccgagagctgaaccagctgctggggcccaaggcctcgggccaggcctttgactttgtccttgacctgcacaacaccacggccaacatgggcacctgcttaatcgcgaagtcctcccacgaagtctttgccatgcacctgtgccgccatctgcagctgcagtaccccgagctgtcctgccaggtcttcctgtaccagcggtctggggaggagagctacaacctggactctgtggccaaaaatggactgggtctggagctgggcccccagccacagggtgtgctgcgggctgacattttctcaaggatgaggaccctggtggccacagttctggacttcatcgaactcttcaaccagtgtacggcctttcctgcctttgagatggaagcctatagacccgtgggcgtcgtggacttcccccgcaccgaggccgggcacctggcaggcactgtgcatcctcagctgcaggaccgagacttccagccactgcagcctggtgctcccatcttccagatgttcagtggggaggacctgctctatgagggagagtccacggtgtaccccgtgttcattaacgaggctgcctactatgagaagggcgttgcctttgtccagactgagaagttcacattcaccgtgcctgccatgcccgcgctgacccctgccccgagcccagcttcctaacccaagacacacctccccaacctcagtcttcccatctgaacgatgggtcctgaggcacagctctgagcacagaggtcccttctgccacctaccatgcaccatgttccttgccaggcctccccaacccctggcctcaatttccctttctataaaatggaagatgtccag

SEQ ID NO: 260098 - DNA, 1255 bp, Homo Sapiens
  misc_feature (905)..(905): n is a, c, g, or t
cacagatattgatatagaaagtcgggtaataatgcggctgttcggtccgaatcctattatatcgtcgaccacgcgtcgggctcctggatgggtcccgactgctgcaggaggtggtgatgagcctgtccaagtgctactcctccctgcctggactcgatgaacgctgagatccgcatccgctggctgcagattgtggtccgaaacgactaactatcctgacctccacagggtgcggcgcttcctggagagccagatgtcacgcatgtacaccatcccgctgtacgaggacctcctgcaccggtgccctcaagtccttcgcgcttggaggtcttctaccagacgcagggccggctgcacaccaacctgcagcaatagccatccagcagatcctgtacccagggccagggctcccagcaaagagcccgactcagagcacaagcacggagctgggcaaggctgaagcagacacagactcggacgcacaggccctgctgcttggggacgaggcccccagcagtgccatctctctcagggacgtcaatgtgtctgcctagccctattggcgggctgaccctcgacctcccagacaccacaattgtgccttctgtgggccaggcctgccatgactgcgtctcggctctggccatgagctctgcccaggcccacaagcccctcccctgggctctcccaggcagggagaatggggagagggacctccttgtgtctggcagagacctgtggacctggcctccccactcccagctctcttgcactgcaggccctggggccagcccgcacacaccatgcctcctgtctcaacactgacagctgtgcctagccccggatgccagcacctgccaggtgccgccccggggcaagggcccccagcagccctatggtgaccngcacactgtgccttaatgtctgccgggggcccaggctgtgctgtccctgcagcacgcctccttgcagggatctgagccaccctccccgcacaagcctggcaccccgccctagggttggcagcctcagttggcccctggcagaggaacaagggacacagacattccctcagtgtgggggggcaggggacacagggagaggatggttgtcctgggggagggccctctggcccaggcaaccttagcccctcagaacagggagtcccaggacccagggagagtgtgggggacaggaccagctgtctcttgtagcttcctggggttgggaggcacaggggccaaagcaataaccc

SEQ ID NO: 260099 - DNA, 1234 bp, Homo Sapiens
  misc_feature (620)..(620): n is a, c, g, or t
ggctagtccagctgggtgcaggaggacttcaagtgtgtggacgaaagaaagactgatggctcaaagggtgtgaaaaagtcagtgatgctccccctttctactccaaatcctgtccttcctggagcaaggttgagggagtaggttttgaaaagtcccttaatatgtggtggaacaggccaggagttaaagaaagggctggcttctgtttacctgctcactggctctagccagcccagggaccacatcaatgtgagaggaagcctccacctcatgttttcaaacttaatactggagactggctgagaacttacggacaacatcctttctgtctgaaacaaacagtcacaagcacaggaagaggctgggggactagaaagaggccctgccctctagaaagctcagatcttggcttctgttactcatactcgggtgggctccttagtcagatgcctaaaacattttgcctaaagctcgatgggttctggaggacagtgtggcttgtcacaggcctaaagtctgagggaggcgagtgggagtctcaccaatctcttggtcttggcttcatggcaaccactgctcacccttcaaaatgcctggtttaggcagcagcttgggctggngaagaggtggtggcagagtctcaaagctgagatgctgagagagatagctccctgagcttggggccatcttgactttctacctcccatgtttgctctcccaactcattagctcctgggcagcatcctcctgagccacatgtgcaggtactggaaaacctccatcttggctcccagagctctaggaactcttcatcacaactagatttgcctcttctaagtgtctatgagcttgcaccatatttaataaattgggaatgggtttggggtattaatgcaatgtgtggtggttgtattggagcagggggaattgataaaggagagtggttgctgttaatattatcttatctattgggtggtatgtgaaatattgtacatagacctgatgagttgtgggaccagatgtcatctctggtcagagtttacttgctatatagactgtacttatgtgtgaagtttgcaagcttgctttgagctgagccctggactcccagcagcagcacagttcagcattgtgtggctggttgtttcctggtgtccccagcaagtgtaggagtggtgggcctgaactgggccattgatcagactaaataaattaagcagttaacataactggc

SEQ ID NO: 260100 - DNA, 952 bp, Homo Sapiens
  misc_feature (809)..(809): n is a, c, g, or t
  misc_feature (827)..(827): n is a, c, g, or t
gcactgctggctcaatgcctttgctgagatgttacgctttggtgacaggatgttctataaggattggtggaactccacgtcatactccaactattatagaacctggaatgtggtggtccatgactggctatattactatgcttacaaggactttctctggtttttctccaagagattcaaatctgctgccatgttagctgtctttgctgtatctgctgtagtacacgaatatgccttggctgtttgcttgagctttttctatcccgtgctcttcgtgctcttcatgttctttggaatggctttcaacttcattgtcaatgatagtcggaaaaagccgatttggaatgttctgatgtggacttctcttttcttgggcaatggagtcttactctgcttttattctcaagaatggtatgcacgtcagcactgtcctctgaaaaatcccacatttttggattatgtccggccacgttcctggacttgtcgttacgtgttttagaagcgtggactttgtttcctccttgtcactgaagattgggtagctccctgatttggagccagctgtttccagttgttactgaagttatctgtgttatttggaccactccaggctttacagatgactcactccattcctaggtcacttgaagccaaactgttggaagttcactggagtcttgtacacttaagcagagcagaactttttttgtggggctgggttgggggggagaagaccgactaacagctgaagtaatgacagattgttgctgggtcatatcagctttatcccttggtaaaatatatctggntttgttttcttgactctngtccaatcagaagaataaacattccatagtttgcttgggcccactgaaatttagccaaaaacaccttaagggaagaaaatcactttaaaataccctcctggggctttaaaaaattttttttccct

SEQ ID NO: 260101 - DNA, 892 bp, Homo Sapiens
ggggcgcgctcccgggtggcaagatggtggcgcgcaggaggaagtgcgccgcgcgggacccggaggaccgtatccccagcccactgggctacgcagctattccaatcaagttctctgaaaagcaacaggcttctcactacctctatgtgagagcacacggcgttcgacaaggcaccaagtccacctggcctcagaagaggactctttttgtcctcaatgtgcccccatactgcacagaggagagcctgtcccgcctcctgtccacctgtggcctcgtccagtctgtagagttgcaggagaagccggacctggctgagagcccaaaggagtcaaggtcgaagttttttcatccaaagccagttccgggtttccaggtagcctacgtggtgttccagaagccaagtggggtgtcagcggccttggccctgaagggccccctgctggtgtccacagagagccaccctgtgaagagtggcattcacaagtggatcagtgactacgcagactctgtgcccgaccctgaggccctgagggtggaagtggacacgttcatggaggcatatgaccagaagatcgctgaggaagaagctaaggccaaggaggaggagggggtccctgacgaggagggctgggtgaaggtgacccgccggggccggcggcctgtgctcccccggactgaggcagccagcttgcgggtgctggaaagggagagaacggaagcgcagccgaaaagagctgctcaacttctacgcctggcagcatcgagagagcaagatgggagcatctagcgcagctgcccaaagaaattttgaggaggacaaagcagagggatcgaagcttgctggcgggcccaccgccaaatcccgaacggaactgaacctgttaaaaacct

SEQ ID NO: 260102 - DNA, 979 bp, Homo Sapiens
  misc_feature (177)..(188): n is a, c, g, or t
  misc_feature (421)..(429): n is a, c, g, or t
caacaaaacctgtgtaatggccagcggtgattaattagaaatcacagacacctggtttatttcatttttgttaaagaactcacatgtttgaaaggaacactgaccattaaggtgcatttattagttctcaaaattcctaaaacaagatggggttgcatttgatttttaccccatttnnnnnnnnnnnnccagactgggtataattaagataccattaatactcttccccacccctgaccttgtatatgtgggattattttcttgtggttaatttattaaaatgtggaatgtacattttaaatacaggtaccaggagaaatgaacatttgcctgaatactatggctaagcatcataaataactttagaatctccttctaaacaaagaatgtttttgaaaagcccaaattagtaagttccaannnnnnnnncacaggtgactactgtaccagtgtggagaaatgggctggttaactgtgtgggcccagacagtcatttgtctatattcctagtgatgagaaattattccccctaaccttccaatgaaacaagtgtccacatagttctcatttttccctattgttgaaacattagtgagagggacccatgcatgttattaaaaattaagttcaaaacacttaaaataattctgtattagaaacttgactctatcataagtctcttcttttggaagtcatactgggctggttaaaggctccaattccattgttattaacatttaggaagcagaagactattccagctagttcaaacaagaggtttagttactacaacactgattcctggttggttgtgtgggttcggtaaggtctactcctcttcctctggcagaatttgctcctggattttgtggttcattctttggcaattttttagctatcgccatgaatatttcatttacattcattgatgttttagcggatgtcgccatgaataataaactattgtcatctgcatagg

SEQ ID NO: 260103 - DNA, 830 bp, Homo Sapiens
ggcagataagaagtggcttggaactcccattgaggagatgagaagaatgcctcggtgtgggatccggctgcctctcttgagaccatctgccaatcacacagtaactattcgggtagatcttttgcgagcaggagaagttcctaaaccttttccaacacattataaagatttgtgggataacaagcatgttaaaatgccttgttcagaacaaaatttgtacccagtggaagatgagaatggtgagcgaactgcggggagccggtgggagctcattcagactgcacttctcaacaaatttacacgaccccaaaacttgaaggatgctattctgaaatacaatgtggcatattctaagaaatgggactttacagctttgatcgatttctgggataaggtacttgaagaagcagaagctcaacatttatatcagtccatcttgcctgatatggtgaaaattgcactctgtctgccaaatatttgcacccagccaataccactcctgaaacagaagatgaatcattccatcacaatgtcgcaggaacagattgccagtcttttagctaatgctttcttctgcacatttccacgacgaaatgctaagatgaaatcggagtattctagttacccagacattaacttcaatcgattgtttgagggacgttcatcaaggaaaaccggagaaacttaaaacgctcttctgctactttagaagagtcacaaagaaaaggaattccctttcttcttactggaatttttcctgctgatgggaacagttccagtcaagggacatggggaggacattttgtggtttacgtaaaccttcctggccc

SEQ ID NO: 260104 - DNA, 988 bp, Homo Sapiens
  misc_feature (501)..(501): n is a, c, g, or t
  misc_feature (504)..(504): n is a, c, g, or t
cttttctccgtggccctttggcgcgtgagtgacagcggcccagacagagggggcgatgtccgcgtcgtggctggggccggtcgcggggcagactaatcccctgctcctggccagtggaggctcccgagcggatcctcgggaaaggggctccgaatgtcaagaaactgccctgctgggcgtccggggagtgggaaaataaagcactttttgtatcccgcccctcccccgtcacgtgaccacgcgaggcggaaagaagaaatccgaggaccggcgacgcctagaacaggagcccatgatgctgcccaaacctgggacctattacctcccctgggaggttagtgcaggccaagttcctgatgggagcacgctgagaacatttggcaggttgtgcctctatgacatgattcagtccagagtaacactgatggctcagcacggatccgatcagcaccaggttcttgtctgtaccaagttggtggagcccttccatgcccaggtggntcncctgtacatcgtcctcggggagctccagcatcagcaggacagaggctccgtggtgaaggcgcgcgtgctgacctgtgtggaggggatgaacctgcccttgttggaacaagccatccgggagcagagactgtacaagcaggagcggggcggcagctagtaggaaacagcagcctagcaacaccctcacctgcttcagagcccgaaccctctggagctgcaggagcccgggagagcacagacgcctccccagcgacggccttgtctggagctcgaaagccgaggggcgggtgatgaatccagccccttcccctactttgggattggctcagcaatgagaacccagaaagcatgccataaatccgacagccccaccccaggagactgcaggtggccgagcttgggcgccggggccgtgcttggtgtggggccatggagggttccagaaggtcctggtgaataaaagcccagggggcgtgctcttgaa

SEQ ID NO: 260105 - DNA, 1244 bp, Homo Sapiens
  misc_feature (624)..(624): n is a, c, g, or t
  misc_feature (684)..(684): n is a, c, g, or t
  misc_feature (858)..(858): n is a, c, g, or t
aagttgattgactatggtctctccggctaccaggtaagagtctgccgaaggtgaaggccatggacttcatcacctccacagccatcctgcccctgctgttcggctgcctgggcgtcttcggcctcttccggctgctgcagtgggtgcgcgggaaggcctacctgcggaatgctgtggtggtgatcacaggcgccacctcagggctgggcaaagaatgtgcaaaagtcttctatgctgcgggtgctaaactggtgctctgtggccggaatggtggggccctagaagagctcatcagagaactcaccgcttctcatgccaccaaggtgcagacacacaagccttacttggtgaccttcgacctcacagactctggggccataggtgcagcagcagctgagatcctgcagcgatttgactatgacgacatacttgacaacaaagctgggatcacctaccgcggcaccatcatggacaccacagaggatgtggacactaggctatcggacacaatctactagtggcccagattggtctaagcaaaagcatttcctgcctctccatggaattcaagagtgagggcaagcgccactataagcaaccaccgtcgatccatgcaattcctanggagtcaatgatggtagccatctcccctatacttcaaatgcgcggcagtaatggcaaggncacctccccaataaaattctggcaaaaccccttgcgcgcttctactccttttttaaaacctgttatcatggacctgctgcgcccgaatataataggggccaaaacccagcacaggttgatttacacattccttgatagcggggtggaaataccccccgtgttatatttctatangcctctccccgagggcctttatacctattgcccctcccgcactcccagaaccccgatagcctaccctggtcgcaaaactactggtcccaggctcccaaccccgactcgtggacaagggaggatataccataaaaatctttaaccggggaaaaacagagcccatcaacactctcaatctcacacagaggagcgctctctgaaaacgcggctcacattgttcagatataagggggggtcgtcatccctcagctaaaaaaagtggtcccctgatgggacctacagctatgtcgaggggggcgaaaagcctaatccagcacttaaaacatttaatcacgccggaaattgccctacaggacacaccaagactttcacaatgagagcaaaca

SEQ ID NO: 260106 - DNA, 1085 bp, Homo Sapiens
  misc_feature (797)..(853): n is a, c, g, or t
ccggagctggcactggtccggtttgtggtggaagattatgacgccacctcccccaatgactttgtgggccagtttacactgcctcttagcagcctaaagcaagtgtgtaccgccacatacacctgctttccaatgacggggcctcactgtcaccagccacgctcttcatcctaatccgcatccagcgctcctgagggcccacctcactcgccttggggttctgcgagtgccagtccacatcccctgcagagccctctcctcctctggagtcaggtggtgggagtaccagccccccagcccacccacttggcccactcagcccattcaccaggcgctggtctcacctgggtgctgagggctgcctgggcccctcctgaagaacagaaaggtgttcatgtgacttcagtgagctccaaccctggggccctgagatggccccagctcctcttgtcctcagcccacccctcattgtgacttatgaggagcaagcctgttgctgccaggagacttggggagcaggacacttgtgggccctcagttcccctctgtcctcccgtgggccatcccagcctccttcccccagaggagcgcagtcactccacttggccccgaccccgagcttagcccctaagccctcctttaccccaggccttcctggactcctccctccagctccggaacctgagctccccttcccttctcaaagcaagaagggagcgctgaggcatgaagccctggggaaactggcagctaggtttgggttctcttattcttcgagacagggtctcgctccgtcnnnnnnnnnnnnnnnnnnnnnnnnnnnnnnnnnnnnnnnnnnnnnnnnnnnnnnnnngctctagcgatcctcccatctcagcctcctgagtagctgggactacaggccacaggccaccaaatcctggctacctgtttacactccactgtagacgatggcggcagggcgccgccgtcctccctatgttgcccaggctgctctcgagcctcctgacctccacgtgatcctcctgtcccatgcttcctacgttgctgggactcccggctgtgccccactgcctgccctgttc

SEQ ID NO: 260107 - DNA, 801 bp, Homo Sapiens
  misc_feature (646)..(755): n is a, c, g, or t
  misc_feature (770)..(770): n is a, c, g, or t
ccctccaatccacttccctgcagcccacttccctgcacccagggaccaggacaacctgctccatacgtgagcatacatacatccttgaaatttccaaatgccaaactttctgtgtgtctctctagagccattgaattctcctgagacacactctctgggcctggccaggggtgtgggcctgagccaggggccagtaggggagctggagccttcaaggatggagccaaatttcttttgagccttggaagccttggaggaagccgccctgcagtcctggggcagagaagactatgccacagagagggcgaggggctggccttgtggtcaaaaggccccagagactgtcctgaagccccaagggtggccactggcatggttttaggcaagaactggagcctgcagacttagactaggaggtgctccagacactccttgagtcaggtaaagtttattttcaaacccccatcttgaggcaaattgccaggggctggagcataaggaatagatgagactgaagaagttagctgtgatataggctgaagtgtcagagaactagagctaaagaagcctcaaaggacatcaggaccaaatcttccaatatgtagataagaaacaaaggtcctggccaggcgcgatggctcacacnnnnnnnnnnnnnnnnnnnnnnnnnnnnnnnnnnnnnnnnnnnnnnnnnnnnnnnnnnnnnnnnnnnnnnnnnnnnnnnnnnnnnnnnnnnnnnnnnnnnnnnnnnnnnnttagccaggcatggntgcatgtgcctgtaatcctctccgtgccgaa

SEQ ID NO: 260108 - DNA, 447 bp, Homo Sapiens
gggaaggtgcgcagcaggtcgaggatgtagtggcgcccgtcgttgccaatgatgccattgcactcgaccgaggagcagagctccacctcctcgtcacggtcgttgagcacctggtgccgcaggatcttgaggggccgactcgtgcgctccagcagctccaggtaccgcgggtgtgacaccacggtcttgccgaagtcgatggagccgtagatgacgctctgctcctggtcccgctccaggatgccggggatgatggactgggccgtgacccggtagccgcggtaatccaccaccacagtaaacagcgtgtacagcccctccacgtccaccgcgttgtacgtgcggacgccattcaggtcgttggtgggcgccacgtaggccgccacgtcccccccgaagtcattgtagtggtctcggacgtcgaagcccaggctgaagaagatgttg

SEQ ID NO: 260109 - DNA, 1066 bp, Homo Sapiens
  misc_feature (937)..(937): n is a, c, g, or t
ctgccagcctcaccctctgcagttagcatggttggcctgatgcagggatcccgagggattactttttagaccttctttcacattcagaaaagtagtatagattcaggagaggcaagaaaattatgctgtccatagaagtcacccatgaagactgatgccaccacctgaaggctcatgattgttaaaaatgtccacgggaacctctcgtccacaggaggtttgtctcaacacttcccatttttacggcattggcattgccaagcatggggaagtatctgctcttctcatgttaaaagtggcccagcttttcttaactcagtccaagctgacttgtttagctgcactggaatttcttaccaaccaaatatttgcatcgagcaaagggggctgtgtgcacctccctaatggcagcgatgatggctgctgtcattcaagcccatcttcagacgtcacagtctggaagtgaaatgtccacaaacatctgtggcagaaaaggctatacggaccacccagttgtgctgcagctttacagagcaaggaagggttgtggcaaataaatgattaacctgcctcgactgtgctgagggcaacaaaggccatctcaccaaaggattattcgatgccattaaatcatcccgtgaccttcctgcttccgagtccatggcctttgcccagggcatgtactcccctgagaggccttctgcctagaaagatctatgactgggttccaaagttgaggcctaggtttttgctgggatttagatattttcaggcaccattttgacagcattcaggaaaacggttattgaccccatagactagggtaagaataaaggcaataaatttggtctgactcagaatataggagatccatatatttctctggaaaccacagtgtacactaaaatgtgaaattgaaggttttgttaaaaagaanaagataatgagcttcatgctttgtttaattacataatgatttcccatacgctatttctggtgaatgcagcagggttcttaacgttatttcagtggcaatggcttgaccttatcaccaaaagcatgtgtg

SEQ ID NO: 260110 - DNA, 420 bp, Homo Sapiens
  misc_feature (20)..(20): n is a, c, g, or t
  misc_feature (33)..(33): n is a, c, g, or t
ggtgccaacacagccccccntgcctacgaatgncaaatatttggttggtaaagaaaattcccagtgccagcctaaaacaagtccagcttggactgaagttaaagaaaagctgggcccacttttaaacatgaaaaagagcagatacttcccccatgccttgcaatgccaatgccgtaaaaatgggaagtgttgagacaaacctcctgtggacgagaggttcccgtggacatttttaacaatcatgagccttcaggtggtggcatcagtcttcatgggtgacttctatggacagcataattttcttgcctctcctgaatctatactacttttctgaatgtgaaagaaggtctaaaaagtaatccctcgggatccctgcatcaggccaaccatgctaactgcagagggtgaggctggcagtcc

SEQ ID NO: 260111 - DNA, 1911 bp, Homo Sapiens
  misc_feature (55)..(69): n is a, c, g, or t
  misc_feature (1629)..(1777): n is a, c, g, or t
  misc_feature (1787)..(1801): n is a, c, g, or t
  misc_feature (1825)..(1834): n is a, c, g, or t
  misc_feature (1841)..(1849): n is a, c, g, or t
ggggaacactaaagatgttttgaatgaattatagtccactggcattttagtgtannnnnnnnnnnnnnnagaaacacacatttctaaaaatgtcatgttacattcctgcatgtcccttttgatagcattagtggatccattggatttcttttttctttttgtgagacagcttttagtcttacctgaatttatgtgtgtttttccgacagtggttaataattatattggtgatgtagcagcaattgtgttggcagggttttcatatattattagtaattaacactaactgttggactgacttgtgtacactgtgttaaacatgatttaaaagctattaagagtactttgtgttagcactcttaaaaacgctaacagagatcatcattagctgtgaagatttgagttgtatatacctgcactgatattcttatcaaaaatttctacattagctttaagtgttcagattaacacttttgaaatttttgtagcttttagctgattaatgagaaaaaattaaatatttccagggaaagttttaaattatcatttaatttatttttttaaaatgagaggggaaagctgaaaattccttgttaagcacacaagggaaaaagaatggcccctacctattatcatgcaaaaatgctttgttggcacctcagattaatcatataatagctatagtctcttcagcatttgtttaaattttagaaaacctgtataaattactggtgcataacttaaagattattctgcctttggctaattgagtaattcccctccagcactagagaccgctcagtgctcttactagatgaactcagtaacgccttgagctgggttgattgaggatgtgtgaaaagctcacagagcccgatgcctgctgctatttcacggcaatgagcctttttctttctacactgaagattttcttcttatttaatgtggtttattttgggctcagaaataattgctctgttgaaaataatcctttgtcagaaaagaaggtagctaccacatcattttgaaaggaccatgagcaactataagcaaagccataagaagtggtttgatcgatatattaggggtagctcttgattttgttaacattaagataaggtgactttttccccctgcttttaggattaaaatcaaagatacttctatatttttatcactatagatcatagttattatacaatgtagtgagtcctgcatgggtactcgatgtgtaatgaaacctgaaataataagataataagaaaagcaataattttctaaagctgtgctgtcggtgatacagagatgatactcaaattataataaaactcttcattttgtgaattatagaagctactttttataaagccatatttttttagggaaactaaggagtgacatagaactgatgaatgagtaaaagtaagttttgctggatttttgtagaactctggacgttgaggattcattatgctgtggttaactttaaatatttttgaattccaaatatctgaattaatgagccttgtctttacaaatatgtgccattgtgcaacatcggtggattttctaaaaataatgtaaatgtcttctattaaatgttgagtgcaataaaatacagaagaattnnnnnnnnnnnnnnnnnnnnnnnnnnnnnnnnnnnnnnnnnnnnnnnnnnnnnnnnnnnnnnnnnnnnnnnnnnnnnnnnnnnnnnnnnnnnnnnnnnnnnnnnnnnnnnnnnnnnnnnnnnnnnnnnnnnnnnnnnnnnnnnnnnnnnttttttgcgnnnnnnnnnnnnnnnaaaaaattttttaaaacctttttnnnnnnnnnnccccccnnnnnnnnngggaaaggggaaaattttttctcacaaaaaacccggccacacaaaggggtttgatccccccc

SEQ ID NO: 260112 - DNA, 934 bp, Homo Sapiens
  misc_feature (287)..(287): n is a, c, g, or t
  misc_feature (559)..(581): n is a, c, g, or t
gagggattcccagctgcagggccacagtgaagtggctggttttagtgtctcggacgatgctagtgttcatggctgactggataccccatcgccactgcaggtagcccacggtgttcttgtctaggttccgagctaggacagtggtcaggccgggtcggattccacgggatgaaaactgcagagcacagtttgttgtcacaaagcatcttggtgtgagattacggaacagcttgagaccgaacaaagccccctgtaggtcctccagctcccaaattcccaactctccnccatccctttgccgaagttactcgtctgagcgcaaagttaatggaacctcctccatttccattctggggttgagaggcttccagagaggatggctgtgtctgtcgctgtcaagggtgcctcaatggactgggatatgtgcattttattaatttcaatctgcggaaagctactgccggacacatcttcatactcctcatcatagcgatcaaaaaggtcggtggcatctactccaacgctgatcgttcccttgggattggttcgctgctgcaannnnnnnnnnnnnnnnnnnnnnngcagccgctcaaactcctctcgaatttcagcaggggttctcctcctttccacaacctcccatccttccatttccagtcctctcttcccatatatatcatagatggccctggtttgggggtcactaagcacttcataagcctggtgaacaaggttaaacagtcgttccgcctgtgacttgagctctgggtctctgtgcttgtctggatggtagagcatacagagcctccggtaggcagctttcagctcttcagaagaggcctccctgcgcacgttcagcaacgagtaatagtcttcattgtccagctcctcctcgctcaaggccgtcgccatcttcgcaacctttcaccccccc

SEQ ID NO: 260113 - DNA, 1510 bp, Homo Sapiens
  misc_feature (37)..(37): n is a, c, g, or t
  misc_feature (998)..(1037): n is a, c, g, or t
  misc_feature (1322)..(1322): n is a, c, g, or t
aagccacttactttataattaaagtggaagcagaatntcccacccttgctcgatgggccataggtcagactctgatgattaaccagctcatagatatggagtggaaatttggagtgacatctgggagcagcgaattggagaaagtgggaagtatatttttacaactaaagttggtggttaagaaaggaaatcaaaccgaaaatgtgtatatagaattaaccttgcctcagttctacagcttcctgcacgagatggagcgagtcagaaccagcatggagtgtttctgctgatttctgtccctgcatctcccctggccccgttccctgccctcctcccttccctgggtgactgctctgagaggcacttcactcacaggcctgtgggatgctccatggggccctgctggctccatggggcccaggtgcaaagggtttctgaaaaacagcaggattaagtactgaaagagcccaacacaattaccctgtaaactctctgttagggcaaccaccaccacctgtcttccaggacacatttttagatactctgacaggccactgcatctcagattcaggggagaaaataagttgtcacctccccttcaaagttccagagtaaacaaatggtgccatcattcaagataacatgctgatcaccctcctcccaaaaagcaagagcttgtttatggctgaggaatcggcggattgtctgaatgacacatatacagagcccccacggatttctgcacactctgggtctgtgctggtggaacattgccaatcagttcttaatgaggcacctgtgtgtaaatacatgcttggtcttctctgcagagaactgaggctaaactctgtccctacttctggttttgccctgtcatgtcgtaacgaggtgggccttttgaggccattttagtttgagttcgagccaaccacctctgttggttagatgatgaataaaaaggttctgaagaacaacccgtgtcagagagggggacaatnnnnnnnnnnnnnnnnnnnnnnnnnnnnnnnnnnnnnnnncttggggggccgccctcgagccttcgaaaaagctttttaaaaccctttccttttgggccccgcgggcccccgcctagggcaacagtgaaaaaatgggcccataaaaccggtatttcccaaaaggaggatcccctggcccattcacaataaggggacttagggatttcccttaaccaaaaatataaaaaatacggccctccggtgggggcccacagccgcgaaacgggggggtctgggaaacagaaaatcccgcggtaagaggattgtactcctggagcggggtcnaaataacccggcggggggtcctaatcacacagacacgcgaatgtggaacgcggcgggggacactcggcgacatgagcctagataattgtcagcagctgctgccgcccctggggttgcccttatatctaaaaaactgacacctggcgggccgcccgcgcgtcacaccaacggcaggcattacgtgggac

SEQ ID NO: 260114 - DNA, 1085 bp, Homo Sapiens
gaggctggaccggtccggattcccgggatcgggatccctacgtcccgcgtcccccgagcgctcggagcctacgcgcccagcgctaccgaaacccagggtcccgggactggtagagacactgcggaggtttcgaggggacgtgaccttggacccggacaccgccaaccctgagctgatcctgtctgaagacaggcggagcgtgcagcggggggacctacggcaggccctgccggacagcccagagcgctttgaccccggcccctgcgtgctgggccaggagcgcttcacctcaggccgccactactgggaggtggaggttggggaccgcaccagctgggccctgggggtgtgcagggagaacgtgaacaggaaggagaagggcgagctgtccgcgggcaacggcttctggatcctggtcttcctggggagctattacaattcctcggaacgggccttggctccactccgggacccacccaggcgcgtggggatctttctggactacgaggctggacatctctctttctacagtgccaccgatgggtcactgctattcatctttcccgagatccccttctcggggacgctgcggcccctcttctcacccctgtccagcagcccgaccccgatgactatctgccggccgaaaggtgggtccggggacaccctggctccccagtgactcgggccctcctggaggagtcctgttgcctctcctgcccctccaggccactgagtgttttggccacttggaggacctgggaggagggagtgtgtcctttgagcaagaggaggaactcctggtgcctttctgagcctgccgtgggagaaccccaattctagcactccaggaaactgtgggagagtgtggggcaggctccgtcctccctgggagacccctccagccaccgggtgccacttaatgccaacagcccttaccaaagctgggagccccattgccccggcagctctggcctgtggttccagaagccgagaaaactccactggggcttgcagaatcccagggttcacctaagctgcacagttcctgcagctttgccagccccctgaaacgcttaatgatt

SEQ ID NO: 260115 - DNA, 368 bp, Homo Sapiens
ggtgtgaggcacacaggtaagaagaaatgtcaacattaaatgtatgacttacttggtacaaaaattttttaaaaagggaactaccttgacattgtgtattaaatgtttacctaagactataatctcaagtatgatgtttgtttaacatatacctctcaaaatttatcaccactcaatgacactgcatcaaaattgactataaaactaattcaagaaatatttatatataatttttaatatacaaaaaatatgtagcctgatggaatggctttccttttcaaacattatattctaagtttctatacaaatgaaatctttacctctgcatattaatgagccttgccataattactgtagagtggcttttc

SEQ ID NO: 260116 - DNA, 777 bp, Homo Sapiens
tcaaaatggagcgagagcaaaggggcgtcctcagtcctcaacctacaatcactgtatggaatcggtcctggcagctgaacataggaggtcactggaacaagtgatagtgcagattggctttcaaacatcctcctggcttgagttttatcagctacaatgtgggtcctcttttgaagccttaattcacaacagcagctttttgggggtggggctgggcgggtgttgtcattgttctttcccttcctgtaagtgtcgctagttgctgcctcgtatctcaggtttttctctgtttttgagaaatggacagttttttgaccaggatgtgacttcatgtttcctatggtgacttctaaaaccagcacagaatgatatgactcaacacagaccgacttggttatggggatgatgagccgcacagacctcactagttgtgcacaaataatgtgctatgatggggtgtaaagtgaaggcagaagagggtcagccgcattgttatgatactgggaaagtgctggtcaacgatttgagttagtttttagatatacattgaaatctttaatcagacattctcaagtttcacacagtagtttttgatgttatgtacacacacaccaaatgtgtaacagttcaccacttccagagtgtggtcatgcccaaaacatgtttaagaaaggaaagcagtagctccttgctaacgatgtttcaggaggtttgggggacttggttttaatgagcttctgtcatttagggcttctcttggccatggtcccccttcct

SEQ ID NO: 260117 - DNA, 963 bp, Homo Sapiens
  misc_feature (739)..(739): n is a, c, g, or t
  misc_feature (747)..(747): n is a, c, g, or t
  misc_feature (749)..(749): n is a, c, g, or t
  misc_feature (751)..(754): n is a, c, g, or t
  misc_feature (765)..(801): n is a, c, g, or t
aaggtagcgaggcctgggtggcgaattcggcacgagggttagtttttagatatacattgaaatctttaatcagacattctcaagtttcacacagtagtttttgatgttatgtacacacacaccaaatgtgtaacagttcaccacttccagagtgtggtcatgcccaaaacatgtttaagaaaggaaagcagtagctccttgctaacgatgtttcaggaggtttggggcacttggttttaatgagcttctgtcatttagggcttctcttggccatggtccccttccttctggaactgtgatgtagtcacatcctacagcctttagtgctggttcactagtgtcagataatcagttcttggaatcgagactgccgtggcgaaggggtggcctcggaggcaggctctggagctgcttggatgtctttaggtggggtggtggctggctctcttcagcatgtaattggggaaaccctcgcgtctactaggggtgatacagatggtgattttaaagagcaaaactagacttctatgtgagaagtgctggaaaatgatttaggacatgtgtaaagttagatggaaagactgtaaatgtttaatatgaatatagtgttcttttgaagtaaggccagctgttgaacggttaaactgtgcatttctcattttgatgtgtcatgtatgttaatgtatgaaatgattaaataaaatcaaaactggtacctgtttatacataaatacgaaanaaaaaaananannnnaactcgaggcnnnnnnnnnnnnnnnnnnnnnnnnnnnnnnnnnnnnnacatggtccataactgtttcctgacccagcttcttgtacaaaggggaagatctggccgtctccctatagggagtcggtattaatttccataagccaggtttacctggcataaatgaatcggctgcagaacccggggaatttaacccccccaatgaaccgggc

SEQ ID NO: 260118 - DNA, 804 bp, Homo Sapiens
tacaggcaatgaatccagatagaatataaccatccatttacttacaagggtcaatggcccttccaaaccctagagaatttagattccataaggatggtatttttacaatttaagcctccaagaccacagacgagggacttccaggtgatctatccacctcactgcagatcagggtgaaggatcctttgaaacaaagtacagtctcctctcacttaaccctggaccattagaacctctagggcctgtaacgagtatacctttacaaggcaccagcaggcggcagagcagagctcaggacttgagatgactcagttgctcaaaaggtgaaggagaggctctcacttctaaaacgcagaaagacaggacacaggagaggcaaagccaagggggcacccaggagatgcgggagaaggactggtacatttgcagacaccaggcctgcttattctgcatagacaatgtaacatggctgagctgcccagcagagcttcggagaattacgctgattcacctctcaacctgggcggggtacacaaaggactgtacacaagatgaaatgaggattatttttggtcaaatgttcccaagaagggggcaaaagtaaaacaaaaggaggctggcagcccctgacacaagactagcaggtagtttccgccgcaaactgaaccttatcagcttaacacacccacacagcagccctgagggcatcagtgaggaggaagtacctcctttggggtcctcttccccaagaaagcctcgacgcgtgggtcgacgatatcccgaaattccggaccgtacagcctt

SEQ ID NO: 260119 - DNA, 2086 bp, Homo Sapiens
  misc_feature (17)..(17): n is a, c, g, or t
  misc_feature (1738)..(1884): n is a, c, g, or t
  misc_feature (1902)..(1918): n is a, c, g, or t
  misc_feature (1933)..(2005): n is a, c, g, or t
ttttctcctcacccccntccttttcctctttcccctccccagcagcgaggtctgggtggcgaattcggcacgaggcagcggcacagcgaggtcggcagcggcacagcgaggtcggcagcggcacagcgaggtcggcagcggcacagcgaggtcggcagcggcacagcgaggtcggcagcggcagcgaggtcggcagcggcacagcgaggtcggcagcggcagcgaggtcggcagcggcgcgcgctgtgctcttccgcggactctgaatcatggcgaccacggccacgatggcgacctcgggctcggcgcgaaagcggctgctcaaagaggaagacatgactaaagtggaattcgagaccagcgaggaggtggatgtgacccccacgttcgacaccatgggcctgcgggaggacctgctgcggggcatctacgcttacggttttgaaaaaccatcagcaatccagcaacgagcaatcaagcagatcatcaaagggagagatgtcatcgcacagtctcagtccggcacaggaaaaacagccaccttcagtatctcagtcctccagtgtttggatattcaggttcgtgaaactcaagctttgatcttggctcccacaagagagttggctgtgcagatccagaaggggctgcttgctctcggtgactacatgaatgtccagtgccatgcctgcattggaggcaccaatgttggcgaggacatcaggaagctggattacggacagcatgttgtcgcgggcactccagggcgtgtttttgatatgattcgtcgcagaagcctaaggacacgtgctatcaaaatgttggttttggatgaagctgatgaaatgttgaataaaggtttcaaagagcagatttacgatgtatacaggtacctgcctccagccacacaggtggttctcatcagtgccacgctgccacacgagattctggagatgaccaacaagttcatgaccgacccaatccgcatcttggtgaaacgtgatgaattgactctggaaggcatcaagcaatttttcgtggcagtggagagggaagagtggaaatttgacactctgtgtgacctctacgacacactgaccatcactcaggcggtcatcttctgcaacaccaaaagaaaggtggactggctgacggagaaaatgagggaagccaacttcactgtatcctcaatgcatggagacatgccccagaaagagcgggagtccatcatgaaggagttccggtcgggcgccagccgagtgcttatttctacagatgtctgggccagggggttggatgtccctcaggtgtccctcatcattaactatgatctccctaataacagagaattgtacatacacagaattgggagatcaggtcgatacggccggaagggtgtggccattaactttgtaaagaatgacgacatccgcatcctcagagatatcgagcagtactattccactcagattgatgagatgccgatgaacgttgctgatcttatctgaagcagcagatcagtgggatgagggagactgttcacctgctgtgtactcctgtttggaagtatttagatccagattctacttaatggggtttatatggactttcttctcataaatggcctgccgtctcccttcctttgaagaggatatggggattctgctctcttttcttatttacatgtaaataatacattgttctaagtctttttcattaaaaatttaaaacttttcccatnnnnnnnnnnnnnnnnnnnnnnnnnnnnnnnnnnnnnnnnnnnnnnnnnnnnnnnnnnnnnnnnnnnnnnnnnnnnnnnnnnnnnnnnnnnnnnnnnnnnnnnnnnnnnnnnnnnnnnnnnnnnnnnnnnnnnnnnnnnnnnnnnnngaaaagaaggcaggagcnnnnnnnnnnnnnnnnnggggccgttgccggnnnnnnnnnnnnnnnnnnnnnnnnnnnnnnnnnnnnnnnnnnnnnnnnnnnnnnnnnnnnnnnnnnnnnnnnnagaaacgggggggaatctttttacacacaaagaaagagcgcgggcccaaaagagaaaatggcgggtgggaaattacgccgc

SEQ ID NO: 260120 - DNA, 461 bp, Homo Sapiens
  misc_feature (67)..(67): n is a, c, g, or t
ggcccagggggtggatgcccctcggtgcccctcaaccattaactaggaccccccctaataacagaanaattgtaccatacacagaattgggaagatcaggtcgaatacggcccggaaagggtgtggcccattaactttgtaaagaatgacgacatccgcatccctcagagatatcgagcagtactattccactcagattgatgagatgccgatgaacgttgctgatcttatctgaagcagcagatcagtgggatgagggagactgttcacctgctgtgtactcctgtttggaagtatttagatccagattctacttaatggggtttatatggactttcttctcataaatggcctgccgtctcccctcctttgaagaggatatggggattctgctctcttttcttatttacatgtaaataatacattgttctaagtctttttcattaaaaatttaaaacttt

SEQ ID NO: 260121 - DNA, 437 bp, Homo Sapiens
atcatagtatatatatataggatttggtgcttccatactttcaggcatccactgggagtcttgaaacgtgtcgccctgggataagggggacaactgtatgcacaattctttgtccaaaggactcatcctcccagggaggaagggagaagggtgaagatgctcagagtacaggtggccactggctctcccaggacattccatccatttctggaacgtcattatgcttcagggaggtcataccggacactcactactgctcaacagctaagcagtagaaatgaaaacagatgttctttgtaccttgttcagctctaccctgagtattctatggtagaaacttcaacccttgtccataaatggggattctgctctcttttcttatttacatgtaaataatacattgttctaagtctttttcattaaaaatttaaaacttt

SEQ ID NO: 260122 - DNA, 850 bp, Homo Sapiens
gaacaatcataaaacagggtaatctttactgcatcaaattcccaaaactacgcctttgaagtaagttgacataatacttgttgtttcttctcaaatttttaatggttctccacggtatgctaggtcctttattttctcattggctgtaatttgacaagttctcccaaaagcactatcatgaacttaattagataatactttccagctgtacttaaatcagaaggatcgtaggcctgataagcaggtcaacctgaagctaccaggcagctctggaggctcccgtggccatagctaacagtgcacaggagggcccctggcccaggatgagccctcagaaccttttagagagagtgaaattcagggtctactgggtgtccaagctgcagagtggagcgtgagaggtcagctgccatgtgatagaaagagctgacataagagaaaagacccccacacagtgaaaagctggaagagaaacaaaactcacaacctgacagcagagttcctggttccaactgttgagacctgtctctacctccaatggtcacagtatatagttacccaggcctggaaatctccctcttttcctaattagtttaactggtgttcctgttgtttgcaaacagcaactgcatcttcagacagcactgagcaagtaaaaggtgtgggacggtcctgaaaggagatgatgggaaggcagagctggctggcagcaatgtctctctggccagaaggtcaggggcggcctcatctgagtagcaaacacctttatatttttgaaattacttgtcctacttcctggtactacttaaaccattctgttgattaagctgggtaatttagtatcaatgcc

SEQ ID NO: 260123 - DNA, 1045 bp, Homo Sapiens
  misc_feature (56)..(56): n is a, c, g, or t
  misc_feature (868)..(920): n is a, c, g, or t
caccccaaagccaggcctgggtaaccgggccggaaatttcgtaggtagaggagcangagactggggattttcacaaaagaggcgaacaaccccacagaccgacgggagtgcggcgacctgtgattacccccgcagggtttctctaaatgcgcgtttgagaggagctgcactggatggcggggaccgcaacaggactcttcgagatggtccaagggtggcatcggaaagccacctcctggtggcttcttgttagtcccagttttggaggggccttttgcactgcccagttacctgtatggcgacccccttcgtgcccagctcttcatcccactcaacatcagctgcttgctcaaggagtggcagcgagcacctgtttgatagctttgaacccgaaacgtactgggatcgaatgcacctcttccaggaagccattgcacacaggtttgggtttgtacaagataaatattctgcctcggcttttaacttccctgctgagaacaagcctcactatatccacgttacaggaacagtgtttctgcagctgccctactcccagcgccaagttcgcaaggcagcaacggcggcgggggaactccgccagctccaccaagcagaagcatgtcctgcgaggaacgggtccgcctacaacctgggcccctaccaccaccaatgctcacgcaaaaacatgggtggctcccagccgcccacaagggggcatggaaaaaccattggcctggaatcgggccgcctggaaaaggacatttccacggaactttcctgcaattcaaaccgtggaaaaaacccgggctgggctcccgttatctcgggaaggaaataggccccgcgggaaaaagaatggccaggcccnnnnnnnnnnnnnnnnnnnnnnnnnnnnnnnnnnnnnnnnnnnnnnnnnnnnnaaaagaccgcctcggaaaccacctggccccctcaaaacccccggggcccaaacgcaccccccactttcgggctctctaggacgccccagtaccccacctgtggtgtggtcaaccccacccaaggc

SEQ ID NO: 260124 - DNA, 1109 bp, Homo Sapiens
tgtggggtgtaactactagctttagattacccctatacacaagaatggccaacctaaaattatgtgtgtcttgtacagttagttatattagcagccctctgagatggcgtatctatcggaaggatttcaaacaccaattgctttacctgaacaaatggtgcttaccctttgaacagcagagtgaccatgtagaaggaaggaaaagggcaaaatcgcttcagttaaactgaaattaaatgaacaataaggcaactatataagtaacttctagtagcattgcctgagagacaaattattgtttgataattttcattgtgaataggaatccaatagatcatattgcttactttgttctttttatactatagaataatattttgttctctagtatatcaaaataccaaaatattatctcatattttctccctctttctcttactctttaccaagttttcctggtggcttggcttccctgactaaagaattaagtctcatttttactttccatttctattttcttaccacttggttggctccctttgtctctgtacctttaccaacattaaggatctcacctctttcttcctcccttaattcataagcaccactcctatcaaagtcccatctcttaaccctgggtatcaaacaaactgtgagttttccagaatctgtttcccagttttcccctcagctttcctggtctcccatccgaactgcttctttgtgcacctcttgttctttctcttggctcccagtcttgattcctgtgatcactcttgcatcactaattgcacaagtgatttcaggtgcaattctgattagcctgcgtccacacagtgatcgatgatcctatgtgcctagaaaggacactgtgtgctgctcatgacctgcaacaggaaaaaagccatttcttgttagcagtgtaagaaccttagagcaaaggagttgaccttctgattgaatataagcacaaccatattaaatgaatcaatacaagaaaattatttctgatactatgtatgtacatatttcttctctaaaatgtatcattcttttctaatgtatatgatctaacaaaaatgaaacatgaaatgcagtagcaacccact

SEQ ID NO: 260125 - DNA, 694 bp, Homo Sapiens
cagagctcagagttccatatagcagtgcactttggttattcttgcccattttcaaaaacacttcacttctgcctccaatcgtcttatcagaagtcactgtccacttatccaaatcttctttcccccggaattgccagacaaccttggcttgttccagcaagacctcatgcagagggtggccttccggtcctctccaatgatccacaatttcatccttcaaaagcctaaaatggtatattgcttcatctctaattgctttatcgaaactaacatcaggcttctcctcagaagaagttatatccaaagcaacttctttctggtgatctccttgcaaatccccttcagtcttcctctgtgaggaggctttgccaggagaagccactggtttctgaagactactggaatactctgcaaagcgaatacccaaaaatggatacaaggcagaagttggcttagagaattttctgagaaaataagtaccacgcagcaatttgtgaaccaaagccatggtacaaaaaaatcaaaatgtaagtttcttcctgggctagcaagggccaccaagaagcttcagcaaatagcccaattctacctataacagaagagacattgaagaattatcagcatagcaatgaatgcatcacaatttcaaattcaacagaaatcaggtattttgaagtttgttaacttatttgtt

SEQ ID NO: 260126 - DNA, 863 bp, Homo Sapiens
  misc_feature (649)..(684): n is a, c, g, or t
aaaacagtataaagacatctacaccgccttgaaaaaaggaaagctctgcttttgttgccgaaccaggaggttttccttcttcacttggtcttatacctgtcagttctgtaagaggccggtgtgctcacagtgttgcaaaaagatgcggctgccctccaaaccatactccactcttcctatcttttcattgggaccttctgctctgcaaagaggggaaagtagtatgaggtcagaaaaaccctccactgcccatcatcggccacttcggagcattgccaggttctcctcaaaatctaagtctatggacaaatcagatgaagaactccagtttcccaaagagttgatggaggactggagcaccatggaggtgtgtgtggactgcaagaagttcatttcggaaatcatcagttcaagccggcgcagtctggtgttggccaacaaaagggcccgattgaaaaggaaaacgcagtctttctacatgtcctcgccaggcccctcggagtactgcccttcagagaggacgatcagtgagatctgagcctcgtgcctttcagctgcttttgtgctacgagtcagcgtccgtgcgcgaggacactgagccgggctggctctcctttctgtggttttatttaatgggcttgaatttgcnnnnnnnnnnnnnnnnnnnnnnnnnnnnnnnnnnnnagactgaatgctgtgttcgtatcgattgatgaaacgtgacaggtccgccaattgctcgtttgcactgagagaggacaacagtttgaaacttacttttgtgtgtgtgtggctttggaagccagtagctacttccttagttcagttctttactgttcctcgaataatctcctgactaaggc

SEQ ID NO: 260127 - DNA, 578 bp, Homo Sapiens
  misc_feature (30)..(30): n is a, c, g, or t
  misc_feature (36)..(36): n is a, c, g, or t
  misc_feature (50)..(50): n is a, c, g, or t
  misc_feature (63)..(63): n is a, c, g, or t
aaggtccggggaaaaagcacctttgggaanctgggncggaaaaacgcttnaaaatccccaaangcttcccaagaaaagaaatttgtgaaagaaaaaggtgaaagagcgaagttccccgcaggcaaaattggaatgggcgtctggcccgcccgtggagttcccggtgaccccatttcccccagccgtgtcgtctcccaggaccacccgatggaaataacaggcgggcttcacggtgcggctctgtccgcccatgcccgctgggtctgcagggaactggactgtcccatggcctgtgagcaccggagcgcctggctgcctgccaaggaagtgcaattgcataaaaacagaaagaacaacgccctggagccaatcttcaagaaaggaatttccaaaggataatatttttctaataaatgcggctgcaacctcctgtgcatttaattaaataggccaaatttttgctgcttaggtcatctcaaggctgatacttgagctgtgtgcccagagatcatgcatttagatttatatttttgccagaaaatacaaggttataataaaactaagaactaccattacaa

SEQ ID NO: 260128 - DNA, 1559 bp, Homo Sapiens
  misc_feature (710)..(710): n is a, c, g, or t
gggctctcacgcagccaacatggctccagtggagcacgttgtggcggatgctggggctttcctgcggcatgcggctctgcaggacatcgggaagaacatttacaccatccgggaggtggtcactgagattcgggacaaggccacacgcaggcggctcgctgtcctgccctacgagctgcggttcaaggagcccttaccggaatacgtgcggctggtgactgagttttcaaacaaaacaggagactaccccagcctctctgccacggacatccaagtgcttgcactcacataccagttggaagcagagtttgttggggtgtctcacctaaaacaagaaccacagaaggttaaggtgagctcatcgattcagcacccagaaacacctctgcacatttctggtttccatctgccctacaagcctaaacccccacaagaaacagaaaaaggacactcagcttgtgagcctgagaacctggaatttagttccttcatgttctggagaaaccctttgcccaacatcgatcatgaactgcaggagctgctgattgacagaggtgaggacgttccaagtgaggaggaggaggaggaagaaaacgggtttgaagacagaaaagatgacagcgatgacgacgggggtggctggataacccccagtaacatcaagcagatccagcaggagctgaagcagtgtgacgtcccccgagaagtgncgggttggctgcctgaccacagacttcgccatgcagaatgttctgctgcagatggggctgcacgtgctggcggtgaacggcatgctgattcgtgaggcccggagctacatcttgcgctgccatggctgtttcaagacaacgtctgacatgagccgagtgttctgctcacactgtgggaacaagaccctgaagaaagtgtccgtgaccgtcagcgacgacggcaccctgcacatgcacttctcccgcaaccccaaggtgctgaacccccgcggcctccggtactcgcttcccactcccaaagggggcaaatacgccatcaacccccatctcaccgaggatcagcgcttccctcagctgcgactctcccaaaaggccagggcagaaaaccaacgtgttcgcccctgactacatcgccggggtgtcaccctttgtcgagaattgacatcttcagccgctaagctaccctgcaggtccgggacagcaccttgggagctgggcggagacgcttaaatcccaacgcttccagaaagaagtttgtgaagaaaaggtgaagagcgagttcccgcaggcaaattggaatgggcgtctggccgccgtggagttccggtgaccccatttccccagccgtgtcgtctcccaggaccacccgatggaaataacaggcgggcttcacggtgcggctctgtccgcccatgcccgctgggtctgcagggaactggactgtcccatggcctgtgagcaccggagcgcctggctgcctgccaaggaagtgcaattgcataaaaacagaaagaacaacgccctggagccaatcttcaagaaaggaatttccaaaggataatatttttc

SEQ ID NO: 260129 - DNA, 1043 bp, Homo Sapiens
taattgacttctaaatgttcaaattgtctagttctaaaagtttactaaatgcctagtgcagttaaacatactcttgtttaagtgtgtgttgctaaattttttactgtcattactaaataatctgtgtggcaaaatgtgtgtcagcacttttccctccttttttatctcctattttcaggagtcaaatgtagccataaactgtatccttgtctgacactttagctaaaaatttccagttaggggagtttattgccaaattaaatttggctgttccccccaacccatatagatattaaggaaggtgtacttaaaaaatgtttggactgcttttaaaacctgagcaatgtcattaatccatatgtggactagtgatgaatagatattttcataagagtttaaatgctgatatttggtggaagtagagagtaactcatattctatcaattcaagtattcttactatggttgctttccctatttgttcaatagactgataatactggaatttatagagtttgagccattacaacttttgtgaggatgtgtttcaaacatttctggacaaatcttattttgtatttctggaagaatgtagtaatcttctagaccgcttaaaaccaatgctcccaagctgaatattcttgagaaatttgtttttattatgccatttgacatttcaaatcagtgctcatatacagtaaacttgtgatagaaattgtattttattgctttttggattataattcatataaatataattacttgaatattgtttgagatcattaacatgccagggcagttcccactgatttagatggtccaagataatctcattcaggaggcttgaaacattaatggtttagtcttgtgaattttaacagttctctgtcatcgtttaacaaaaccaacaactgacacaactccttaagctgtggtttcagtctctgctagttcatattgcatgtttattttggacagtcttttgttaagcatggtgcttgtactggtttaaataaacatgttaacattaaacaaaacaaaaaa

SEQ ID NO: 260130 - DNA, 933 bp, Homo Sapiens
agagccactgcccggcccgccagagagccagtcccccacccaggcagctcagcacatgcctcacgtagctcatcactcccctgtctgtcagggacatgccagggtctggcagtgtgactggccatccaggcagcgtcctgtctcccacttcggaccccaccagccgcaggccctccgggcaggagatggtctgctggaagacttggcggccccggtagaaggctgtcacctcgaactcccactcttcccccggcaccaacagccgcttcagtgggttctcagagggccccaggtttgggaagggagtgggattgtccaagctggggctccgcaggggctgagggcagggctcaggggctacagccaggcttgggggtcccggatctgggagtggggccaacaccatgttacccagtaactcatccagaatgtcttcctgggtatcagaagtactgcctccaccattggtgtccggagaggtgtctggctgggaaaagtccccaactcctgagttcacaaactcgtagattttatgtgggtcgtgagggtccttgctccggtcctctgctaaacgcaacccttctttgcggttgagggcagagcggaaattcctcttccaggttggcaggtctggcttatccctcccgggaacatatgcaccagtggcctcggcccaggccagcgttggcacgagcccgcccctcgcgcgccacctccgccttctcagccgggcccactaggagtcctttccgcccagcgcgcagctccgggtttccagcgtcccaggtcgtcgcacgcacctacgatggaaggtcggggcgtgcgggcagctggaacccacccctgtcttggagctccgggtagctctcaaactcgaggctgcgcaccccctttcccgtcagctgagctctagagcgctggggctttcttttt

SEQ ID NO: 260131 - DNA, 409 bp, Homo Sapiens
tccaggttggcaggtctggcttatccctcccgggaacatatgcaccagtggcctcggcccaggcctggaagattccgaaatcctcctgctgtgcatcctgccgtaggccgtgcttccaagggatgcggaagcgcgtgcggctcttgttcacacaggccacgccctccagttgccccaggtccagctgcgacaccagccagggcaggatccgtggctttggggttcccatggtccggcctacgatggaaggtcggggcgtgcgggcagctggaacccacccctgtcttggagctccgggtagctctcaaactcgaggctgcgcaccccctttcccgtcagctgagctctagagcgctggggctttctttttgatcgacttcttgaaataaaaccaactttatcattcttt

SEQ ID NO: 260132 - DNA, 823 bp, Homo Sapiens
  misc_feature (703)..(709): n is a, c, g, or t
  misc_feature (711)..(712): n is a, c, g, or t
  misc_feature (716)..(717): n is a, c, g, or t
  misc_feature (719)..(719): n is a, c, g, or t
  misc_feature (727)..(730): n is a, c, g, or t
ggggagagaggtttccgctgtaggagcagagcttccgggctgcgctcttcgttgcccagtttccgctcagtggtcgcgtctccgccccccacccaccagtcccgctgcattctcggccgggctctaggcgccatggctccccgcgggaggaagcgtaaggctgaggccgcggtggtcgccgtagccgagaagcgagagaagctggcgaacggcggggagggaatggaggaggcgaccgttgttatcgagcattgcactagctgacgcgtctatgggcgcaacgccgcggccctgagccaggcgctgcgcctggaggccccagagcttccagtaaaggtgaacccgacgaagccccggaggggcagcttcgaggtgacgctgctgcgcccggacggcagcagtgcggagctctggactgggattaagaaggggcccccacgcaaactcaaattccctgagcctcaagaggtggtggaagagttgaagaagtacctgtcgtagggagatttgggtagaagccctcatgctgagctttgtgtccctggtgatgttggaacattaatgatggaacatggccaaacttcagtcatgatcctgaagccatggtttcttccctgccagaaatgaaggttcagttatgaggcaaccctctagtaaggcattgtaaaagttactggatttggtttaataaaaggttgaaatnnnnnnngnngggnngnaaaaaggnnnnccttggcgggcggcctcggccctccaaaaagttttctaaaccattctttgggggcgcgggccccgtaggtaagtggaacggggccctaactgg

SEQ ID NO: 260133 - DNA, 1487 bp, Homo Sapiens
  misc_feature (1036)..(1098): n is a, c, g, or t
  misc_feature (1236)..(1245): n is a, c, g, or t
ggggactctttcctgtcccggcctgcgtggtgtgggcttgtgggtctttgagacccgaaaattgagagcgttttcgcactccagcggctgctcctggcggctctgcggccgtcaccatgccacagaatgaatatattgaattacaccgtaaacgctatggataccgtttggattaccatgagaaaaagagaaagaaggaaagtcgagaggctcatgaacgttcaaagaaggcaaagaaaatgattggtctgaaggctaagctttaccataaacagcgtcatgctgagaaaatacaaatgaaaaagactatcaagatgcatgaaaagagaaacaccaaacaaaagaatgatgaaaagacaccacagggagcagtacctgcctatctgctggacagagagggacaatctcgagctaaagtactttccaatatgattaaacagaaaagaaaagagaaggcgggaaaatgggaagtccctctgcctaaagtacgtgcccagggagaaacagaagtattaaaagttattcgaacaggaaagagaaagaagaaggcatggaagagaatggttactaaagtgtgctttgttggagatggctttacaagaaaaccacctaaatatgaaagattcatcaggccaatgggcttgcgtttcaagaaagcccatgtaacacatcctgaactgaaagccaccttttgcctaccaatacttggtgtaaagaagaatccctcatccccactgtatacaactttgggtgttattaccaaaggtactgtcattgaagtaaatgtgagcgaattgggccttgtgacacaaggaggcaaagttatttggggaaaatatgcccaggttaccaacaatcctgaaaatgatggatgtataaatgcagtcttactggtttgacagcaatttcatatataattattgaggactacacaccaattgaagaaactgccattactgtgatgtttctgaatactaccaaacagccatacatgtctgcaatgaagagatttattaaattgtaaacattaaagtgnnnnnnnnnnnnnnnnnnnnnnnnnnnnnnnnnnnnnnnnnnnnnnnnnnnnnnnnnnnnnnncccttgtcggcccccctccgcccccacaaaagctttctaaaacattctctttggcccccgggcccaatagggaagggaacctgggcataactggttcctaagaaaacctgggcatgaataagggttggattccccccnnnnnnnnnngcccggggggaacccaacgttttgaacaaattccaaaggaattctgaaggccttactggattcatccaccgggagtcccagcggactccaaaattaaattaaccccccggcctggcatttattcgaagaacgggggggaattcctttaaccattcctgcccaacttggaaacccattccaaacggggtttgtagaaaccttaaattcccaaggggatttaacacccttggccgcccttgggg

SEQ ID NO: 260134 - DNA, 1058 bp, Homo Sapiens
  misc_feature (532)..(532): n is a, c, g, or t
ttttggactcagagatctagacccaattgtatagctcctagactccaagcactatataggcccctgtatagaaatgctcactaatgaagagggagggctagaagcttgtctgcattcaaagatcactggtgagtcattcagcaagaaaaggccccttaccagggaatagtcacagttccgtggcattgtactagcaaaagggtctgatcaaaggtctcctgtggagcttgcatggttccctttcatactacgaccataattaaaaccactaattctcttttaaaatgctgcaggatgccatgtagggcatctgtctgggagtgtcctttgtgatgtcataagctgttaaggaccagtgccgagggcttttgagtgaaatgccagtcatgaaggtgcttcaagacaagggtgcctctaaaagcttgacagggccttgactgcacaattcgagctgaatttgccccttgtcagctgccagtaaataaatctcaaagggggaaaagctgaagtttcattacctgatccatggggnctttgttggttttggcatcacacaggggaagctcttgcccctccattctctggatttgaagatgtccattggagcctgcagtcccgggacagggttcagaacgggaaccttttgaagagtgtcaatagttgtaacagttcagctgttaggaagacaaataaatggaggagctcattaatccgcttttggctctcagtgccttttgcccttttatcacagccttattaggctcctactcatcttgaaccagaaaaaaatgaattgaagttgttgagtactaattggcaaagacttttaatcatgggccaagaactttcactgacttgaaagtaacttctccacagggaaggaccaaaaacctggtttaccttaaaacaaaaacctgttggagttcagcgtggtgtaaaaatgtaaggaagcattgataaattgtctaagtttatccatttgaaagaaattgtgtaagattatgatattctcttttctttaaaaaaaacagtacaataaaattcaaacattccttagg

SEQ ID NO: 260135 - DNA, 1206 bp, Homo Sapiens
  misc_feature (1095)..(1116): n is a, c, g, or t
ccaaagtgggttctgaactttccaggtgtaggtagggggcctagtgaagacccttggaaaacagagcccagtctcagtcctggaggtcctccacagagcagctgccagccaggctgtggtcagtcctctggcaggcaatcttcggcaccgagagcctctgtccattagtgtcagccccgagggggccacgacggaggccgcccaatgtccactgtgatattggtgaagagtggttgccgagacacctccaagacctggtaccgcactgacccaatgcccgtcccgcttcatggtcagcttcgtgttttgaatcttggtaaacctctgagggttaggttcgttatgcttgtcgcggtcgtgcttgatcatgcggtagcggccgattcggatgtctgggcgtgagatcttcatcccagtcagggagatccggttgaagatgtcatcatcctcgccaccccagccccagtactcattggggaagccattgattctcagaaactgagccttactcaggcctgacacacctccaaagtagccagcatagggaagccggaagccaaacttgtccatggcaatggcaaagtggcggggttggtcgccgcagcggtataggttgcggtcatccatggggaccaggtccacatcgctgaagatgaagcagtcataggcggcatcctccttcagcgcctctaggaagcccacgttaagcagcttggcccggttgaaggtgtcctcaccatgctggttgatgacatagacgccgtagcgcagccgctgccgcctcaagatggggtgtagatagtggagccagtagcgcaggtggtgttcccggtgtctaaaggggatgatgaccgccaccgtctgggctggggtgcagtcgggcggtgtgtatcggccgcccatgagcacgcctgggttctccctctgcacccgctccaggggcatgggtgaggtgaactcgatcagcagtctgcccacaagaccaggtggcgagtcaggacagggtggcagcgtgggagccgtgggaccgggcagggcactggggacctcagggagcccggagctagaggcggtggcgttgggccgggagcagtnnnnnnnnnnnnnnnnnnnnnnagcagctgggtggagggcatgggcagggcctcgggcactgaagcggctgaagaaggcctcgtgccgaattcgccacccaggcctcgctac

SEQ ID NO: 260136 - DNA, 442 bp, Homo Sapiens
gagaccagaaagaccttgactacttccctacttccactgctttttcctgcatttaagccattgtaaatctgggtgtgttacatgaagtgaaaattaattctttctgcccttcagttctttatcctgataccatttaacactgtctgaattaactagactgcaataattctttcttttgaaagcttttaaaggataatgtgcaattcacattaaaattgattttccattgtcaattagttatactcattttcctgccttgatctttcattagatattttgtatctgcttggaatatattatcttctttttaactgtgtaattggtaattactaaaactctgtaatctccaaaatattgctatcaaattacacaccatgttttctatcattctcatagatctgccttataaacatttaaataaaaagtactatttaatgattta

SEQ ID NO: 260137 - DNA, 927 bp, Homo Sapiens
  misc_feature (770)..(770): n is a, c, g, or t
  misc_feature (781)..(781): n is a, c, g, or t
  misc_feature (858)..(858): n is a, c, g, or t
gggggcctccgctcattcctgaccccgcagtgggcgcgatggcggaggctgtactgagggtcgcccggcggcagctgagccagcgcggcgggtctggagcccccatcctcctgcggcagatgttcgagcctgtgagctgcaccttcacgtacctgctgggtgacagagagtcccgggaggccgttctgatcgacccagtcctggaaacagcgcctcgggatgcccagctgatcaaggagctggggctgcggctgctctatgctgtgaatacccactgccacgcggaccacattacaggctcggggctgctccgttccctcctccctggctgccagtctgtcatctcccgccttagtggggcccaggctgacttacacattgaggatggagactccatccgcttcgggcgcttcgcgttggagaccagggccagccctggccacaccccaggctgtgtcaccttcgtcctgaatgaccacagcatggccttcactggagatgccctgttgatccgtgggtgtgggcggacagacttccagcaaggctgtgccaagaccttgtaccactcggtccatgaaaagatcttcacacttcccaggagactgtctgatctaccctgctcacgattaccatggggtccacagtgtcccaccgtggaggaggagaggactctgaaaccctcggctcaccctcagctgtgaggagtttgtcaaaatcatgggcaacctgaacttgcctaaacctcagcagatagactttgctgttccagnccaacatgcgnctgtgggggtgcaaacacccactgcctgatctcacttctgtcagatgctcccatccactattaatgcactaggtggnaggagagggcggcaatgacactgcacctctcctttcccaccgcattccctggagctccctaaataaaac

SEQ ID NO: 260138 - DNA, 947 bp, Homo Sapiens
ggaagaaatgttgatctttgcagctctacagtaccacattagcaaactgtcgttgtctgctgaaacacaggattttgcaggcgagtccgaggttgatgaaatagaagcggcgctttctaatttggaagtaaccctagaaggtggaaaagcggacagccttttggaggacattactgatatccctaaacttgcagataatctcaaattatttaggcccaagaagttactaccaaaagctttcaaacaatattggtttatctttaaagacacatccatagcatactttaaaaataaggaacttgaacaaggagaaccactagaaaaactaaatcttagaggctgcgaagttgtgcccgatgtaaatgtagcaggaagaaaatttggaatcaagttactaatccctgttgccgatggtatgaatgaaatgtatttgagatgtgaccatgagaatcaatacgcccaatggatggctgcctgcatgttggcatcgaagggcaaaaccatggcagacagctcctaccagccagaggtcctcaacatcctttcatttctgaggatgaaaaacaggaactctgcatctcaggtggcttccagtctcgaaaacatggatatgaacccagaatgttttgtgtcaccacggtgtgcaaagaaacacaaatccaaacagctggccgcccggatcctggaggcgcaccagaacgtggcccagatgcccctggtcgaagccaagctgcggttcatccaggcgtggcagtcactgcctgagttcggcctcacctactaccttgtcagattttaaggaagcaaaaaagatgacattctggggagttcatataacagggtgattaaaattgatgccaccacccgggatcccggtgacaacatggaggattcccaatatccaaccatgtaaaggtaaccgggaaaacccggaagggggtcatcga

SEQ ID NO: 260139 - DNA, 1160 bp, Homo Sapiens
  misc_feature (661)..(711): n is a, c, g, or t
cactcaaccccacccctgggcttggcttggagccctgagtcagctccatcaccacccaagccaaaccaaagctgaggcaggagccgaaactcagagtccttcaaggcctatagccaggtgatggaggacgaggagaaggcagtggagatcttgggcaacacggaagctgctcatcctccatcccccatccgctgctgctggctccgcctccgctgcttggcagctactagcattatctgtggctgctcttgcctgggagtcatggctctggtgtttgccatcaaggcggaagagcggcataaagcaggccggtccgaggaggcagtgcgctggggggcccgggcccggaaactcatcctggccagctttgctgtctggcttgctgtcctcattctgggtcccctgctgctgtggttgctctcctacgccatcgctcaggctgagtgaccctggatggcctctgctgagagccagccgagacctcctggatcctgcaatgcggcattgctaaggtcctgtgacagcagtggttggaaggatcctggttggaaggatggggactctctcaaggggctttggaagagctcttctagccctttataaaaggagggcagcagctgagactgatgagaggagggcagcctgctctgttctttcaggnnnnnnnnnnnnnnnnnnnnnnnnnnnnnnnnnnnnnnnnnnnnnnnnnnngcgggaggggttgaagaccaggcctggttttattagaattcattttgtaataaaagccttttttagtggtgaaatactcctgtctaattgttctcctcctgctttcccttgggcccttggtgagagccagactggacatctgactgatagcagaagccagcatccacctcatccaggagctccaagagaaggaaacaatttttattttcttcttctggaagtttcccttcttggaaagaccccagcttctcccttgtacgtccacagagactctgaggccaagagtagtagcagctgctactatttattacttactatattccaggctgtgttctaagcactttatatttcttaacttcctccagttttcagtcactcagtaggtgtctgtactatcatatccatcatatgaatatatcaccatatgataggtaccaactatctgagtg

SEQ ID NO: 260140 - DNA, 664 bp, Homo Sapiens
tgagaagttggatttctggggagagagtgttctactgcccacatccgcaggaagcgctggatagccaccaatcccttctgcacaacgagctgaggagggaattccagagggcagtgtcttaggttcagtgctttcagcgtggttacgctccccagctccacaggtaacattttgataggatttctttctaaaagcaaagttttcaaatgctggtgagctccaatcccagaaggaagcgctttaattctattgtaccggaggtccagccaagtcaggttcggaagcaactgaaagaaatcttgaggaatcacacacagggcattcctttgcagatgcaattgttgaaggctggggattctaaagacctcctccaaacggcacagaccactttcactcaagtctaaaatcggtgaggaggaaaagatgatgcctccaacacccttgtgaacatctttggagggggtggcaggcaagctcctagtctgaccagcaccctcctccagatcagcagcagccacagagggaacttcgtaggagctgcttccctccatccgttctcttccagggacagcagctcaccctccttggtctggagtcacctgccgcgtccccgcccactgaagcgctggcgagccccgccgctgagagcagcagcccgacaatg

SEQ ID NO: 260141 - DNA, 1550 bp, Homo Sapiens
  misc_feature (708)..(717): n is a, c, g, or t
tttgctagttccataaatacacgattagtttagtaacagccatcacaatgtaccatgtacattcatggtgagagctaaagatcgacacagacttctaggagctttgttcatactgattacttaatccaattgtatagattgaatatttgagtggaaggaatttacactctgtttaaatgatgggattctatcgagatagcactcatgatcatgacctttttggtagtattcttaaacaaaattctacagagactaaatgttagcgatgatcctccattttcaattttaaccaattctgtcccctttctcaaaaccctgagccctgtgcatgctttctcagtcctgtggtgggactggatacaatgactaacttcccctcctcccctctttaaacaccattttccatggagttcaaaaaaattttttttcttaacgttacatatcatagtgaatggtttccccagtgtatatgaatgttttaagtgtctccaatagcttatgcagtctaggagctttccaatactcatttaattaagatttaatcatttgctaatggaaatcttaccacctttcattttccctctgttaccaaatttcagctcttaggagctgctctacaattctgaatttgcttttcttgcctctctttagtcacctgtcacaggaggttcctgctcagtaatgatattgtgagttaggataataacnnnnnnnnnnggtgcttcagatttagaagaaaagatcctgtttccatttgaaaggaactgtaagcttttatcttttaaccaactgaacaatacaccaaaagcagcctagggatgagcatttctttgaaagcaattaggttattcacctggtattcaaactatttactgttaaaaaatctgtgacttcatgaagtcgatttttaaaggcagcatcaaaacactgacacaggcaagggaacacaacatcaggcagcttctctgcacttgttggagctccccaataaaggagccatggagcaagtggccatcagaccgggtggcctttcgaagaacacctgtggcagtcagacagacacgcatttgcatacactggcatgcaaggcccctccttttcagcaccgggaacacaacgtggcttgagaccccactggaaagccacttaaaccccctcacctggccgaatgcggatcgggtctcaccgcgccggactgggaactagtaaaaacaggaggacacccaaccacaccaccatatacctgcggcacaagccgagccacacacgcgaagcgacacaacgatagggagagaccacccacgacgatgtcgatgagaacgaccacaacatgaagcgacgaaaacaaaaaaacggtcctcccccgtcgctcctcctggcgcatgtctctgctctctgtcgcactacacggaccatgactgaagagagcacaacgacaagacgcaaacgagcagcaactaacacagagcagacacgacgaagacggatcagaagcaacaaaagcaagaacagagagaacggaacgtacggccagaaagcaagaggggcga

SEQ ID NO: 260142 - DNA, 477 bp, Homo Sapiens
tattaaaactatttactgttaaaaaatctgtgacttcatgaagttgatttttaaaggcagcatcaaaaactgaaaaggaagggaaaaaataggcagcttctctgcacttgttggagctccccaaaacaggagccatggagaagtggcatcaagaccgggctgccctttcgagaacaccctgtggcagttcagagacacgcttttcctacactgcatgcagcccctctttccagcactggaaagaagtggtcttgagcccagctgagaagcacttcacactcctctctcttgttctgaatggtgtttgtgtcagtctgcagctgtgtatggtattatgtcttataatcctgcatcacttctatcctatccagtcatatctaatgtacaaaattacttaccagtgaaagtaatatgtagtgcttacatgatatttgtgtgcaatatcccctcttccattgaggatatttgatgtaaagg

SEQ ID NO: 260143 - DNA, 939 bp, Homo Sapiens
gcttccggtcccggctcagcctccgacccaggtggtctggagcctgccgggagagtggtggcatctgagaggctggtcgtggactgtggttgggggaggtgggagctgttttaaccgtgtgccccctctcctgtgccggcgtgggcatcccccggggcagtggaacgcgggcgctcctccagcttccgagtccagccagcctgggcgcggggcgccgcccccgagacacccgaggagtccgttcctccctggttacgtggactgtggagctggtctcttgtggctcagcgccgtgcggaggttgaagcgtacctgcggaggtcgcaccagggcgtgaggaggaggaggaagggcatgagccgagcttgaggaatccgtgctccaaactctacactcaagggtggcccttgggtagggtgaagatcccctgtctttatcctagttccacaccttggtgtgggttactgggtgcaggatgaactgtcgctcggaggtgctggaggtgtcggtggaggggcggcaggtggaggaggccatgctggctgtgctgcacacggtgcttctgcaccgcagcacaggcaagttccactacaagaaggagggcacctactccattggcaccgtgggcacccaggatgttgactgtgacttcatcgacttcacttatgtgcgtgtctcttctgaggaactggatcgtgccctgtcgcaaagttgctggggaattcaaggatgcactgcgcaactctggtggcgatggcctggggcaaaagtccttggaagttcctaccacaaaaagaagtctcggtgggcccttctcaccacaagtggattccccatgggaaagggtgggaccgcgtcagggggccttgggggaagcccctggtcccctgagccctggacggggcgaattgtgtccgggaaaaatgtggggccgaaaca

SEQ ID NO: 260144 - DNA, 622 bp, Homo Sapiens
ttttttccccaagtataaatgaggaatttggtgatgtgaaattgagtccaaaatgaaacgaaaacataaacccatgaagaaaatgcaacccaccactcttcaaatttatgacatttaaaaatcccctctccccattaatataaaatagccaggggttggggggaagaagctccctatggttttattcaccataaccttagtgtttctcaactggaacttgttcgtgggaacactgatttgtgtttgaggaaactatttggtttgcaaaacaacaagcaaaatttcttacttcactagtatcctattctaatattgctaaatttttagaagtggtggcaacacaatttaaaaaatgttctactttaggggtaatggggaggctcatagaaacctgaaatccccattctagccctggtccaagaggatgcaatgcagttgaaggaattttcctgattctcacaagttaatctgaagttaaggctcaattctcagtctattacgggtgaatgttttgcatcagtgaatcatttcaacagattttgggggggcagaaaatgatgatgggctaaagatagaaactgcagcttacatgggaaatttggctttagaaaattaaagcgat

SEQ ID NO: 260145 - DNA, 1408 bp, Homo Sapiens
tcagaggtgccttcttacatcagcgatttatgcactccaaggccgcagtgtggctgtgcaaaaacaaatatctaaagctgttcacagcaaccctggtgaccctgctctttggtctctgttgtctcgagttgttgcacagtatgctcaacgaaatgcaaagggaggtgttgtagcaagaaatgtggctcatattctggactcaaatcatggaaagaaggcattactgtacactgcggtaaatcagttggctatgggaagcagttcagcagaagatgaaaaaaatactgcactaaagaccattcagaaggcagctctcctttctccaggtgatcctgctatctgggctgggctaatggcagcctgtcacgctgatgataaactggccttagtgaacaacactcagccaaagaggatagatttatacttggcactgttatctgctgtttctgcttcaattaaagacgaaaaattctttgaaaattacaaccagtcccttgaaaagtggtctctctcacaagctgtcactggtctaatagacacaggaagaatatctgaagctgaaactctctgcacaaagaatttaaaaagtaaccctgatcagccagccgttatcttacttttgagacaagttcagtgtaaaccactcctggagtcacaaaagccactcccagatgctgtacttgaagaactacaaaaaacagtcatgtccaactcaacctctgttccagcttggcagtggctggcacatgtgtatcaatcccaaggaatgatgagagctgcagagatgtgttacagaaagagtctacaattggcatcccaacggggcagttggagtgggaagctctcaagtctgttgagactagcactacttgcattaaaagtctgtatggctaacatttccaatgatcactggccatctttggttcaagaggctacaactgaggccttgaagctttgcttttgtccactggctgttcttttacaagctttgttacaattcaaacgcaaaatgggggcaagagagacacggcgtcttttggaaagagtggtatatcagcctgggtatcccaaatctattgcatcaactgcacgttggtacctactgagacacttatatgccaaagatgactatgagcttattgacgtgctggtaaacaatgccaaaactcatggagatacaagagcattggaactgaatcagagattgtcctcacaataacattggattattttatagtaaggaagcaaagaaaaagctgtaagaatgaagcaatgaatcaagacttctacccaaagcaacatttttttaaactatatttattccttttctaaaggaatctagagaagttgaagtttttaagttaggaatgcaattttctgttaactccaaacctgattttaatctgaa

SEQ ID NO: 260146 - DNA, 833 bp, Homo Sapiens
  misc_feature (695)..(695): n is a, c, g, or t
  misc_feature (786)..(786): n is a, c, g, or t
  misc_feature (788)..(788): n is a, c, g, or t
agagcgaggcctgggtggcgaattcggcacgagggcttggcccaagatggcggcctccgtgtgcagcgggttgctggggccacgggtgctgtcctggagccgagagctgccttgcgcttggcgcgccctgcacacctccccggtctgcgccaagaaccgggcggccagagtacgcgtaagcaagggggacaagccggtgacctacgaggaggcacacgcgccgcactacatcgcccaccgtaaaggctggctgtcgctgcacacaggtaacctggatggagaggaccatgccgcagagcgaacagtggaggatgttttccttcgcaagttcatgtggggtaccttcccaggctgcctggctgaccagctggttttaaagcgccggggtaaccagttggagatctgtgccgtggtcctgaggcagttgtctccacacaagtactacttcctcgtgggctacagtgaaactttgctgtcctacttttacaaatgtcctgtgcgactccacctccaaactgtgccctcaaaggttgtgtataagtacctctagaacaatccccttttttccatcaagctgtagcctgcagagaatggaaacgtgggaaaggaatggtatgtgggggaaatgcatcccctcagaggactgaggcatagtctctcatctgctattgaataaagaccttctatcttgtaanggaaaccgaacggtcctgaccaaatccgacgggcgccccggggcccatacggggactaatcccccgggagcccaggccgcctccaataatnanttttttggggccccctttggcccctggaaaaattttcttaaacct

SEQ ID NO: 260147 - DNA, 771 bp, Homo Sapiens
aagaagcgaggcctgggtggcgaattcggcacgaggaagatggcggcctccgtgtgcagcgggttgctggggccacgggtgagtggggcgactcggcaggtccctgcgagtcggaggtggggtccctagtttccgcctcacgcgccctccctccacaggtgctgtcctggagccgagagctgccttgcgcttggcgcgccctgcacacctccccggtctgcgccaagaaccgggcggcccgagtacgcgtaagcaagggggacaagccggtgacctacgaggaggcacacgcgccgcactacatcgcccaccgtaaaggctggctgtcgctgcacacaggtaacctggatggagaggaccatgccgcagagcgaacggtggaggatgttttccttcgcaagttcatgcggggtaccttcccaggctgcctggctgaccagctggttttaaagcgccggggtaaccagttggagatctgtgccgtggtcctgaggcagttgtctccacacaagtactacttcctcgtgggctacagtgaaactttgctgtcctacttttacaaatgtcctgtgcgactccacctccaaactgtgccctcaaaggttgtgtataagtacctctagaacaatccccttttttccatcaagctgtagcctgcagagaatggaaacgtgggaaaggaatggtatgtggggggaaatgcatcccctcagaggactgaggcatagtctctcatctgctattgaataaagaccttctatcttgaaaaaa

SEQ ID NO: 260148 - DNA, 1041 bp, Homo Sapiens
cttgttaaagagcgcgggtatataacggtcctaaggtaacgaggctgggtggcggtcagcactctggtggaggaggagttcgggcagaggcggcaggacctgtacagtgcccgggacctgcagggcctcaccgtggagcatgccattgattccttccgagaaggggagacaatgattcttaccctcaaggacaaaggcgtgctgcaggaggaggaggacgtgctggtgaacgtgaacctggtggataaggagcgggcagagaaaaatgtggagctgcggaagaagaagcctgactacctgccctatgccgaggacgagagcgtggacgacctggcgcagcaaaaacctcgctctatcctgtccaagtatgacgaagagcttgaaggggagcggccacattccttccgcttggagcagggcggcacggctgatggcctgcgggagcgggagctggaggagatccgggccaagctgcggctgcaggctcagtccctgagcacagtggggccccggctggcctccgaatacctcacgcctgaggagatggtgacctttaaaaagaccaagcggagggtgaagaaaatccgcaagaaggagaaggaggtagtagtgcgggcagatgacttgctgcctctcggggaccagactcaggatggggactttggttccagactgcggggacggggtcgccgccgagtgtccgaagtggaggaggagaaagagcctgtggcctcagccccctgccgtcggacgacaccccgagtgggagaacatggacatcagtggatggaagaaggaaggtgggaactcccacccccggcgttccccgcaggtggctggaaggaaggaccaagccggaacctggagcttgcaaagcccctggaaaaaggggaccccgggctgccaaaggtaaaagcagctacagccagctgccaaaaccgtggccaaaaaaggggggtggaaaattgtgaaaaaaacttggagttctcccccacggggggcttgggaagggggattaccgaacctccaacggggagggga

SEQ ID NO: 260149 - DNA, 1646 bp, Homo Sapiens
  misc_feature (1428)..(1428): n is a, c, g, or t
  misc_feature (1623)..(1623): n is a, c, g, or t
ggcctgggtggcgaattcggcacgagggctcggcggcagccgggctcggagtggacgtgccactatggggtcgtccaagaagcatcgcggagagaaggaggcggccgggacgacggcggcggccggcaccgggggtgccaccgagcagccgccgcggcaccgggaacacaaaaaacacaagcaccggagtggcggcagtggcggtagcggtggcgaacgacggaagcggagccgggaacgtgggggcgagcgcgggagcgggcggcgcggggccgaagctgaggcccggagcagcacgcacgggcgggagcgcagccaggcagagccctccgagcggcgcgtgaagcgggagaagcgcgatgacggctacgaggccgctgccagctccaaaactagctcaggcgatgcctcctcactcagcatcgaggagactaacaaactccgggcaaagttggggctgaaacccttggaggttaatgccatcaagaaggaggcgggcaccaaggaggagcccgtgacagctgatgtcatcaaccctatggccttgcgacagcgagaggagctgcgggagaagctggcagctgccaaggagaagcgcctgctgaaccaaaagctggggaagataaagaccctaggagaggatgacccctggctggacgacactgcagcctggatcgagaggagccggcagctgcagaaggagaaggacctggcagagaagagggccaagttactggaggagatggaccaagagtttggtgtcagcactctggtggaggaggagttcgggcagaggcggcaggacctgtacagtgcccgggaacctgcagggcctcaccgtggagcatgccattgattccttccgagaaggggagacaatgattcttaccctcaaggacaaaggcgtgctgcaggaggaggaggacgtgctggtgaacgtgaacctggtggataaggagcgggcagagaaaaatgtggagctgcggaagaagaagcctgactacctgccctatgccgaggacgagagcgtggacgacctggcgcagcaaaaacctcgctctatcctgtccaagtatgacgaagagcttgaaggggagcggccacattccttccgcttggagcagggcggcacggctgatggcctgcgggagcgggagctggaggagatccgggccaagctgcggctgcaggctcagtccctgagcacagtggggccccggctggcctccgaatacctcacgcctgaggagatggtgacctttaaaaagaccaagcggagggtgaagaaaatccgcaagaaggaggaaggaggtagtagtgccggcaagatgacttgctgccctctcggggaccagactcaggatggggactttggttccagactgccggggacggggtcgccgccgagtgtccgaagtggaggagganaaggagcctgtgcctcagcccctgccgtcggacgacacccccagtgggaaaacctgggacttcactggatgagggagaaaaggtgggacttcccccgccgggggtccccgcaaggtgcttgggagggaggacccagcccgggacctggcaacttgcaaacagcgcgtcgggaaaaaggggaccccggcgcttccnaaagggttactagagagctttcc

SEQ ID NO: 260150 - DNA, 1036 bp, Homo Sapiens
ggcctgggtggcggtcagcactctggtggaggaggagttcgggcagaggcggcaggacctgtacagtgcccgggacctgcagggcctcaccgtggagcatgccattgattccttccgagaaggggagacaatgattcttaccctcaaggacaaaggcgtgctgcaggaggaggaggacgtgctggtgaacgtgaacctggtggataaggagcgggcagagaaaaatgtggagctgcggaagaagaagcctgactacctgccctatgccgaggacgagagcgtggacgacctggcgcagcaaaaacctcgctctatcctgtccaagtatgacgaagagcttgaaggggagcggccacattccttccgcttggagcagggcggcacggctgatggcctgcgggagcgggagctggaggagatccgggccaagctgcggctgcaggctcagtccctgagcacagtggggccccggctggcctccgaatacctcacgcctgaggagatggtgacctttaaaaagaccaagcggagggtgaagaaaatccgcaagaaggagaaggaggtagtagtgcgggcagatgacttgctgcctctcggggaccagactcaggatggggactttggttccagactgcggggacggggtcgccgccgagtgtccgaagtggaggaggagaaggagcctgtgcctcagcccctgccgtcggacgacacccgagtggagaacatggacatcagtgatgaaggaggaaggtggagctccaccgccggcgtccccgcaggtgctggaaggaggaccaggcggaactggagctgcacaaccaactggagaagggacgcccggctgcgacagttacagcagctacagcagctgcgaaacagtggccaaaaaggtggtggaaaattgtgaaaaaagctggaatctcccccaccggggctggggagaaggtataaggatccccaaccggaaggggggcctcctgggtttaaccccacgtcccgattttccgccccaccttggggggaatccccccag

SEQ ID NO: 260151 - DNA, 878 bp, Homo Sapiens
aactggagtctcgccagcggggctgggagtgaggatgaggatcccgagcggaagggggccatcgtgttcaacgccacgtccgagttctgccgcaccttgggggagatccccacctacgggctggctggcaatcgcgaggagcaggaggagctcatggactttgaacgggatgaggagcgctcagccaacggtggctccgaatctgacggggaggagaacatcggctggagcacggtgaacctggacgaggagaagcagcagcaggatttctctgcttcctccaccaccatcctggacgaggaaccgatcgtgaatagggggctggcagctgccctgctcctgtgtcagaacaaagggctgctggagaccacagtgcagaaggtggcccgggtgaaggcccccaacaagtcgctgccctcagccgtgtactgcatcgaggataagatggccatcgatgacaagtacagccggagggaggaataccgaggcttcacacaggacttcaaggagaaggacggctacaaacccgacgttaagatcgaatacgtggatgagacgggccggaaactcacacccaaggaggctttccggcagctgtcgcaccgcttccatggcaagggctcaggcaagatgaagacagagcggcggatgaagaagctggacgaggaggcgctcctgaagaagatgagctccagcgacacgcccctgggcaccgtggccctgctccaggagaagcagaaggctcagaagaccccctacatcgtgctcagcggcagcggcaagagcatgaacgcgaacaccatcaccaagtgacagcgccctcccgcccccgccctgcctcaaccttcatattaaataaagctccctccttatttttt

SEQ ID NO: 260152 - DNA, 1001 bp, Homo Sapiens
gaagtactctggggccccccaagtttgtcggggggagggctttgaaagggtggagccccctccttgggagaggaaaccccgttgtcccttgtcattcacaagtgtgtgggttcaactgtggtcaaaggggagtcattcttctttcgggcccgggggctcattctccccttttcgggcagggacttaaattagggaagggcccagcccttcgcctgccgtcacccgttgttccgcgtccagccccagcatcttctccaggaggttcacagccagagggcttgcatgggtcaggatagaggcaaaatcctttcttctccaaattcggggaggcccttcatgtagttcttggcctcatcgctctgcagccgctgcacaaactcagccggaggcgtccccgtcaccttcatgatctccttcaggctggtccaggtggtcgctgcccttgaacagcgtcttgcctgtgatcatctccgccatgatgcagcccacggaccagatgtccaccgtctgcgtgtagcgcatccaattcaagatgacctcgggagcccggtaccaccgggtcaccacgtacccagtcatctcactgtctgcctgcctggccaggccgaagtccaggatcttcagctcacagtcttcgttcacagccaggttgccgggcttcaggtctctgtggatgatgccggcagcgtggatatacctcagccccttcagcatctggtacacgaggaactggatccggtcctcgcctagcttctcatgtttcatgagcttgcccaggtcggtgcccatgaacggcatcaccaggtaaaagtccgtgaagtcatccagggtctcatcaggagtgaatacgtccagcagcccgatcacgttctcgtggcgcatgtgcttgagcaggcgcagctcgcggtaggcgcgcttggcgaacagctcggactggaagggccgatacagcttcttgatggccaccttagcgccggtgcggccgtccacggccgagctgc

SEQ ID NO: 260153 - DNA, 501 bp, Homo Sapiens
tgagactacccccgtccgattctcggtggccgcgctcgcaggccccgcctcgccgaacatgtgcgctgggacgcacgggccccgtcgccgcccgcggccccaaaaaccgaaataccagtgtgcagatcttggcccgcatttacaagactatcttgccagaaaaaaagcgtcgcagcaggtcatcaaaaattttaaatggctagagacttatcgaaagcagcgagacaggcgcgaaggtgccaccagattcgcacgcggcggccccagcgcccaagccaggcctcaactcaagcacgaggcgaaggggctccttaagcgcaaggcctcgaactctcccacccacttccaacccgaagctcgggatcaagaatcacgtactgcagccaggggcgtggaagtaattcaaggcacgcaagggccataacccgtaaagaggccaggcccgcgggaaccacacacggcacttacctgtgttctggcggcaaacccgttgcgaaaagg

SEQ ID NO: 260154 - DNA, 1273 bp, Homo Sapiens
gtcacaggtggtggtgcagcattgctgtaaatgccagttcctgagcctcttggcatcacatggcccaaagtcctgaaggctgcctgatccaggtgcacaggcctccggtcacggttaaagccaagctgaggcttccactgccgtccattgctggatttttcccagtcactaggtttcagtactgctgctggctttcttgctcctggaagcattacagctttaaaaatgtaatcttcagcaaactgtgggtctttaaaattaatactgactacagtgttctgtgtcagatcccttaacataggaacaggagaacatactatttgatctggaagaatggcttcttcatccaaagaaaactttccttgaatcccatgacatagttcagggggtacctccactggctctgtggaacctgtctggtacagctctaaaatgaagtcatggagtgggtgatgtttccccacaaataagacatcacctccaaggctgtttcttctggtctcttctggagtgaggtctgggtatacctcttctagggcagctcgtagccttcgctcatccacgaatggcaagagagcaacaccttgccatgcatatttcttcccattcaaatcaatagcaaaatcttcaggatagaagtcaattatactagaatcaggatcactcatgagcttccgccatgatggaggtagaaaattaccacttgcagctggaaatacccccataagttgttctagtggtttaaacggtttcgtacccttctcaaaatcagatggcatgtctgcaatgccttcaaagtctgaagcaaatggtgcataatgaaatggataataccacttccaggaagcacagccctggtaataatatctaagaacccagcaaagtccttcaacgtacgactgcacaactttccgacggaatttctcatcagctgcatccacatcaaatttgttcttgtagtaccgctgcttccagccagcttcccataacctgacattatcctctggctcaggttcactgtcactgtcttctgcttttcgcttaattcctcctaatggagacggggagccatcagatgtgaaactcgtattaggagatatcgaaggactagagttattctgcatcctcatttcataggctgcttgtctcggattactggctacttgagaacctggtgaatttcttgaacccaaggcatgaggagcgacgcgtgggtcgacgatatcccgggattccgaccggaccagcctgctttttcaacagctgtttaacc

SEQ ID NO: 260155 - DNA, 1416 bp, Homo Sapiens
  misc_feature (1058)..(1058): n is a, c, g, or t
agataggctctgcctcccgaagaaaagggagccgcgcagcgcctacgggagtccggcggcagcagccggtaccggcaaccacgggcagctctcagggaatctccgtcgtgaggccagaggctccagtccccgcgagtccagatgcctgtccagcctccaagcaaagacacagaagagatggaagcagagggtgattctgctgctgagatgaatggggaggaggaagagagtgaggaggagcggagcggcagccagacagagtcagaagaggagagctccgagatggatgatgaggactatgagcgacgccgcagcgagtgtgtcagtgagatgctggacctagagaagcagttctcggagctaaaggagaagttgttcagggaacgactgagtcagctgcggttgcggctggaggaagtgggggctgagagagcccctgaatacacggagccccttggggggctgcagcggagcctcaagattcgcattcaggtggcagggatctacaagggcttctgtctggatgtgatcaggaataagtacgaatgtgagctgcagggagccaaacagcacctggagagtgagaagctgctgctctatgacacgctgcagggggagctgcaggagcggatccagaggctggaggaggaccgccagagcctggacctcagctctgaatggtgggacgacaaactgcacgccagaggcagctccaggtcttgggactccctgccgcccagcaagaggaagaaagcaccctctggtttctggcccatacatcgtgtacatgccttcaagagatcgacatccctggaggactggacagccatcaaaaaggctagggcagctgtgtcccctcagaagaaaaaaatcggatggaccctgaaccctgctgttcacagccagggggaccctcagagcagctggcactgcacccaggattctcgtcttcctcctgcagacaggcggactcacaggcccctcaggggtctgccagccaggctcctgtggtgctgctgggccctccgagtcgattctggcactggctggaatcttcntctgccgtcgtcgaggcttcacagctgttgccttgaacttacttacaaggcagggtgctgttcaatcttagccgcctgaattcgatcgtaggtctattctggggtcttaacagaacagcgagctaacgaatccctgcgaattggatagcttctgcttggcaggagaattaatttgggatctgctgatgattttggggttccggtatttggagattagccgagtttagggttttgttggttgaatggggtgtgatttatataaaaatattgccccttcggtatgcgggtatttgaaaagaaaggcccttggaagagccttgggggctgcgggggccccctctctcgggaagtgcgcgct

SEQ ID NO: 260156 - DNA, 793 bp, Homo Sapiens
gtccacctccaaaacccggaacatccagtcctagaccaggcaaaccactgtttccaactgaaggcataccaggcctagcatcaccaaaggccccgcctcctaatcctggaggagggattggtggcccaaaggcatttgatccaccaaaattaccaggaaagttaaatggaggcccattattggcttcctttgatcctacagtcaggaaggcatgctcttcacctcctgcactaggtattcctgcactgggcattcccgcaccaggcagtcctgcactggttattgctgaaccaggcagtcctgtgctgggcaggcctgcaccgggaagtcctgcactgggcagtcccacaccgggcagtcccgcattgggcattcctggaactgcaggattacctggcacaggcatctttaatcccttttttccttgggcagggggatttttctcaatctctctcatatcttctagggtaactacatgaacaaaagcttctctcccattaagttttttacggtgtaagcgttcagacttacgtgcatcatcttcatttttaaactgaaccaatgcctgtcctagaccttgcccattgttatcaacaagaacatgtacagcattttcatccactgggattccttctaggaactgaagaacatccatctttgtaatgctgaatggaatatttgttatgtgggcacagactttggcagagttgacatccccctctggatttagtatcatttccctctggtcatagctgaagttctgcagtctttttcgaatcatatctatcttttc

SEQ ID NO: 260157 - DNA, 910 bp, Homo Sapiens
  misc_feature (718)..(718): n is a, c, g, or t
aatgcataagacctatgaattcaaatatctttattagacctggggctaaccaggtgaagatctgagcccagaaatgacccttcctccaccacacccctcctttgaggacgcccagggtctcccacaggcctgtgagttgcctcggcatatgacgcagaaccccaactgttacaacttagtttggatgtaagatgctctgaggaccctgcccacacccctgaatgcattaagatgtcgctggcctttgctcacctcagaggggagaaaaggctaaagatttgcagtttgacagcccagcagggaggaagcatcacacagcgttaggagccgtttccttcaggtgttaaggaaggggatgcccctgaggttctcctggctagtcagggtggcttcacccatcactggtgggttgcaggaacagcacccaggactctgaggagggacagagaagcaagggggctgctgaaatcgcagagacttttgcagcatcagatctgaggagtaaaacggcacctctggccttcatcttggtgctgcgacaattgtggaggcaaagcattctttctgtgactattttgttctgtagacagtcacgatggcccagaggtggtgtcgtgtcaggggtcatctttcagaatcatgctgtgtatgctgtcatctctgactgtgctgcaacgctattcatcagcagcatcgatttgcagtgacggaggagctntctctagaaggattcttagcttaagcatgcagatcggcgtgtgatactactcgtactgcactattatcgtctggggacatgaactctctttcaggcccctttggcaagggcgcactaattttttttggggccccccgcggatgcaccccagctaagtgcgtttcaagttcgtcggctccttgtccacactag

SEQ ID NO: 260158 - DNA, 648 bp, Homo Sapiens
tacaatatcaagttggagacaaatgtcaagttaggttggatcacaatggaaaatttttgaatgcagatgttcaaggaattcattctgagaatggaccagttttggttgaagaactgggaaagaagcacacatcaaagaacctcaaggcacctcccccagaaagctggaacacagtgtcagggaagaagatgaaaaaaccttccacttctggacaaaatttccattctgatgtggattacagagggccaaagaatcccaagcaagccaataaaagccccatcagcactacctcctcgactgcagcatccttcaggagtaagacaacatggcgttctctagtcattcttcaggggtcacagtctcagaaattctccagtgagcacaaaaatcttagccggacaccttcacagatcataagaaaacctgatcgtgaaagagttgaggattttgatcacacaagtcgagaatctaactatttcggcctttccccagaagagcgcagagagaagcaagctatagaagaatcccgtttactctatgagattcagaacagagatgaacaggctttcccagccctttccagctcatcagtcaatcagtcagcttctcagagtagcaatccatgtgtccagagaaaatcatcacatg

SEQ ID NO: 260159 - DNA, 893 bp, Homo Sapiens
gggcagaggcggcgagaggcgggctgaggcggcccagcggcggcaggtgaggcggaaccaaccctcctggccatgggaggggccgtggtggacgagggccccacaggcgtcaaggcccctgacggcggctggggctgggccgtgctcttcggctgtttcgtcatcactggcttctcctacgccttccccaaggccgtcagtgtcttcttcaaggagctcatacaggagtttgggatcggctacagcgacacagcctggatctcctccatcctgctggccatgctctacgggacaggtccgctctgcagtgtgtgcgtgaaccgctttggctgccggcccgtcatgcttgtggggggtctctttgcgtcgctgggcatggtggctgcgtccttttgccggagcatcatccaggtctacctcaccactggggtcatcacggggttgggtttggcactcaacttccagccctcgctcatcatgctgaaccgctacttcagcaagcggcgccccatggccaacgggctggcggcagcaggtagccctgtcttcctgtgtgccctgagcccgctggggcagctgctgcaggaccgctacggctggcggggcggcttcctcatcctgggcggcctgctgctcaactgctgcgtgtgtgccgcactcatgaggcccctgggggtcacggcccagccggggctccggggccgccgcgaaccctcccgggggcctgccaagacctgaagcggccttcccgggaaccgcggcctttggtgccttttacgcccgtgggccgcccctcgggctcatgggggcctgggggggcttctttcgttcccccgccccgggggttccggttgggtgggagccttacccccccaaggggaacccttggggcg

SEQ ID NO: 260160 - DNA, 902 bp, Homo Sapiens
aggcggcgagaggcgggctgaggcggcccagcggcggcaggtgaggcggaaccaaccctcctggccatgggaggggccgtggtggacgagggccccacaggcgtcaaggcccctgacggcggctggggctgggccgtgctcttcggctgtttcgtcatcactggcttctcctacgccttccccaaggccgtcagtgtcttcttcaaggagctcatacaggagtttgggatcggctacagcgacacagcctggatctcctccatcctgctggccatgctctacgggacaggtccgctctgcagtgtgtgcgtgaaccgctttggctgccggcccgtcatgcttgtggggggtctctttgcgtcgctgggcatggtggctgcgtccttttgccggagcatcatccaggtctacctcaccactggggtcatcacggggttgggtttggcactcaacttccagccctcgctcatcatgctgaaccgctacttcagcaagcggcgccccatggccaacgggctggcggcagcaggtagccctgtcttcctgtgtgccctgagcccgctggggcagctgctgcaggaccgctacggctggcggggcggcttcctcatcctgggcggcctgctgctcaactgctgcgtgtgtgccgcactcatgaggcccctggtggtcacggcccagccgggctcggggccgccgcgaccctcccggcgcctgctagacctgagcgtcttccgggaccgcggctttgtgctttacgccgtggccgcctcggtcatggtgctggggcctcttcgtcccggcccggggttcgtgggggagctacccccaagggacctggggccgtgccccgaaaaccaaaggcccgcctttccctgctttaaccaatcctggggcttttc

SEQ ID NO: 260161 - DNA, 915 bp, Homo Sapiens
  misc_feature (822)..(830): n is a, c, g, or t
gcagaggcggcgagaggcgggctgaggcggcccagcggcggcaggtgaggcggaaccaaccctcctggccatgggaggggccgtggtggacgagggccccacaggcgtcaaggcccctgacggcggctggggctgggccgtgctcttcggctgtttcgtcatcactggcttctcctacgccttccccaaggccgtcagtgtcttcttcaaggagctcatacaggagtttgggatcggctacagcgacacagcctggatctcctccatcctgctggccatgctctacgggacaggtccgctctgcagtgtgtgcgtgaaccgctttggctgccggcccgtcatgcttgtggggggtctctttgcgtcgctgggcatggtggctgcgtccttttgccggagcatcatccaggtctacctcaccactggggtcatcacgggggttgggtttggcactcaacttccagccctcgctcatcatgctgaaccgctacttcagcaagcggcgccccatggccaacgggctggcggcagcaggtagccctgtcttcctgtgtgccctgagcccgctggggcagctgctgcaggaccgctacggctggcggggcggcttcctcatcctgggcggcctgctgctcaactgctgcgtgtgtgccgcactcatgagggcccctggtgggtcaccggcccagccggggctcgggggcccgccgcgaaccctccccggggcctgctaaaacctgaaaccgtcttccggggaacgcgggttttgcggcttttacccgagggaccccttcccccattggagctgggggctacttcgtnnnnnnnnngggttcaggggtgacccctccccccaagacacctggtacccgttccccaaacccatagggccccctttccttggacccacaatcg

SEQ ID NO: 260162 - DNA, 1518 bp, Homo Sapiens
  misc_feature (1250)..(1276): n is a, c, g, or t
acgttcacatcaagatccccgcccgccggaacctgggcgatccacgatgccgagtttgccacgctgcgacagcccataggcttgcccccccgggcattcgggtggactacgaacacaaactgaagccctaggacttgtcgcccgtttgcgctctcgccgaggcacaggctgctcgcggaccaccctgctccgaaaactaagaggtaggtggtagcccattcatctggttactgatactggccggcatcagtggactgtcggcaggtccttgagcaactggtgtgtgaaatgggacggacgtcaaaggacaagcgggatgtctactaccgcctggccaaggagaatggctggcgtgctcgcagcgccttcaaactgctacaactggataaggaattccaactcttccaaggcgtgacacgggcagttgacctgtgtgcagccccaggcagctggagccaggtgctgagccagaagatcgggggccaagggtccggccacgtggtggctgtggacctgcaggctatggctccactaccaggtgtggtacagatccagggtgacatcacccagctgtccactgccaaggagatcatccagcactttaagggctgccctgcggacctagtggtgtgtgacggggctcctgatgtaaccggtctccatgatgttgatgagtatatgcaggcccagctcctcctagctgctctgaacattgctacacatgtcctgaagccagggggctgctttgtggccaagatattccgaggccgggatgtgacgctcctctacagccagctgcaggtcttcttctccagcgtgctgtgtgccaagcccaggagcagccggaactctagcatcgaggccttcgctgtctgtcagggctatgaccctcccgagggcttcatcccggacctgagcaaacccctgctggaccattcttacgacccagatttcaaccagctggatggccccccccgcatcattgtgccttttgtgacctgtggggacctgagctccctatgattcggaccgccacttacccacctggacctaaaagggcgggcttcaaagtaccaagtccacttccaccccaaacaacgcccccccatccccggccgaccataacaagggaaggcccttggaacgcttgcaaaaagggaaagggggacacccctggccacaaggggagaattccggcccacccagggaactggccccccatccacacagaagtgcggacaccgtttttnnnnnnnnnnnnnnnnnnnnnnnnnnntccgagtggcccacgccctttggtggggccccctggagaatggggcaaacacccccggatatatgtaccgcgtgtcccccctcacccccacctacggtgtgggccaatttggcaccccattctccaaaaacgggctccaacgcgcaccgcaaaaaacccgccaatctgtgatgatagaactttcggtctctaaaagaatcccaccaattataccgagggaccttggaacaacagaacgcttg

SEQ ID NO: 260163 - DNA, 1199 bp, Homo Sapiens
cgttctgcaagttgccacaacgatttcataaactggaggccaaaaccatgtgttccttttcccggaagatccccccccttttcgggatttgtggaaaataaaacctctcgcggcaaaaagggaaattccttcaaaccaatttgtacgacgacagtggcccccggaacattgtaagctagctcaccttaaggattcgaggatcaaagactactcccagatatgaccagattcttataccatgttctgtctctgcgcagatatctgcactgggtcttcagggccttgccaatagcatgaatagtaggaaatgagaactttcccctctgtcagatcttcacaaaaaactttggttttcactatattctttggagtgtagattagcataatcatccctaatttggaaaaagagcccaagtgtattaagtagcggttttaaatcttctttgtaatcagagaacaactgcatgagacctactgctaatccaaacagtccacctgttttctgcagcaccatagctttatattcttcttcagtgggacaagtgtaattatccctccagtaaatatctaggccttgtccctgatggagttccaaaagctggcgggtaaaaaagcttcactgcatctgggtgatcaagggttaagactttctccaagccaaggaaatacacgtaattggcagaattgatgacagatgggattccatagatgctgtgggccactggaaagccacgtcggagttttgagttgtcttcaatatcatcgatgagtaaactggcattatgcaacatttctgtcacttcaataataatctgtagcttgtcctctggaactttcagccaatgattaaatgcctgtgaaagtttggttctcacttgtttacctggtaactgaagtaagtatttatagggttctagaagaattctttggactgtttcttgagtcttctccattggatttaaacttcaaagctaatagttcaacgatgatatcacgactttcacgccgccggtccgggagtaactgtaccccgcatcaacttcctattttataatgtggacttaggctcttcccgatgcctacatgaatccttcccactatttcaccacagaactctccgccctcctcagccgccagcgacaccgcattagttggtgcaagaaaatgcgccatcccggtcacactgcgcaggcgtcgta

SEQ ID NO: 260164 - DNA, 905 bp, Homo Sapiens
  misc_feature (854)..(854): n is a, c, g, or t
attcgccgccggcgcttgcgcccggaaggtgtgccgcaccacacgggggaggaaggaaggagctcccaactcgccggcctggccacgggatggcccccaaattcccagactctgtggaggagctccgcgccgccggcaatgagagtttccgcaacggccagtacgccgaggcctccgcgctctacggccgcgcgctgcgggtgctgcaggcgcaaggttcttcagacccagaagaagaaagtgttctctactccaaccgagcagcatgtcacttgaaggatggaaactgcagagactgcatcaaagattgcacttcagcactggccttggttcccttcagcattaagcccctgctgcggcgagcatctgcttatgaggctctggagaagtaccctatggcctatgttgactataagactgtgctgcagattgatgataatgtgacgtcagccgtagaaggcatcaacagaatgaccagagctctcatggactcgcttgggcctgagtggcgcctgaagctgccctcaatccccttggtgcctgtttcagctcagaagaggtggaattccttgccttcggagaaccacaaagagatggctaaaagcaaatccaaagaaaccacagctacaaagaacagagagcactctgctatttggtcctgaagcagtacacagaagcagtgaaggactgcacagaagccctcaagctggatggaaagaacgtgaaggcattctacagacgggctcaagcccacaaagcactcaaggactataaatccagctttgcagacatcagcaacctcctacagattgagccctaggaatggtccctgcacagaaagttgcggccagggnaagtgaagcagaaacctacactaaaaaaccccaacaggggcaactgggaac

SEQ ID NO: 260165 - DNA, 1473 bp, Homo Sapiens
gggacgggggaggaaggaaggagctcccaactcgccggcctggccacgggatggcccccaaattcccagactctgtggaggagctccgcgccgccggcaatgagagtttccgcaacggccagtacgccgaggcctccgcgctctacggccgcgcgctgcgggtgctgcaggcgcaaggttcttcagacccagaagaagaaagtgttctctactccaaccgagcagcatgtcacttgaaggatggaaactgcagagactgcatcaaagattgcacttcagcactggccttggttcccttcagcattaagcccctgctgcggcgagcatctgcttatgaggctctggagaagtaccctatggcctatgttgactataagactgtgctgcagattgatgataatgtgacgtcagccgtagaaggcatcaacagaatgaccagagctctcatggactcgcttgggcctgagtggcgcctgaagctgccctcaatccccttggtgcctgtttcagctcagaagaggtggaattccttgccttcggagaaccacaaagagatggctaaaagcaaatccaaagaaaccacagctacaaagaacagagtgccttctgctggggatgtggagaaagccagagttctgaaggaagaaggcaatgagcttgtaaagaagggaaaccataagaaagctattgagaagtacagtgaaagcctcttgtgtagtaacctggaatctgccacgtacagcaacagagcactctgctatttggtcctgaagcagtacacagaagcagtgaaggactgcacagaagccctcaagctggatggaaagaacgtgaaggcattctacagacgggctcaagcccacaaagcactcaaggactataaatccagctttgcagacatcagcaacctcctacagattgagcctaggaatggtcctgcacagaagttgcggcaggaagtgaagcagaacctacactaaaaacccaacagggcaactggaacccctgcctgaccttacccagagaagccatgggccacctgctctgtgcccgctcctgaaacccagcatgccccaagtgagctctgaagccccctcctcaatcccttgatggcctcccaccctgtaagaggctttgcttgttcaaattaaactcagtgtagtcaaacacagacatggttgttgcaccagaaaggtccccactagagctaagcgtgaagctgaagctctgtccctattcccccagcccagctagctgattcacaccaacagatccttcatcaggcaaagcatttggctttgtcctgcccaagtgggctgcagactgagtgctgcccttgtagcttccccagaccccaactcactgcagttcatctgaacaacctgagctcctgggccggggtggaaggagggggataaacctaaggccctgatccaaagcagcctgttgagctggttctccagggctgcagtc

SEQ ID NO: 260166 - DNA, 1617 bp, Homo Sapiens
  misc_feature (635)..(695): n is a, c, g, or t
  misc_feature (870)..(981): n is a, c, g, or t
  misc_feature (1559)..(1559): n is a, c, g, or t
tttaaagcgtaaaatccggtaatattaaaagataggtaaacctaggcctggaaaggctgttatttggctaaaattgcacaggaggccatgaacagaggcaagtgccccagagactccactttcattcctaactgttctcaaattaatgctcatgattgagtattctcagtgcaactcgtagagtttgataagtaaaagttacatgcccctgttttcctagcatgatattcactgttatcaaagacaagaggcagaccattcattcattctcaaaacactgaatgccattctgtgcctagtgctatacaaggcatgggagattcagtgtgaataagtctttgctctccacctaacaagggacagttttaattatagattgtcttcccacttaagtatgagttttagtaggcattaaaaatcgtaattagtttgataatatgagacccaaccctaacttgccagaagagtaatcagttcatgaacccattgatatttcctgtatatttcatgaatgtgacttcagtcattctagtgttaatactgtggaatgtcattggtgtagcaacgtgggttcaccaaaacacctttttatacaaaagacagatgtgtgaattaaagagattaaaggataaaannnnnnnnnnnnnnnnnnnnnnnnnnnnnnnnnnnnnnnnnnnnnnnnnnnnnnnnnnnnntatgaactatcgcgaaccagcagccacctgaacaatgcctccagcgcccgcccagtttgctctgccagcccctaccgtcctcccccggaccagccttgacaccctccgtacatgcggatcactcggagaaaacaccaccgctgcagcgattccttgttagataaaagcttactcnnnnnnnnnnnnnnnnnnnnnnnnnnnnnnnnnnnnnnnnnnnnnnnnnnnnnnnnnnnnnnnnnnnnnnnnnnnnnnnnnnnnnnnnnnnnnnnnnnnnnnnnnnnnnnnnagccgcctaacctgtggcgccctcgttatgccgacccacgtagactagcggcaggcatagtggggccgcactcgagatagaacaaacgccgccgcccagcctatcctcgcagtgtccccgagaagctagcgggctgcacaacagtttttgacgccgccttccgttcagaacccgccagcaccgccccccgcacgactagcgctcgccgacgcccgttgtcatgcgttacgcccggacgcccgctggccgtccccgctcgcccttatagcgacgcggggactgcgaatcgctggtcgtttgatcaccgacattgctggggtcggtaattcggcgctacgcgtgtcttcgcgtgatcaccgcctcgcaccggacttgaaacctcgtgcgaccgcgcaacacgcgccacatccgtgcgtgagccgttggctcgtctagcgcacacaacaacacgcgcgtgaaatgacgcccacacctcatgcgcggagcctcgaaaatctatcgcccgcccatagtccctcctcccgcactgtcgtcgaccgtgacttatgcgcccttctccatatcctgttacgccacantgcgcgttcgcacgccgtacttgtcctcggtgtttgcctagtgcacgcaggtgatact

SEQ ID NO: 260167 - DNA, 1269 bp, Homo Sapiens
  misc_feature (620)..(736): n is a, c, g, or t
ctctcgcctcggcctgcggccgggatcctccgcccgggtcgcgcagcggaggccgagggctgggacgggcggctgggaagtgggaaagggagctccttttgtcttctcttcccatcccccaggtttgggaaagttttccttttgggaaagcccctctcttcagcctgctggcgggtgtcggattggttagcgaccaccggcccccgcctcccccaacaggattctcctttgggccacaggtcttccggaagttgccaaaccccggtagcggcagcgtccggctgggggctttattagggggcaccggggtctgctttccgactcccttccgactccgcgcctgcgcaggaagcgatttggggagtgttgtgaattccgagggctccacacttaagaggttgtacactcacctgtctacctggactccaatttccatatttccagccacttgaggactgagaggtggatgataaaccctgtcatagtggagcaagttcaggtgtttaaccgctgttatgggggatctgccttttctccctcttctttcttacttccataagtatgtatgtgcagagattgaaaaataaccttgagagagtccatccatctaactccagaannnnnnnnnnnnnnnnnnnnnnnnnnnnnnnnnnnnnnnnnnnnnnnnnnnnnnnnnnnnnnnnnnnnnnnnnnnnnnnnnnnnnnnnnnnnnnnnnnnnnnnnnnnnnnnnnnnnnggttgttggcttccatcaggggtggtcatttccaatcagacacctaagaactcctgctaatgggcaatgatggaggcacattctagatggaggcacattctagaaacgcttgaaactgtgtgttgctttggacagctgtttcaggatgttgggaactgactgtaaggaagacaggattggagaaccaggtttagaagagaaaaggcagtgccagaagtttttgattggagaaaactacagggcaatgttgcacaagaaccattgctggactgcatcattgcttacccaacatgactcagcctcggtattgccactgactcacggagctcctaatagaggagaattagtgtcacagatcgactggaaaaacaatccacatgaagccaggaagagaaatgaagctgctgttgctgaatccatagctggccttaatgatgctgggctagggaaagaccgccccattctggggggagaggtgatgaaaactgtacgtttttcccaaggacaccggggctaggtatggaatgagataa

SEQ ID NO: 260168 - DNA, 1384 bp, Homo Sapiens
  misc_feature (1227)..(1227): n is a, c, g, or t
  misc_feature (1235)..(1235): n is a, c, g, or t
  misc_feature (1268)..(1268): n is a, c, g, or t
  misc_feature (1285)..(1285): n is a, c, g, or t
gtgatcttcacgtccgacaacgggatccccttccccagcggcaggaccaacctgtactggccgggcactgctgaacccttactggtgtcatccccggagcacccaaaacgctggggccaagtcagcgaggcctacgtgagcctcctagaggaaaagaatgaggctcagagaggtgaagtaagctgctcaggattgcacagctgacctcacgcccaccatcttggattggttctcgatcccgtaccccagctacgccatctttggctcgaagaccatccacctcactggccggtccctcctgccggcgctggaggccgagcccctctgggccaccgtctttggcagccagagccaccacgaggtcaccatgtcctaccccatgcgctccgtgcagcaccggcacttccgcctcgtgcacaacctcaacttcaagatgccctttcccatcgaccaggacttctacgtctcacccaccttccaggacctcctgaaccgcaccacagctggtcagcccacgggctggtacaaggacctccgtcattactactaccgggcgcgctgggagctctacgaccggagccgggacccccacgagacccagaacctggccaccgacccgcactttgctcagcttctggagatgcttcgggaccagctggccaagtggcagtgggagacccacgacccctgggtgtgcgcccccgacggcgtcctggaggagaagctctctccccagtgccagccccctccacaatggagctgtgaccatccccaggaggcctgttgcacacattcccagggcatgtcccagacacatcccacacgtgtccgtgtggccggccagcctggggagtagtggcaacagcccttccgtccacactcccatccaaggagggttcttccttcctgtggggtcactcttgccattgcctggagggggaccagagcatgtgaccagagcatgtgcccagcccctccaccaccaggggcactgccgtcatggcaggggacacagttgtccttgtgtctgaaccatgtcccagcacgggaattctagacatacgtggtctgcggacagggcagcgcccccagccctgacaagggagtcttgttttctggcttggtttggggaccggcaaatgggaggcctgaggccctcttcaggctttggcagccacagatacttctgaacccttcacagagagcaggcaaggggcttcggtgccngcgtgggncagtacgcagggtcccaccgacactcacctggngagcacgggcgcctggnctcttaccagcgtcctgggcctagaagggaaagccctttgagcgaaccttttgggggcagggttttctggctttcccttctgtttttggcccccatggg

SEQ ID NO: 260169 - DNA, 1066 bp, Homo Sapiens
  misc_feature (1006)..(1006): n is a, c, g, or t
acacgggcccctacaaggggcccctacaagcggccacaaggatggcaggcttcgcggagctcgggctgtcatcgtggctcgtggaacaatgtcggcagctgggtttgaagcagcccacgcccgtgcagctcggctgcatccccgccatcctggagggtcgagactgcttgggctgtgctaagacaggcagtgggaagacagcagcgtttgtccttcccatcttgcagaagctgtctgaggatccctatggcatcttctgcctcgtcctgacacccaccagggagctggcctaccagatcgcagagcagttccgggtcctggggaagcctctagggctgaaagactgcatcatcgtcggtggcatggacatggtggcccaggcgctggagctctctcggaaaccacacgtggtcatcgccacgccggggcgcctggcagatcacctgcgcagctccaacacttttagtataaagaagatccgcttcctggtgatggatgaggcagaccggctgctggaacagggctgcactgacttcaccgtggacctggaggccatcctggcggctgtgccggcccgcaggcagacactgctgttcagcgccacgctgaccgacacactccgggagctgcagggtctggccaccaaccagcccttcttctgggaagcacaggccccggtgagcaccgtggagcagctggaccagcgctacctgctggtgcctgagaaggtcaaggacgcctacctggtccacctgatccagcgcttccaggatgagcacgaggactggtccattatcatcttcaccaacacgtgcaagaactgccagattctgtgcatgatgctgcgcaaattcagcttccccaccgtggctctgcactccatgatgaagcagaaagaacgctttgccgccctagccaagttcaagtccagcatctaccggatcctgatcgcaacagacgtggcctcccggggcctggacatccctacggtacaggtggtcatcanacaaaaaccccgggctccccaagatctacatccaccgagtcggccggacggcccgtgcaa

SEQ ID NO: 260170 - DNA, 1074 bp, Homo Sapiens
  misc_feature (1019)..(1019): n is a, c, g, or t
ttttcttattggataccggcttttatggggccgagcgccgctgggtacgcggaagtagccgcaggcatggcggcggctatgccgcttgctctgctcgtcctgttgctcctggggcccggcggctggtgccttgcagaacccccacgcgacagcctgcgggaggaacttgtcatcaccccgctgccttccggggacgtagccgccacattccagttccgcacgcgctgggattcggagcttcagcgggaaggagtgtcccattacaggctctttcccaaagccctggggcagctgatctccaagtattctctacgggagctgcacctgtcattcacacaaggcttttggaggacccgatactgggggccacccttcctgcaggccccatcaggtgcagagctgtgggtctggttccaagacactgtcactgatgtggataaatcttggaaggagctcagtaatgtcctctcagggatcttctgcgcctctctcaacttcatcgactccaccaacacagtcactcccactgcctccttcaaacccctgggtctggccaatgacactgaccactactttctgcgctatgctgtgctgccgcgggaggtggtctgcaccgaaaacctcaccccctggaagaagctcttgccctgtagttccaaggcaggcctctctgtgctgctgaaggcagatcgcttgttccacaccagctaccactcccaggcagtgcatatccgccctgtttgcagaaatgcacgctgtactagcatctcctgggagctgaggcagaccctgtcagttgtatttgatgccttcatcacggggcagggaaagaaagactggtcccctcttccggatgttctcccgaaccctcacgggagccctgcccccctggcttcagagagcccgagtctatgtggacatcaccacctacaacccagacacggagacattagaggtgcacccacccccgacacttacatatcaggacgtcatccttaggcactcggaaagacttatgnccatctatgacttggcttgacaccgccatgatcaacaaactctcggaaacctcaa

SEQ ID NO: 260171 - DNA, 515 bp, Homo Sapiens
aagaagatctaccccaagcacgaagccaacaggagagctgggatcgcaaaccagcagcgaggcagatgtgcagatccagggggccagcattccatttctgcactttcaacaagtcatgaaaccctgagcctgttttctcaccaataaatggggaccagtgtccctactctaaggtatttgggagagacttgggagagctctgggtggactgtctcaccctgttcaaatgccagtgcatgcagctaccctggctttacagcaggaaacataaatggcaaggatattcaccacagcacacgcatcccagccaaaagccaaaagcaaccttgatgccacagtgagggagctggttaaagaacctacggtgcaagcactacatggaataggatgaaactttcccaatgacgacagtgtcttcagttgcatgggcggttggctgatctcattattcaggagaacctttttatatagaaaatcttactcaaaaccctaagatagaaaacagatgaaaactg

SEQ ID NO: 260172 - DNA, 1033 bp, Homo Sapiens
  misc_feature (863)..(863): n is a, c, g, or t
ggcctgggtggcgaattcggcacgaggcttagaagtgcctcccagccctgagagttgttgtcatatgctccataaagagaaggttgtttgtattgctgctggactgaggcatgcagtagctgctacagcgagtggcatcgtgttccagtgggggactggtttggcatcatgtggacgacggttgtgccctgggcagactcttccattgtttttcacagcaaaggaaccaagcagagtgacaggtctagagaattctaaagcaatgtgtgttcttgctggctcagaccactcagcttcattaacagatgcaggagaggtgtatgtttggggaagcaacaagcatgggcaactggctaatgaggctgctttccttcctgtgccccagaaaatagaagcacattgtttccagaatgaaaaggtcactgccatctggagtggatggacacacctggttgctcagacagaaactggcaagatgtttacctggggccgagcagactatggtcagctagggaggaagttggagacttatgaaggctggaaactagaaaagcaagattcatttctcccctgttcaagaccaccgaacagcatgccttcatctccgcattgcttaactggagcaactgaggtctcttgtggctcagagcataatttggcaataattggtggagtgtgttactcttggggctggaatgagcatggcatgtgcggagatggcactgaagccaacgtctgggccccaaagccggtgcaggctctgctgtcatcgtcaggactccttgtgggctggggggctggccactccttggccctctgccagctgccagctcaccctgcattgggtccaggaccccaagggncacctaccttttccccaaatgccatcgaggacactgaatctcaggaagccatggacaaagagagaaactggaaggaaagacaatcagaaacttcaacccaaagccaatctgactggtccagaaatgggggactgtgatagagaatctttaataaagtggcttttcccacc

SEQ ID NO: 260173 - DNA, 971 bp, Homo Sapiens
  misc_feature (722)..(722): n is a, c, g, or t
  misc_feature (904)..(904): n is a, c, g, or t
aacgcgcgataccataggggtataggtacgaggcctgggtggcgcgtgggcagttcaggggctgggcggctgaggtgtcttcaaaaacaaacatatttaaaagattttacttctcatctccaggaagaaccagctaggagtagggtgcaaatagctatgggcaacttggcctcggccataaggaagatgtgctgttgccccagcaactgaatgacttctgtaaacccaggagtgtcaggaggatcacaggaggagggggccactctgcagttgtcacagatggaggagacctctttgtttgtggcctgaacaaagatgggcaactggggcttggtcacacagaggatatcccatattttaccccctgcaaatccctctttggctgtcccatccaacaggtggcctgtggctgggattttacgattatgctcacagaaaatggtcaagttctatcatgtggatccaactcctttggccagttaggagttcctcatggacctcgaagatgtgtggttccccaggccattgagctccataaagagaaggttgtttgtattgctgctggactgaggcatgcagtagctgctacagcgagtggcatcgtgttccagtgggggactggtttggcatcatgtggacgacggttgtgccctgggcagactcttccattgtttttcacagcaaaggaaccaagcagagtgacaggtctagagaattctaanagcatgtgtgttcttgctggctcaagaccactcagcttcattaacagatgcaggagaagtgtatgttttggggaagcaaacagcatgggcaactgcctaatgaggctgcttttccttcctgtgccccagaaaaatagaagcacattgtttccaagaatgaaaaaggcactgcccatcctggnagtggatggacaccacctggtttgctccaaacggaaactgggcagaatgtttaacctgggggccgac

SEQ ID NO: 260174 - DNA, 1521 bp, Homo Sapiens
  misc_feature (259)..(322): n is a, c, g, or t
  misc_feature (489)..(489): n is a, c, g, or t
ctctggggaattgtccacgagttggcgcacacacactgctgccggctagtagagaacacagaccccatccctgagtctaggtgggcacttaactccacttagacctgagtttcctctgtctaatgatagactctggaggccccactagaggaatttctgctgaccctctctcactctcaaatactttggcactggagcttgttccactctgaagggtccgagagagatctggagggttgcacaaatcacggtcacgcgnnnnnnnnnnnnnnnnnnnnnnnnnnnnnnnnnnnnnnnnnnnnnnnnnnnnnnnnnnnnnnnngatccagcagcatccttggaacatcctgaagtcaagaaaggcacagcactgtctgccccgatagaaggaattccagaaaacagccacgaggttgggccacagaatttccaaagagagcaatctacaaactgggggttgatttcccagttcctggatctcagcagtcnacacacgagaaggatttttttctgaagctgccacctccaattctgaaataatcccatgtttcagactggggccgggacggtggcaaacctgcagacctggcagcaagatgagggcaaggaagggaaaggtcagctgggcacagtccagttctcagcagtaatgacagaaatgaaggaaggaagctcagaatgagtgcacgggggaaatgggttttgctgatgcatttccagggccggccgtactctttgttttggcacacttttcctgacaaacagccagtgttctcaacacataaatactagtccacgttaacaacaatagcatatgagaccgctctccgtaaagatgccagaatggatgcaaatggactggaaataccttggagggttccacagaaataagacagaagggcaaaggaactttgccaaaggagatggagagcaattctttaaagttagtgggagggaggaagcaaagagctcatataatacaagcatcttaaaatgggacgcatttgcctcgcgcctactgggtgtctgcagctcagcttggtgccccacacaggacaccgactttaagtggctgcctttgcaaggctgagaggccatgagggttgatgcctgaagtggtcagcgccatctagtggaaacatggggcatgccgctttggacggcctcagcctaaaatgagaggcagagagacacgctctatttcgcatctcacatgcaagatgagagaaaggctgttgagttttatttcatcatcgcccgtttaggtcaaaggagatgccactttggctcccagtcatcaatcaactggcaacacccaaggaccaggctgggctacatttgcacattccatttcagcccaggtagagatggagacacttataagaacggcttcggaatgttctccagtttgattctcagatgtcaaagcctgtgaggccatgagaggtccctacttaaacagaacagctatcctttgcggaacgcgtggtcgacgatatccctaactttccgggccggtac

SEQ ID NO: 260175 - DNA, 902 bp, Homo Sapiens
  misc_feature (716)..(716): n is a, c, g, or t
tttgctcgcactcggctgtgcggcggggcaggcatgggagccgcgcgctctctcccggcgcccacacctgtctgagcggcgcagcgagccgcggcccgggcgggctgctcggcgcggaacagtgctcggcatggcagggattccagggctcctcttccttctcttctttctgctctgtgctgttgggcaagtgagcccttacagtgccccctggaaacccacttggcctgcataccgcctccctgtcgtcttgccccagtctaccctcaatttagccaagccagactttggagccgaagccaaattagaagtatcttcttcatgtggaccccagtgtcataagggaactccactgcccacttacgaagaggccaagcaatatctgtcttatgaaacgctctatgccaatggcagccgcacagagacgcaggtgggcatctacatcctcagcagtagtggagatggggcccaacaccgagactcagggtcttcaggaaagtctcgaaggaagcggcagatttatggctatgacagcaggttcagcatttttgggaaggacttcctgctcaactaccctttctcaacatcagtgaagttatccacgggctgcaccggcaccctggtggcagagaagcatgtcctcacagctgcccactgcatacacgatggaaaaacctatgtgaaaggaacccagaagcttcgagtgggcttcctanagcccaagtttaaagatggtggtcgaggggcccaacgactccacttcagccatgcccgagcagatgaaattttcagtggatcccgggtgaacgcacccatgtgcccaaggggttgggattcaagggcaatggccaatgacatcgggcatggaattatgaattatggcccctcctggaaacttcaaa

SEQ ID NO: 260176 - DNA, 1852 bp, Homo Sapiens
tattttgctgcaacaacttttataaaaaggttatgaagtttaaaagtatattttgtatcaagagtacttaatatttgtaaacactaagaaacaaacatacttcctatcaaaacctctagctgccatttgcacactgtttttaaggtgaagcctcccatttcttgaattacttatgcagagctgagcaggctcatgtggttccactcccacgttaagtatttgttctttgggcataggtcatttcatcagcatgggtattttctgaccacccactcagagggtcccactttccagcagaagttctcatatctgggcttaagaatgatttacagtgactgttcagatttggaggcagagcgacttaaaaaatgtatacctcttcctaaagtcatttattttcttcgagaactctggacattccataactgggtgtgtagtatgagtagaatgaattcagtgctagcctcttgctggagagggacaagtgcaggtttagaattacagcttatgttagaaggttctcttctcatgataccttcatgttagaagaaagaggacagaggcagagctgatggaatctcataaaataacagctaatgccgtgtgtcaggcactatgcttaacaagtatctgtttaacatgtgtaaatgctctttagctcttgcttttctataatataaaacagtcctggagtcctgttcttccccttcctttctctcgtgtcctttgactgtcttttgcagcctctggcctttctcattatctactacagcttgctacctgactcatcaaaggcacatgggtgttgcaagagaggatggtatcctgtgtttataccattaaacttgctattataacaggagctataaagtgaaaaaatagagacaagaaataaagcagagatttgtcatccatgagcttggggctattgataattatgaagagaggagatattaagtattctgaacagtaacttgatatagttgagaatgctggacttgagttcaaaagacctaggtctaggtcttggatctgtcagcattagctgtatggtcaagtcaaccctttttgagcttcagttttttcatctgacaggtgggaaaaacatctctctttcctaccaaaaataagttgtggatatcaaatgagacagtgtgcttaaaacttccttgtgaatgataaaattttatgtaaacataagctgtttgatggattagaaatggatatgaagaagaaaaatatggtttaaaattgttagtaaaatttcattaaaatttggacacgtaaacttaacatagttggctttctccttatagggccctatgttaattttttttctaactcactaggttgctgaccctgagtaatcatgtctgtctcttcattttataatgctctaaccttcagcttctaggagcctgtaaagatggtttttgctgtcacaaagccaggtcctaaaaggcagatttgaatctcacttgaaaaaatgcagtttcacacattaaaggcaaggagaatttttggctattggtataaaacaaagatcactgcccaaagtgaaagaaatattaaagaaaagcttccatggcagtgacttcctgtggaaaacttgatccgaccttcaactgctggataaattacttttattttggagatatatgtagaaaccacgttgatatcttggtcaccagagtcatgtcttaataattcatcttttatcatctggaacccatctccaccattggccaggaagtttgggaggatcaccttatatacctcgtccattttgagagggtcataactgggcactcgacacttggtgcaaagagcatctaatttgactactctgtct

SEQ ID NO: 260177 - DNA, 1873 bp, Homo Sapiens
  misc_feature (1512)..(1512): n is a, c, g, or t
agcccgacgcaagaggcaggaagcgcagcaactcgtgtctgagcgcccggcggaaaaccgaagttggaagtgtctcttagcagcgcgcggagaagaacggggagccagcatcatggcagaacaggatgtggaaaacgatcttttggattacgatgaagaggaagagccccaggctcctcaagagagcacaccagctccccctaagaaagacatcaagggatcctacgtttccatccacagctctggcttccgggactttctgctgaagccggagctcctgcgggccatcgtggactgtggctttgagcatccttctgaggtccagcatgagtgcattccccaggccatcctgggcatggacgtcctgtgccaggccaagtccgggatgggcaagacagcggtcttcgtgctggccaccctacagcagattgagcctgtcaacggacaggtgacggtcctggtcatgtgccacacgagggagctggccttccagatcagcaaggaatatgagcgcttttccaagtacatgcccagcgtcaaggtgtctgtgttcttcggtggtctctccatcaagaaggatgaagaagtgttgaagaagaactgtccccatgtcgtggtggggaccccgggccgcatcctggcgctcgtgcggaataggagcttcagcctaaagaatgtgaagcactttgtgctggacgagtgtgacaagatgctggagcagctggacatgcggcgggatgtgcaggagatcttccgcctgacaccacacgagaagcagtgcatgatgttcagcgccaccctgagcaaggacatccggcctgtgtgcaggaagttcatgcaggatcccatggaggtgtttgtggacgacgagaccaagctcacgctgcacggcctgcagcagtactacgtcaaactcaaagacagtgagaagaaccgcaagctctttgatctcttggatgtgctggagtttaaccaggtgataatcttcgtcaagtcagtgcagcgctgcatggccctggcccagctcctcgtggagcagaacttcccggccatcgccatccaccggggcatggcccaggaggagcgcctgtcacgctatcagcagttcaaggatttccagcggcggatcctggtggccaccaatctgtttggccgggggatggacatcgagcgagtcaacatcgtctttaactacgacatgcctgaggactcggacacctacctgcaccgggtggcccgggcgggtcgctttggcaccaaaggcctagccatcacttttgtgtctgacgagaatgatgccaaaatcctcaatgacgtccaggaccggtttgaagttaatgtggcagaacttccagaggaaatcgacatctccacatacatcgagcagagccggtaaccaccacgtgccagagccgcccacccggagccgcccgcatgcagcttcacctcccctttccaggcgccactgttgagaagctagagattgtatgagaataaacttgttattacganccaaccaacccccaaaaccctaatccccttgtggggccgctctcgggccctcgaggaagcttttctaaaccacttctttttggcagcgcgggccccaataggttaagtgaaacatgggccataacctgtttccctaaggaaattctggcccatgacataagggcctcgggaatcctcaccaaatacaaaaaaggcctcggcggccaacccggaggggttcttgaaccacatcccgagaggggagttcctgaaggggccattacgtgggaatctgattcagacgggggagtccccaggcggaaagtcacggaataaccaaaatgtaagcggcccggggccccttggcgacactacattgtga

SEQ ID NO: 260178 - DNA, 941 bp, Homo Sapiens
  misc_feature (630)..(630): n is a, c, g, or t
  misc_feature (647)..(647): n is a, c, g, or t
  misc_feature (657)..(657): n is a, c, g, or t
  misc_feature (781)..(781): n is a, c, g, or t
  misc_feature (783)..(784): n is a, c, g, or t
  misc_feature (797)..(797): n is a, c, g, or t
cgcgcggagaagaacggggagccagcatcatggcagaacaggatgtggaaaacgatcttttggattacgatgaagaggaagagccccaggctcctcaagagagcacaccagctccccctaagaaagacatcaagggatcctacgtttccatccacagctctggcttccgggactttctgctgaagccggagctcctgcgggccatcgtggactgtggctttgagcatccttctgaggtccagcatgagtgcattccccaggccatcctgggcatggacgtcctgtgccaggccaagtccgggatgggcaagacagcggtcttcgtgctggccaccctacagcagattgagcctgtcaacggacaggtgacggtcctggtcatgtgccacacgagggagctggccttccagatcagcaaggaatatgagcgcttttccaagtacatgcccagcgtcaaggtgagtccctcgggccagactggaccaggcgccacttggtttctgcagctttgttagcctcggctctggcccagccagcatttaccaagcttggcaggggcagctgcctttgaggtttggcggtggtttttgctccttaaaagcctgatgaattatgcatggctcccagggngcctgcgcaggtcccangcctgggggnctgcctttgagtggaaggccccggggagggctctcagggcctgccttgggtcccctggaggccttcctggttcgcagggtgctggggccggtggcagggttggggcccttggggccgtgtatcnanncatgggagcgggnttccctccctcattccccattaagtgggtctggtgtttctttcgggtggggtctcctcccatccagaaaagggatggaaagaaaagtgttggaaagaaggaaactgttcccccccatggtcccttgggtgggggggaccccccg

SEQ ID NO: 260179 - DNA, 872 bp, Homo Sapiens
  misc_feature (535)..(535): n is a, c, g, or t
  misc_feature (631)..(632): n is a, c, g, or t
  misc_feature (721)..(721): n is a, c, g, or t
  misc_feature (748)..(758): n is a, c, g, or t
gggggctaccggccgcgactccgggcttggccccggccctagctcgtcggctgtgtattggggcgcgtggaggctgcagtcacggtggcgcccgcggggacggaggagggaatgagtgaagaggagcaaggctccggcactaccacgggctgcgggctgcctagtatagagcaaatgctggccgccaacccaggcaagaccccgatcagccttctgcaggagtatgggaccagaatagggaagacgcctgtgtacgaccttctcaaagccgagggccaagcccaccagcctaatttcaccttccgggtcaccgttggcgacaccagctgcactggtcagggccccagcaagaaggcagccaagcacaaggcagctgaggtggccctcaaacacctcaaaggggggagcatgctggagccggccctggaggacagcagttctttttctcccctagactcttcactgcctgaggacattccggtttttactgctgcagcagctgctaccccagttccatctgtagtcctaaccaggnagcccccccatgggaactgcagcccccctgtctcccccctcagcagtctggagtgcaacccccgttgggtgctctggcaggagctgggtggtgcannaaaggcctggcgggtgcccggagtacacagtgacccagggagtctggggcccagcccaccgccaaagaaattccccatgaccctgtccnagtgggagcggtttcaattgaaaattnnnnnnnnnnnccccccccccctggaatgggcctttccaaaacccgggggccccagggttggccactggggggattccctcctaccgaaaattccccgtaggggaaagaaaaaatcccccggccc

SEQ ID NO: 260180 - DNA, 573 bp, Homo Sapiens
  misc_feature (486)..(505): n is a, c, g, or t
  misc_feature (546)..(547): n is a, c, g, or t
gtggccacataggaaattgcctgggcctggccgattgcccccaccaggctggagatgttgatgacattcccttgactcttccgcaggtaggggagggcgagcttggtcaaggtgtacgtccccagtaggttcagctccagcagctggcggaatccctgggcagaggtttcctcaggcctctgtgggggtgggtggtggccagcgttgttgacaacacaatccaggcggccaaaatcggcggatggtctcagaaaccagggtcttcacatcatcttcctgagtcacatcacagaggataaagacagccccagggagctcctgctccagggcccggcccccagactcatccttgtcgcagataaccactcgggccccgctgttcacgaaggcgcgcacgatcccagctccgatgccgcgcccgcccccggtcacgaccaccaccttcccggcatagcgcgttcccgtagccatcccgtgtacgtcggnnnnnnnnnnnnnnnnnnnngggcctctttcacctccaaagccccgtgaggccgtcgcatnnaatcctcaatagaggctggatccctg

SEQ ID NO: 260181 - DNA, 1109 bp, Homo Sapiens
  misc_feature (787)..(799): n is a, c, g, or t
  misc_feature (958)..(965): n is a, c, g, or t
  misc_feature (967)..(1017): n is a, c, g, or t
  misc_feature (1019)..(1021): n is a, c, g, or t
  misc_feature (1024)..(1034): n is a, c, g, or t
  misc_feature (1036)..(1037): n is a, c, g, or t
  misc_feature (1039)..(1048): n is a, c, g, or t
  misc_feature (1051)..(1051): n is a, c, g, or t
  misc_feature (1056)..(1057): n is a, c, g, or t
gggggcgctccgccggccgccctgcgtacgctcgcaaggcgctcgcagactccggagtcgccaacatgtcgaccgccatgaatttcgggaccaagagcttccagccgcggcccccggacaagggcagcttcccgctggatcacttaggtgaatgtaaaagctttaaagagaaattcatgaagtgtcttcataacaataattttgaaaatgctttgtgcagaaaggaatcaaaagaatatttagaatgcaggatggagagaaaattgatgctacaagaaccattggagaaactgggatttggagacttgactagtggaaaatcagaggcaaaaaaatgaattttgatgagaagacccctgggccgtgttcagtggtctctcaggacggagggcatcatcctgcctcttaggtttggctgaggcctgcgtgtggtgtccttagaaatgggcttcgaatagaagctccagccctgtgggggcgtctcctgggtagggagtggcgtcccgttttcccttaggagggtgtttctgcattgaacccctgagtgggacggcgttcccggcaaagctgggagggaggcgagcgtggggcaagacccttgtcttcgaggccggggccctcttgtatggggcggttttatgttgcagtcctctgatactttctgagttcaaagaggtaaatgtataaatttcagtcccttctgaacacagatatcatcagaaaattaccattccctagcaggatgttttcgtgtttgtattcgtatatgccagttcatttcctttgnnnnnnnnnnnnngtggaacacaaagtaggaagtgagaaccttctggctttggatggattgacttcttgattctttctggttttgcctgaacaccaagtagcttcataatcaaagggtcattttctggtttgtatcagaccgtatttataaagttgggtatttaatttcaannnnnnnngnnnnnnnnnnnnnnnnnnnnnnnnnnnnnnnnnnnnnnnnnnnnnnnnnnnannntgnnnnnnnnnnntnngnnnnnnnnnnaangtttnnaaaccattctctttgggaaagctttccaaaaaagtaatttaaaattggtgtg

SEQ ID NO: 260182 - DNA, 693 bp, Homo Sapiens
  misc_feature (17)..(17): n is a, c, g, or t
  misc_feature (56)..(56): n is a, c, g, or t
cctaacaaaataaagcntaacttcctactgaaactccatgaaagcctgttccctantgtccagttttgaagtttccaaagtgaaagaactgaaatgtccaactgcaggctttcccgaattccctcgacccatgtcccatcccatggattctcttcttgtctagatttccaagcatgaagatgctaactaaagcatttctcaatggggaacacgaaaagatttctattattgtgggttctccggtgttcctaaaggctgagttataactaaaggatttcaacctatttgtgagtttgatggtaacgctggaaaaatgcttgaagttgttactttgctcattataggagtatggtttccctccaggaaggtttctctaaaattaagagctattctacaacagagacccctctacacttaaggtatttatgggatctgtcctctcatggcttctcaggtgtttaaagaggctacaactccagctgaaattcattccacattctttacattgaaaaggtttctcaccagtatggattctctgatgttgattaagatgtgacttcagagtgaagcctctgccacattcatgacattgatgggattttgtgctggagtagattttttgatgttgtttggtgtgggaacactggccaacattttctctacatatatcacattgatagggcttctccgctg

SEQ ID NO: 260183 - DNA, 651 bp, Homo Sapiens
ctttatctccactctgcggagattcacgcctggaaaacgctcttctgagaggatctgtggaggtcaacccaggagagagaagacaggactgaagcactgaaagggtcctgccgttaagggcgcaggattgtatagaatatataatagcagtagcagctctgtttacggagcattaaccttacgtggagttatttcctgcatttcctcctttcgtctttacaaggtagccgtttggcgttcgtgaggtatggatgttcccatccctaatttgcaaaataggtaactgaggctcaggagagctagactagtttgtgcacagccgagaagtggtcaagctagaatggggaccccaggttttgtgctccctactctccaccgataacctattcaaagggctttgcaaggagctttttgactaatcgtctgtcaatggttcttcattcacgtattaattgcacatcagtatgtgccaaatctactagacattggagaaacagtaggaacaacacatggtaccggcacatggatctttcaggaaaacgaagtaggtaataaacaggaaaaagcccgagtctgatgctaagaagaacataaacaggatgctgagagattgggtctctccacattgccccggctgctctccaacccctg

SEQ ID NO: 260184 - DNA, 386 bp, Homo Sapiens
ttgcacatcagtatgtgccaaatctactagacattggagaaacagtaggaacaacacatggtaccggcacatggatctttcaggaaaacgaagtaggtaataaacaggaaaaagcccgagtctgatgctaagaagaacataaacaggatgctgagcggaaagtgaccagaagaggtgtgcagtttccaggcctggcccatacagacctccaacaggtgctcccctgtgctgttactccttctgccaactggaagcagatggtgaccaggctctggagaaagcaaggcctgaagatgggagattcctaagtggaggagaactgtgccttactgacctaaatatccactcagtattgttacgtgagaataaataaacttgtgttgacc

SEQ ID NO: 260185 - DNA, 936 bp, Homo Sapiens
  misc_feature (222)..(318): n is a, c, g, or t
  misc_feature (420)..(420): n is a, c, g, or t
gggacgcctggaaaacgctcttctgagaggatctgtggaggtcaacccaggagagagaagacaggactgaagcactgaaagggtcctgccgttaagggcgcaggattgtatagaatatataatagcagtagcagctctgtttacggagcattaaccttacgtggagttatttcctgcatttcctcctttcgtctttacaaggtagccgtttggcgtcgtgannnnnnnnnnnnnnnnnnnnnnnnnnnnnnnnnnnnnnnnnnnnnnnnnnnnnnnnnnnnnnnnnnnnnnnnnnnnnnnnnnnnnnnnnnnnnnnnntgagccaccgtgcctggctgagaagatggatttaagacatattttggaggtaacattgtcaggacttcctgaaggattagatgtggaagggaaggataaganacagaccaaggataactttcaaatgtatgcttaagcaactggatggataatgatgccattgagtgagtgaaaaacttgatggaagtggaagattcagagttcatttctatctaggttaatttgagacataccagagcataagttaagtaagtaattgaatattggagtggagacttatttgtctaccgaattattgttttccttgtcggacatacacctacactgcattcctcaaagtaaaatttaagtgtggctctgtgcctatgctctccccagcggaaagtgaccagaagaggtgtgcagtttcccaggccctggcccatacagacctccaacaggtgctcccctgtgctgttactccttctgccaactggaagcagatggtgaccaggctctggagaaggcaaggcctgaagatgggagattcctaagtggaggagaactgtgccttactgacctaaatatccactcagtattgttatgtgagaataaataaacttgtgttgaccattcaaa

SEQ ID NO: 260186 - DNA, 430 bp, Homo Sapiens
  misc_feature (39)..(39): n is a, c, g, or t
  misc_feature (60)..(60): n is a, c, g, or t
  misc_feature (69)..(69): n is a, c, g, or t
  misc_feature (93)..(164): n is a, c, g, or t
ctgaatgcctaagaagaacataaaaacaggatgctgaanagaattggggtctcctccaanattgccccnggctgctctcccaacccctgagtnnnnnnnnnnnnnnnnnnnnnnnnnnnnnnnnnnnnnnnnnnnnnnnnnnnnnnnnnnnnnnnnnnnnnnnngaagatggatttaagacatattttggagcggaaagtgaccagaagaggtgtgcagtttccaggcctggcccatacagacctccaacaggtgctcccctgtgctgttactccttctgccaactggaagcagatggtgaccaggctctggagaaggcaaggcctgaagatgggagattcctaagtggaggagaactgtgccttactgacctaaatatccactcagtattgttatgtgagaataaataaacttgtgttgaccgtttaaa

SEQ ID NO: 260187 - DNA, 675 bp, Homo Sapiens
tgttgaaaaagagaatctacaaccagagcaaatttatggtgctgatcaaactggattgttttggaaatgtctaccgtcaaggacattaactcttgaaactgaccaaagtacttctgggtgtaggtcaagcagagagagaatcatcattatgtgttgcgcaaatgccacaggtttacacaaacttaatctttgtgttgtggggaaggccaaaaagccccgagcattcaaaggcactgacctttcaaaccttcctgtgacatattacagtcaaaaaggtgcatggatagaacagtctgttttcagacagtggtttgaaaagtactttgtgccacaggtacagaagcatttgaaatccaagggacttttagaaaaagcagtgcttcttttagatttccccccagcacgtccaaatgaagaaatgttgagttcagatgatggcagaataattgtgaagtatttgccaccaaatgtcacaagtctgattcaaccaatgagccagggagttctagccactgtaaaaagatactatcgagcaggacttctccagaaatacatgggatgaaggaaatgacccaaaaatattttgggaaggaacttgacagtgttgggatgcaatttatggaagtgttcaaggagcttgggaacatgggtaaaatcaagtacccttaacccaaa

SEQ ID NO: 260188 - DNA, 784 bp, Homo Sapiens
gactctggaggaagactggagcctttgcggcggcgctgcccctcccctggtccccgcgagctcggagggcccggctggtgctgcgggggccccgggaggttgaaaactaagcatggggaagagctgcaaggtggtcgtgtgtggccaggcgtctgtgggcaaaacttcaatcctggagcagcttctgtatgggaaccatgtagtgggttcggagatgatcgagacgcaggaggacatctacgtgggctccattgagacagaccggggggtgcgagagcaggtcaccatcgtggtccttggcaacaagtgtgacttacaggagcagcggcgtgtagacccagatgtggctcagcactgggccaagtcagagaaggtgaagctgtgggaggtgtcagtggcggaccggcgctcctcctggagccctttgtctacttggccagcaagatgacgcaaccccagagcaagtctgcttccccctcagcggaagaacaagggcagcggtccttggatggtgaagagctgcgttcctctttcacgatcccaggcccattttcagtggtctgtggggctctggtagaatgtgtgaggggcaaagtagagggaccaagcctgtctttccgcaggtacagcagggagctccccgcagggccacgcccaagccactttgtttccctctcacctctgggaaagtggccaatactctgggttggaaatcccctttctttaagccttccaagggtaatctccattccagtttagaggatctagtccactgtctctgggc

SEQ ID NO: 260189 - DNA, 888 bp, Homo Sapiens
gggtgaagaggggaagcaaaagttggctgggggcgtgggccctgggcgggggagcttccctggcttgactggggaaagaccaggcttgtcctttacttttgcccctcaacacatttacccagaggccccagacactgaaaatgggggctgggatcgtgaaagaggaacggcagctcttcagccatccaaggaagccgctgcccttgttcttccggctgagggggaaggcagacttgctctggggttgcgtcatcttgctggccaagtagacaaagggctccaggagggagcgccggtccgccactgacacctcccacagcttcaccttctctgacttggcccagtgctgagccacatctgggtctacacgccgctgctcctgtaagtcacacttgttgccaaggaccacgatggtgacctccttcttgtccttggatttgtcaatctccttcttgagcagctccacacgctgaaaagactctctgctatctgtgctatagaccaggacgtagccatcagtgcaagagaagcagtgtcggggcagttcggccccatctcggagcccccgggtgtcatagaaacgcacctgctctcgcaccccccggtctgtctcaatggagcccacgtagatgtcctcctgcgtctcgatcatctccgaacccactacatggttcccatacagaagctgctccaggattgaagttttgcccacagacgcctggccacacacgaccaccttgcagctcttccccatgcttagttttcaacctcccggggcccccgcagcaccagccgggccctccgagctcgcggggaccaggggaggggcagcgccgccgcaaaggctccagtcttcctccagagtcggtgtaggctcctccaggcccc

SEQ ID NO: 260190 - DNA, 617 bp, Homo Sapiens
  misc_feature (499)..(499): n is a, c, g, or t
aaagaggctgaagctccacctgggaggggaggcagaaatggaggaacgggcgttcgtcaaccccttcccggactacgaggccgccgccggggcgctgctcgcctccggagcggccgaagagacaggctgtgttcgtcccccggcgaccacggatgagcccggcctcccttttcatcaggacgggaagatcattcataatttcataagacggatccagaccaaaattaaagatcttctgcagcaaatggaagaagggctgaagacagctgatccccatgactgctctgcttatactggctggacaggcatagcccttttgtacctgcagttgtaccgggtcacatgtgaccaaacctacctgctccgatccctggattacgtaaaaagaacacttcggaatctgaatggccgcagggtcaccttcctctgtggggatgctggccccctggctgttggagctgtgatttatcacaaactcagaagtgactgtgagtcccangaatgtgtcacaaaacttttgcagctccagagatcggttgtctgccaagaatcagaccttcctgatgagctgctttatggacgggcaggttatctgtatgccttactgtacctgaaca

SEQ ID NO: 260191 - DNA, 1714 bp, Homo Sapiens
atttcctaatcctgtctgccttgagcctggtatctcctacaagctgcatctgaagctggtacggacagggggaagtgcccagcctgagactccctactctggacctggcctgctcattgactcgctggtgctgctgccccgtgtcctggtgctagagatgtttagtgggggtgatgctgctgccctggagcgccaggccacctttgaacgctaccaatgccatgaggagggtctggtgcccagcaagacttctccctctgaggcctgcgcacccctcctcatcagcctgtccaccctcatctacaatggtgccctgccatgtcagtgcaaccctcaaggttcactgagttctgagtgcaaccctcatggtggtcagtgcctgtgcaagcctggagtggttgggcgccgctgtgacctctgtgcccctggctactatggctttggccccacaggctgtcaagcctgccagtgcagccacgagggggcactcagcagtctctgtgaaaagaccagtgggcaatgtctctgtcgaactggtgcctttgggcttcgctgtgaccgctgccagcgtggccagtggggattccctagctgccggccatgtgtctgcaatgggcatgcagatgagtgcaacacccacacaggcgcttgcctgggctgccgtgatcacacagggggtgagcactgtgaaaggtgcagttgctggtttccacggggacccacggctggccatatgggggccagtgccggccctgtccctgtactgaaggccctgggagccaacggccacttggctacttcttgccaccgaggatgaatattcccagcagattgtgtgccactgccgggcaggctatacggggctgcgatgtgaagcttgtgcccctgggcactttggggacccatcaaggccaggtggccggtgccaactgtgtgagtgcagtgggaacattgacccaatggatcctgatgcctgtgacccccacacggggcaatgcctgcgctgtttacaccacacagagggtccacactgtgcccactgcaagcctggcttccatgggcaggctgcccgacagagctgtcaccgctgcacatgcaaactgctgggcacaaatccgcagcagtgcccattctcctgaccagtgcgcactgttgatccaagcagtgggcaatgcccatgcccccccaatgtcaagggccctacctgtgaccgctgtgcccccaacttctggaacctcaccagtggccatggttgccagccttgtgcctgccacccaagccgggccagaggccccacctgcaacgagttcacagggcagtgccactgccgtgccggctttggagggcggacttgttctgagtgccaagagctccactggggagaccctgggttgcagtgccatgcctggtgaatgtgactcctcctggaaataaatacccctcaggtgtccaccgctttcaaacggacccttggccaacttccctccccacagggatggccctgccttcaccccaaaacagaacatgcaaataccacgccccatcccttcctgcagcgaaatcacctctttcaacttaaaatcagacactcccccacaaccgcgaacaagcaatcagacattaagcaacaagagaaacctataataaacccctacactacacgcacacatagtagtacaaaaatataaaggatagcaaagaccagcggacacac

SEQ ID NO: 260192 - DNA, 640 bp, Homo Sapiens
  misc_feature (29)..(29): n is a, c, g, or t
  misc_feature (104)..(281): n is a, c, g, or t
atttaaaaatgccatgctggccgggccgnaatggttcacgccctataatcctaagcactttgggaggctgaggcaggtggaatcacgtgaggtccagaagttcnnnnnnnnnnnnnnnnnnnnnnnnnnnnnnnnnnnnnnnnnnnnnnnnnnnnnnnnnnnnnnnnnnnnnnnnnnnnnnnnnnnnnnnnnnnnnnnnnnnnnnnnnnnnnnnnnnnnnnnnnnnnnnnnnnnnnnnnnnnnnnnnnnnnnnnnnnnnnnnnnnnnnnnnnnnnnnnnnntgacaaagcaagactccatctcaaacaaacaaacaaaaaagtatgctgaagaagaatccatctactccagtgcagcttttccaaaaatagttctgtgtaaactcagttttctatttctgccctaaaatctatttggggcaggggacacacctgaaacaaagttggctttggataacttcgcttactttcctttgaatactttggattctgtttaaaagtatgatgaaagccgtgaacaacaattagtgccattaaatatattagctatttaatgctctaaattataaggacaaaaattaattggttcagaactgcctctttaatagactctgtggcttcccttgacactggaggatctt

SEQ ID NO: 260193 - DNA, 749 bp, Homo Sapiens
  misc_feature (308)..(326): n is a, c, g, or t
ggacgacgaggaggtagctggctaccaggatagcattgggcagctggagaatgatctgaggaacaccaagagtgagatggcacgccaccttcgggaataccaggacttgctcaatgtcaaaatggctcttgacattgagatagcagcttacaggaaactgctggaaggcgaggagacacgttttagcaccagtgggttaagcatttcggggctgaatccacttcccaatccaagttacctgctcccacctagaatcctcagtgctacaacctccaaagtctcatccactgggctatcacttaagaaannnnnnnnnnnnnnnnnnncatctaaggtagcctctaagaaaacctcccagataggggaaagttttgaagaaatattagaggagacagtaatatctactaagaaaaccgagaaatcaaatatagaagaaaccaccatttcaagccaaaaaatataattccattgctttgaaaaagttaatgcttaagagggaatgatatgcatttgacttgttaaacagcctattcctgaactataacacctgccaccactataaaatgtcttcaaggcttcagtctcatatttagtattgaatacttacattctctaataagaaaaccacccccttaaattgaagtaaactgcagtcctgggagcaatcacagatgaggttatctaagaatacagcttttctggaccttcagctcacgcctttcacagtggatcgaattgattccaggtgg

SEQ ID NO: 260194 - DNA, 427 bp, Homo Sapiens
  misc_feature (105)..(316): n is a, c, g, or t
  misc_feature (354)..(354): n is a, c, g, or t
  misc_feature (363)..(363): n is a, c, g, or t
  misc_feature (377)..(377): n is a, c, g, or t
ttgaagatgcatgacctgaactcgactgcttgtgtttgtttacatatcaggcatacccaggcatctcctgcagccagaggttccattgctgtctttgctcagtcnnnnnnnnnnnnnnnnnnnnnnnnnnnnnnnnnnnnnnnnnnnnnnnnnnnnnnnnnnnnnnnnnnnnnnnnnnnnnnnnnnnnnnnnnnnnnnnnnnnnnnnnnnnnnnnnnnnnnnnnnnnnnnnnnnnnnnnnnnnnnnnnnnnnnnnnnnnnnnnnnnnnnnnnnnnnnnnnnnnnnnnnnnnnnnnnnnnnnnnnnnnnnnnnnnnngggtggggaacctggggaggccaggactttgccagttnagcccaagntccacgcccacttncactcccagcctggggccaaccagagccaagattcttgtcttccaaaaaa

SEQ ID NO: 260195 - DNA, 244 bp, Homo Sapiens
catgtaatggtgtacttcactcttacctagcacgctgtcttctcattgctttgggggagggagggtctctctgctggcactgtctaacttgcttacctgctgactttgcagtttgcttgtgctatgacatttattgtaggtgctatttagggtaggcttaaagtgctgggtggtgatttgagttcaaacaataaaaaattgtattttttcaatattgtataaacaatagtgttctaattacctt

SEQ ID NO: 260196 - DNA, 863 bp, Homo Sapiens
aatagcctccattcttctcaaccccaatatgaaaaatttctctttcaactggggtaactaaaaccccaaagaagccatcaacagtcaaaagggataggcacttacaattttaaattctgtggtaccaaatgaaagctgaaatccttgcctctcaagcaagaaaatccaccatgacactggcccaagggaatgtttctctcatgctgccttttatggtatctggtacccaagacaatattacaaaagcttaagggtttcttcttcttcccctttggtcccatttaacaaggagtatgtgaaagtgatcatctgaagtacccagctctgctctgaccccaagcaaatcagctcctctgattctctctgcacctggcctatggcactttggtaggtttgtgcctcccagggcaactgggacattgtttggcaacctgacgatgcttttgtctcccctctcagcccagaacactaagtatggtacttgtgcagcttgcaagagtggaaaagtctcctggtctttgagcctcgggaacccaggagtcagtccctttagccaaatagtcattaccctttcaatacaatgtctttcctcaggttgcgtggtctttgtcccttttacccacagtattcctgtcctcttgtcccgaccgctctggctactcctctttctctccggcctatccagtctcagggcttgtgggctggcttgattccacgtctccccacagaggtaagatgcattgtgaacaagctatgaccatcagactgcaagagtgcctacacaatggctaggctgcagccagatatgaagagggatcatacagacctgatatcctgcacatatctaccacactaagatatct

SEQ ID NO: 260197 - DNA, 2803 bp, Homo Sapiens
  misc_feature (2737)..(2737): n is a, c, g, or t
  misc_feature (2759)..(2759): n is a, c, g, or t
  misc_feature (2771)..(2771): n is a, c, g, or t
  misc_feature (2790)..(2790): n is a, c, g, or t
tagactataaccgttgtttaaaaagcaagctgggtacggtccggaattcccgggatatcgtcgacccacgcgtcgggaacctataggccagagtatgcggttaactccattaaaacagatgtgcacagtccaggcaatttcaggattattgggactttgcagaactctgcagagttttcagaagcctttcactgccgcaagaattcatacatgaatccagaaaagaagtgccgggtttggtgatcttcaaaagaagcattgcagcccttggctagacttgccaacaccacagaaatggggaattctctaatcgaaagaaaatgggccctaggggtcactgtactgacttgagggtgattaacagagagggcaccatcacaatacagataacattaggttgttctagaaagggtgtggagggaggaagggggtctaaggtctatcaagtcaatcatttctcactgtgtacataatgcttaatttctaaagataatattactgtttatttctgtttctcatatggtctaccagtttgctgatgtccctagaaaacaatgcaaaacctttgaggtagaccaggatttctaatcaaaagggaaacagaagatgttgaagaatacagttaggcaccagaagaacgagtaggtgacactatagtttaaaacacattgcctaactactagtttttacttttatttgcaacatttacagtccttcaaaattccttccaaagaattcttatacacattggggccttggagcttacatagttttaaactcatttttgccatacatcagttattcattctgtgatcatttattttaagcactcttaaagcaaaaaatgaatgtctaaaattgttttttgttgtacctgctttgactgatgctgagattcttcaggcttcctgcaattttctaagcaatttcttgctctatctctcaaaacttggtatttttcagagatttatataaatgtaaaaataataatttttatatttaattattaactacatttatgagtaactattattataggtaatcaatgaatattgaagtttcagcttaaaataaacagttgtgaaccaagatctataaagcgatatacagatgaaaatttgagactatttaaacttataaatcatattgatgaaaagatttaagcacaaactttagggtaaaaattgccattggacagttgtctagagatatatatacttgtggttttcaaattggactttcaaaattaaatctgtccctgagagtgtctctgataaaagggcaaatctgcacctatgtagctctgcatctcctgtcttttcaggtttgtcatcagatggaaatattttgataataaattgaaattgtgaactcattgctccctaagactgtgacaactgtctaactttaaaagtgcatttctgaatagaaatgggaggcctctgatggaccttctagaattataagtcacaaagagttctggaaaagaactgtttactgcttgataggaattcatcttttgaggcttctgttcctctcttttcctgttgtattgactattttcgttcattacttgattaagattttacaaaagaggagcacttccaaaattcttatttttcctaacaaaagatgaaagcagggaatttctatctaaatgatgagtattagttccctgtctcttgaaaaatgcccatttgcctttaaaaacaaaaagttacagaaatactataacatatgtacataaatggcataaagcataagtatacagttcaataaacttaactttaactgaacaatggccctgtagccagcacctgtaagaaacagagcagtaccagcgctctaaaagcacctccttgtcactttattactcccagaacaacaactatcctgacttctaatatcattcactagctttgcctggttttgtcttttatgtagatagaatcaatcagtatgtattcttttgtgcctggcttctttctctcagccttacatttgtgagattcctctgtattgtgctgattgtggatcttttcattctcattgcagaataatgttctattgtgggacttattacaatttgttcatcctattgttgatgggcacttgagaactttccattttggcgctattacaaatagtgcaactatgaatgtactgcatgttaccatcttacttgagcctttaatggacttatttcttcaaatccttccaaaaattattataagcattgaaattatagtttcaagccaactgtggatacccttaccctttcctcctttatcacaaccaccgttacaagtatacttatatttccctaaaatacatttaaaacttacctaagtgacatttgtagttggagtaataggagcttccagctctaataaaacagctgtctctaacttattttatttccatcatgtcagagcaggtgaagagccagaagtgaagagtgactagtacaaattataaaaagccactagactcttcactgttagctttttaaaacattaggctcccatccctatggaggaacaactctccagtgcctgggatcccctctgtctacaaatataagattttctgggcctaaaggatagatcaaagtcaaaaatagcaatgcctccctatccctcacacatccaggacatcatggaattttacatgggtactcttgttgagttctataggaggccttctggatgtcttcttaaagcacttacccgattcnttgggggttgttcacatcaggntaagggcatttntctaatttccctccctaantccagttctactt

SEQ ID NO: 260198 - DNA, 736 bp, Homo Sapiens
gggagaatttagaggaagaaaataccggagttgcaggctataggtaaatttctcaaggttataggttggggttcttagaactttttgtggtgtgtgttggcctagagcgactcagaagcgttagtgacttcacctaaaaaagctaacctctctgctgagcgcgaccggtatgcggcgcaggatgagcctcagggcttctgttaagagtctgtctgagaaagccggtctgcgctgttcctcggtggcgaccttaattatgagatgagctaatgctttactgacttaaccatggcgcagcgggcagtgtggctcataagccacgaaccgggaactccactttgtggcaccgtgagattctccagacggtatccaactgttgaaaaacgagccagagtcttcaatggagcaagttatgtgcctgttcctgaagatggtccctttcttaaagcactgctctttgaacttagattattggatgatgataaagacttcgttgagagtcgtgatagctgttcacgcatcaataaaacatccatttatggactcctgataggaggtgaagaactctggccagttgttgcttttctgaagaatgacatgatatatgcttgtgttccactagtttgaacaaactctgtccccctcctccgccactaaattagtgtcagtggaattttcacaaagctttttgaatttcttttttggggataccgggaattttcctttattcagggcc

SEQ ID NO: 260199 - DNA, 272 bp, Homo Sapiens
  misc_feature (92)..(92): n is a, c, g, or t
tgcgctgttcctcggtggcgaccttaattatgagatgagctaatgctttactgacttaaccatggcgcacgggcagtgtggctcataagccncgaaccgggaactccactttgtgcaccgtgagattctccagtgtgatttggaaggaatcatgccaaatgttaccatcagcttgagtctccccaccaatggatctccacttcaggatattctagttcacccttgtgtaacttctcttgactctgcaattctgacttctaggtaagtattga

SEQ ID NO: 260200 - DNA, 1769 bp, Homo Sapiens
  misc_feature (1590)..(1722): n is a, c, g, or t
caggatcatagaaaagaagacaaagcttgctcagccatgagatggccaggtatccagttttgttaactctctttgggaatttctttttcagcctgttttttagcttagtgccattatgtcattttgatttgtattcaagtactcttcaagtatctttgtaatgaaggtttggctacttgtataggtctgcctgcagggtgaaaatgccagtgtgaatattctagctaccaaacattgttttttgttgaaaaactgactttctgttgtctacctcaggccttgtgcatttgggttatctcaagccagtcaccacagagggtctctagggtctgcaaaatagaggccaaatccagggaccaggccctaataatagaagttgtaccaaaatgcctgtggtacttgatggcctgttggtcaaataggaagtacaagtgtgtgatgttagaacctccctagttgctgctatatcaaacactgcacacttgacaagtgttttcatttccccgccctctgacagaacaacattcctaattctttgaaggcaaccagtgcaaaggctactacacttgtgtaatgatatttagcagatgcatacaggactggatcccagggcactgtcagttcttccctccctctcgtgctgctcagtttgtcctctgctcccatgtaggcctaaagtcaccccactccttagtgcctgcacctcaccacgatattgaggaagcacaggacatccaagggtactctccagtttggcttggagacttgagcaagccctaaacgtcccctgctccctggacttctcctgggttgtgcttttttgggggcaacataccttggacaaagctgagctgacagcttaatgtttattagcctcctacctaagtcagtcactttgctaaattcttcacctgtggtaactcattttgattgttataacatctcagcaccattattcccattttaatgatgaggaaactgagtcatagaggatacagacttgcccaaaggagagccaggattttcacaccccctcctcaagctgggcctgccctccaagtgcttgttatatacctccacgggtgtcagcccagatgactcctcacccatccaccacctgcagcttgagatgttaactattagagctccattcttttggttcaaaacgttgatacttacttagatgttccctgagaggagtgtttatttctgagtaaggggctttgttgaaagagggggttagagagagcaagacagcacttgagtgcactggcaggaagcagagataagacttgaatttcagtttggtagacctccttctttagcagcccaacctgtagcaaatctagtttagcctgcatggcagggaagagggattctcttcccaccctcaccatttgcaagtggcaggagctgagaatgccagtacgagagtgtagccaaagtgagaggctgagagcaaaggagacatttttttcagttttgagtcgagtatccagacagaggcaaatcattttgtttaactttttattaaagtgtaactatagaaacacatcaatgatttttcacaagtggagcacgtgcatacannnnnnnnnnnnnnnnnnnnnnnnnnnnnnnnnnnnnnnnnnnnnnnnnnnnnnnnnnnnnnnnnnnnnnnnnnnnnnnnnnnnnnnnnnnnnnnnnnnnnnnnnnnnnnnnnnnnnnnnnnnnnnnnnnnnnttcttcgtatctggtttcttttcaccaatattatgtttgtgagattt

SEQ ID NO: 260201 - DNA, 774 bp, Homo Sapiens
ccgggctggactgtggaccccgatgggccagagtccttgtggcccacagcatagcactggggacagagcgctctatgcaggtgaggcgtatgagaacagcatggtaaataattgatgaagtcacatttgttcaacttaaaggattgttctttattctgaagttattttcttccttatttggatgataaaatttccttttatgtaatgaaggtaaaagtagagggcaatatttttgctttttgaaatgctcttggttgcaaaacaaaatgttggttgctgtttgtcagccccagaatttcttcttaagttcgcctgtctctgaaatcccaaagtcacggaaccgcagtctagctgtggtgcatgtttacgtattggtgagaaattcctcttgggttcttgaacagcctgtacgctggcaggcagcactgcagcatttctgctgctcatggccaagaacgagtctggagatcgctgcgtgcggttttaggaagtgccaacacccgtggtgatgggcctctggccacccctggatccatgggacacactcacaggaagctgatgtggccttctcggtgaggactgcaccttaacctgggcactgggagcctgtggcccccctgtatgttggtgatgacactagtgtgggtcttctggctctggggctacagcttctgcctcctcacctggccgtcggtactccggcaagcaggcctggcctcccggggcctggatccctaccggctgggattggcctcctggaagtacctgtctgga

SEQ ID NO: 260202 - DNA, 1295 bp, Homo Sapiens
  misc_feature (970)..(975): n is a, c, g, or t
  misc_feature (977)..(980): n is a, c, g, or t
  misc_feature (982)..(985): n is a, c, g, or t
  misc_feature (987)..(990): n is a, c, g, or t
  misc_feature (992)..(996): n is a, c, g, or t
  misc_feature (998)..(1001): n is a, c, g, or t
  misc_feature (1005)..(1009): n is a, c, g, or t
  misc_feature (1011)..(1012): n is a, c, g, or t
tttaaaggcggggcgagcctcggggtaatgcgtgggtgaggcgagggctaaacgggcggaatgaactgggagtaagatgctgccgagtccgggcgaaaagcaacgcatgctgttggacaggatacgagcttgaaatccgggtcttcctccagcagctcaagggccgcgtagcccgggaggccattcagaaagtgcatccgggtggccttcagggaccaaggcgccgggaggcacagcccccagcccccatagaggtctggacggatctggctgagaagataacagggccactggaagaagccgtggcagtggctttctcgcaggtgctcaccatcgcggccacggaaccggtcaccctcctgcactccaagccccccaagcccacgcaggcccgtggaaagcctttgctcctgagcgcccctggaggacaggaagaccccgcccctgaaatacctagctctgcccctgctgcacctagctccgcacccaggactcctgaccctgcccctgagaaaccttctgagtcgtcggctggtccctccactgaagaagactttgctgtggactttgagaagatctacaagtacttgtcctctgtctcccgaagtggccgcagccccgagctctcagcagctgagtccgctgtggtcctcgacctgctcatgtcacttccagaggagctgccactcctgccctgcacagccctggttgagcatatgacggagacgtacctacgcctgacagccccccagcccattcccgctggagggagcctggggcctgcagcagaaggggatggggctggctccaaggcaccagaggagacccccccagccaccgagaaggccgagcacagcgaactgaaatcgccttggcaagcagctgggatctgtcccctgaacccgttcctggtgcccctggagcttctgggtcgggcagccacccctgccagtgagggggcatgggcggnnnnnnannnntnnnncnnnncnnnnncnnnngccnnnnngnncgggggcggcgcggggcggcgccgcgtccgaggcgccacgggaaggcaggacaccgggaacccaataacggcccgaggacgcggaccccacctcactcgatttttgctctgcccagccagcgaatcaactgatcgcacaccgctagtgtcccccacaggtgtcgtccaattggcctggtccatcgggcggccagctgtctccgttccccgcgcccttgtgttccagccgccgacggccccgatagcccgctgttacgtccgtcatcatcacgatgacaaagct

SEQ ID NO: 260203 - DNA, 958 bp, Homo Sapiens
cggagcgtggggctaggagggggtcattgccgtatcacggagaacccggggggaggctatatagggggccgggggaggccggccccaatccccttctagaagcgaggcccccaggctcccctcccaccgggaaatgcgctgggggggctgtcaggcgtaggtacgtctccgtcatatgctcaacccagggctgggcagggcaggagtgccagctcctctggaagtgaccatgagcaggtcgaggaccacagcggactcagctgctgagagctcggggctgcgcccacttcgggagacagaggacaagtacttgtagatcttctcaaagtccacagcaaagtcttcttcagtggagggaccagccgacgactcagaaggtttctcaggggcagggtcaggagtcctgggtgcggagctaggtgcagcaggggcagagctaggtatttcaggggcggggtcttcctgtcctccaggggcgctcaggagcaaaggctttccacgggcctgcgtgggcttggggggcttggagtgcaggagggtgaccggttccgtggccgcgatggtgagcacctgcgagaaagccactgccacggcttcttccagtggccctgttatcttctcagccagatccgtccagacctctatgggggctgggggctgtgcctcccggcgccttggtccctgaaggccacccggatgcactttctgaatggcctcccgggctacgcggcccttgagctgctggaggaagacccggatctcagcctcgctccggccccgcagctcccgggccagctcggtggcgtccggctccggctggccctgccgcgcctgcaggagtcgcactagctgccgcttctcgcgagcgctccaggtcgcgggaccggtcacctcgcccagatagcgcgccggggccgctcgccgcctgggcctcgtgccgaattcgccacccagccct

SEQ ID NO: 260204 - DNA, 914 bp, Homo Sapiens
cagcagtgatagcgaggagacactgagggggccccgaggctcctgaggacctgagggttaccgggggcgccgggcccgtcacccttctctgggctcgacgaccgggcactgtggaggcgggagaggggctgaggggacgggaactgacccagcagcccctgccgccaggctcaacgtggacgggctcctggtctacttcccgtacgactacatctaccccgagcagttctcctacatgcgggagctcaaacgcacgctggacgccaagggtcatggagtcctggagatgccctcaggcaccgggaagacagtatccccgttggccctgatcatggcataccagagagcatatccgctggaggtgaccaaactcatctactgctcaagaactgtgccagagattgagaaggtgattgaagagcttcgaaagttgctcaacttctatgacaagcaagagggcgagaagctgccgtttctgggactggctctgagctcccgcaaaaaacttgtgtatgcacccctgaagacaacggtctgcatcgactccatgagcgtcaaactcacccgcccgaaccctttgacgggtgcccaggggcaacctgggagacccctgccaaaagaacggggcttcgggatcaaagagtacggacggggcagccgcctgcggggacgagataccgggcgttttggttggaaggggcttggctggagggcctacggccccccccgggaaaacaggaaagccccccctggggcaaaccccgcggctggccccaatcaaaaatgcttttcgggagggccagggcccggggttccctccccgaagggggccgaagccatttttccggggggctttccctatagtcccccccgccttggagacccacacgtgatagggggggccctctcctata

SEQ ID NO: 260205 - DNA, 741 bp, Homo Sapiens
  misc_feature (538)..(538): n is a, c, g, or t
  misc_feature (541)..(541): n is a, c, g, or t
  misc_feature (557)..(692): n is a, c, g, or t
tgggcctcttcctggtggggctgctgctcggcctgctgctcgcagctgctgccctgctgggctccgcaccctactaccagccaggctccgtgtggggtccactggggctgttgctggggggcggcctgctctgtgccctgctcactctgcgctggccccgcccactcaccaccctggccaccgccgtgactggtgctgcgctgatcgccactgccgctgactacttcgccgagctgctactgctggggcgctacgtggtggagcgactccgggctgctcctgtgcccccactctgctggcgaagctgggccctgctggcactctggcccctgctcagcctgatgggcgttctggtgcagtggagggtgacagctgagggggactcccacacggaaggtaagggggcacaggccaaggtggacatgagaggagtgggtggccagggatgggttgggggcccaagtgactggggagtgggggacagcagcagaaggcctcgatggcggtagagagctgacttgctcagggtctgggaggnatnagaccccaggtgccannnnnnnnnnnnnnnnnnnnnnnnnnnnnnnnnnnnnnnnnnnnnnnnnnnnnnnnnnnnnnnnnnnnnnnnnnnnnnnnnnnnnnnnnnnnnnnnnnnnnnnnnnnnnnnnnnnnnnnnnnnnnnnnnnnnnnnntgcaaacaaacatgattccagttgtgtagagtgatatgacagagacatt

SEQ ID NO: 260206 - DNA, 890 bp, Homo Sapiens
  misc_feature (415)..(415): n is a, c, g, or t
  misc_feature (428)..(428): n is a, c, g, or t
  misc_feature (483)..(483): n is a, c, g, or t
  misc_feature (574)..(575): n is a, c, g, or t
  misc_feature (602)..(602): n is a, c, g, or t
  misc_feature (646)..(646): n is a, c, g, or t
  misc_feature (686)..(686): n is a, c, g, or t
  misc_feature (714)..(715): n is a, c, g, or t
  misc_feature (728)..(728): n is a, c, g, or t
  misc_feature (745)..(745): n is a, c, g, or t
  misc_feature (754)..(755): n is a, c, g, or t
  misc_feature (766)..(766): n is a, c, g, or t
  misc_feature (802)..(803): n is a, c, g, or t
  misc_feature (814)..(814): n is a, c, g, or t
ggggaaggctgaagtctttcacctgagctgctgccagttcgctcttctgttcctgggtggttgggagaagagaagagggagggtattttatgctttaattaaagacagataagagagcagggtaaccaggagccgacaacaactcctgacgcaatggttcagccttttactaccatcccatttccaccacctccgcagaatggaattcccacagagtatggggtgccacacactcaagactatgccggccagaccggtgagcataacctgacactctacggaagtacgcaagcccacggggagcagagcagcaactcacccagcacacaaaatggatctcttacgcagacagaaggtggagcacagacagacggccagcagtcacagacacaaagtagtggaaattcagagagtnaatctaccccganacggctgcatgtctctaatattcctttccgcttccggaccctgacctccggcagnatgttgggcagtttggcaaaatctagatgtagaaataatctttaatgaacgtggctctaaggtgataatgctacagcacgtgtaatgaccnnatagaagatggtcacaccatatgcaantggggtggaataagcccagtagttggagctgtatatggtccggnagtatatgcagcatccagctttcaagcagatgtgtccccntagcatgatgcagcagtgcccctatcanngaagaggggggtnatcacacttacattccntttatcagnnctccctttagntcctggcttcccttaccctactggcagcaccacggnnagcgctttcanaggagcccatttgaggggcagaggggggacccattttttgggggcagtccgagcgggtacctccacagcatccgcc

SEQ ID NO: 260207 - DNA, 796 bp, Homo Sapiens
ctactattgcattcatgaagaaggagggagatgaaaaattaggcattctaactgggtaaccaggagccgacaacaactcctgacgcaatggttcagccttttactaccatcccatttccaccacctccgcagaatggaattcccacagagtatggggtgccacacactcaagactatgccggccagaccggtgagcataacctgacactctacggaagtacgcaagcccacggggagcagagcaggcaactcacccagcacacaaaatggatctcttacgacagaaggtggagcacagacagacggccagcagttcacagacacaaagtagtgaaaattcagagagtaaatctaccccgaaacggctgcatgtctcttaatatttcctttccgctttccgggaccctgacctccggcagatgtttggggcagtttggcaaaatcctagatgtagaaataatctttaatgaacgtggctctaagggattcgggttcgtaactttcgagaatagtgctgatgcagacagggccagggagaaattacacggcaccgtggtagagggccgtaaaatcgaggtgaataatgctacagcacgtgtaatgaccaataagaagatggtcacaccatatgcaaatggttggaaattaagcccagtagttggagctgtatatggtccggagttatatgcagcatccagctttcaagcagatgtgtccctaggcaatgatggcagcagtgcccctatcaggaagagggggtatcaacacttacattcctttaatcattcctggcttt

SEQ ID NO: 260208 - DNA, 2512 bp, Homo Sapiens
  misc_feature (1861)..(1994): n is a, c, g, or t
  misc_feature (2480)..(2480): n is a, c, g, or t
tggtccggaagtccgggatatcgtcgaccacgcgtcggtgtgtggccaaaactggggcatcgtggaggccatggtggtctgccgccagctgggcctgggattcgccagcaacgccttccaggagacctggtattggcacggagatgtcaacagcaagcaaagtggtcatgagtggatgtgaagtgctcggagaacggagctgtccctggcagcacttgccgccacgacggggaggacgtggcctgccccacagggcagagtgcagtacggggccggagttgccatgctcagaaaccgcccctgacctggtcctcaatgcggagatggtgcagcagaccacctaactggaggaccggccccatgttcctgcatgcagatgtgccatggaaggagaactgcctctcggcctcagacgcgcagaccgaacccaccacgggctacacagacggactcctgcgcttctcctcccagaatccaccaacaatggacagtccgcacttccggcccaagaacggccgacacgcgtggatctggcaacgactgtcacaggcactaccacagcatggaggtgtacacccactatgacctgctgaacctcaatggcaccaaggtggcagagggccacaaggccagcttctgcttggaggacacagaatgtgaaggagacatccagaagaattacgagtgtgccaacttcggcgatcagggcatcaccatgggctgctgggacatgtaccgccatgacatcgactgccagtgggttgacatcactgacgtgccccctggagactacctgttccaggttgttattaaccccaacttcgaggttgcagaatccgattactccaacaacatcatgaaatgcaggagccgctatgacggccaccgcatctggatgtacaactgccacataggtggttccttcagcgaagagacggaaaaaaagtttgagcacttcagcgggctcttaaacaaccagctgtccccgcagtaaagaagcctgcgtggtcaactcctgtcttcaggccacaccacatcttccatgggacttccccccaacaactgagtctgaacgaatgccacgtgccctcacccagcccggcccccaccctgtccagacccctacagctgtgtctaagctcaggaggaaagggaccctcccatcattcatggggggctgctacctgacccttggggcctgagaaggccttgggggggtggggtttgtccacagagctgctggagcagcaccaagagccagtcttgaccgggatgaggcccacagacaggttgtcatcagcttgtcccattcaagccaccgagctcaccacagacacagtggagccgcgctcttctccagtgacacgtggacaaatgcgggctcatcagcccccccagagagggtcaggccgaaccccatttctcctcctcttaggtcattttcagcaaacttgaatatctagacctctcttccaatgaaaccctccagtctattatagtcacatagataatggtgccacgtgttttctgatttggtgagctcagacttggtgcttccctctccacaacccccacccctttgtttttcaagatactattattatatttttcacaggacttttgaagcacaaatttattgggcattttaatattggacatctgggccctttggaagtacaaatctaaggaaaaaccaacccactgtgtaagtgactcatcttcctgttgttccaattctgtgggtttttgattcaacggtgctataaccagggtcctgggtgacagggcgctcactgagcaccatgtgtcatcacagacacttacacatacttgaaacttggaataaaagaaagatttatgnnnnnnnnnnnnnnnnnnnnnnnnnnnnnnnnnnnnnnnnnnnnnnnnnnnnnnnnnnnnnnnnnnnnnnnnnnnnnnnnnnnnnnnnnnnnnnnnnnnnnnnnnnnnnnnnnnnnnnnnnnnnnnnnnnnnnntgaatatgcctgctgaaagtggacatcgaaaataaaaaacagccatagaaaactcgatcgtgtctgaccatcctccacaaggaagtagtgatttcattactgctgtgtaccggcgggcagaccgaacagagatgaaatactatgtttttttcccgtcctgaaaaacagtcccgagactgattgtaattcattaaccctaacaaagaacatccccgccggtcacccaaggggtttataaaactatattcggtgggggcctgggccccttggttaactttactaggagatctgccgctgcgtaaaaaatcgtgccacccccccgcccctattttccaaggtgtaattgaaactggtgaaactccccccgggggggagcagaccccaagggggtggtggaaatcaaacccgccacggaaaaaaagccccccttttcgcccaaaaaataaaatttcccccccgagaaatagcggtcgaacaaaaaaaggnatcatttattggccaatcatttctaaaagaag

SEQ ID NO: 260209 - DNA, 793 bp, Homo Sapiens
  misc_feature (28)..(28): n is a, c, g, or t
  misc_feature (58)..(58): n is a, c, g, or t
  misc_feature (69)..(69): n is a, c, g, or t
gggtcctcctgcccacagacggcaagcnccccgacctcgatggcccaggaaaagggtntcccaaagggnacctcacccgccccgagctctggaatgactgacgctcgcatccaggacatttgagatgggaatccaaataggctacttggaaaagacgtgctgcaggcagccctggagagactcatggagttcattgtacattactccatctaccgaggcagcgcatggcatgactgaatggcttggaacaaacacagaaattagcaccacaaacattcaggaaccaaatataatctgctatggtcacaccacagacaatgcaggaagaggctttttattgcttgtgtgtgttttcaaatcaagtaggcacaacccagtcctcataacagccctcgggagtggacgcaccggggcgggagagcgcaggagggagtgtgcttggctatcctgcccagtggaaaggaaagtgacgtgcattgatcttagagtccttggcaacagactgtggaggcaataacaggataaagaaagcagggagaacgaggcatggccagggaccccagtgcgccttcaaggagaccttaaaacagatagcaccacaagagagccacaagagagaagtgtaaaaaataagcaccaattttcattgagttatcacctacaaaaaatgtggtttccctgccctggacattctcccatcaggctctgcgggaagaaaagcggaaaaaggaagcaaataaaattaatccaaacctgtgttttagtcttaagtgcatgagaaaaaagaaaatta

SEQ ID NO: 260210 - DNA, 1529 bp, Homo Sapiens
  misc_feature (118)..(118): n is a, c, g, or t
  misc_feature (151)..(192): n is a, c, g, or t
  misc_feature (297)..(320): n is a, c, g, or t
aagtgtgcaatttacttcgcaatacgcgcgcgaggggcgggggtaagggcagtgaccgcgaatcagagagcggtggataagcgcgggctgcctaccgtggtccgaaatggcggtggcngcgtggcgcgccgcgcaggcggccgttaacgcnnnnnnnnnnnnnnnnnnnnnnnnnnnnnnnnnnnnnnnnnnccgccgtactcgcgcgcaagaggaatataggtcgggcacgggtgtgcggaacacgagcgggggtacgggagaaaataggccaacgaataagaggggtgacggaannnnnnnnnnnnnnnnnnnnnnnntgcgtgcccgcggagggggagggggagcatgccatggactaggtggagcaggccgaaaaactccctctgttcatcttctgggaggaaactagatttgtccgcattgatgttcggccttttaagctcctcttcagtaaagcccatgtcccgtttggtcatctggtaatcagtgtccagggtggacgtgaagatgagcgggtcatctgtgttgagcgagtagttagcctggtcatttttgagccgaatgactgcatgctccgtgtccggcttccagacaccagtgaggtacctggaccaggggcagatctcgaagtgcatgttttcctcccgcagcctgttataaagggcctgctcttcccagggtgtggtagccgtgtcccagccgctctgtcttgagtatgtccacagcctcttttactacttcggccgagcccacctccccggcgtggacagtacggtgaatgccgctcttcacagcctcctggtaggcctggacatgtccaggcaagaggctgcttcctgggatggtctcatctccagccaggtcaatggctaccacggtctgctgctggtacttcttacacagctccaccaccttgggggaccagttgggctgtggcgcatgcagcacaggatggaccgggccttgaccccgaagtctcgctccccctcctgcaggcctggcccactagggccaccacctcgtcgggggggaggtccccttcagcctggttccaggggattggctccactttggagttggccagcaggtgcggactgtaccgcacctccacatacaccacgccctctttggccttcatctctacaaactcataggcgatccttttgatagcctcccggcagcccgcgatagcaggcatgtagtagtcaaacttggccaggaagtctggaagggtgagcggcttgtccatgccaatgacgttcagcagcccctctgctgtgttagctgggagggcgatccctctcctcctgccatagtataagatggtttcaggcttgatggatccgtctaggtggacatgcagttctactttgggcttgtcgaaggcgggcgtctgggccatggtgccctcgtgcgccccggcgctgctccctccgccgccgctcggtgggtctctgccggctcggtggccgctcggctttccctggggccagcggtggccgcggccggccacgctcttcttcccc

SEQ ID NO: 260211 - DNA, 966 bp, Homo Sapiens
  misc_feature (844)..(860): n is a, c, g, or t
tggacaataggtttgaagatgacaagatggcgctatgacatgtgtgttgcacatgatgttgtacctatcgcgatcgtcgtacgacttgtctacgattcttgaggcccaccgtcagacaggtagcctactaaattggttttggtgaaccacacgtcacccccttccactgtagcacactggcgacttttcgcccatgtggcaaaccggggcaccgccagcattccaccacctggattcatctatttttgtaataaaactgggaatccgaagccaagttaaaaagactaacttctaaaatagtacacccgcccaccaatacacacacagtagacttagtttgatactgattaattttaagagtaaactcatcctgtcccctcttaatactctactgcaatttattgatggctagaatatttactgacttaaaaaaggtattaaatacttgtatcatgaaattacattcttattaacaataagacatactgtgtaagaaaatagctcatgtgtgaaatgtgtctgaaatgcattttttccttacaactatcaaaacatccactcacactaaaatgaaaccactcccaaccccccctgaaaaaatgttaagggaagacggggtgggctgggggaggagcaaggaaggaaaagatttagctatactaattacagcacagtgattaacaatggttcaagacagaaccaacaagagttggtcaaaaagatgccttcaatacatggctacaattaaaaaccaaactcagccgcttttggttcattgcagtgagaccaaaaaaattatctctcacagattcatataaatactagactccagctcttatatcannnnnnnnnnnnnnnnnctgtttgtttctgcaggcctagctatcttattacatttgtatttgctctgcaacaactacagcggacgcgtggtcgacgatatcccgtaattccggaccggtaccc

SEQ ID NO: 260212 - DNA, 556 bp, Homo Sapiens
acttcccccggctccagccggcgcaggcagcggcggcagcagcaggcgagcctcggccccgcaaggccatgaaggtgaagaagggcggcggtggggccgggacggcgacggagtccgctccggggccctcgggccagagcgtggcccccataccacagccgcctgcggaatccgaatctgggtccgagtcggagccggacgcaggcccagggcccaggccggggccgctgcagaggaagcagccgatcgggccggaggacgtgctggggctgcagcggatcaccggtgactacctctgctcccctgaggagaatatctacaagatcgactttgtcaggtttaagattcgggacatggactcaggcactgtcctctttgaaatcaagaagcccccagtctcagaacggttgcccatcaaccggcgggacctggaccccaatgctgggcgctttgtccgctaccagttcacgcctgccttcctccgcctgaggcaggtgggagccacggtggagttcacagtgggagacaagcctgtcaacaacttccgcatgatcga

SEQ ID NO: 260213 - DNA, 1327 bp, Homo Sapiens
tttcctggggaagcggcgggcggggtggagcagccagctgggtccggggagcgccgccgccgcctcgatggggtgttgaaaagtctcctctagagctttggaaggctgaatgcactaaacatgaagagcttgaaagcgaagttcaggaagagtgacaccaatgagtggaacaagaatgatgaccggctactgcaggccgtggagaatggagatgcggagaaggtggcctcactgctcggcaagaagggggccagtgccaccaaacacgacagtgagggcaagaccgctttccatcttgctgctgcaaaaggacacgtggaatgcctcagggtcatgattacacatggtgtggatgtgacagcccaagatactaccggacacagcgccttacatctcgcagccaagaacagccaccatgaatgcatcaggaagctgcttcagtctaaatgcccagccgaaagtgtcgacagctctgggaaaacagctttacattatgcagcggctcagggctgccttcaagctgtgcagattctctgcgaacacaagagccccataaacctcaaagatttggatgggaatataccactgcttcttgctgtacaaaatggtcacagtgagatctgtcactttctcctggatcatggagcagatgtcaattccaggaacaaaagtggaagaactgctctcatgctggcctgtgagattggcagctctaacgctgtggaagccttaattaaaaagggtgcagacctaaaccttgtagattctcttggatacaatgccttacattattccaaactctcagaaaatgcaggaattcaaagccttctattatcaaaaatctctcaggatgctgatttaaagaccccaacaaaaccaaagcagttgagtgatgtctcttccccaagatcaataacttcgactccactatcgggaaaggaatcggtattttttgctgaaccacccttcaaggctgagatcagttctatacgagaaaacaaagacagactaagtgacagtactacaggtgctgatagcttattggatataagttctgaagctgaccaacaaaatcttctctctctattgcaagcaaaagttgcctccccttaccttaacacaataaggagtttacaagataaaatttcagggccaaaatcccccaaaggaggcgggaagccaggaccttaagcttttgaactcaataacatttccccccccaacctggacctgggggcccattcccctggggaaaaacccgggttgaaaaccttcctccccccagaaacctccaaaattcatcctccccattcccggggccttaaaa

SEQ ID NO: 260214 - DNA, 993 bp, Homo Sapiens
ccccccgaattaatccttccccagaatagagaagtgacctggaaggaggaaggagagaatctttacccaggtccatgccccggctctgggcctgtctgcaaatactgcaacataaagtaccagagctgagccggggtgtccagcaacagaaactggaagccagcgggaagtaaatgcagggcgcctctccaggttcagtactcttcatgagcccagcctggctgaggagctgaccaagtcctggctgacagctgcactgggggagcccaccatgaagtgcaagaccacctcccatcgctcctcggcgtacttgtcaagggagggaacgtcccgggcatgcttgtctggtcccaagctgacttgtgtcatcagaccaggccttccccccacccagaagggcaatgcggaggttctggcggaaaatggggttgaggatgaggccctggagcccgcctgggagcagctgtgtgtgccagatccggaggccgctcagcagccctgtactttcctcctgagccttgctgaattccttctttacccacagagctacagcagcctgtggcaaaggctgctccagaaagagcatccgcatcacccagttcttagccaaggatgggagctccctgaagacagccagacatgtggcagggtgcccatacaatcggtccaataccccagggctcaggccccctaagaattcctgcagattcctgcattgtaggtgtactcggttcagtccccttgaaggggtgctctccatcaccactctgtcgatcctcctcgcgcaccccgagtctcgggccgtcgcttaatcggagccaaagtctcgcattggctcctggagattgagggaaagatggtgaaaaaatgcgaggaaaagatggggaaagcaaagaaagatttcacaggcaagagcccagaatggagaattcagaagagaagggaggtcggacgcgtgggtcgacgatatcccggggattccggaccggtacc

SEQ ID NO: 260215 - DNA, 758 bp, Homo Sapiens
  misc_feature (415)..(415): n is a, c, g, or t
  misc_feature (421)..(421): n is a, c, g, or t
  misc_feature (625)..(648): n is a, c, g, or t
tatttccataacaaacaaaaaacactatgctttagtcaagtgtgcttttcagtatcactagaagaatccaggaatccctcaaattatgtgtaaggttagttggttggtctcaaaattccatgtatcaaatctcactttcagtttatttgcattgtgaaagggaagtgtgttctggaagaactaagattgagaggtaaattggggagaaagtaaggacttttccttatgtccattcaagcacaggtatcctgtcaagcaacacagggctaggaatggtggttgtagggctggccaaactgatgagaggtgattgaaattaccactgctcaggacacagtgtagtcagtcacacagcagggcatcctgccactgggaacttgcaccctataaaatcggagaaatcaaaaaccctgtnaactgncctgcctttaggctgtatattcaaaatgtatttcctgttttacctagtcattaatgtatacagatattccctacttaaatgaacagtgagttaacagattttaggattagtattttaccacaaaaatgccattcattgcataactccaactcagggagaacaaataaaactagagaaactcatttctagcccaaaaacaatttnnnnnnnnnnnnnnnnnnnnnnnnttctaacaaacgtcactgataaagcgttcttgagcaaaaacaagataggataaaacttaagaatcccataaggattatacatgctaagattggcttttaaactttgaaaa

SEQ ID NO: 260216 - DNA, 1705 bp, Homo Sapiens
  misc_feature (1268)..(1288): n is a, c, g, or t
  misc_feature (1520)..(1520): n is a, c, g, or t
  misc_feature (1536)..(1548): n is a, c, g, or t
cgaacgtgcccatcctctacgacgccgacaccgccacccacccccgcccgccgcccgggtggcgaattcggcacgagggtggttccaccaacatggagctctcgcagatgtcggagctcatggggctgtcggtgttgcttgggctgctggccctgatggcgacggcggcggtagcgcgggggtggctgcgcgcgggggaggagaggagcggccggcccgcctgccaaaaagcaaatggatttccacctgacaaatcttcgggatccaagaagcagaaacaatatcagcggattcggaaggagaagcctcaacaacacaacttcacccaccgcctcctggctgcagctctgaagagccacagcgggaacatatcttgcatggactttagcagcaatggcaaatacctggctacctgtgcagatgatcgcaccatccgcatctggagcaccaaggacttcctgcagcgagagcaccgcagcatgagagccaacgtggagctggaccacgccaccctggtgcgcttcagccctgactgcagagccttcatcgtctggctggccaacggggacaccctccgtgtcttcaagatgaccaagcgggaggatgggggctacaccttcacagccaccccagaggacttccctaaaaagcacaaggcgcctgtcatcgacattggcattgctaacacagggaagtttatcatgactgcctccagtgacaccactgtcctcatctggagcctgaagggtcaagtgctgtctaccatcaacaccaaccagatgaacaacacacacgctgctgtatctccctgtggcagatttgtagcctcgtgtggcttcaccccagatgtgaaggttggggaagtctgctttggaaaaagggggagttccaggaggtggtgcgagccttcgaactaaagggccactccgcggctgggcactcgtttgctttctccaacgactcacggaggatggcttctgtctccaaggatggtacatggaaactgtgggacacagatgtgcaatacaagaagaagcaggacccctacttgctgaagacaggccgctttgaagaggcggcgggtgccgcgccgtgccgcctggccctctcccccaacgcccaggtcttggccttggccagtggcagtaatattcatctctacaataccccggcggggcaagaaggaggagtgctttgagcgggtccatggcgagtggatcccccaacttgtcctttgacataactgggccgcttttctggccctcctnnnnnnnnnnnnnnnnnnnnncggcctgttttcacaaacaactccctggggccacccaagcccttgggtgggaaggaaaattgccagggcccacccctgaaagcggggcccctcccaaaacgaagaagcccccccgccccataaggcgtggaagcaagacaacctggacccccagggccccacaaagaacccctggaaaaagcccgggggctgcccttggaaaaaatgagcctcttggggcaggggccccggncgccaaaggtattgtnnnnnnnnnnnnnctccctggcctccccccatggggaaggggtgggcattctttcctccccagggggggaaacctttctagaagagaggcctcctgcgggttttccttaacgggggggcccctgttttttttcccatatggaaaacacccctttggacaaatcaaagggg

SEQ ID NO: 260217 - DNA, 1669 bp, Homo Sapiens
  misc_feature (1608)..(1617): n is a, c, g, or t
  misc_feature (1643)..(1643): n is a, c, g, or t
taaagctatatagagaaagaatgtacggtcagttccctatggtttctgtagatcatcgtcatcttgtatattccccacaaagccgttcgcagcttccggagaaggggccagagcccggtggggccagtttctcacagagggaggaggtggcctttgtcccctggagcccgatcagccagttggtgctactgctgtggccagctggggggcttcctccagaccaccggcctcggccccggcatccctgttgggcgtcagcctgagagtccctactgtgcgtcagaatccaccttgcgtgctgtgcgtatctgtgaacctggagcggttacttattttgacagatatcactttgggtctttttacattaaatttcttttctctaaggaatataagacataccccatagctctgtgtgagccagcaataccgctgccccctggcgacagggcagaccaatgatgccaggcagctgtcacacgctagtattggcttcattgtgatctgagccctgcacgctgggccttcagaattaatggccagcagtgtcagggatgagcccgtcagccagggcacaggcctggctcacagtcctgcacacctgctggcctggggagctccagccaggcagcgagtcctgccccgcccgcagctccctcccacaccccgcctggccaagatgactgcttcagggggctttggggaaagaattaggaagggtcagaaccaaacaatacctgctcatttacactgaggattcagggcgggagacaggagccttggggtcctgttaaaccacagacagttatgaactgaaagtcataacggggagaggtgcctggcttctacctgggtgctcaggaatgttcctcgtcacccctgccactctgtggtcggtgccctgcttcctcctccactcctggccgccttctccagcgccgcacacacagatgctcggtctcagagaggctggcacggcctggcagtctgagaaaagcgtcagttaggcacacctgcaggcccctcggtgggacagcggcggccttggagttaggagccaccctgggaggttgtgccggtgccatgctcctccctgtgtcttgtatgaaaggggccactgtgtgtcttcctccccggcgggagccccacgtgtgtgcactgtaggacagcggccccgaggtggaagcctggctggagggctgccctataagtcttctcttcccgctcccctgccatgcaacagatgtgttgtgagtgggcagcgttgcccccacgctggagtaactccgcacgcttctgtctttcacggtgggcgctcggggggagcctgaggaaaaaccccccttaggtacctgtgcgaggctgtggagtgcacggccagagcagggtgtgcgtagccccagcacccaggttcttctgtcagaacctgtgacctgcgagctgctactactgtaaggagggaaatggatgaatctggctcgttttaaaatcacgttttctgacgaatcctttgccccttcacctttaccccgcccgcacccctaggccctcttcagccttcctatcatcccacgtgttttacccagacccttggcggcggcccatggcctnnnnnnnnnncgttcctgttccctggagctgggganggcggcttttgggatgggttcccggg

SEQ ID NO: 260218 - DNA, 403 bp, Homo Sapiens
  misc_feature (327)..(327): n is a, c, g, or t
  misc_feature (392)..(392): n is a, c, g, or t
aagaattaggaagggtcagaaccaaacaatacctgctcatttacactgaggattcagggcgggagacaggagccttggggtcctgttaaaccacagacagttatgaactgaaagtcataacggggagaggtgcctggcttctacctgggtgctcaggaatgttcctcgtcacccctgccactctgtggttcggtgccctgcttcctcctccactcctgggccgccttcttccagcgccgcacacacagatgctcagtctcagagaggcttggcacggcctgggcacttttgaggaaaagcgttcagtttagggcacaacttgcaggncccttcggtggggacagcggccggctttggaatttaggggagccaccctgggaaggtttttgccngttgccatgtt

SEQ ID NO: 260219 - DNA, 1137 bp, Homo Sapiens
aaggtagcgaggcctgggtggcgaattcggcacgagggctccgcggcgccgccatggccgacgtggaagacggagaggaaacctgcgccctggcctctcactccgggagctcaggctccaagtcgggaggcgacaagatgttctccctcaagaagtggaacgcggtggccatgtggagctgggacgtggagtgcgatacgtgcgccatctgcagggtccaggtgatggatgcctgtcttagatgtcaagctgaaaacaaacaagaggactgtgttgtggtctggggagaatgtaatcattccttccacaactgctgcatgtccctgtgggtgaaacagaacaatcgctgccctctctgccagcaggactgggtggtccaaagaatcggcaaatgagagtggttagaaggcttcttagcgcagttgttcagagccctggtggatcttgtaatccagtgccctacaaaggctagaacactacaggggatgaattcttcaaataggagccgatggatctgtggtcctttgggactcatcaaagccttggtttagcattttgtcagttttatcttcagaaattctctgcgattaagaagataatttattaaaggtggtccttcctacctctgtggtgtgtgtcgcgcacacagcttagaagtgctataaaaaaggaaagagctccaaattgaatcacctttataatttacccatttctatacaacaggcagtggaagcagtttcagagaactttttgcatgcttatggttgatcagttaaaaaagaatgttacagtaacaaataaagtgcagtttaaaacccaactcttactcttaatttgttcctaatacgtatttttggcagggagagggaacggtccatgaaatctttatgtgatataaggattttaagtttgggccagtgaacagggtaaataaaatttaacttttgagcatatggaattttggatgccctttaaaggtactaattctggaaccttggattccttcaagaaaaaacctagaaatctggaactcccccttccctgggttcaaatccattggaaggggggaaaagggggcccggaaaggtatttttttcttaaaatctccgggggccccccaaggggattttaaaaaaa

SEQ ID NO: 260220 - DNA, 802 bp, Homo Sapiens
tacagaatgactttgcagaaaaggagagaaagctgcaggagacacagatgtccaccacctcaaagctggaggaagctgagcataaggttcagagcctacaaacagccctggaaaaaactcgaacagaattatttgacctgaaaaccaaatacgatgaagaaactactgcaaaggccgacgagattgaaatgatcatgacggaccttgaaagggcaaaccagagggcagaggtggctcagagagaggcggagaccttaagggaacagctctcatcggccaatcactccctccagctggcctcacagatccagaaggcaccagacgtggagcaggccatagaggtgctgacccgctccagcctagaagttgagttggccgccaaggagcgggagatcgcacagctggtggaggacgtgcagagactccaggccagcctcaccaagctgcgggagaattcggccagccagatctcacagcttgagcagcagctgagcgccaaaaacagcacactcaaacaactggaagaaaaactcaaaggccaggctgactatgaagaggtgaagaaagagctgaacattctgaagtccatggagtttgcaccatccgagggcgctgggacacaggatgcggccaagcccctggaggtgctgttgctggagaagaaccgctcgctgcagtccgagaacgccgcgctgcgcatctccaacagcgacctgagcggacgctgtgcggagctgcaagtccgtatcactgaggctgtggccacagccactgagcagagagagctgatcgcccgcctgga

SEQ ID NO: 260221 - DNA, 1172 bp, Homo Sapiens
tggtacggtccggaattccgggatatcgtcgacccacgcgtcgaagaagctggctagtcctttctgtgaagctaatacaatggtcatttccagacaaatataaaggaaacactaaggctgcttcaaagattatctgattcctttaaaatatatgtctatatacacagacatgctctttttttaagtgcttacattttaatagagatgaatcagtttggaatctaagctgtttgccaagctgaagctacaggttgtgaaataatttttaacttttggaatcatactgcctactgttactctaaatagaaatatagggttttttttaatgtgaatttttgcctatctttaaacatttcaatgtcagcctttgttaaccttaaatacactgaattgaatctacaaaagtgaaccatctcagacctttactgatactacaacttttgttttctgatggccaaaataccaaatgcctgttgtatttatggattaaaaactgcttataaaaccctgtgttactactcctactcttggagatgataatattctatgtggtcaaatatttggactcatttaggacttagatatttcagtgtacttgattttttaatttaactctttttcacagccacgctaagggtaaaaaggaataatttccttctgtcttccttttcaagtatttctgggtaaagggattcaaaaaactaaaactgtttttgtttgtaatataaaatatggaattgatctttccagggtcagagatgattaatgtttttgctatatactttttatacattatttttcttatcaaactagttaacaagtatttttatatgtttgtaagcagatatgcttttcatagcataccttgtgtatatgtaaacgataacgtatttaattctcactggttcacttttaactgggcaaggaaaacaagtggaactaaagaaactgtgtaaacttttactgccggtcggctggtggaccacttggcggccataatactaggaaccttcaaagaatcacaggggtgagcgaacacttgatccgggaaatgggacacgctagggcgacgagatcaacacgggggcaaggaaccggtgtgcccacatcctcgaaacgtgcagcagcaccatactgtcggaattaagcatccgtccgctacgtaaaggttt

SEQ ID NO: 260222 - DNA, 785 bp, Homo Sapiens
atgaacaggaacacacagaaaaggggagaatcatttggaatcagcagaataggtagcaaaattaaaggagtattcaaaagtaccacaatggagggagctatgttgcctaattatggtgtagctgaaggtgaagatgattttattgaagaaggtattgttgtaatggaagatgattctccagtggaggctgtgagcacacctaatactccccgaaaccttgctgcatggaaaattagcattccatatgtagacttttttgaggatccctcctctgaaaggaaggagaaaaaagaaagaattcctgtgttttgtattgatgttgaaagaaatgatagaagagcagttggacacgagcctgaacattggtctgtctatagaagatatcttgaattctatgtacttgaatcaaaactaacagaatttcatggtgcatttcctgatgcccagcttccttctaagaggatcattggccccaaaaattatgaattcttaaagtcaaagagggaagagttccaagaatatctacagaaacttctgcagcatccagaactgagtaatagtcaacttctggcagactttctttcccctaatggtggggaaacacaatttcttgataagatactaccagatgtaaatcttgggaaaattataaaatctgttcctggaaaactaatgaaagagaaaggtcagcatttggaaccttttatcatgaatttcattaattcttgtgagtctccaaagcctaaaccaagtagaccagaactgaccattctcagccctacttc

SEQ ID NO: 260223 - DNA, 557 bp, Homo Sapiens
tgaggaaagcgttgccaaacgcgttgagcttgcggaaggggcgccgcgggtccaccacgagcgcgttgcccggcaccacgccctcagtggggccgtgcatgacggcgatgaaggagtcggtggtgggctcgggcccgatgcgcatccccgggaagtcctgctcgatcaggtgtcggatgaaggtggtcttgcccgtgctgtactgccccacgaggagcaccataggcttgttgtcgaagtcagcgtcctccagcgcgggcgagtggaactcgtggaagcggtagtgctcctccaggggtagcagcttctgcgcgtacagctgccgcagcccctcggccaccgtctggaagagctccggctccttcttgcggcgggcatccttgctgacccagctgaacatactgccggacacggggctggctgctgcggggcagagcggcggctgagagcggggcgagggtgcggagccgaggcggggccggccggggcagggaatcgggagcgacccacactgcgcaggcgcacagcccagcccgtcgaagcgccctctgccgaat

SEQ ID NO: 260224 - DNA, 1067 bp, Homo Sapiens
ggcatggtacggtccccaatcctagggatatcgtcgacccacgcgtcgcctcgggctccgcaccctcgccccgctctcagccgccgctcggccccgcagacagccagccccgtgtccggcagtatgttcagctgggtcagcaaggatgcccgccgcaagaaggagccggagctcttccagacggtggccgaggggctgcggcagctgtacgcgcagaagctgctacccctggaggagcactaccgcttccacgagttccactcgcccgcgctggaggacgctgacttcgacaacaagcctatggtgctcctcgtggggcagtacagcacgggcaagaacaccttcatccgacacctgatcgagcaggacttcccggggatgcgcatcgggcccgagcccaccaccgactccttcatcgccgtcatgccacggccccactgagggcgtggtgccgggcaaacgcggctcgtggtggacccgcggcgccccttccgcaagctcaacgcgtttggcaacgctttccctcaacaggttcaatgttgtgcccagctgcccaaccccgtcctggacacgcatcagcatcatcgacagcccccgggatcctgtctggagagaagccagcggatcacgcagaggctattgactttgcagccgtcctggaagtggttcggcggagcgtgtggaccgcataattctgattcttccagcccacaaggctggacatcatacgatagagtactcggaagtgatcacgggtcttgagcaaccatgaggaccacatccgcgttatgctgaaccaaaggaaccaagttcgagagccagcagtgatcgggtgtaccgggcctatgttggtcctgagagaacctaagaccccgagaggtcaagcataaatgcatactgtcaccaggccatatccgacacgacttacgaccgcagagctacggattctctaccgatggcctagaactatcaacagcggaggacgacagccgaacacatgaaaacaaagagcagaaaagaagcagagacgaaacaagatcaagaacgagacctcttgatttacttca

SEQ ID NO: 260225 - DNA, 1490 bp, Homo Sapiens
  misc_feature (674)..(674): n is a, c, g, or t
ccgttgcatccgctgggtgtagccgtggggatggcaggttcggggaggctggtcctacggccctggattcgggagctgattctggggtcagagacaccctccagtccacgagccgggcagctgcttgaggtactacaggacgccgaggccgcggtcgcgggcccatcccacgcccctgatacgtccgacgtcggggccacgctgcttgtgtctgacgggacccacagtgtccgatgcctggtgacgcgggaggccctggacacctcggactgggaggagaaggagttcggcttccgcgggacagagggccggctgctgctgctgcaggactgcggggttcatgtccaggtcgctgagggcggcgcgcccgcagagttctatctccaggtggaccgcttcagcctgctgcccacggagcagccccggctacgggtgcctggttgcaaccaagacttagatgttcagaaaaagctctatgactgccttgaggagcacctttcagagtccacctcgtccaatgcaggcctatcactgtcccagcttctggatgaaatgcgggaggaccaggagcatcagggggcactcgtgtgcctggctgaaagctgcctgacactggagggcccttgcacagcaccccctgtcacccactgggctgcctcacgatgcaaggccancgggagaagctgtgtacactgtccccagctcaatgctgtgcatctctgagaatgaccagctaattctgagctctctaggcccctgtcagaggacacagggccctgagctgcccccaccagaccccggctctgcaggacctatctctgaccctcatagccctctcctccttcctcacccagtttcctcaggaacccccggcctttacccggccacatgtcatccgaggaaagtggtaccagcatcagccttctgcctgccctgtccttggctgctccagacccagggcagagaagcagctcccagccctcaccagccatctgctcagcccctgccaccctgacccccaggtccccacacgccagccgtacccccagctccccactccagagctgcactcccagtctctcaccccgtagccatgtccccagtccacaccaggctcttgtgaccaggccccagaaacctagcctggagttcaaggagtttgtagggttgccctgcaagaatcggccgccttttcccaggaccggagctaccaggggagcccaggagccctgctctgtctgggaacccccaaagaggcatcgtgatggttctgccttccagtatgagtatgagccaccctgcacgtccctctgtgctcgggtccaagctgtccaggcttcctccccagctcatggcctgggccttgcactttctgatggatgcacagccagggtctgagccaactccgatgtgagacgtcacgcaggacagataccgctccacactctgcttcctttgagttttttaataaaataatctcatgcggcagg

SEQ ID NO: 260226 - DNA, 471 bp, Homo Sapiens
attataaggcggggcctgggcgcccgcgggaaacccgggcccgttgcatccgctgggtgtagccgtggggatggcaggttcggggaggctggtcctacggccctggattcgggagctgattctggggtcagagacaccctccattccacgagccgggcagctgcttgaggtactacaggacgccgaggccgcggtcgcgggcccatcccacgcccctgatacgtccgacgtcggggccacgctgcttgtgtctgacgggacccacagtgtccgatgcctggtgacgcgggaggccctggacacctcggactgggaggagaaggagttcggcttccgcgggacagagggccggctgctgctgctgcaggactgcggggttcatgtccagcccgcagagttctatctccaggtggaccgcttcagcctgctgcccacggagcagccccggctacgggtgcctggttgcaacca

SEQ ID NO: 260227 - DNA, 800 bp, Homo Sapiens; identical to SEQ ID NO: 15479
  misc_feature (330)..(357): n is a, c, g, or t

SEQ ID NO: 260228 - DNA, 628 bp, Homo Sapiens
gggctttcacattcgggaagcgtcgggattaggtgaaagtacgtagttgtctttcgtaagttaaaatgataattgggccgaaacttactgccttacctaaaaggcagcgcagtcaggatattggtaggtcgggggcggctttggaaacccttaagtttacaagcatgcgcggcacttgagtgctcattaggtcgccgggcgtccacgtgcagccctggaccctgaaccccggcgtgcgtgggccgtgggccctcggggaaaggttccgtgcactcggggactccggtgaagcctgttcagccgtctgtgtcatgtggccatcttgagtctactctgtcgctcttgtgccctagcaccccgagaaccgtcagtttgagccagatggaagctgagctgaacacattacgatggatgatggaaacataagactatcaagaaatccaagtggtaatgggcgaagtttattcagcatccggcaatggacttatcgtagttggggaaacgggtgttccgaataatatcctggaagttatcaggacacctattttaaatataggcctgaattttgtaaagtaatatttaaggtggtccgtgataattaaataaaatgcttaattcatgtggctct

SEQ ID NO: 260229 - DNA, 379 bp, Homo Sapiens
  misc_feature (19)..(19): n is a, c, g, or t
  misc_feature (28)..(28): n is a, c, g, or t
  misc_feature (80)..(80): n is a, c, g, or t
  misc_feature (282)..(282): n is a, c, g, or t
ttccggaggttaaatctgnaaaaccctnagcgggccaggacgttggaaagcctaaaagttggccccgttttgcctggccntttgtagtttgaggtaacaacccaactgaattagcctgataagatctcaaaaacagtgaggtaagtacacagctcggagttttataatgctttttttcctcttgcagactatcaagaaatcccaagtggtaatgggcgaagtttattcagcatccggcaatggacttatcgtagttggggaaacgggtgttccgaataatancctggaagttatcaggacacctattttaaatataggcctgaattttgtaaagtaatatttaaggtggtccgtgataattaaataaaatgcttaatta

SEQ ID NO: 260230 - DNA, 513 bp, Homo Sapiens
  misc_feature (151)..(151): n is a, c, g, or t
  misc_feature (232)..(232): n is a, c, g, or t
  misc_feature (408)..(408): n is a, c, g, or t
  misc_feature (443)..(443): n is a, c, g, or t
  misc_feature (461)..(461): n is a, c, g, or t
  misc_feature (470)..(470): n is a, c, g, or t
  misc_feature (492)..(492): n is a, c, g, or t
gtcgggattaggtgaaagtacgtagttgtctttcgtaagttaaaatgataattgggccgaaacttactgccttacctaaaaggcagcgagtcaggatattggtaggtcgggggcggctttggaaacccttaagtttacaagcatgcgcggnacttgagtgctcattaggtcgccgggcttccacgtgcagccctggaccctgaaccccggcgtgcgtgggccgtggctcggnggaaaggttccgtgcactcggggactccggtgaagcctgttcagccgtctgtgtcatgtggccatcttgagtctactctgtcgctcttgtgccctagcaccccgagaaccgtcagttttgagccagatgggaagctgagctgaaacacattaacgatgggattgatgggaaacatnaagattattcaagaaattccaagtgggtaatgggncgagttttatttcaggcntcccggcantggatttatcctagtttggggnaaacgggtttttcccattatt

SEQ ID NO: 260231 - DNA, 1270 bp, Homo Sapiens
cgtcttgctcagttgtgctatgagaaatagtaagctgtccatatctatttgtggtcggaataatccccagacccctattgaggctgaatccagcagctaatgggagccccacgacattaaccagggtttccactgagagggactggctgggtattttcctgaagaaaaatgaatttcaaacttttgctgcagtgggaccactacgctgctaactgtccccagaaccgaatgagagatcagctttggtgacttcacctgcatctgtgtatgtgaggctgtactttacctcaagaacaacattcacgcaaaggctaaagtgtccagcgttgacgagagtcggctgcagcacatcagtgtcctcccgtcgggtgagcgttttatttagagactgaatgacgatggactgaacagtgatagggaccttttttcttgaatcaggtaccctcagaatttccgggctgctgtaaaaagccatgctgagggcttcaatttcttcacactgttctaaatttatttttctggtgcacttaacagcctggttcaccagaaacgctgcagggttattatcagtgcacagagatgatgtcagggacgaaggaaatctcagaaacgaatctgaagtctgcagaggaaccccatactcatatttagcagcagtaggaatatccagtttggttgtgaaggaaacatatgattcagcattcaatgtaaaaccatcagatgttttcatcaatgtatcaaaattgttttcatcaggtacttctggattaataaaggataatgcaggtttatagtttgtaatatgaatgcagaaaatagatggattaatctggtcaacaagttcaaatactctttgaggtgggtttgctgtaaaattcaatgaatagatgactgctttttgactacaaaactggctgtcgcccgtgacaactggaactgagcaggcagaaaagacactgaaatccacggagctgcagtcgggatcacagcagcagttgatgtcacactgtgctggggataagtcacagacacagagaacagcaacgtccgtgactggggtaggcctggggccggaggagggccctggagccctgggagtcccggggggcctggtcgacgggaaagttccgaaggtggccagggctgcctcggtggagttgaggccctctgtcgtcaccgccggggtggcatcggtctgggcgctcacggaggcccagcagcccaggagcaccaccaggagcggcgggagacctcgcggcctcatctccca

SEQ ID NO: 260232 - DNA, 966 bp, Homo Sapiens
  misc_feature (626)..(685): n is a, c, g, or t
ggcgacccatagttgagaccaccacttcgttttcccttaagttcctgtagtgttttgggggtaattataatggatgttattgttccattcggacctgcccctcggggggcaagcagtaaatctagccccacctgccccttcttccctcagcgattttggtcctctgccttggcctcgcggtatatttgctgccttgggggggaccaccgactgccccccctctgttctgccgcttctttagatcgcagctacctgtcttcttcgctccgcgctgagcgtttcttcatagaggtagatgctgtccccggctccagctgccagcccctacgagcagcccctgaggtccaccattagaatctgctgctcccccaccggcgagtgcctctggtgcccacgcgggatgcgcccacgccttagtactctcctcagggcgtcgccgcagcagctgcatagggcaccagcggaagactggtcgttgttggaagaaagcatactacttacgacttttctctaccctcgtcgttatggagacgaggggtgacgcgtctcgatcacgcacggagttggccgcatcttagcacggcagcataatcagcccctcggcttcatcaacgactagttaatcnnnnnnnnnnnnnnnnnnnnnnnnnnnnnnnnnnnnnnnnnnnnnnnnnnnnnnnnnnnncaaagtatctacatttctccctacctaataacccctccaaagagaggacgagtgctctggagaaccagagattttttgctgctcctgctccctgtgcaaataagtacctggcaccttagccccaaatgcagggaaaagcagagtcatctagtgggcagctcggtcccaaaataaaaataagcaaggctaagagatgaagggagagagggttgatagcagctgcttggagtctgggctgaaagcccaagaggaagaaccagtggtagtaagcaagctctatg

SEQ ID NO: 260233 - DNA, 179 bp, Homo Sapiens
cctttaatcacatctcagcccttagcatcggaaagcttatactgtaaataaacttgatgaatattatatgtgaggaaaactttcatgtatagcactcattgcttcagacagaaaatgaattccgtcggtatgttccaatcgtgatgaatttgagaaacattgcaagagggagctcaatc

SEQ ID NO: 260234 - DNA, 757 bp, Homo Sapiens
  misc_feature (63)..(63): n is a, c, g, or t
  misc_feature (136)..(162): n is a, c, g, or t
  misc_feature (365)..(414): n is a, c, g, or t
  misc_feature (741)..(741): n is a, c, g, or t
ggcacgagaaaatacaaactttacctaccccaaattcataaagtacatttagtgctgtatagnctaaaacttagagatacagacactgtacttactttttaagaattagagacagtaactccaaaaataattgtcnnnnnnnnnnnnnnnnnnnnnnnnnnnacaataaggctcttgaaaattgtcattacttgtgttttcctatacattcatctgtgtgaaagcctttttcttctttgatttaaaaaaattaactatacagttaatggtttagaacttagaactacttagaattaatgctaaagtgtcaggaagaaattaatttagcttcaataattgtgactggcctcaggaattctcccttnnnnnnnnnnnnnnnnnnnnnnnnnnnnnnnnnnnnnnnnnnnnnnnnnnaaagccagagcagctgcttgtctgcagcaggacacagttcctacatacgtttcagttctttcatggtaagctcaatggactttgaattgtttacagtgctgtatgtccaattgttaaatgtaccattctgaacgatgttaaagcaagtgtggtttatttatggcatgaaccatgtaacttgaaatatgaacttacaaggaggggcactcattaggtaacaagttcttacaccaaacttccttgatgaaataaggccaaaataatcctaaaattcattaggaaggaacttggataaaaggactccaaataaatgtttaggaaaggagncccttatttttagggg

SEQ ID NO: 260235 - DNA, 1104 bp, Homo Sapiens
  misc_feature (591)..(591): n is a, c, g, or t
  misc_feature (931)..(931): n is a, c, g, or t
  misc_feature (943)..(943): n is a, c, g, or t
ttctcttctaaaatgaaaatttaatgcaggtacaggataactttagggctatatctaatctgaagcttatcaggtagcaaaaccattttcgttttctacagcataaataacagctctaaggcaaccactacctcagcatgaagctcatttctccacgttagagtagtgtttacctgctacagtgaccagtgtttagagaccatttccctttcagtagcaaaaagagactttacctaagaaacacactacatactacagaatccttggaacaagaaacagaaagggagctgtaactaaggcactgaaagcacattatttgtataaagaaatgtaaacaatttaacaccaacaggctccctccgttggagtctttattgtaaatgcacacaggggcatcatagtcagggctagagtttgaagtctgggtgaaacaaatgtttctgcagagttcagagtcttggctgccaatatatttctaacatggtgctgttgaattaactatttcaaagtgactcaagtggaagctggtatttcccttgaatctgagttttaatagcattaacaaacaaggaagaattttataggagtccntaaaattatgggctctttctaacatttatttgagtcgtttatcaagttcttctaatgaattttaggattattttggcttatttcatcaaggaagtttggtgtaagaacttgttacctaatgagtgcccctccttgtaagttcatatttcaagttacatggttcatgcccataaataaaccacacttgctttaacatcgttcagaatggtacatttaacaattggacatacagcactgtaaacaattcaaagtccattgagcttaccatgaaagaactgaaacgtatgtaggaactgtgtcctgctgcagacaagcagctgctctggctctggtgccggtnccgttccgttcncggtgcggtgcggtgaggtgaggtgaggtgaggtgggcaggtgtggaagggagaattcctgaggccagtcacaattattgaagctaaattaatttcttcctgacactttagcattaattctaagtagttctaagttctaaaccattaactgtataattttt

SEQ ID NO: 260236 - DNA, 2639 bp, Homo Sapiens
cggctggaccggtccggaattctccggatcccggacgtgcggctcccctcggcctcctcgccatggacgcggacgactcccgggcccccaagggctccttgcggaagttcctggagcacctctccggggccggcaaggccatcggcgtgctgaccagcggcggggatgctcaaggtatgaacgctgccgtccgtgccgtggtgcgcatgggtatctacgtgggggccaaggtgtacttcatctacgagggctaccagggcatggtggacggaggctcaaacatcgcagaggccgactgggagagtgtctccagcatcctgcaagtgggcgggacgatcattggcagtgcgcggtgccaggccttccgcacgcgggaaggccgcctgaaggctgcttgcaacctgctgcagcgcggcatcaccaacctgtgtgtgatcggcggggacgggagcctcaccggggccaacctcttccggaaggagtggagtgggctgctggaggagctggccaggaacggccagatcgataaggaggccgtgcagaagtacgcctacctcaacgtggtgggcatggtgggctccatcgacaatgatttctgcggcaccgacatgaccatcggcacggactccgccctgcacaggatcatcgaggtcgtcgacgccatcatgaccacggcccagagccaccagaggaccttcgttctggaggtgatgggacgacactgtgggtacctggccctggtgagtgccttggcctgcggtgcggactgggtgttccttccagaatctccaccagaggaaggctgggaggagcagatgtgtgtcaaactctcggagaaccgtgccccggaaaaaaaggctgaatattattattgtggctgaaggagcaattgatacccaaaataaacccatcacctctgagaaaatcaaagagcttgtcgtcacgcagctgggctatgacacacgtgtgaccatcctcgggcacgtgcagagaggagggaccccttcggcattcgacaggatcttggccagccgcatgggagtggaggcagtcatcgccttgctagaggccaccccggacaccccagcttgcgtcgtgtcactgaacgggaaccacgccgtgcgcctgccgctgatggagtgcgtgcagatgactcaggatgtgcagaaggcgatggacgagaggagatttcaagatgcggttcgactccgagggaggagctttgcgggcaacctgaacacctacaagcgacttgccatcaagctgccggatgatcagatcccaaagaccaattgcaacgtagctgtcatcaacgtgggggcacccgcggctgggatgaacgcagccgtacgctcagctgtgcgcgtgggcattgccgacggccacaggatgctcgccatctatgatggctttgacggctttgccaagggccagatcaaagaaatcggctggacagatgtcgggggctggaccggccaaggaggctccattcttgggacaaaacgcgttctcccggggaagtacttggaagagatcgccacacagatgcgcacgcacagcatcaacgcgctgctgatcatcggtggattcgaggcctacctgggactcctggagctgtcagccgcccgggagaagcacgaggagttctgtgtccccatggtcatggttcccgctactgtgtccaacaatgtgccgggttccgatttcagcatcggggcagacaccgccctgaacactatcaccgacacctgcgaccgcatcaagcagtccgccagcggaaccaagcggcgcgtgttcatcatcgagaccatgggcggctactgtggctacctggccaacatgggggggctcgcggccggagctgatgccgcatacattttcgaagagcccttcgacatcagggatctgcagtccaacgtggagcacctgacggagaaaatgaagaccaccatccagagaggccttgtgctcagaaatgagagctgcagtgaaaactacaccaccgacttcatttaccagctgtattcagaagagggcaaaggcgtgtttgactgcaggaagaacgtgctgggtcacatgcagcagggtggggcaccctctccatttgatagaaactttggaaccaaaatctctgccagagctatggagtggatcactgcaaaactcaaggaggcccggggcagaggaaaaaaatttaccaccgatgattccatttgtgtgctgggaataagcaaaagaaacgttatttttcaacctgtggcagagctgaagaagcaaacggattttgagcacaggattcccaaagaacagtggtggctcaagctacggcccctcatgaaaatcctggccaagtacaaggccagctatgacgtgtcggactcaggccagctggaacatgtgcagccctggagtgtctgacccagtcccgcctgcatgtgcctgcagccaccgtggactgtcagtttttgtaacacttaagttattttatcagcactttatgcacgtattattgacattaatacctaatcggcgagtgcccatctgccccaccagctccagtgcgtgctgtctgtggagtgtgtctcatgctttcagatgtgcatatgagcagaattaaacatttgcctacaactctaaaa

SEQ ID NO: 260237 - DNA, 995 bp, Homo Sapiens
  misc_feature (818)..(818): n is a, c, g, or t
  misc_feature (842)..(842): n is a, c, g, or t
tgtatgtgcaatgatagaaatcatcccaagattcgctctctggttcattattgttttgatcttcgttttcaaagacctcgggttgaacagattaagggtgctatgatgtctattgcatttaaagaaggtttaaagattccccctccagctatgaatgaaataattttgggagccaatcaagatatcagacaggttttacataatctgagtatgtggtgtgcacgaagtaaagcattaacctatgaccaggccaaagctgattctcacagagccaaaaaggatatcaaaatgggcccatttgatgttgcccggaaagtgtttgcagctggagaggagactgctcacatgtcacttgtggacaagtcagatctcttttttcatgattattcaatagcacccctcttcgtccaggaaaattacatacacgtgaagcctgtagcagcagggggtgacatgaaaaagcacctgatgcttttaagcagagcagcagacagcatatgcgatggtgacctagtggacagccagatccggagtaagcaaaactggagtcttctgcctgcgcaggccatttatgccagtgttcttcctggagagttgatgagggggtacatgacccagtttcccaccttcccaagctggctggggaagcactcgtctacaggcaaacatgatcgtattgttcaggacctggccttgcatatgagtctcagaacttactccagcaaaaggactgtaaacatggattatctgtcgcttctaaaggatgcacttgtacagcccttgacctcacaaggagtagaccgagtacaggatggtgntgcacttatggacacatatttatntgatgaaaagagacttttgagaatatcatggaaatcagcagctgggggtggcaaacctagtccctttttcaaagctgggatccccaaggtgaaagcagcccttccccaagagctttaccaataaggggaggccccccctttacttccatacct

SEQ ID NO: 260238 - DNA, 511 bp, Homo Sapiens
gcaggctcacgttggcgccaggacccaccaccggcccgggcagcgccaccagcgacggccgcggcagctcctctgtaaccagcagctccaggacatcgctgggctgggaccagacacccggcccccagtctggccttcggtagcagcagcggtaacttcccccttgggctggagtcacctcctccagaaagaattctgccagctcggaggacacatcccggaagagaaggggagcgatctctccaggcttgaaaagtccaaatctccaagcgggttggggtgcccggcatctcaaggtcacgttgaccccaggggtcacaactgtagccggctgagctcccagccatggcttagggtggtatgaagctggggggacagacggagtgatgtctgtgtgacacagaggccagagggtcagcagctggaggatcagcaccagggccatggtgggcagatacccgctagagctggagccagggcttggtcgcaccctctcccctcccaggaaaat

SEQ ID NO: 260239 - DNA, 481 bp, Homo Sapiens
aatttaaagatagaatttattctctgatggtttactcatgcaaactgcacataaaagaaaatagtacagtttgtgtaacattgcaaatataaggactgaaaatgctaggtacagaagtagtatgacatcctgaaagtcaaaatggaatttgtgtttatacaactaataatgatttttatttgctcagtacagactgatttacaatgaaagttttgctaaccttggtaagcttgttaaccgtttacatgacttcttacatctatgtagttttattttacagttgcaagaattctgttaccaaagaaccttaacttgcataagtaataagatgaaagaaaaatgtactgaaggacttaagagtgaaaaattgaggcttttcctaacccattcaaactacaataaaaaatagccttcttgcagaattcatattttgtgcctttgagataactccttagaataatgatatcaaaatcatgatttg

SEQ ID NO: 260240 - DNA, 897 bp, Homo Sapiens
  misc_feature (37)..(37): n is a, c, g, or t
  misc_feature (625)..(625): n is a, c, g, or t
  misc_feature (733)..(733): n is a, c, g, or t
  misc_feature (804)..(804): n is a, c, g, or t
  misc_feature (818)..(818): n is a, c, g, or t
  misc_feature (828)..(828): n is a, c, g, or t
  misc_feature (845)..(845): n is a, c, g, or t
  misc_feature (872)..(872): n is a, c, g, or t
  misc_feature (885)..(885): n is a, c, g, or t
acagaaaaattaacaggtacttcatctgacactggangagaagctgtagaaaatgtaaacttcaggagtctaggtgatggcctgtcaaccgataaggaaggtgtccccaaatctagggaatccataaataagaaccgttctgtcactgtaacctcagctaaaacatccaatcagttacactgcaccttaggtgtagaaatttcacccaaacttttagcaggtgaggaggatgcactcaatcagacttctgagcaaactaagtctttgtcatccaatttcatattggttaaagacttaggtcagggcatacagaatttcagtaacagacaggcctgaaaccagagaaaatgtctgtcctgatgcttcgaggccattacttgaatatgaaccacctaccagccatccatcatcaagtcctgccattcttccaccattgatttttcctgccacagatattgaccgcattctccgtgctggctttactttgcaggaagctcttggagctttgcatcgagttggtgggaatgcagaccttgcacttcttgttttgctcgcaaaaaacatcgtagttcctacatgactgtgggaaagtgggctagaccgttctccattccctttaaacaanagaaagctctctctatatacacgcacacatacacactcaccacatatacacgtatatatagaaacctgcaagcagaatgttgagccagattttttttaaagatttttntcggccaaagtaatttatgatcttttgtctgatgaattttgtctgatcctacttgttaaaatttaggcctnttttaaatgtattnggcagtatgngcatacagaagcttttnattctcattaagatgtatccttggatnaaatggatggggntttgtgttgtag

SEQ ID NO: 260241 - DNA, 648 bp, Homo Sapiens
gggatccaggcccactctcagatggagaagcaccgtctttccactcaacaacatcgtcttggtcaacctcactatcagaggcattgtgcattagtttggttggttcctcagtcaaatgaatagtttcgtattttgaaccatcctctttttggtctagcttctcctcagattctgaagcatcctcaggaattaccttcagtacatgttcctctgggttatcgttagagattttaggttcaacttcaaaaacagggtcaaaagggctaccactttcattggattcttcttccaaattttcaaaactgtctgaggaactgtcatcttccttcccaaggttgagctttttgtcagcagtcttactagcattgactctggaatccttctcatcatgattttcaaatagccactcagcatcaaaatccatctcatgcttgactttatttaattctttcatgttaaaccccagcaacacgccaggcttgtacttttcacaatcacggacacacttcttccttttgttactaaaatgggaagcgatgtcactcttccataaccataaactggctgctagcttctcaatttctctcctggtgggatagggctgtttgttgaaatactttgttagaaagcttttcctggcttcatagg

SEQ ID NO: 260242 - DNA, 564 bp, Homo Sapiens
  misc_feature (86)..(94): n is a, c, g, or t
  misc_feature (552)..(552): n is a, c, g, or t
attcaatattccaccttaccatcatttaaataaaggtaaatgctggtaattaacatagacaaaatttaaatacatactgcacaatnnnnnnnnnttcccaggctaccaaattagtgcaacattctgtatgttcctacatttattccattgcctgaacttccaatgtttaacaaaaaccagtatcagtggcttcttgaaacacaggtggcccacattctctcggttatctacgtgctcatacagttgaaaaatattgtccatctattttctaggtagactgtaaaacacaccattccaagtaattttctgtttggtcaaaacaatttccttcaaacaaaatgaacagaaaggcagttgggtagtattactgccatttagcgtaacttgcatttccttgtgtttctagtatttggcaaacaaaggaagcggaatcttgcactgcctgccttcacatgcatctcgccccagctaagctgtgctctggtggagtttcatccaaccaatacagacatttcctttttttctgagaagttactctacccacaatatagntaggctcgtgcc

SEQ ID NO: 260243 - DNA, 792 bp, Homo Sapiens
  misc_feature (98)..(98): n is a, c, g, or t
tcagccaggaggatcttggaaggtgcaccaaataaatggggagaggggggttccttgtcagccattaggacaatggactcccaaaattgtactgtcanacccacaagggaggggggcaactcaaggaggggacacatgactaagcaagaaaatgtgactctgtgagctgacccggcttctgaacaaacctaatacagtctatgctcacagtgtgcttcagcccccttgactctaaaccgtcacagaagcagaaggaagaggaagtggtggattgcccagctggagcctggggactgttacgactgtctagatctctgcggtcatagggcgtcacagcctcctcagaccctgagcctggaatgcgggggaacacaatgtagattcccaggagggctgtccccaagaccctctccctgcccgcccagctcctcaggcctcctcttctaccgcttcttcttagtctctttcttgggcctcttgttcacagaaggaacagcagccttgggcttcctcgtcacctcagcacttctgggctcagacggttcagcctccgcctcgtgggacttgggaatgggtacgatgatggccagcacacagatgagctggaagatggctcccaggaagagtccgtaccgtagcaggttctccaggaaagtgggctcgggcacctccggaggtgagaagtctaggtcagaggccatggcccaagtcgcttgctgcctgacgtctcttctgactcaccactctttagaaccaactcccgcgccgccgcgccgctcccccggaagtccc

SEQ ID NO: 260244 - DNA, 858 bp, Homo Sapiens
  misc_feature (16)..(16): n is a, c, g, or t
gccttgcttaaatganatcccaggaccccgtcccactgaacagctcagctcccagcttgcagcaaccttgaagcctaaagaaggagatcacccagatcaatattttgccattataccctgaaatgaaggatgagttccgaaattgttcaaagagatcgcgtttgtaaagcagggcgtatacccaagtttgggttgtggtgaagggaatttgtcaggcaggagttgatgatctctaacatcattcgaatcacttcttcaatgacatttaggtcttgtgcataatctggtagaggaacatcattagaactcagcgaacctctcaaggactgtgtggcttgttccagaactttgttgtgttttttagacagcaaagaaaataaactgatgatcctctgggcagcatactgatggagagaacgaaactgtgccgacatattttctaaagctgccaaacaatttgtgtgaaggtacttgtctcgtgtcctagtcatgttgtattgaatggttcttattaccaccaggatcaggagactccccaaggagatttcagttaaaactcgttctgaataccaagtaatattttttagtatcacttcatgaatggatctgttgaagccatcatcttccgtaaggatcaacaatattataagggccatatacacatggtgtgaattcctttcttcaacatgatacagaatctcaagaattggtaaaacaagattttccatatctgtgcgagccaacatgtatgttctaatattactattttgatggagcaaggtatacaagaggagagttgcttgatcagatgtctgctgttcacaaagagctgtgtacaaactattaaagttgatctgg

SEQ ID NO: 260245 - DNA, 1181 bp, Homo Sapiens
agaaccccgcggggtctgaccagcccagcgtgcccattccagcgcccgcgtccccgcagcatgccgagcccccgcctgctggccgcgctgtgcggcgcgctgctctgcgcccccagcctcctcgtcgccctggatatctgttccaaaaacccctgccacaacggtggtttatgcgaggagatttcccaagaagtgcgaggagatgtcttcccctcgtacacctgcacgtgccttaagggctacgcgggcaaccactgtgagacgaaatgtgtcgagccactgggcatggagaatgggaacattgccaactcacagatcgccgcctcatctgtgcgtgtgaccttcttgggtttgcagcattgggtcccggagctggcccgcctgaaccgcgcaggcatggtcaatgcctggacacccagcagcaatgacgataacccctggatccaggtgaacttgctgcggaggatgtgggtaacaggtgtggtgacgcagggtgccagccgcttggccagtcatgagtacctgaaggccttcaaggtggcctacagccttaatggacacgaattcgatttcatccatgatgttaataaaaaacacaaggagtttgtgggtaactggaacaaaaacgcggtgcatgtcaacctgtttgagacccctgtggaggctcagtacgtgagattgtaccccacgagctgccacacggcctgcactctgcgctttgagctactgggctgtgagctgaacggatgcgccaatcccctgggcctgaagaataacagcatccctgacaagcagatcacggcctccagcagctacaagacctggggcttgcatctcttcagctggaacccctcctatgcacggctggacaagcagggcaacttcaacgcctggggttgcggggagctacggtaacgatcagtggctgcagatcttccctggcaactgggacaaccactcccacaagaagaacttgtttgagacgcccatcctggctcgctatgtgcgcatcctgcctgtagcctggcacaaccgcatcgccctgcgcctggagctgctgggctgttagtggccacctgccacccccaggtcttcctgctttccatgggcccgctgcctcttggcttctcagcccctttaaatccccatagggctggggaaagggggggaaaggggaaagg

SEQ ID NO: 260246 - DNA, 1266 bp, Homo Sapiens
  misc_feature (521)..(521): n is a, c, g, or t
  misc_feature (529)..(529): n is a, c, g, or t
gacctggggcttgcatctcttcagctggaacccctcctatgcacggctggacaagcagggcaacttcaacgcctgggttgcggggagctacggtaacgatcagtggctgcaggtggacctgggctcctcgaaggaggtgacaggcatcatcacccagggggcccgtaactttggctctgtccagtttgtggcatcctacaaggttgcctacagtaatgacagtgcgaactggactgagtaccaggaccccaggactggcagcagtaagatcttccctggcaactgggacaaccactcccacaagaagaacttgtttgagacgcccatcctggctcgctatgtgcgcatccctgcctgtagcctggcacaaccggcatcgccctgcgccctggaactgctggggctgttagtggccacctgcccacccccaagtctttcctgcttttccatgggcccgctgcctcttggcttctcagcccctttaaatcaccatagggctgggaactctgggggaagtgganaggttcgnctgagttctaatgatgttcctctaccagattatgcacaagacctaaatgtcattgaagaagtgattcgaatgatgttagagatcatcaactcctgcctgacaaattcccttcaccacaacccaaacttggtatacgccctgctttacaaacgcgatctctttgaacaatttcgaactcatccttcatttcaggatataatgcaaaatattgatctggtgatctccttctttagctcaaggttgctgcaagctggagctgagctgtcagtggaacgggtcctggaaatcattaagcaaggcgtcgttgcgctgcccaaagacagactgaagaaatttcccagaattgaaattcaaatatgtggaagaggagcagccccgaggagttttttatccccctatgtctggtctcttgtctacaactcagcagtcggcctgtactggaatccacaggacatccagctgttcaccatggattccgactgagggcaggatgctctcccacccggacccctccagccaagcagcccttcaagttcttttatttctgggtaacagaagtagacagacaggttacttggtgtatcttctgttaaagaggattgcacgagtgtgttttcctcacacactttgatttggagaattggtgctagttggcaatagataactcagcgtagatagtattgcaaaaaggggaggaaatacacaacaataataaatgtaaaaacctgctattcaaa

SEQ ID NO: 260247 - DNA, 534 bp, Homo Sapiens
  misc_feature (36)..(36): n is a, c, g, or t
  misc_feature (47)..(47): n is a, c, g, or t
aaggcgtcgtttcgctgcccaaagacagactgaaancgctggccgancgtcaggtggacagagtccttgcaatgccaggcctttgtgtatgcagcttctgggttctcacagtttcatggcttgtctgtcagaaatttccagaattgaaattcaaatatgtggaagaggagcagcccgaggagttttttatcccctatgtctggtctcttgtctacaactcagcagtcggcctgtactggaatccacaggacatccagctgttcaccatggattccgactgagggcaggatgctctcccacccggacccctccagccaagcagcccttcaagttcttttatttctgggtaacagaagtagacagacaggttacttggtgtatcttctgttaaagaggattgcacgagtgtgttttcctcacacactttgatttggagaattggtgctagttggcaatagataactcagcgtagatagtattgcaaaaaggggaggaaatacacaacaataataaatgtaaaaacctgctaaaaaa

SEQ ID NO: 260248 - DNA, 260 bp, Homo Sapiens
  misc_feature (153)..(153): n is a, c, g, or t
gagccccttgcccccactgaacaggccacctccggagccgatatggcgagaagtcctcgtcggtcagcttggggggtgcgaataagttatcctcttcatcgtccgaaggagttctcctttccttcttctctttgagtgtcttcccgaagtttntgcttctcctgagggtaaggttgtcggatcctcgaccactcgacccacggcatcccccttgatgcgggtagccagctcgtctgcaaacgatgtaggtctgcttcttt

SEQ ID NO: 260249 - DNA, 599 bp, Homo Sapiens
acccagctgaccagcagtatttagtgaataaatgatagagcagtgactctcaaccaggggtgattttgccccctaggagacatttggcaatgtccgcagacatttgggttttacagctggggaggggagaagagtgtcactggcacttagtgtgtagaagccagggatgctgctcaacatcctacaatgcacaaacagcccatacaagagatgattatccagcccaacatgtttacagtgctagggctgagaaatcctacaccagaggaacaggaactaggaggcaaagagagtcaacagctatgagcatggagatgttttaggcaattaagggaaacaaaggaagagcatgctttgcttgcttgtttggaaaagggggtaatgagtagagagctctggattctgacaaacttgagaacagcatgtttatgaggagagaatgcagggcggcctgctcagctactgctgccatttggagagcaaagttggcttgtacttccactggactggtggcaaggaactctgcctctgcgatcaactcttggatgaggagtgtgccaaaagcagtgataaggatcaagtggtcctcacataaggat

SEQ ID NO: 260250 - DNA, 1218 bp, Homo Sapiens
  misc_feature (62)..(62): n is a, c, g, or t
  misc_feature (278)..(278): n is a, c, g, or t
tttagttcgggcttggttccccggggtacaggtttctggtaagaagctccctccctggggtnaacgtaaaggctttcccctctgaggctgaggggcccggaagggcgctctcaatttcctcggctggactggacgttctcagtttcgcggctgatcatgaaaggccatgtattctggcaaggagacatggccatctctgttcggatccaccgtgtccaggattgcctcgaactcagggtcaggttcccctttcctccacccatgggcaggtcatagcncagggagcgcaggcaagatttgaactcctgatggttcagcctgccagacttgtccttgtcaaagtgtttaaacatcatgctgaattctttgagggcctcctcagtcacacctgttgtgttcctggcctggatctgctgctccaggttgtgctgcatgcgcatgcccagctggtccagctggtcccactgctgggcgaggcccacggtgctgtgctccgtgtacttgttgtccaggatgagggcctcctccatggcggcccccaggtcctcgatctttttgagctgacttctcatggctcggatttcctggtgcttgcgtttggtagcttcaagctgggattcgagggtccccgactcttccaccatacaggacccatcgaggaggtatgtcctggtctcttggatccactggtggaaggcgttggcgtgctgggcaaactcctggcgcagcttgtcgttctcctcctgccgccgctgttccttctgcagctccagctccctctccttgatgattttctgtaggttcctccaggtctcctccagggcctccatggtaaaccaggtgtaggggttggaggctacgcggaagctcttgatctggcggtccagctcggccagctggttgaagtcagcctgggcagagctgagggaggagcggaaggcgtcgtgggcctcgcgcaaagctttgatttcttccaaggagttgcagcgcacggggtctgttaagtcctcctctgcattttcaaaccagctgttgaaggcagaagcctttttggcgaaggtcaggaagaggtcctccaccttgcggaagtgactctgagcctccagaagcttcttcttgcgggcggctgagttggccagaagctggctccacctcttcatgagggaggcgtgccgggcctcgatggccttggactgaacgtgtttggcggcgagaagc

SEQ ID NO: 260251 - DNA, 848 bp, Homo Sapiens
catctgaatcttaatcatgtccaactgcctgcaaaatttcctgaaaattacaagcactcgtcttctatgttcaagattatgccaacagttaagaagtaaaaggaagtttttcggaactgtgccaatatccagattgcataggcgagttgtcattacaggcattggcttagtgactcctcttggtgttggaactcacctggtttgggatcgtcttatcggaggagagagtggaattgtttcactggttggtgaagagtataagagtatcccttgcagtgttgctgcttatgtgccaagaggtagtgatgaaggtcagttcaatgaacaaaactttgtgtccaaatcagatatcaagtccatgtcttctcccaccatcatggccattggggctgcagaattagccatgaaggattctggctggcatcctcagtcagaagctgatcaagtggctactggtgttgcaattggcatgggaatgattcctcttgaagttgtttctgaaactgctttgaattttcagacaaaaggttacaataaagttagcccattttttgtccctaagattctggtcaatatggcagcaggcaggtcagcattcgatataaactcaagggcccaaatcatgcagtatccacagcctgtaccacaggagctcatgctgtgggagactcatttagatttatagcccatggtgatgctgatgtgatggtggctggaggtacagattcttgtattagccctttatctcttgctgggttttccagagcccgggctctgaagcacaaactcagatccccaagttggcatgtccgaccatttcatccaaagagagatgggttttgtaatgg

SEQ ID NO: 260252 - DNA, 1714 bp, Homo Sapiens
aaaattgccctagtaacggccgcatggtaactcaggcgccgggcgcactgtcctagctgctggttttccacgctggttttagctcccggcgtctgcaaaatgaagattgaggaggtgaagagcactacgaagacgcagcgcatcgcctcccacagccacgtgaaagggctggggctggacgagagcggcttggccaagcaggcggcctcagggcttgtgggccaggagaacgcgcgagaggcatgtggcgtcatagtagaattaatcaaaagcaagaaaatggctggaagagctgtcttgttggcaggacctcctggaactggcaagacagctctggctctggctattgctcaggagctgggtagtaaggtccccttctgcccaatggtggggagtgaagtttactcaactgagatcaagaagacagaggtgctgatggagaacttccgcagggccattgggctgcgaataaaggagaccaaggaagtttatgaaggtgaagtcacagagctaactccgtgtgagacagagaatcccatgggaggatatggcaaaaccattagccatgtgatcataggactcaaaacagccaaaggaaccaaacagttgaaactgggaccccagcatttttgaaaggttgcaaaaagaagcgagtaaaagcttggagatgtggatttacatttgaagccaacagtggggccgtgaagaggcagggcaggtgtgatacctatgccacagaattcgaccttgaagctgaagagtatgtccccttgccaaaaggggatgtgcacaaaaagaaagaaatcatccaagatgtgaccttgcatgacttggatgtggctaatgcgcggccccagggggacaagatatcctgtccatgatgggccagctaatgaagccaaagaagacagaaatcacagacaaacttcgaggggagattaataaggtggtgaacaagtacatcgaccagggcattgctgagctggtcccgggtgtgctgtttgttgatgaggtccacatgctggacattgagtgcttcacctacctgcaccgcgccctggagtcttctatcgctcccatcgtcatctttgcatccaaccgaggcaactgtgtcatcagaggcactgaggacatcacatcccctcacggcatccctcttgaccttctggaccgagtgatgataatccggaccatgctgtatactccacaggaaatgaaacagatcattaaaatccgtgcccagacggaaggaatcaacatcagtgaggaggcactgaaccacctgggggagattggcaccaagaccacactgaggtactcagtgcagctgctgaccccggccaacttgcttgctaaaatcaacgggaaggacagcattgagaaagagcatgtcgaagagatcagtgaacttttctatgatgccaagtcctccgccaaaatcctggctgaccagcaggataagtacatgaagtgagatggctgaggttttcagcagtaagagactccccaggtgtgcctggcctgggtccagcctgtgggcgcttgcccctgggcttggggctgccgtccccactcaggcgtggtctgcagcgctgtcagttcagtgtggaaagcatttctttttaagttatcgtaactgttcctgtggttgctttgaaagaacccttccttacctggtgtgttttctataaatcttcataggttattttgatta

SEQ ID NO: 260253 - DNA, 996 bp, Homo Sapiens
gtagcgaggcctgggtggcaattcggacgagggctggttttccacgctggttttagctcccggcgtctgcaaaatgaagattgaggaggtgaagagcactacgaagacgcagcgcatcgcctcccacagccacgtgaaagggctggggctggacgagagcggcttggccaagcaggcggcctcagggcttgtgggccaggagaacgcgcgagaggcatgtggcgtcatagtagaattaatcaaaagcaagaaaatggctggaagagctgtcttgttggcaggacctcctggaactggcaagacagctctggctctggctattgctcaggagctgggtagtaaggtccccttctgcccaatggtggggagtgaagtttactcaactgagatcaagaagacagaggtgctgatggagaacttccgcagggccattgggctgcgaataaaggagaccaaggaagtttatgaaggtgaagtcacagagctaactccgtgtgagacagagaatcccatgggaggatatggcaaaaccattagccatgtgatcataggactcaaaacagccaaaggaaccaaacagttgaaactggaccccagcatttttgaaagtttgcagaaagagcgagtagaagctggagatgtgatttacattgaagccaacagtggggccgtgaagaggcagggcaggtgtgatacctatgccacagaattcgaccttgaagctgaagagtatgtccccttgccaaaaggggatgtgcacaaaaagaaagaaatcatccaagatgtgaccttgcatgacttggatgtggctaatgcgcggcccccgggggggacaagatatcctggccatgatgggccagctaatgaagcccaagaagaccgaaatcccagacaaacttcgagggggagattaataaaggggggggacaagtacatccaccagggccattgctgaactggcccccggggggctggtttgttgaagcaggccccccc

SEQ ID NO: 260254 - DNA, 408 bp, Homo Sapiens
  misc_feature (24)..(24): n is a, c, g, or t
  misc_feature (64)..(64): n is a, c, g, or t
tgcaaactgctgaaccccgggccnaacttgccttgcctaaaaatcaaaggggaaaggacagcantgagaaaagagcatgtcgaaaaagaatcagtgaaacttttcctatgatgcccaagtcctccggcaaaaaccccggctgacccagcaggataagtacatgaagtgagatggctgaggttttcagcagtaagagactcccccaggtgtgccctggcctgggtccagcctgtggcgcttgcccctgggcttggggctgccgtccccactcaggcgtggtctgcagcgctgtcagttcagtgtggaaagcatttctttttaagttatcgtaactgttcctgtggttgctttgaaagaacccttccttacctggtgtgttttctataaatcttcataggttattttgat

SEQ ID NO: 260255 - DNA, 319 bp, Homo Sapiens
  misc_feature (159)..(159): n is a, c, g, or t
catagtgggccgtgcagcgcagcgggatcttcgtgacaggccatggggcatcataggacaggtaggcaggcaggacactgatcctcagctcgccctgtctgttgaagtacaggaagccgcggggacagttgacattgtggaatggagcgaaagagtcgnccgggccgtcgataaccagaaagtgtagccgcagagcccctcggccggtcaccaagagccagtgaggggaggggccgcagatgaagacccctgagtagccataaatatcctcgaagtagcggaaacgcgccacgcggccccgggccccagccccctcctc

SEQ ID NO: 260256 - DNA, 646 bp, Homo Sapiens
  misc_feature (265)..(559): n is a, c, g, or t
tagcagcaaaattgcctcagcagagctcccagttttattcccagttgtggctgaaaagcaaagccatggcatcagtatccttgtgcaatcggaggttgctgggctttcaccacctgtgttgttaaccttatttcctggaggaataatcagatgaaacaagtgcctaactccctttatcaaacacagccaaggacagcctcttttaacatgtgacttcatacttgaagaaaaggagagttgacagctgtatttaaaaacccatggnnnnnnnnnnnnnnnnnnnnnnnnnnnnnnnnnnnnnnnnnnnnnnnnnnnnnnnnnnnnnnnnnnnnnnnnnnnnnnnnnnnnnnnnnnnnnnnnnnnnnnnnnnnnnnnnnnnnnnnnnnnnnnnnnnnnnnnnnnnnnnnnnnnnnnnnnnnnnnnnnnnnnnnnnnnnnnnnnnnnnnnnnnnnnnnnnnnnnnnnnnnnnnnnnnnnnnnnnnnnnnnnnnnnnnnnnnnnnnnnnnnnnnnnnnnnnnnnnnnnnnnnnnnnnnnnnnnnnnnnnnnnnnnnnnnnnnncccatggaaatggtttaagaaaatggttctgggtacaccagaaatttgtttgcctgaagctaaagtgtgtctacaatggtacagctc

SEQ ID NO: 260257 - DNA, 550 bp, Homo Sapiens
  misc_feature (430)..(450): n is a, c, g, or t
cgtccacacgctccagggcggggggcccggtcccagctggccgcagaatcggcaaactcagggacttggagtccttcatgccatgctccaccttgccctcatctccaggcttggctggggctttgacacgaaggtagtgtcccccgaacctgtaggcctcgaaggtgagggacaggggtgtgttggactggtccaggtagatgtccactttgcccagcgcaatgcccttcctttcaaatacaggcagcagcacctcccccagtgacttcttcttcatggctgggacgatctctgtctcaatgtccacattcaggtcaaatttcagagtgaagcattccttgcttgggtcatccgtgtgtctcctccttgctttcttcttggagagtttcaggcctgtgataataccggtcccctttgccatccacagagnnnnnnnnnnnnnnnnnnnnnaagtccactgcggggctggtgcgcggcgggcatgaccgggtggacacgttccgggccagcacagagccttgtgggggaaggtcgaagcggacatgcccat

SEQ ID NO: 260258 - DNA, 1543 bp, Homo Sapiens
  misc_feature (500)..(500): n is a, c, g, or t
  misc_feature (504)..(504): n is a, c, g, or t
  misc_feature (1479)..(1488): n is a, c, g, or t
ttttcttggtcctaaaggctggcagacccatagaccatggcctgttaggaggcgtcctgtctgtaaaggaaattcatctcttgtgacagcctggggctacctagctcccaaacccagaagttggagacatcaggctgtttaaacgatcatagcctagcgggattggattaaaaccacaggcttttgcagctggaatggggttcagtgaacatctcccccattcctctcttgctacaaataaggaaacaggcccaggagattaagtgacttggctaaagtcacatagcaaattagtagcagagccgggactatcccttatccctgtgggttgggcaacactatttagtcctgaaaccgaatggcagataaaccccatgaggggtcaggctgatgtgccctccagcagtatctgagaagctgctaccttcaggggtgtgtcagggatgaggacgggtgcctgagcttaggttgtggagtggctgagagggcccaggaggctncggngacagctgtgtgctgcatggggttgggtgtctgcctggctcgcacttggtacccatggccacctccccattttctgtgccttatctcactgtttcagctgagtccaagttgtttactctgttcctctccagaggggctctctgtcccagttgggcagctcacctttgggacataagcctttgccccacaagctgtggagagggccaaaaccaagctgcttgagcccactctcttgctgagagtccaggcctgcctgcctgccagccagaggtgccccttatgcacatccagtcctaccagcctgcttccaggagcctagagtgggaaaggcacctgggggagccctggtgaagggctggacctgacccatggaggcaggaggaagacctggctttcttggtttgtccggccctggggagcagccttccctactcactttccccttgcggcaccaaatggtcacctccttccagagcaaaaactggcactcatagcaagccagaacccccatccccatcctcatgggtctgtggctgggtgcaggccatcaaaatggacaccacgagacagaagtggggactgcctgggccacctagcgccttctcactccttaagcaagcacaaagaagatgaggcagagaattgtcagagctgaaagttcctttgggttgctcacaactcagggtatgcacccatgtggcagccaggcagcggagccctactagactgccagtctcatgcacccagacctgtggccagattgtgcctctggctcctcaggcattttcctctttgcattgggttttcctgcattagtaactacagctgcaacagacatcctccacattgtgcacactggttttgcctttgtcctcaagagttgatacttggcattagcatgaaacttgtgggtgtgggaggatggagagagaactctaacacaaaacatcttattaaaattgtacttgagagacnnnnnnnnnnctctgttgtattttgacagaattatttttattaaaatacacatccatgagcagta

SEQ ID NO: 260259 - DNA, 557 bp, Homo Sapiens
aaaatacagtagccgaactcttgctgaagtttttctgcctcttcttttagcttctgcttctcctccctgctcaggactttccgggctgcggccttgtccacaaagtatctgtggatctccgtgaagtcacacttgtccaggctcttgatgacttccctctcttccaccgccatttcctttcgccagtcattgaagaagttcttccggaaaacctcctttgttgtgtattcatgatctaacatcctcccataaaaagtggcgacctcctccgctgccacgctcaatctcacaggccttccttcatagaagaaacgcactccgtcgggaaggggctcgtatgggggtgcgaagtacgggcccttgtgctccagctgtctccacttcaccccgtcttcgtgcttctccttctcccacctggctccactgcccttctgcgtcctgcgcgagcccgggacaccccgggaggccgggcggcgggggacctccccgagcagcgtcagagccgcccggagccgcagcagccgcaccacgcgcatctgccagcctccgggaaaaag

SEQ ID NO: 260260 - DNA, 1390 bp, Homo Sapiens
acgcgcgctcgcaggatcggtgcgtggtgacgtttcgccggcgcgggcgccatcccggaagcgcgagcaaggccgccagatgtgcaggcagcggaggaggagaaagagatggacctcccggactcggcctcgagggtcttctgcggccgcatcctgagcatggtgaacacagatgatgtcaacgccatcatcctggcccagaagaacatgctggaccgctttgagaagaccaatgagatgctgctcaacttcaacaacctgtccagtgcccgcctgcagcagatgagcgaacgcttcctgcaccacacgaggaccctagtagagatgaaacgggacctggacagcatcttccgccgtatcaggacgctgaaagggaaactggccaggcagcacccagaggccttcagccatatcccagaggcatccttcctggaggaagaggatgaagaccccatcccacccagcaccacgaccaccattgccacctcagaacagagcacggggctcatgtgacacccagccccgacaccgtctcgccctccctgagccccggattccaggacctgtcccatgcccagcctggctccccagccatcaacggccgcagccagacagatgacgaggagatgacgggcgaatagccctgctgcccggtgccttgagggggtctcagggcagcagcatacaaggtggcagcgggtaaccctgccttgttctgtcatccagggctcctttgctgccccgttctgtcacccagggctcctagggggacaaggctctctcccgaggggtgtggaattcctggggggggtctttaattctggctccttccttcctcagaacatctctattctgcaagacccctctgccatgccagggcacgcccattccagctggagtcgtggggctgggcacaggggaatttttccagagctgagcctgacgtctgctctgaagaatgcttagaaggttcccagacaccagagccagatgtcccccaccaccggtcacgacctccttgaggtgcacaagcacggtctcctctgagttcaccccaacgccacccccgcacccactaattctgcttttcctgccccttgctccgtaaaagtatcaaatactttctccttggtatctcaaggaggtttctgagataggtagaagtcttgagacggaggctggccatccattcagccctgagcgtgctgagttctgtgtttctctgaatagaggtgtggaacctgaggggccagcaggcctctcgtgaaggcctccatggagcaaacggagccacctcgggaaagagtttaatggaatattgttgtacccgatgtttacagatgctgttgggaagttatcaataaaaagacaccattactaaaacagggaa

SEQ ID NO: 260261 - DNA, 541 bp, Homo Sapiens
  misc_feature (116)..(116): n is a, c, g, or t
agactgggtcgtgtgtgagacgcatgtgctccaccccactccttttgggggaagccaggcaacagtggcctctaggagggggtcaggaagaggcgaacagctcaggcagcgcaggntgtgatgggcacagtacgcagagcaagctcgggaagttggtaggatctcaggcttggggccgggactctggagtgaatccccatttctctaccggcttgcttggagtttggacagaagcatttcacctctgatctcagcttccccacctgtggagtgggtttagtgacctgagtcactagggaatgtcacctgaatgcacagcccagcccatgcacctgccccagcccctccagctttggagccaaggccatcgttccagccacttgactgtcctcgacggcctgttccagacagggcgtttgttttgtccatgccttcctccctgcacgcacacggccttcaaaaccaagctgccggccactgtctccagaacgcaaggctccaggcccgtgtgtctgtaagcagtgagtggtccacacaggtt

SEQ ID NO: 260262 - DNA, 815 bp, Homo Sapiens
acagagacgggagtcgggtgggatcccaggctgggccccgcggcggctggattctcttccctggccaagtctctgagatcttctcccagggcgatgcaaagctactcgctaccagcttggacctgtctgcagtatctcctctgggacctgccatgctgaggacccattctcacctctgagggactcctgtcctaggactaaggtggagcctgggccatggtacagctggctcctgcggcagccatggacgaggtcacctttaggagcgacactgtgctgtcagatgtccacctctataccccgaaccatagacatctcatggtacggctgaacagcgtggggcagccagttttcctgtcccaattcaagcttctatggagccaagactcttggacagattcaggagccaagggtggcagtcacagagatgttcacacaaaggagcctccttctgctgagacaggcagcacagggtcccctccaggaagtggccatggtaatgagggtttctccctccaggccgggactgacaccactggccaggaagtggctgaagctcagctggatgaggatggggatttggacgtggtgagaagaccacgagccgcctctgattccaacccagcagggcctctgagagacaaggtacatcccatgattctagcacaggaagaagacgacgtcctgggagaggaagcacaaggcagcccgcacgatatcatcagaatagagcacaccatggccacgcccctggaggatgttggcaagcaggtgtggcggggcgccctgctcctggcagactacatcctgttccg

SEQ ID NO: 260263 - DNA, 544 bp, Homo Sapiens
gcagctgcaccgaccgtccccgcaaacagaagcatccctgtggaaaggaggggtctaccctgggcacagcagcagcaggaccctttgcatgtagctcacagacatgtactgccctaaccacagaaacatccttctcttactcccttgaaagacacaattcttcttaaaactacacaaagtataaagcatcagtactgaggctgggggccccatgcctgctggctgggcctgcgatctggagagaaacccaggctgtgtcttgtggaccatccagggccttcaccttgtcactgtggcatggccaccagtgctccctcccgtcccagcacatggccaacagatgccacggccctggaggctcagctctcccttcctagtccaagcttctggtggcttccagggcccctgatctttctgtaccacactccatctgcggctgcaaagtcaaggcgtggagccccacgagctcagcaggctccttcagtttactgatctaacagacttgggttcctcctgtgctcccagagtggggtatgagggataa

SEQ ID NO: 260264 - DNA, 1249 bp, Homo Sapiens
tgattattgggggacacccggctccctccagacaatgccagcataaatccatccatccaaaggcagagaaccaaaggggccatggaaggttctctgtgctcctcctacccttccagtgccctaggcctggcgactgccctgccttttagacccgccctccccttttatacctgctcttgttctactgagaaaagcctctccagcaataatgttttctagtcacttcctccgtctccgggacgccgtgcctggacactgtaccgactttgatagatttctacactgaggtttgaattcatatcgcctgagttgcttttacttctctatacaaaatgattttgaagagattttaaagacgttcccttttgtattctcttcctcatccaccgccactgggcctgtcactgatggtggctctggtgtgaagtttgctttgtactgagggttggggtggggaagcaatttgtattttattgtttcttagcacaagcaggtgaactgggagcagctctgtgactccccctctttcacttcatagctcaccaggactgttttataaactgctgtatttggaaaccccttctttacttcccaggccagcaagctcttcactgaaactggttgaagggtgttgcacccttttgggcctagaattctgaactttatctgttctgtttctgtgggaggagaaggggaagtatgttttggggggctgcttcctgtctgagtaagccctcaggagcctctgctcccctgtgaacccactgaaccttctgagcccccactgcttctatgggggctctctcttctgccttctcaggaaagctggtgtctgatttggccatcaggactctgacgtctcttggtcttgttgatttcctctgggcatatcccttccccagatctgtcctcccctttcacaggtgggatccgcactcaggggtctggaacgaaggtcataagggagcatgataggattcggggcagaagggaccaggctcctctggggaaacccccagagctcttttaacaaggttgaaagagggagccaggctagagtcctgaatgaaggaaaaggggcccacgggtccaaaggtgacggccaacattcactgggctctggcaaagcgagtgagggccgaaaggggccccttggggagggacccagacccaaagttgtgtcactaacaggcacggctgttagaggcccattcccagagggctgggaccgcagagggaagggagccag

SEQ ID NO: 260265 - DNA, 886 bp, Homo Sapiens
  misc_feature (460)..(461): n is a, c, g, or t
  misc_feature (481)..(482): n is a, c, g, or t
  misc_feature (494)..(494): n is a, c, g, or t
  misc_feature (498)..(499): n is a, c, g, or t
  misc_feature (508)..(509): n is a, c, g, or t
tgaagaagaaagaaaacaacatttgaaggaaatgggtcaaatgcaggttttgcaaatgaaaagtgaacatcagaagttggaagagaacatagacaatataaaaagaaatcataatttggcattagggcgacagaaaggttatgaagaagaaattattcattttaagaaagaacttcgagaaccacaatttcgggatgctgaggaaaagtatagagaaatgatgattgttatgaggacaacagaacttgtgaacaaggatctggatatttattataagactcttgaccaagcaataatgaaatttcacagtatgaaaatggaagaaatcaataaaattatacgtgacctgtggcgaagtacctatcgtggacaagatattgaatacatagaaatacggtctgatgccgatgaaaatgtatcagcttctgataaaaggcggaattataactaccgagtggtnngatgctgaagggagacacanngccttggatatngcgnnaggacgatnngcagtgcttgggaacaaaaggggtatttagcctcactcatcattcgcctggccctgcctgaaacgttctgcctcaactgtggcatcattgccttggatgagccaacaacaaatcttgaccgagaaaacatggaatctcttgcacatgctctggttgagataataaaaagtcgctcacagcagcggaacttccaggcttctgggaatcccctcatgatgaaagaattttgtggaaactttttaaggaacgttctgaaatatggtggaaaaatttctaccggggatttaaaaaagaacttccaatccgggggctccaaaaaattggggaaaatggcaagggtttaaccccccccgggggaatccaaaggggctcctttt

SEQ ID NO: 260266 - DNA, 483 bp, Homo Sapiens
gagcggcggcgggcgctggcattacgtcccggggcggggccgccaggctggggaggtgcggggggcttccctgtggtgactcctgatgctgctgcggcagcagcggctgcggctgcctcctcatcgctgcccccaaaactggtgatgaacgtgatcttctcctcgcggcccggggactggggagcgggagcgggagcgggactctgagctggactccgagggtgaccgcttataggggtcataggtggggctgtctcggcgggcatagctgggtgggctgatcttgcgacccctcagccgcttctcccgaaactctctccgctggcgtcgagagcggagtcccgagtacatggccttctcctcctcaagagccttggcatgcttgatggcctctgcctcctccttgtctttccggagcatcctgacgaagtcaccgtcggccatgccataagtcgtggcctgtttgttgagatctgccacctg

SEQ ID NO: 260267 - DNA, 2046 bp, Homo Sapiens
  misc_feature (1834)..(1844): n is a, c, g, or t
caagcaggctggtaccggtccgccaatcccttgggatatcgtcgacccacgcgtccgggcctgactacaccgaggacgtggggtttgacatcggccaggcgatgctggccaaagccagcatcagtactgaaaacttccgacccaactttgatgtttctattcccctcttttctaaggatcatcccaggacaggaggggagagggggtttttgaagttcaacaccatccctcctctcaggaagtacatgctggtattcaaggggaagaggtacctgacagggataggatcagacaccaggaatgccttatatcacgtccataacggggaggacgttgtgctcctcaccacctgcaagcatggcaaagactggcaaaagcacaaggattctcgctgtgacagagacaacaccgagtatgagaagtatgattatcgggaaatgctgcacaatgccactttctgtctggttcctcgtggtcgcaggcttgggtccttcagattcctggaggctttgcaggctgcctgcgtccctgtgatgctcagcaatggatgggagttgccattctctgaagtgattaattggaaccaagctgccgtcataggcgatgagagattgttattacagattccttctacaatcaggtctattcatcaggataaaatcctagcacttagacagcagacacaattcttgtgggaggcttatttttcttcagttgagaagattgtattaactacactagagattattcaggacagaatattcaagcacatatcacgtaacagtttaatatggaacaaacatcctggaggattgttcgtactaccacagtattcatcttatctgggagattttccttactactatgctaatttaggtttaaagcccccctccaaattcactgcagtcatccatgcggtgacccccctggtctctcagtcccagccagtgttgaagcttctcgtggctgcagccaagtcccagtactgtgcccagatcatagttctatggaattgtgacaagcccctaccagccaaacaccgctggcctgccactgctgtgcctgtcgtcgtcattgaaggagagagcaaggttatgagcagccgttttctgccctacgacaacatcatcacagacgccgtgctcagccttgacgaggacacggtgctttcaacaacagaggtggatttcgccttcacagtgtggcagagcttccctgagaggattgtggggtaccccgcgcgcagccacttctgggataactctaaggagcggtggggatacacatcaaagtggacgaacgactactccatggtgttgacaggagctgctatttaccacaaatattatcactacctatactcccattacctgccagccagcctgaagaacatggtggaccaattggccaattgtgaggacattctcatgaacttcctggtgtctgctgtgacaaaattgcctccaatcaaagtgacccagaagaagcagtataaggagacaatgatgggacagacttctcgggcttcccgttgggctgaccctgaccactttgcccagcgacagagctgcatgaatacgtttgccagctggtttggctacatgccgctgatccactctcagatgaggctcgaccccgtcctctttaaagaccaggtctctattttgaggaagaaataccgagacattgagcgactttgaggaatccggctgagtgggggaggggaagcaagaagggatgggggtcaagctgctctctcttcccagtgcagatccactcatcagcagagccagattgtgccaactatccaaaaacttagatgagcagaatgacnnnnnnnnnnnggccaatgagaactcaactcctggctcctgggactgcaccagactgctccaaactcacctcactggcttctgtgtcccaagactaggttgtgtacagtttaattatggaacattaaataattatttttgaaatgattgctatgcaggtttaaacttttttaatgatcaaaactattaaaaaccagagttctttgtttaatca

SEQ ID NO: 260268 - DNA, 1018 bp, Homo Sapiens
  misc_feature (731)..(769): n is a, c, g, or t
  misc_feature (902)..(902): n is a, c, g, or t
gggcagcctcggcgtttccgccatgcgtctgcagtgctccgcgcgctcttgacgtccggagcccctggagtaggcgcttccggccattcatactgcagtcggtcagtgttcggttgaaggattctgtgtgctgtcggacccagagggtgacggcgccgctaggatgaagctcgtgagatttttgatgaaattgagtcatgaaactgtaaccattgaattgaagaacggaacacaggtccatggaacaatcacaggtgtggatgtcagcatgaatacacatcttaaagctgtgaaaatgaccctgaagaacagagaacctgtacagctggaaacgctgagtattcgaggaaataacattcggtattttattctaccagacagtttacctctggatacactacttgtggatgttgaacctaaggtgaaatctaagaaaagggaagctgttgcaggaagaggcagaggaagaggaagaggaagaggacgtggccgtggcagaggaagagggggtcctaggcgataatgtctctcaagatttcaaagtcatatgagatttgggatattttttgtacaggttgtgtttgtttatgtcagtttttaataaacataaatgtgggacagagctgtctatttagtatatcaaagttttagtagtttcctccacattcacgaaattaccacagtgagagctaagcatttctactgggcagtttcatttttagttgatcagnnnnnnnnnnnnnnnnnnnnnnnnnnnnnnnnnnnnnnnatgatgaataaggttaaaataaaagccttagacaaattaaatttggcagagtttaattgagcaaaggacaattcacaaatcaggtagcccctgaaacataataggctcagaggcttcagcccagctgcatagnttgaagattatgggacaaaaagaaagtgatgtatgggaaaatggaagtgagatacggcaacagcccggattaattaacggttcaccgttttgccttatttgaattatggtttgaaa

SEQ ID NO: 260269 - DNA, 891 bp, Homo Sapiens; identical to SEQ ID NO: 96419
  misc_feature (641)..(706): n is a, c, g, or t

SEQ ID NO: 260270 - DNA, 475 bp, Homo Sapiens
  misc_feature (22)..(22): n is a, c, g, or t
  misc_feature (34)..(34): n is a, c, g, or t
  misc_feature (55)..(55): n is a, c, g, or t
ccctctttgcctgaggtctctntatcttctttcntggcctgttcactctctttcntctccatttcttcttttgctttgttgttgcttctctgtaatttcattttcttcagcttcttgtttctttttggctttttgttcttgttcttccttcctcagtttctcttcctctgcctcttcctgcaacagcttcccttttcttagatttcaccttaggttcaacatccacaagtagtgtatccagaggtaaactgtctggtagaataaaataccgaatgttatttcctcgaatactcagcgtttccagctgtacaggttctctgttcttcagggtcattttcacagctttaagatgtgtattcatgctgacatccacacctgtgattgttccatggacctgtgttccgttcttcaattcaatggttacagtttcatgactcaatttcatcaaaaatctcacgagcttcatcctagcgcc

SEQ ID NO: 260271 - DNA, 588 bp, Homo Sapiens
aaaccagccaagacataaactatagagccaactgctgcacatttcactgttacacccttccatggcattggtgagaccatcttccattcgttcaacttaatatcgtaatattccacattgtccagaccacctaaaccattctgaccacccacagcaaatatcttgtcttttacaaataccagcccatgattcttcctggcttcaatcattggacacagctcagtccatgtttctgtggcaggatcataaacttcacaggaattaagcactctcccagaaacattgtttcctaaacttccaccacaaacatagattaggccattggcttccaccatcccatggctgcagcgctgggtcagcatgctgggctttgtgtgccagctttcagttctcgtatcatagcactcaaataaatacagagctgagtttcctacttatgaacctccagatgtataaattttgccttctgcagcacatgcagcaaggctgtctcgaggtgtcggaggacccagtttcgaataccagctatccttcactacattatagcagtccattcgctttatggggaaaagctgagagcctcccaaa

SEQ ID NO: 260272 - DNA, 840 bp, Homo Sapiens
caattcaaagaaaggggatgtttgaaccttatctgaagagtttctatgttaggtcaactgatccaactatgatcaagacactgaagcttgaaattttgacaaacttggcaaatgaagccaacatatcaactcttcttcgagaatttcagacctatgtgaaaagccaggataaacaatttgcagcagccactattcagactataggcagatgtgcaaccaacatcttggaagtcactgacacgtgcctcaatggcttggtctgtctgctgtccaacagggatgaaatagttgttgctgaaagtgtggttgttataaagaaattactgcaaatgcaacctgcacaacatggtgaaattattaaacatatggccaaactcctggacagtatcactgttcctgttgctagagcaagtattctttggctaattggagaaaactgtgaacgagttcctaaaattgcccctgatgttttgaggaagatggctaaaagcttcactagtgaagatgatctggtaaaactgcagatattaaatctgggagcaaaattgtatttaaccaactccaaacagacaaaattgcttacccagtacatattaaatctcggcaagtatgatcaaaactacgacatcagagaccgtacaagatttattaggcagcttattgttccgaatgaaaagagtggagctttaagtaaatatgccaaaaaaatattcctaggcacaaaagcctgcaccactgcttgagtctccttttaaagatagagatcatttccagcttgggcaccttattctcattacttctcaacatttaaaggctactggggtaccggggatttattct

SEQ ID NO: 260273 - DNA, 862 bp, Homo Sapiens
gggatgttgagacagtgggcaggagactgcctgtgagagagggatgatctcaagaagagacctggcacaggaaaccaaaaggaggcaactgtagggaatgaaacttaagggtctgggaaagcgctgtaaaaggagagaggacctggagatccgctttatcctcatccagaaccgggcaggcaagacgcgcctggccaagtggtacatgcagtttgatgatgatgagaaacagaagctgatcgaggaggtgcatgccgtggtcaccgtccgagacgccaaacacaccaactttgtggagttccggaactttaagatcatttaccgccgctatgctggcctctacttctgcatctgtgtggatgtcaatgacaacaacctggcttacctggaggccattcacaacttcgtggaggtcttaaacgaatatttccacaatgtctgtgaactggacctggtgttcaacttctacaaggtttacacggtcgtggacgaggatgttcctggctgggcgaaatccgagagaccagccagacgaaggtgctgaaacagctgctgatgctacagtccctggagtgagggcaggcgagcccccaccccggccccggcccctcctggactcgcctgctcgcttccccttcccaggcccgtggacaacccagcagtccttccctcagctgcctaggaggaagggacccagctgggtctgggccacaagggaggagactgcaccccactgcctctggggccctggctgggggcagaggccaccgtgtgtgtcccgaagtaaccgtgccgtttggcgggtgatgccataagcgtctgggcggggagtccccaataaacctgggggtcctggccgggc

SEQ ID NO: 260274 - DNA, 672 bp, Homo Sapiens
gcctgggtggcgaattcggcacgagggctctgggccctacaactgcaccctgagccggagctgcccagtcgccgcgggaccggggccgctggggtctggacgggggtcgccatgttccggaactttaaaatcatttaccgccgctatgctggcctctacttctgcatctgtgtggatgtcaatgacaacaacctggcttacctggaggccattcacaacttcgtggaggtcttaaacgaatatttccacaatgtctgtgaactggacctggtgttcaacttctacaaggtttacacggtcgtggacgagatgttcctggctggcgaaatccgagagaccagccagacgaaggtgctgaaacagctgctgatgctacagtccctggagtgagggcaggcgagccccaccccggccccggcccctcctggactcgcctgctcgcttccccttcccaggcccgtggccaacccagcagtccttccctcagctgcctaggaggaagggacccagctgggtctgggccacaagggaggagactgcaccccactgcctctgggccctggctgtgggcagaggccaccgtgtgtgtcccgagtaaccgtgccgttgtcgtgtgatgccataagcgtctgtgcgtggagtccccaataaacctgtggtcctgcctggcaa

SEQ ID NO: 260275 - DNA, 892 bp, Homo Sapiens
  misc_feature (786)..(805): n is a, c, g, or t
  misc_feature (807)..(811): n is a, c, g, or t
ggggccctacaactgcaccctgagccggagctgcccagtcgccgcgggaccggggccgctggggtctggacgggggtcgccatgatccgctttatcctcatccagaaccgggcaggcaagacgcgcctggccaagtggtacatgcagtttgatgatgatgagaaacagaagctgatcgaggaggtgcatgccgtggtcaccgtccgagacgccaaacacaccaactttgtggagttccggaactttaagatcatttaccgccgctatgctggcctctacttctgcatctgtgtggatgtcaatgacaacaacctggcttacctggaggccattcacaacttcgtggaggtcttaaacgaatatttccacaatgtctgtgaactggacctggtgttcaacttctacaaggtttacacggtcgtggacgagatgttcctggctggcgaaatccgagagaccagccagacgaaggtgctgaaacagctgctgatgctacagtccctggagtgagggcaggcgagccccaccccggccccggcccctcctggactcgcctgctcgcttccccttccaggcccgtgggccacccagcagtccttccctcagctgcctaggaggaagggacccagctgggtctgggccacaagggaggagactgcaccccactgcctctgggccctggctgtgggcagaggccaccgtgtgtgtcccgagtaaccgtgcccttgtcgtgtgatgccataagcgccttgtgcgtggagtcccaaataaccctgtggtcctggnnnnnnnnnnnnnnnnnnnnannnnntccttggtcggccgcctcggcccttgaaaagctttccaagacctttcgttttgcccgcgggccccattggggaatgaacca

SEQ ID NO: 260276 - DNA, 477 bp, Homo Sapiens
  misc_feature (346)..(346): n is a, c, g, or t
  misc_feature (432)..(432): n is a, c, g, or t
  misc_feature (445)..(445): n is a, c, g, or t
  misc_feature (455)..(455): n is a, c, g, or t
aactgcaccctgagccggagctgcccagtcgccgcgggaccggggccgctggggtctggacgggggtcgccatgatccgctttatcctcatccagaaccgggcaggcaagacgcgcctggccaagtggtacatgcagtttgatgatgatgagaaacagaagctgatcgaggaggtgcatgccgtggtcaccgtccgagacgccaaacacaccaactttgtgggagttccggaactttaagatcatttaccgccgctatgctggcctctacttctggcatctgtgtgggatgttcaatgacaacaacctgggctttacctgggagggccatttcacaactttcgtgnggaggtctttaaacgaatattttccacaatgttttgtgaactgggacctggtgtttcaacttcttacaaggtttttacaaggttcntggaacgagattntttcccgggnttggccaaatttccgagggtac

SEQ ID NO: 260277 - DNA, 1187 bp, Homo Sapiens
  misc_feature (977)..(1120): n is a, c, g, or t
  misc_feature (1128)..(1142): n is a, c, g, or t
gccaagtggggactaagacgtacaaacaattggtagctggaaatagtcctaagaaacaagcttctagaccacctatccaaaatgcatgtgttgcagataagcacaggcctctggaaatgtcagccaagatccgagtaccatttttacgtcaggttgttcccattagtaaaaaggtagcccgggaccctcgctttgatgatctgtcaggggaatataatcctgaggtgtttgacaaaacataccaattcttgaatgacatccgagcgaaagagaaagagcttgtgaaaaaacagttgaagaagcacctttcaggagaggagcatgagaaactgcagcaactgcttcagcgaatggagcagcaagaaatggcacagcaggaacgaaagcaacagcaggagctgcacctggccctgaagcaagaacgtcgggctcaggcccagcagggccatcggccatacttcctgaaaaaatctgagcagcgccagttggcactagctgagaagttcaaggagctgaaacgcagcaagaaattggagaacttcttgagtcgaaagaggcgacgaaatgcaggcaaggacaggagacatctccctttgagcaaagagtaataaggaactatcctctgctctgccactgccccagggagacatggatctgtgaggacagatttggccacggctggtttccgttcaagggcaaggatcacagctgcccttgaatctcattgcctcagagaagactagagggctcttggactatccctagggctacacaagaatagttcagccttctgccatgccacacagcctcagcttgaatctggttcattgcgtcctcgtgttcttctctcatccttgccttaaaccagggattctgataccgaagaagaggggccaatgaaaaccatggagtctgttcgtgactcccagggctgggacattatgtaggagccacttcataaacattctctttactcnnnnnnnnnnnnnnnnnnnnnnnnnnnnnnnnnnnnnnnnnnnnnnnnnnnnnnnnnnnnnnnnnnnnnnnnnnnnnnnnnnnnnnnnnnnnnnnnnnnnnnnnnnnnnnnnnnnnnnnnnnnnnnnnnnnnnnnnnnnnnnnnttttgcgnnnnnnnnnnnnnnnaaaaaatttttaaaaacttttttttgggcccgggcccccaaagga

SEQ ID NO: 260278 - DNA, 578 bp, Homo Sapiens
tattgacagtgccaaagctcggtactggacacaacgagggacctgggtctacgataacgcgcttttgctcctcctgaagtgtctttggtccaacgttgttccaggtttgtcaccgtttctctccggccggtcagggcaagagccagagtgtaccatggcttccagtaacactgtgttgatgcggttggtagcctccgcatattctattgctcaaaaggcaggaatgatagtcagacgtgttattgctgaaggagacctgggtattgtggagaagacctgtgcaacagacctgcagaccaaagctgaccgattggcacagatgagcatatgttcttcattggcccggaaattccccaaactcacaattataggggaagaggatctgccttctgaggaagtggatcaagagctgattgaagacagtcagtgggaagaaatactgaagcaaccatgcccatcgcagtacagtgctattaaagaagaagatctcgtggtctgggttgatcctctggatggaaccaaggaatataccgaaggtcttcttgacaatgtaacagttcttattggaattgcttatg

SEQ ID NO: 260279 - DNA, 916 bp, Homo Sapiens
ggggtttcccgcatgctcagtagctgaggtagggatgccatccttctcaaaagacttattgacagtgccaaagctcggtactggacacaacgagggacctgggtctacgataacgcgcttttgctcctcctgaagtgtctttggtccaacgttgttccagagtgtaccatggcttccagtaacactgtgttgatgcggttggtagcctccgcatattctattgctcaaaaggcaggaatgatagtcagacgtgttattgctgaaggagacctgggtattgtggagaagacctgtgcaacagacctgcagaccaaagctgaccgattggcacagatgagcatatgttcttcattggcccggaaattccccaaactcacaattataggggaagaggatctgccttctgaggaagtggatcaagagctgattgaagacagtcagtgggaagaaatactgaagcaaccatgcccatcgcagtacagtgctattaaagaagaagatctcgtggtctgggttgatcctctggatggaaccaaggaatataccgaaggtcttcttgacaatgtaacagttcttattggaattgcttatgaaggaaaagccatagcaggagttattaaccagccatattacaactatgaggcaggaccagatgctgtgttggggaggacaatctggggagttttaggtttaggcgcctttgggtttcagctgaaagaagtccctgctgggaaacacattatcacaactactcgatcccatagcaacaagttgggttactggactgtgttggctgctattgaaccccgatgctgtgctgcgagttaagaggagccggaaaataagaatttttcagcttgatttgaagggaaaagccttctgccttaatgtatttttgcaagtccccggggtttgt

SEQ ID NO: 260280 - DNA, 630 bp, Homo Sapiens
tagaaggccacctgaaagaaatctatggaataaatttctcccccaatggctatcacattgcaaccggcagtggtgacaacacctgcaaagtgtgggacctccgacagcggcgttgcgtctacaccatccctgctcatcagaacttagtgactggtgtcaagtttgagcctatccatgggaacttcttgcttactggtgcctatgataacacagccaagatctggacgcacccaggctggtccccgctgaagactctggctggccacgaaggcaaagtgatgggcctagatatttcttccgatgggcagctcatagccacttgctcatatgacaggaccttcaagctgtggatggctgaatagatgacaatgggaaaaggacttgaacctcaagctctctctaaggagctgttttcctcaaacgagaagaattgaagtgtttagttctatcatgttttctgccaattaccatgcatagaccctcagtagaattggatttccatgtcagcccccactccaggaaggcagcccaatccctaggtgatggggaacccctctcacggttgaaaatttattacctttttacgccctgccacgaactgtgtagacattgtttttattaatcttttgt

SEQ ID NO: 260281 - DNA, 1117 bp, Homo Sapiens
aggtacgaggcctgggtggcgaattcggcacgaggattcagaacacaagaggagaatgagctggagcgccagcaccacgatggccccaggacgttgtttaagatctgagatcccttggtttctctcttgttgatctgagatgctacatcagggcccttgctgctgtattacctctgcccgggtgtttgagacaggtcacaagcgcgtggatgtttcctggaagtgtattcccctggggctcagcgatgctctgggaacccttggggtttggggaaggacagtgtggtgtgactattggcttgaaacgttatggatatggttggagtcacccatgtggatatgattttcagcttggagctgggatggagaagatggaagcactggtggccgggcctctttttccagcgaggccagccctggcttctcctctgttccagcttgtctgccagaagccttcccctgcaaggtgcccacctgcccggagacagagggagcagctgaggcctctctccactggccgccagcctccctagcacaaggggaccattcagcaatgagtgtttactcatgttctttcttgttgatgagttctgcggcccagcatatagaaatggctcagaacgttccaggccttggtgagacacagcagcgtccaatgctcacaggctgtccccactctgcctgttcccatcttcccctcgggacctgtttataaattgaggaatggatgagggccctggagggtccttgggagtagttagtggagggcaggattctcaggtccccatagagagggaaagagaagaccagatgtgcatagaagccaatctctgtcacatacaccgcaggtgggtcaccgagttatttttcaaaagctgaggaacataaagcaaatttaggcttttgtccttctgcaatacatgcacttgaaaataaacagaaaagagatggtttaataacaagtttacttccgggtctgctagcaccctcagcctgggagctactgccagagggctggcgtagtgggggcacctgctgaacaaaccccacagaacagagggcaccaggcatcaaacgacatctttccctcccatctctgccatctggttggcccgga

SEQ ID NO: 260282 - DNA, 1046 bp, Homo Sapiens
  misc_feature (57)..(57): n is a, c, g, or t
cccttccttcttaccccctcccctataccgtcttccgtcccggtcttaacactgccncctggcctgcgtggcgaattcggcacgaggattcagaacacaagaggagaatgagctggagcgccagcaccacgatggccccaggacgttgtttaagatctgagatcccttggtttctctcttgttgatctgagatgctacatcagggcccttgctgctgtattacctctgcccgggtgtttgagacaggtcacaagcgcgtggatgtttcctggaagtgtattcccctggggctcagcgatgctctgggaacccttggggtttggggaaggacagtgtggtgtgactattggcttgaaacgttatggatatggttggagtcacccatgtggatatgattttcagcttggagctgggatggagaagatggaagcactggtggccgggcctctttttccagcgaggccagccctggcttctcctctgttccagcttgtctgccagaagccttcccctgcaaggtgcccacctgcccggagacagagggagcagctgaggcctctctccactggccgccagcctccctagcacaaggggaccattcagcaatgagtgtttactcatgttctttcttgttgatgagttctgcggcccagcatatagaaatggctcagaacgttccaggccttggtgagacacagcagcgtccaatgctcacaggctgtccccactctgcctgttcccatcttcccctcgggacctgtttataaattgaggaatggatgagggcccctggaggggcccttgggagtaattacggggagggcaggatttctcaggcccccatagagagggaaagaaaagaccagatgtgcatagaagccaatccctgtcacctacaccggaaggggggccccgagtttattttcccaaacttgagggacattaaggcaaattttaggcttttggcccttcgggcaagaatggccttggaaacatcacccgaaatggggggcgttaatagcaacgtcaattttccggcccggccg

SEQ ID NO: 260283 - DNA, 1078 bp, Homo Sapiens
tccgggccgggcctccgccctatgtaccaaggctgggtggcgaattcggcacgaggattcagaacacaagaggagaatgagctggagcgccagcaccacgatggccccaggacgttgtttaagatctgagatcccttggtttctctcttgttgatctgagatgctacatcagggcccttgctgctgtattacctctgcccgggtgtttgagacaggtcacaagcgcgtggatgtttcctggaagtgtattcccctggggctcagcgatgctctgggaacccttggggtttggggaaggacagtgtggtgtgactattggcttgaaacgttatggatatggttggagtcacccatgtggatatgattttcagcttggagctgggatggagaagatggaagcactggtggccgggcctctttttccagcgaggccagccctggcttctcctctgttccagcttgtctgccagaagccttcccctgcaaggtgcccacctgcccggagacagagggagcagctgaggcctctctccactggccgccagcctccctagcacaaggggaccattcagcaatgagtgtttactcatgttctttcttgttgatgagttctgcggcccagcatatagaaatggctcagaacgttccaggccttggtgagacacagcagcgtccaatgctcacaggctgtccccactctgcctgttcccatcttcccctcgggacctgtttataaattgaggaatggatgagggccctggagggtcctttgggagtaattagtgggagggcaggattctcagggtccccatagagagggaaagaaaagaccggaggtgcataaaaagccaatctctggtcacataccccgcgggtggtcccccgaattatttttccaaaagcgtgagggaaccttaaggcaaattttaggggcttttggccctttcccgcaataaccttgcccctttggaaaattaaccccgcaaaaaggacgatggcttttaaataaaccacaggtttttagttttcccggggtccttggtttataaccacccccttctcaggccctgtgggggac

SEQ ID NO: 260284 - DNA, 912 bp, Homo Sapiens
ggcctgggtggcgaattcggcacgaggattcagaacacaagaggagaatgagctggagcgccagcaccacgatggccccaggacgttgtttaagatctgagatcccttggtttctctcttgttgatctgagatgctacatcagggcccttgctgctgtattacctctgcccgggtgtttgagacaggtcacaagcgcgtggatgtttcctggaagtgtattcccctggggctcagcgatgctctgggaacccttggggtttggggaaggacagtgtggtgtgactattggcttgaaacgttatggatatggttggagtcacccatgtggatatgattttcagcttggagctgggatggagaagatggaagcactggtggccgggcctctttttccagcgaggccagccctggcttctcctctgttccagcttgtctgccagaagccttcccctgcaaggtgcccacctgcccggagacagagggagcagctgaggcctctctccactggccgccagcctccctagcacaaggggaccattcagcaatgagtgtttactcatgttctttcttgttgatgagttctgcggcccagcatatagaaatggctcagaacgttccaggccttggtgagacacagcagcgtccaatgctcacaggctgtccccactctgcctgttcccatcttcccctcgggacctgtttataaattgaggaatggatgagggccctggagggtccttgggagtagttagtggagggcaggattctcaggtccccatagagaggggaaagagaagaccagatgtgcatagaagcccaatctctgtcacatacacccgcaggggggtcccccgaagttatttttcccaaaagctgagggaaccttaaaagcaaaaattttagggcttttc

SEQ ID NO: 260285 - DNA, 1276 bp, Homo Sapiens
  misc_feature (1126)..(1126): n is a, c, g, or t
  misc_feature (1176)..(1176): n is a, c, g, or t
  misc_feature (1186)..(1186): n is a, c, g, or t
  misc_feature (1220)..(1220): n is a, c, g, or t
  misc_feature (1233)..(1233): n is a, c, g, or t
  misc_feature (1254)..(1254): n is a, c, g, or t
tcggacagagttcaacttgatgtatgcctactcccctttgaatgctatgcctcgagcagatggactgtatcgaggatctcctctagtgggggataggaagcctttacatttggatgggggatattgttcccctgcagaaggattttccagcagatatgaacatggcttaatgaaagacctctctcgtggatccttgtcacctggtggtgaaagggcctgtgaaggagtcccatctgccccccagaacccaccacagaggaaaaaagtatccctgctggagtaccgaaaacggaaacaagaagctaaggaaaattctgctggtggggggaggtgactctgcacagagcaaaagcaagtctgcaggagctgggcaaggcagcagtaactccgtttccgacactggtgcccatggtgtgcagggatcctcagcccgaactccatcttcccctcacaaaaaattctccccatctcattcctctatgtcccatttggaggcggtaagcccatcagattccagaggcacttcttcatctcactgcagacctcaagagaatatcagcagtaggtggatggttcccacatcagtagaacgactccgagaaggagggagcatccccaaggtcctccgaagcagcgtgagggtggcccaaaagggagagccctctcccacatgggagagtaacatcacagagaaagactcagaccctgcagatggagaaggcccagagacattaagctcagcactctctaaaggagcaacagtttacagcccttccagatacagctaccagctcctgcagtgtgatagtcctcggacagaatcacaaagcctccttcagcagagttcctcccccttcagaggacatcctacacagtctccaggataacagttatcgaactactgcactgagacctggaaaccccccctctcacggttcttcagaatcatccctctcttccacgtcctattccagccccgcccaccctgtgtccacagactcgttggccccatttacggggacaccagggtattttagcagccagccacattctggaaacagcactggcagcaatcttccaaggaggagctgcccttctagtgctgctagccctaccctgcaggganccctcagactcgccaacctcagtattcagtttctcagttccagcacaggnaactctgagnttccacctcctttcctcagaaattctaggtcgtnattgccatcaganttacggactaatcagtctggncagtgctggggaattcagctgg

SEQ ID NO: 260286 - DNA, 1095 bp, Homo Sapiens
  misc_feature (1033)..(1043): n is a, c, g, or t
ttgttcaggcacaaatcaagggtccggaggatagggatcaaggtggtataccccggcaagcattgctacaacacagttattagcaaatttgtatccacaaagtatcaatacatttcaagaaactgctataaactgccaggcttggcagatgcgcagtacagggtctccaagtgtcccgtggcgctgccctatactccaggcatttatcctagaggccaggatgccaccccctcccctcccctcctgggcactcagaatccacggagacaccaggaggtctaaacctcatctgcagctgcccctccaggtttgggaccagtggacggggttccaaccacgggctctgacagccacaaggcccatgagatgctgctgcaccatggaggaccagggtgaaggatgaaggtcagtgactctacaggggttggtggggggtgtggcaggggtcccctcacttcccacattgctgcaagtcactgaacgatcacttggcttaggggccgaggtacactgaaccacaggtgaacacaactgagctcacaaagtaggcccctggacctcagaggatggaccccactttcccctcagcatctggatgcccacctcaaaggtgaacaccccctgagggtgagtttctgggtctccatgaagtcaccttatcatgagtgagggcactcaatataaatacacacgtgtggtcctgctcagagccaggtctgaagtcccacttgatagcctcaataaaatggcagaacgataaaaataccaattgcgtgctaaccacagttgataaaataatctctgtgcatttaaaacagcaggaagtttgctataagtaacaagggttcatcagctttctactccctcccttctattattataatacatctatgtcttaagcaaacagctttccaacttgggtgaggaccaaaccccaaacttacaactaatatgaagttacaactctaattctttagaaatgagagaagtccaaacctcaatagaagcctgccatgcttattttgaaatgttnnnnnnnnnnngatccaggtgtcttcaaaattcaagcagaatagcttgaaacactgacagttt

SEQ ID NO: 260287 - DNA, 1090 bp, Homo Sapiens
atcccatcggtagccacggccacggcagcggctctcggcgaggtggaggatgaagggctcctggcgtcgctgttccgggaccgcttccccgaggcccagtggcgcgagcggcccgatgtgggccgctacctccgggagttgagcggctcggggctggagcggctgcggcgcgagcccgagcgcctggcggaggagcgggcgcagctgctgcagcagacgcgcgacttggccttcgctaactacaagaccttcatccgcggcgccgagtgcaccgagcgcatccaccgcctgtttggcgacgtggaggcgtcgctcggccgcctgctcgaccgtttgcccagcttccagcagagctgcaggaactttgtgaaggaagccgaggagatcagctccaaccgccggatgaatagcctgaccctaaaccggcacacagaaattttggaaatactggagattcctcagctcatggacacctgtgtccggaacagttattatgaagaggccctggagcttgcagcctacgtacgccgactggagaggaaatactcttccatccctgtcatccagggcatcgtgaacgaagtgcgccagtccatgcagctgatgctgagccagctgatccagcaactgaggaccaacatccagcttcctgcctgcctccgtgtcattggctacctgcggcgcatggacgtcttcactgaggctgagttgagggtgaagtttcttcaggcccgagatgcttggctccggtccatcctgactgccattcctaatgatgatccctatttccatattacaaaaaccatcgaggcctcccgtgtccatctctttgatatcatcacccagtaccgtgccatcttctcagacgaggacccactgctgccccctgccatgggtgagcacactgtgaatgagagtgccatcttccatggctgggtgctacagaaggtctcacaattcctgcaggtgctggagaccgacctttaccggggcataggcggccacctggactctctgctgggccagtgcatgtactttgggctgtccttcagccgggtgggagctgatttccggggtcagttggctcctg

SEQ ID NO: 260288 - DNA, 559 bp, Homo Sapiens
atgacagggatggaagagtatttcctctccagtcggcgtacgtaggctgcaagctccagggcctcttcataataactgttccggacacaggtgtccatgagctgaggaatctccagtatttccaaaatttctgtgtgccggtttagggtcaggctattcatccggcggttggagctggatctcctcggcttccttcacaaagttcctgcagctctgctggaagctgggcaaacggtcgagcaggcggccgagcgacgcctccacgtcgccaaacaggcggtggatgcgctcggtgcactcggcgcgtctgctgcagcagctgcgcccgctcctccgccaggcgctcgggctcgcgccgcagccgctccagccccgagccgctcaactcccggaggtagcggcccacatcgggccgctcgcgccactgggcctcggggaagcggtcccggaacagcgacgccaggagcccttcatcctccacctcgccgagagccgctgctgtggccgtggctaccgatgggatagtcgccgcggtcgccatcttcccagcaacaacgtc

SEQ ID NO: 260289 - DNA, 925 bp, Homo Sapiens; identical to SEQ ID NO: 1418

SEQ ID NO: 260290 - DNA, 1560 bp, Homo Sapiens
  misc_feature (282)..(282): n is a, c, g, or t
  misc_feature (317)..(317): n is a, c, g, or t
  misc_feature (1009)..(1009): n is a, c, g, or t
acacacctcccacctccaggcctctaggtcggtaaagaacctactttggcgtggctggcgcgcctgacgcggggtctctccattaccggcggggagaaaattcacaaaggcctgctttcgggtacggggggcgacaaactctctccttaccgcggcggcccgccagcgaagtctcaccccagcgcccgccctactttacccctccgcctaggcgccccccggttttcccctaaaaggggaagagggtgttcaaacaataacagtctccccctgacgtggtgncgcaaagaggcgccgacccaaccccacgagacccntcctgctctctcctttctggtgctgcgtacctcacccatgtcacccccgccgaatttatttgtcacgcccgctcccgctttctgagattgacaaaaaaagtgttaggttcgggggcacaaaccccagggacaaagcttcgccaatacaaacactcataactcgttgtttggggggaaagggctggtgcccctggctccttgagaaagcttgaaggccaggggcaggtcccaggtcttcagggaaaggaagttttttttaaagcccaagaagagaggaggcctcccttaaggagccaagagagccgctcattcatgaccccaacccagagctctgtagaactgctgtcacacgccaaacaccaacattaagggggggaggagaatgaactccagccgtttctcccaacacaacccaacagagctattctgggacatgtgtgtttgcgagcttgtgtgtggagagcaccaaaaagctcatcagcagccccaggcctctgtgcggtctggttttcagactggcacccgcaggcagtgcatctgaagcaccttctagttactatccccatctggaatcttggttttctccattccatgtcaccttctattgccaacccaagggtgccagtgcctgtgggtctcattatatgatactctcttccaggactgaatccgctagtctggccaaaaaaaangcactcagccacatcctactccccaataaatgtctctggggtcttcattttctcttccggctgatcctcagttcatccagttccttctccattaagtgggattcggcagtggactctgaaagcatgtctaataagatgtccactttcagccgcaagagattgttctcttcctccaactgctggttccgcctgcgaaggcgctgaacctccctccggtccacaccgccactaacccctgtctctgctatccactggccattttcaaacttcaggctttgccctgccaggttcatagtcggggatccgtattccaagcccagctccacctcccgggttgatcgatccaaagaatgcaggttggagagagatgccgacttccgaggaggtgtcttcttcggactgaacgtattcccaaagaaaggcatctttggcctgatgaaagcaaagccagtgctcccttctcctgacgcgtcccagaagccggggtccaagcgctccccgaacccccagccaaggactctgtagcccagagttaccttgacccacccgcc

SEQ ID NO: 260291 - DNA, 883 bp, Homo Sapiens
  misc_feature (577)..(587): n is a, c, g, or t
  misc_feature (680)..(680): n is a, c, g, or t
  misc_feature (803)..(803): n is a, c, g, or t
gggaggcggcaggaggcgggtgggtcaaggtaactctgggctacagagtccttgctgggggttcggggagcgcttggaccccggcttctgggacgcgtcaggagaagggagcactggctttgctttcatcaggccaaagatgcctttctttgggaatacgttcagtccgaagaagacacctcctcggaagtcggcatctctctccaacctgcattctttggatcgatcaacccgggaggtggagctgggcttggaatacggatccccgactatgaacctggcagggcaaagcctgaagtttgaaaatggccagtggatagcagagacaggggttagtggcggtgtggaccggagggaggatcagcgccttcgcaggcggaaccagcagttggaggaagagaacaatctcttgcggctgaaagtggacatcttattagacatgcctttcagaagccatggcttgaatccccctttaatgggagaacgaactggatgaaattgagggatcagccgggaagagaaaatgaagaaccccgagacatttattgggcgaagtaggatgtgggctggacttgcnnnnnnnnnnngggcccagatctaaccggaattcacgtccctgcaaacaagagtcttctctttagttggcagaacccacagggcgactgggaaacgccttgggngtatggccacatacaaacggtggacccgtggaaagtgatagaaaacccttggatttccagagaggggcgcatcacttaactaaaaacgggtgggcttttgcaatggcccatgaccttggcggntggtctcactttctggaaaaacccgacccgcaccattaagctccttgagagcttgcatcaacgtaccccctatttggagc

SEQ ID NO: 260292 - DNA, 707 bp, Homo Sapiens
ggtccgcgggaaaccaaaatggcgaggggctgtattgaagtgggctgtgtttgaggccggtgtaagaacgctcattctacccccaacccttgtctccaaggacctcggtttgtgcgtgcatatgtgccgggtacccggtggggcgggtgcccagtaagtgctcggactcgcaggggaagcgcccacggggacggattggttgttttttcctgtatgaagcggttggcaccactgaagtgaccgaatgagagactctacaggggcaggtaattcactggtccacaagcggtctcctttacgtcgaaaccaaaagaccccaacacccttgaccaagctgtctttacagggtggacataaagccaaaaagccagcatgtaaatttgaagagggtcaggatgtcctagctagatggtcagatggcttgttttatcttggcactatcaaaaagataaacatattgaaacagagctgcttcatcatatttgaagacagttctaaatcctgggttctctggaaggacattcaaacaggagccactggaagtggggaaatggtctgtacaatatgtcaagaagagtattcagaagctcccaatgaaatggttatatgtgacaagtgtggccaaggatatcatcagttgtgtcacacacctcatattgattccagtgtgattgattcagatgaaaaatggctctgtcggcagtgtg

SEQ ID NO: 260293 - DNA, 1604 bp, Homo Sapiens
gaccaaggtgaagatggcctaggatcttcactgtcttactcaagatactggactaagtggaacgttctctaccttcaacatgtgctcgctctgcatgattagtgcaataaaactcccttccttatgcatactgagatagcttagtgtctcgtggaaggtgtcaatttggtttagaatgctgcgcttaccttcccatgcaggctaaagtgattccttcttgctcagtccctctgggtgggaaccatccagtacttgtggacactacacgtttcaacctctctactagcaccatcacccttgaaaactctcagtcagtgtcatgaatgttgcatgacaacagttggccgattagaaggcagactttctacatgcaaatctggcttagtaaatcgaggtgtgggccagagatcctctgacagctgtcctgagctaacactaaaagtcactgggtatttggttaaaggtctcccacaagactggtattctctttgcctgaagaaacaaggcattgaatctctaaaatgctgttctcaatcattgtcagagatgttttcaagttgcagtcagaagatctttcttaatagaaagtcagatgactaccgtgttggttgtgacttccccttaagtataactaatttgctctgtggtaagagatatgctcattattaccacttagaagatgttgttaaaaacatgtgaaagataggtatggaaaaagcatacacccccaaacagaaaggagttattaaagtaatttacaaacctctcagcactaattagtgtccaactccaagtgggtcaattccttagtataatattaaggcttactagtatcactgctttttccttagcttaatgacttacttagaatttatcctttattttaaatgatctgtactatctagtgtctaaaacactattctccagaaaaatcaatcattttctagccctctccctcagtcctttattgtccattccaatacattgaacacatttcctttaccctccacacacttcttccaaaaggaagcacccgttgagtccttttgagggtgatttgtcttacaactgactgacttagcaggaatttaattaggtcatatttggtgatgagacttatggagtgtgcctctctctcccaactgctgcttaaaatgcaaggacaagcaattagaagccatcctaaagtgcttacctcacacgccacccatgaggcttgtggccacagtggcacttgggtgtggctcctctgttatttgtcctcatgtgagaaagcagatcatctccaaatcttgccatttgtatacttttggtggagacttggatgtcatatcttctttgttttgggttttcttccctagcttattttgtggcttttaaagaagtggattgtattgtgagatcctgtgattcctggtggccagtatcctggattcctctaagatcttgcctctttcctcctcatgaaagcagcacacattgtgttaacttatgtctcttgttaaatgagcttaatgtctttgtgttttgtccaaaactgtattgaaaaaatattgtttaatgcaaatgaaggaatgcaataaagagtaaatatacttgaaaaa

SEQ ID NO: 260294 - DNA, 865 bp, Homo Sapiens
  misc_feature (769)..(797): n is a, c, g, or t
atttaacacagaagaaggtttgttctacctttaaaagcatatcctcttttttcccccaacagactcctcaacaagtggcttctaagacaagactggggttgttttcttactgaaaatcctgtgtttatccagtcttttccttttcaatttctgagtttagcttacctaacagcaaaacagaatcctcaaatttctcacagagcaatgaaaagcaaaacagttggtttctctgatcaacatcattttcagtatgaaaacaaaagttatgactcctagacctttgaaatatttacaaattgtactttaaacaacgagatttttcagtgtgcttctaaaacaaagtaaagggatcagaaaatgtggttcaagtcaagtgtgcaaagctctcgaagaaaggtcctgcagcctggacaggagtacaaatattctcttatacaagttaaatgtactcttttcctccacaacatttttgaaatgaaacagcaaatgcatttatactcacaaatcagtcaaaaggcctcttctccttattaagccctttacacacagatgataaaagcaaggttttcctacaatagatgtggccctaccacatattcaagatacaatcatcctaccatcagttaggttatgctttaaatattttgaaatcaggtatccttaactactgatttccttttagaaactatcttgagtgttagattttcataattacaccatttttaacttttagctttttaaacttctagacaaactatatgtttaagcnnnnnnnnnnnnnnnnnnnnnnnnnnnnngtaatatcagagttttaatttcaaccagcctggcacaacaatgaaagtgtcagactttctgaaagtac

SEQ ID NO: 260295 - DNA, 1566 bp, Homo Sapiens
  misc_feature (1233)..(1233): n is a, c, g, or t
  misc_feature (1417)..(1417): n is a, c, g, or t
  misc_feature (1489)..(1489): n is a, c, g, or t
  misc_feature (1517)..(1517): n is a, c, g, or t
  misc_feature (1546)..(1546): n is a, c, g, or t
tttttccggcccgcagcgcggcctgggctcccgcgtgtttaaaagtgcgcttgtggctgctgctgtcttaactcctgtgcttggcggacagacaggcgagatggcggcggaggtgttgccgagtgcgaggtggcagtattgtggggcgcccgacgggagccagagagctgtactggtccagttctccaacgggaagctacagagtccaggcaacatgcgctttaccttgtatgagaacaaagattccaccaaccccaggaagaggaatcaacggatcctggcagctgaaacagataggctctcctatgtgggaaacaattttgggactggagccctcaaatgcaacactttgtgcaggcactttgtgggaattttgaacaagacctctggccaaatggaagtatatgatgctgaattgttcaatatgcagccactattttcagatgtatcagttgagagtgaactggcgctagagagtcagaccaaaacttacagagaaaagatggattcttgtattgaagcctttggtaccaccaaacagaagcgagctctgaacaccaggagaatgaacagagttggcaatgaatctttgaatcgtgcagtggctaaagctgcagagactatcattgatacgaagggtgtgactgctctggtcagcgatgctatccacaatgacttgcaagatgactccctctaccttcctccctgctatgatgatgcagccaagcctgaagacgtgtataaatttgaagatcttctttcccctgcggagtatgaagctcttcagagcccatctgaagctttcaggaacgtcacgtcagaagaaatactgaagatgattgaggagaacagccattgcacctttgtcatagaagcgttgaagtctttgccatcagatgtggagagccgagaccgccaggcccgatgcatatggtttctggataccctcatcaaatttcgagctcatagggtagttaagcggaaaagtgctctgggacctggagttccccacatcatcaacaccaaactgctgaagcactttacttgcttgacctacaacaatggcagattacggaacttaatttcggattctatgaaggcgaagattactgcatatgtgatcatacttgccttgcacatacatgacttccaaattgacctgacagtgttacagagggacttgaagctcagtgagaaaaggatgatggagatagccaaagccatgaggctganagatctccaaaagaaagggtgtctgtggccgccggcagttgaaaaagatcacaaactgggcaccctgtccctcccgctgcctccagcccagacctcagaccgcctgggcaaagcggaggaaaattacctaggacgcatgctttccagacagggcgttttggctgcatcacagccactggtggtncctatttcatttccatttttatgtatgtttttgaaaagaaaaggtccggggatgggtgggcttcacacctgnaattttcagcctcccgatttacagggcntgcaccaccatgcccgggtaatttttgtnttttttagttggaggacagc

SEQ ID NO: 260296 - DNA, 839 bp, Homo Sapiens
  misc_feature (374)..(374): n is a, c, g, or t
  misc_feature (781)..(781): n is a, c, g, or t
  misc_feature (818)..(818): n is a, c, g, or t
ttgaaggaatatcaccagcatgttgtacggaaactctcccactgaagcaggctttaattgctttaaaattatatttatcttggggcctgtgggaggaaacttccttccatcttctctgcataaaaacttgtggcacacaatgcttattcactagtgtgtcccacccgccagccccacagatgactggaggaaggaggggaaatgtgtagaaagaggcttcgcaccacttgttcccacgagaatatatcacttgcccagataaaactgggcggcacagaagtttccctgaagtgggaagtcagagctacatgcacacagtgtcttcagaaggtgaaaataaatatttccctgtgctccttttactcaacccctgngatatctaatcttgccaggtcttggccagttgagattctgttccacctgcctgcctggccctttcctccattaccatccagactgctcgcctcctggggattctcaggggctccattatggcttgatttactccacgtgcagaagtcttgagtggacctaggaggtaggtgggatattttttttcactaggatacagctcatgccaacccatcctaagtgagttcagaatcagggtatcttgccctataagataaacagtcaaaatgccaccgagctgttcattagtgatgtgtgggcaaatcaaatcaactgttgaagaaggggtgagttttctgtgctacaagcacctgttcactgttgggtacttggcagggaggcttctgctggggtatgttttgggaagtgnagtgttcactacttgggcttttgctttaggcaggttntgctttcacacttgtttcttt

SEQ ID NO: 260297 - DNA, 1113 bp, Homo Sapiens
taagtatatgactgatgggatgttacttcgtgaagctatgaatgatcccctcctggagcgttatggtgtaataattcttgatgaggctcatgagaggacactggctacagatattctaatgggtgttctgaaggaagttgtaagacagagatcagatttaaaggttatagttatgagcgctactctagatgcaggaaaattccagatttactttgataactgtcctctcctaactattcctgggcgtacacatcctgttgagatcttctatactccagaaccagagagagattatcttgaagcagcaattcgaacagttatccagattcatatgtgtgaagaggaagagggagatcttcttcttttcttaactggtcaagaggaaattgatgaagcctgtaagagaataaagcgtgaagttgatgatttgggccctgaagttggtgacattaaaatcattccattgtattctacacttccacctcagcagcagcaacgcatttttgagcctccacctcccaaaaaacagaatggagcaattggaagaaaggtagttgtgtcaaataacatagcagacacgtctttgacaatagatggtgtggtgtttgtgattgatcctggatttgcgaaacagaaggtctacaatcctcgaatcagagttgagtcccttttggtgacagctattagtaaagcttcagctcagcaaagggctggtcgagctggacgtaccagacctggaaaatgcttcagactttacacagagaaagcttataaaacagaaatgcaggataacacctatcctgagattttgcgttctaatttaggatcagttgtgttacaattgaagaaacttggtattgatgacttggtacattttgattttatggatccaccagctcctgaaactctgatgagagccctggaacttttgaattacctggctgctttaaatgatgatggagatctgactgaattgggatccatgatggcagagtttcctctagatccacagctcgcaaaaatggttattgcaagttgtgactacaactgttctaatgaggtcctatctattactgctatgttgtcagtcccacagtgttttgttcgccccac

SEQ ID NO: 260298 - DNA, 942 bp, Homo Sapiens
  misc_feature (883)..(891): n is a, c, g, or t
aaggagcgaggcctgggtggcgaattcggcacgagggcgcattgaccctgtgctctacatgacggagtggttcatgtgcatcttcgcccgcaccctgccctgggcgtcggtgctgcgtgtctgggacatgtttttctgtgaaggcgttaagatcatcttccgggtggccctggtcctgctgcgccacacgctgggctcagtggagaagctgcgctcctgccaaggcatgtatgagaccatggagcagctgcgtaacctgccccagcagtgcatgcaggaagacttcctggtgcatgaggtgaccaatctgccggtgacagaagcactgattgagcgggagaatgcagcccagctcaagaagtggcgggaaacgcggggggagctgcagtatcggccctcacggcgactgcatgggtcccgggccatccacgaggagcgccggcggcaacagccacccctgggcccctcctccagcctcctcagcctccctggcctcaagagccgaggctcccgggcagctggaggggccccgtccccgccgccccccgtccgcagagccagtgctgggcctgccccagggcctgtggtcactgctgagggactgcatccatcccttccctcacccactggcaatagcacccccttgggttccagcaaggagacccggaagcaggagaaggagcggcagaaacaggagaaggagcggcagaaacaggagaaggagcgggagaaagagcggcagaagcaggaaaaagagcgagagaaccaggaaaaggagcgagagaaacaggagaaaggacggcaaaagcaggaaaaaaagctcaaggccggaagctttcccctgcgtccaaaaggagaatgggcccccacggcccccatgaannnnnnnnnaacaggcccctcaacccaaaggccccggcaaggaacccttaatctttcgga

SEQ ID NO: 260299 - DNA, 625 bp, Homo Sapiens
agtattcgctctcccctgtcccctgctatgggcagggcctggctggggtataaataggtcagacctctgggccgtccccattcttcccctctctacaaccctctctcctcagcgcttcttctttcttggtttgatcctgactgctgtcatggcgtgccctctggagaaggccctggatgtgatggtgtccaccttccacaagtactcgggcaaagagggtgacaagttcaagctcaacaagtcagaactaaaggagctgctgacccgggagctgcccagcttcttggggaaaaggacagatgaagctgctttccagaagctgatgagcaacttggacagcaacagggacaacgaggtggacttccaagagtactgtgtcttcctgtcctgcatcgccatgatgtgtaacgaattctttgaaggcttcccagataagcagcccaggaagaaatgaaaactcctctgatgtggttggggggtctgccagctggggccctccctgtcgccagtgggcactcttttttttccaccctggctccttcagacacgtgcttgatgctgagcaagttcaataaagattcttggaagtttaaaacgcgattaaataatatgagatgaaagcttg

SEQ ID NO: 260300 - DNA, 487 bp, Homo Sapiens
attcttcccctctctacaaccctctctcctcagcgcttcttctttcttggtttggtgcttctgagatgtgggcttgcacacgctgttgctatagtacgtgttgatcctgactgctgtcatggcgtgccctctggagaaggccctggatgtgatggtgtccaccttccacaagtactcgggcaaagagggtgacaagttcaagctcaacaagtcagaactaaaggagctgctgacccgggagctgcccagcttcttggggaaaaggacagatgaagctgctttccagaagctgatgagcaacttggacagcaacagggacaacgaggtggacttccaagagtactgtgtcttcctgtcctgcatcgccatgatgtgtaacgaattctttgaaggcttcccagataagcagcccaggaagaaatgaaaactcctctgatgtagttggggggtcttgccagctggggccctccctgtcgccagtgggcac

SEQ ID NO: 260301 - DNA, 816 bp, Homo Sapiens
ctaatggcatctaggggctcgaggccgggggtggcagttaggcgagggccgatcagcgcgcgtgcgttgcgcgcggactttggtagtccgggacctctcttgcatcatccactcctccgtcccacgggcggttgtcttgtggcgagtcagccacaccgcgatccgggtcttcacggatcggctatggaccatgtgggcctacctcatgggcccagccggcaacgaagtggtgtggaaaggttttggaggggcgagcggcccggcctgctttttcattgagtggcgctcgactgcgtgttaaacttacacgaatgtctagtggacttgctcagcatcaagcacgcgtctgaaggagccagggtggaaagaaaatagtgccccctggagacagggagggcccccagctggcagaccccccaaccacatcaaaaggagttttcatttcttccctgggctgcttatctgggaagccttcaaagaattcgttacacatcatggcgatgcaggacaggaagacacagtactcttggaagtccacctcgttgtccctgttgctgtccaagttgctcatcagcttctggaaagcagcttcatctgtccttttccccaagaagctgggcagctcccgggtcagcagctcctttagctctgacttgttgagcttgaacttgtcaccctctttgcccgagtacttgtggaaggtggacaccatcacatccagggccttctccagaggcacgccatgacagcagtcaggatcaaaccaagaaagaagaagcgctgaggagagagggttgtagagaggggaagaatccc

SEQ ID NO: 260302 - DNA, 1415 bp, Homo Sapiens
  misc_feature (17)..(17): n is a, c, g, or t
ggctatgagagtgacanagaagtccggcgtatagcaggctggtacggtccggaatcccggtgatatcgtcgaccacgcgtccggacagcttgactgaaacagacactctgattccaagaaaggtggtgtatgaccagctcaatcagatcctggtgtcagatgcagccctcccagaaaatgtcattctggtgaacaccactgactggcagggccagtatgtggctgagctgctccaggaccagcggaagcctgtggtgtgcacctgctccaccgtggaggtccaggccgtgctgtccgccctgctcacccggatccagcgctactgcaactgcaactcttccatgccgaggccagtgaaggtggctgctgtgggaggccagagctacctgagctccatcctcaggttctttgtcaagtccctggccaacaagacctccgactggcttggctacatgcgcttcctcatcatccccctcggttctcaccctgtggccaaatacttggggtcagtcgacagtaaatacagtagttccttcctggattctggttggagagatctgttcagtcgctcggagccaccagtgtcagagcaactggacgtggcagggcgggtgatgcagtacgtcaacggggcagccacgacacaccagcttcccgtggccgaagccatgctgacttgccggcataagttccctgatgaagactcctatcagaagtttattcccttcattggcgtggtgaaggtgggtctggttgaagactctccctccacagcaggcgatggggacgattctcctgtggtcagccttactgtgccctccacatcaccaccctccagctcgggcctgagccgagacgccacggccacccctccctcctccccatctatgagcagcgccctggccatcgtggggagccctaatagcccatatggggacgtgattggcctccaggtggactactggctgggccaccccggggagcggaggagggaaaggcgacaagagggacgccagcttcgaagaacaccctcaagagtgtcttccgctcagtgcaggtgtcccgcctgccccatagtggggaggcccagctttctggcaccatggccatgactgtggtcaccaaagaaaagaacagaaagttcccaccatcttcctgagcaagaaaccccgaggaaaaggaggttggattctaagagccaggtcattgaaagcatcagcccgctcttctgctcagcccagcagcagcagactatgctgagagggcccatgaatggggcccaagtggaagtgacatcaagttctttccaactgggagccccagtggcccaacccatgtcaaggcactttcccggggggactcttcagtggggaacaaggcccacctgaaggccctgtcttccagaccactttccc

SEQ ID NO: 260303 - DNA, 878 bp, Homo Sapiens
gggcggtgcgctgggctgcacctccctccccgcgccccgtcctctcccgccctacaggccctagcagggcaggcgggaggtgagcgcggccatcccgctcccggagttccgggatcctggaggtgggggctgtgccctgagggagggcacagggaaccgggatggggctgggggacagcgagtgctgggaagtgtgcgagatttcactccggggctcgggtcgagctaccccgtgcttcaggcggtcctgcgcctcctctccccaagacccttcggggacacagcactgcagacccgccggagacaacttgtgcgggagcccggagtcctcggaataacacttggtcttctgatagccgtcagcgtctccgttgataaaatcatctcgcatttcggggccgcccggaacttggtgcagaaggtgaaggtggctggggggaggctgttgggatgaggagagtaatggagctccccggggggtgcgggaatggttggcgggaggtggctgggaggtgtctggagggatctctggagccatcggcatcgcgccacctccaggccccgttgggtgatagccggctgagcccggatgtggggcacctggttgctgaccaccctctgcccggccctccacgccctggtggcggacgggcttgaaccctttcccgaaggacctcatcaccgggccagcgcaggaaccaaccccctggaccctggggggaggcgtcccgtaaaccctaggcttccgcaccccgttccccttggaacccctgtattaggccaaggtcagaccggctttgcccccctctggaagcagcaacccgtaaaccgccttcccatggcccttttaatccttgggggccttctttaaacaatcc

SEQ ID NO: 260304 - DNA, 1293 bp, Homo Sapiens
cgagatttcactccggggctcgggtcgagctaccccgtgcttcaggcggtcctgcgcctcctctccccaagacccttcggggacacagcactgcagacccgccggagacaacttgtgcgggagcccggagtcctcggaataacacttggtcttctgatagccgtcagcgtctccgttgataaaatcatctcgcatttcggggccgcccggaacttggtgcagaaggcccagttgggtgatagccggctgagcccggatgtggggcacctggtgctgaccaccctctgcccggccctccacgccctggtggcggacgggctgaagcctttccggaaggacctcatcaccgggcagcgcaggagcagcccctggagcgtggtggaggcgtcggtgaagccaggctccagcacccgctcccttggaaccctgtatagccaggtcagccgtctagccccgctgagcagcagccgtagccgcttccatgcctttatcctgggcctcctcaacaccaagcagttggagctgtggttttccagtctccaggaagatgcagggagctggtgggagcagttgacccaggcctcccgggtctatgcctctgggggcactgagggctttcctctttcccgatgggcaccgggggcgtcatgggactgcagctgaagaaggtgcacaggagagacccctgcccacagatgagatggcaccaggcagggggcctctggttggggaagactatttgggagtgcctggggggcccccgcaagaaaatgagaatggagccctaaagtccaggagaccatctagctggctgcccccgacagtgagtgtgttggctcttgtgaagcggggggcacctcccgagatgccttctcctcaggagcttgaggcctcagcacccaggatggtgcaaacccatagggcagtgcgggctctctgtgatcacactgctgcaaagacctgaccagttgagcttccggcgtggggaagtgctgcgtgtcatcaccacagtggatgaggacctggctccgctgtgggcgggatggcatggagggtctggtgcctgtggggtatacctcccttgttctgtagccctgggaccctttcctgcgtatgtgtctccttcctgtcacctgggaatggaatggccagtgaacaccatcccagaagcattttccctctgcaaaatgacgtttcttcccacgtctgtttctgctaatatttaaaataaactttccttcttccctcctatacccacctgtaaggtgaaatctgctcttcttccaaatatat

SEQ ID NO: 260305 - DNA, 937 bp, Homo Sapiens
agtggagtgggacaggtatataaaggaagtacagggcctggggaagaggccctgtctaggtagctggcaccaggagccgtgggcaagggaagaggccacaccctgccctgctctgctgcagccagaatgggtgtgaaggcgtctcaaacaggctttgtggtcctggtgctgctccagtgctgctctgcatacaaactggtctgctactacaccagctggtcccagtaccgggaaggcgatgggagctgcttcccagatgcccttgaccgcttcctctgtacccacatcatctacagctttgccaatataagcaacgatcacatcgacacctgggagtggaatgatgtgacgctctacggcatgctcaacacactcaagaacaggaaccccaacctgaagactctcttgtctgtcggaggatggaactttgggtctcaaagattttccaagatagcctccaacacccagagtcgccggactttcatcaagtcagtaccgccatttctgcgcacccatggctttgatgggctggaccttgcctggctctaccctggacggggagacaaacagcattttaccaccctaatcaaggaaatgaaggccgaatttataaaggaagcccagccagggaaaaagcagctcctgctcagcgcagcactgtctgcggggaaggtcaccattgacagcagctatgacattgccaagatatcccaacacctggatttcattagcatcatgacctacgattttcatggagcctggcgtgggaccacaggccatcacagtcccctgttccgaggtcaggaggatgcaagtcctgacagattcagcaacactgactatgctgtggggtacatgttgaggctgggggctcctgccagtaagctggtgatgggcatccccaccttcgggaggagcttcactctggcttcttctg

SEQ ID NO: 260306 - DNA, 510 bp, Homo Sapiens
  misc_feature (230)..(230): n is a, c, g, or t
  misc_feature (284)..(284): n is a, c, g, or t
  misc_feature (340)..(340): n is a, c, g, or t
cgacgccacgtggcggtcctctgtgactcccgtactgtcaacaaccatgcatttttgaagaccctggtggagtatttcacacagcatggggaagtacgcacggcctttgagtatcttgacgatattgtcccagaaaactattcccatgagaactcccagggttccagccacgctgccaccaagccccagggacctgctacgtccaccaggaccggaagccagcggcaggnagggaggccaggaggctgcagcacctgccagacagggccggaagaagccggctnggggaagtctctggcctctgaagctccatcttcagcccagcctcaacggaggcagncccagagggagtgggagagccaagatggcgtgggaccacttccgggccatgatagtggagttcatggccagcaagaagatgcagttggagtttcctccttccctcaattcccacgacaggctgcgggtccaccaaatagccgaggagcacgggctgaggcacgacagttc

SEQ ID NO: 260307 - DNA, 905 bp, Homo Sapiens
  misc_feature (186)..(197): n is a, c, g, or t
  misc_feature (230)..(318): n is a, c, g, or t
  misc_feature (338)..(444): n is a, c, g, or t
taatcctaagttcaaaataattaaagttcatttgagataattaaatcaaaacctctagtctgggttggagggtgataaagttatctggcgaaatatatgaacttctgttaccttcctcttctgctaaatgaatggtaaaatgaatcctgatttgtttaggcagtttacttatgaagttgggagaannnnnnnnnnnnctttaaaggactgagtctggctctgttgcctannnnnnnnnnnnnnnnnnnnnnnnnnnnnnnnnnnnnnnnnnnnnnnnnnnnnnnnnnnnnnnnnnnnnnnnnnnnnnnnnnnnnnnnngccaccatgtccagctgatnnnnnnnnnnnnnnnnnnnnnnnnnnnnnnnnnnnnnnnnnnnnnnnnnnnnnnnnnnnnnnnnnnnnnnnnnnnnnnnnnnnnnnnnnnnnnnnnnnnnnnnnnnngtgtgagccactgtgccaggcctgaggttgggagaaatttggtcccatttctttagaacccaaaattggccaaccagagagtatttggatgttacacaaaatatttagtttccctttctagcctaaattgggttgtttatagcacccgtctctcccatttgagaaaaatggttaggatgctggtgcagggatgaggccttattaaaacagagaaggtacccaaatggtggttcaaacacaggctggctaataagctgtgaggtgacttaccaaaaaacaacaacaacaaaaacccttgaacttctgctttcaacttctactttatgctagattatttggtccaatcttcctggtctaacacctggctacatataacaacaaacatctgcttgaatgtgttggaaaggtgatgattaattgccaggctgatatattaaataaaatggaaatctcaaaagttg

SEQ ID NO: 260308 - DNA, 553 bp, Homo Sapiens
gggacaggactcgctaagtgttcgctacgcggggctaccggatcggtcggaaatggcagaggtggaggagacactgaagcgactgcagagccagaagggagtgcagggaatcatcgtcgtgaacacagaaggcattcccatcaagagcaccatggacaaccccaccaccacccagtatgccagcctcatgcacagcttcatcctgaaggcacggagcaccgtggttgaacatcgacccccagaacgatctcaccttccttcgaattcgctccaagaaaaatgaaattatggttgcaccagataaagactatttcctgattgtgattcagaatccaaccgaataagccactctcttggcttccctgtgtcattccttaatttaatgccccccaaggaatgttaatgttcaatcatgttcagtgggactaggcacatgggcagttcgcttgggaaccccattcacaccattccagtggacctgtgtgggggtgggcggttttttttccctcaccaacgaaaccctgtgttggaacaactttccccagagttcggt

SEQ ID NO: 260309 - DNA, 867 bp, Homo Sapiens; identical to SEQ ID NO: 3558
  misc_feature (836)..(836): n is a, c, g, or t

SEQ ID NO: 260310 - DNA, 1181 bp, Homo Sapiens
  misc_feature (139)..(156): n is a, c, g, or t
  misc_feature (161)..(271): n is a, c, g, or t
gtgggggggattcccaaccccttttttcttgggcccaggtttttcttttgggaaacaaaggtaaaggcccccgggttcacctttccctaaatggggccccggcccgccaaaagaaaagggtttgggaaaggtttttgtnnnnnnnnnnnnnnnnnnccaannnnnnnnnnnnnnnnnnnnnnnnnnnnnnnnnnnnnnnnnnnnnnnnnnnnnnnnnnnnnnnnnnnnnnnnnnnnnnnnnnnnnnnnnnnnnnnnnnnnnnnnnnnnnnngctttttaaaagtttttatttcaaaaaataaagctgcagttcatttcacataaatatctggggagggaaggggagtgggatggggtgggggcttggcccctacctcctcttctctttcacactgtattgtaaaagcaaaggggatggcttgccgaaccagcgggagagcccatatctgcttccatggtcatgtgatcagggagaacttcattgtcaaaaaggagctgcacatgctgagggtttagcatcaagcggtgacacaggaccctccggagatggcgtacctcagctctaacagaacatcggacatacttgttctgcaggacgcttttattcttgtctttgccagaactcagccgctccaggcacaggttcaactgctcatcatagcgatagtagtgggctttagagtggtcaaagctgctgaaggggaggccgaggttgctcagtgctggctcttccccagtgggctgggtgacccggtccaaacctcgggactggtagaattcccgaatccgtttctcttcactgtcttgcaagccaggcaccagcttatacacgatgtcctgcatgacccggtccagtttgaggttgagcagtggctgtgtctcgtggatcttaatgttgcacatggggcagtacttgctagtttggaggtacttcacaatacaactcttgcagaaagtatgaagacactctgtgatggtggtggcatccacgaagtagccggcgcataggcagcaaacaatgtgttcattcaagtctttgatcttcactcgaacctcctcctcgttccgtagcgggtccatcttgtacactgactggagctggttccgaagcctcatcgcgatcgcaatctggcccccctgaggagacgccatcttaaaggctgatcccagccggccacccc

SEQ ID NO: 260311 - DNA, 887 bp, Homo Sapiens
  misc_feature (759)..(759): n is a, c, g, or t
ctcatccctgctgctggcctacactctgcagacgcactccagcctctttctggaggagctggagatgctggtgccctcaacacccacctctactagcggtgccttctggaagggcagtgagttggccactgaccccccggcccagccagccgcccccagcaccaccagtgaggtggttaagatcctggagcgctggtgggggaccaagcggatcgactactcgctgtactgccccgaggcgctcaccgcctttcccaccgtcacgctgccccacctcttccacgccagctactgggagtccgccgacgtggtggcgttcatcctgcgccaggtgatcgagaaggagcggccacagctggcggaatgcgaggagccgtccatctacagcccggccttccccagggagaagtggcagcgaaaacgcacgcaggtcaagatccggaacgtcacttccaaccaccgggcgagcgacacggtggtgtgcgagggccgcccccaggtgctaagcgggcgcttcatgtacgggcccctggacgtcgtcacgctcactggagagaaggtggatgtctacatcatgacgcagccgctgtcgggcaagtggatccactttggcaccgaagtcaccaatagctcgggccgcctcaccttcccagttcccccagaacgcgcgctgggcattggtgtctaccccgtgcgcatggtggtcaggggcgaccacaccctatgccgaatgctgccttgactgtggtggcccggcgncaccggaggctgtgggtcttcagcattcgacgggctccttccaccgccagcggtttccatcatgggcaggcgaccccaaagtgccgaactgggcgcccgtgaaggtgggtcagggcactggccgggac

SEQ ID NO: 260312 - DNA, 1345 bp, Homo Sapiens
  misc_feature (1112)..(1112): n is a, c, g, or t
  misc_feature (1150)..(1150): n is a, c, g, or t
  misc_feature (1203)..(1203): n is a, c, g, or t
agcgctcgcgcaggagaccccgggtgacggggcccggcgccgctaactggagcgaaccccagcgtccgccgacatggcctggaccaagtaccagctgttcctggccgggctcatgcttgttaccggctccatcaacacgctctcggcaaaatgggcggacaatttcatggccgagggctgtggagggagcaaggagcacagcttccagcatcccttcctccaggcagtgggcatgttcctgggagaattctcctgcctggctgccttctacctcctccgatgcagagctgcagggcaatcagactccagcgtagacccccagcagcccttcaaccctcttcttttcctgcccccagcgctctgtgacatgacagggaccagcctcatgtatgtggctctgaacatgaccagtgcctccagcttccagatgctgcggggtgcagtgatcatattcactggcctgttctcggtggccttcctgggccggaggctggtgctgagccagtggctgggcatcctagccaccatcgcggggctggtggtcgtgggcctggctgacctcctgagcaagcacgacagtcagcacaagctcagcgaagtgatcacaggggacctgttgatcatcatggcccagatcatcgttgccatccagatggtgctagaggagaagttcgtctacaaacacaatgtgcacccactgcgggcagttggcactgagggcctctttggctttgtgatcctctccctgctgctggtgcccatgtactacatccccgccggctccttcagcggaaaccctcgtgggacactggaggatgcattggacgccttctgccaggtgggccagcagccgctcattgccgtggcactgctgggcaacatcagcagcattgccttcttcaacttcgcaggcatcagcgtcaccaaggaactgagcgccaccacccgcatggtgttggacagcttgcgcaccgttgtcatctgggcactgagcctggcactgggctgggaggccttccatgcactgcagatccttggcttcctcatactccttataggcactgccctctacaatgggctacaccgtccgctgctggggccgcctgtccagnggccgggcccctgggcagaggaaagcgagcaggagagnactgcctggggtggcaccccgcactccccatcaatgatggccagcctgaaggntcccctggaagggcttctactggcccaccccggggtggctcccttcttcccctggaagactgaaagccacaccccgggccctgggtggggggcccccgaaatgcccctttattccccccaggggcctttcaccccttggtcc

SEQ ID NO: 260313 - DNA, 1589 bp, Homo Sapiens
tcaaaagtcaaacggcaaagcagcacccctagtgctcctgaactgggacagcagccggatgtcaacattagtgaatggaaggacaaacccacccacgaaattcttcaaaaactgaatgattgcagttgtctggctagccaagccatcctgctgggtatactgctcaaaagagaaggccccaacttcatcacaaaggaaggtaccgtttctgatcacattgagagagtctatagaagagctggcagccaaaaactttggtcggttgtacgccgtgcagcaagtcttttaagtaaagtagtggacagcctgggccccatccattactaatgttttagtgcagggcaaacaggtaactctggggtgcctttgggcatgaagaagaagttatctctaatcctttgtctccaagagtgattcaaaacatcatctattataagtgtaacacccatgatgagagggaagcggtcattcagcaagaactggtcatccatattggctggatcatctccaataaccctgagttattcagtggcatgctgaaaatacgaatcgggtggatcatccatgccatggagtatgaacttcagatccgtggcggagacaagccagccttggacttgtatcagctgtcacctagtgaagttaaacagcttctgctggatattctgcagcctcaacagaatggaagatgttggctgaacaggcgtcagatcgatgggtctttgaatagaactcccaccgggttctatgaccgagtgtggcagattctggagcgcacgcccaatgggatcattgttgctgggaagcatttgcctcagcaaccaaccctgtcagatatgaccatgtatgagatgaatttctctctccttgttgaagacacgttgggaaatattgaccagccacagtacagacagatcgttgtagagttacttatggttgtatccattgtactggaaagaaaccccgagctagaatttcaagacaaagtagatctagacagactggtcaaagaagcatttaatgaatttcaaaaagatcagagtcggctaaaggaaattgaaaaacaagatgacatgacttccttttacaacactcctcccctgggaaaaagaggaacatgcagctatttgacaaagggcggtgatgaatctgctgctggaaggagaagtcaagccaaacaatgatgacccgtgtctgattagctagtggggaaggtgtaggaagctctgttgagacacatgttcctgaagtgtgttgtgtttcatgttcaagcctaaatcaaggcagcccattaatatacgaactgagcatgctggggaggtgaatgccacatccttggcggggttatgggccctcttgcatgtcatagccaatcctaacggtaatggtaaatgcttttaatcaagcaggaaaaagttctcatgattatgccaactataatagtaatcctcactgagtgataaaaatagtttatgaattgaaaatttgccgctgcatgttgtatgatcaaatagttcatcaaaatgaatctttgctctttggactgaattcttaccatactgccattaaaataaatttgccaacttacg

SEQ ID NO: 260314 - DNA, 353 bp, Homo Sapiens
  misc_feature (249)..(249): n is a, c, g, or t
ttgttgaagacacgttgggaaatattgaccagccacagtacagacagatcgttgtagagttacttatggttgtatccattgtactggaaagaaaccccgagctagaatttcaagacaaagtagatctagacagactggtcaaagaagcatttaatgaatttcaaaaagatcagagtcgggctaaagggaaattggaaaaacaaggatggacatggacttcctttttacaacactcctcccctggggggnaaaaagagggaacatggcaggctattttggacaagggcgggtggatggattctggcttgctggggagggaggaggtccaggcccaaccattggtgacccctgtc

SEQ ID NO: 260315 - DNA, 1222 bp, Homo Sapiens
  misc_feature (11)..(11): n is a, c, g, or t
  misc_feature (36)..(36): n is a, c, g, or t
  misc_feature (735)..(747): n is a, c, g, or t
  misc_feature (752)..(768): n is a, c, g, or t
cttctgtcctngatgctcagtgttttgcggtttacnatgcgcatcgttttcccggctctggcaccagatccatactattctgtaaactgaggcggcgatgccaaaaattggaagcaattactctaagatatcaaaagattgaagcaagccatgaaacctctgcgcggagagagccgagcccgaggcggcggggagccagcacgtgtgcgcagctccgccctcttttggcgaagcacctaggcctggcccctcccgcgacctgtagcgcggcggagcaagcgcagaaggctgggagggctgcgcgggctgcgcgtcgccatggagcccgacgggacttacgagccgggcttcgtgggtattcgcttctgccaggaatgtaacaacatgctgtaccccaaggaagacaaggagaaccgcattctgctctacgcgtgccggaactgtgattaccagcaggaggccgacaacagctgcatctatgtcaacaagatcacgcacgaagtggacgaactgacccagattatcgccgacgtgtcccaggaccccacgttgccgcggaccgaggaccacccgtgccaaaagtgcggccacaaggaggctgtgttcttccagtcacacagtgcgcgggccgaggacgccatgcgcctttactacgtgtgcacagccccacactgcggccaccgctggaccgagtgacctcctctctcccccgagtgtaataaacaccagattccnnnnnnnnnnnnntacannnnnnnnnnnnnnnnnacagacaacaacaaaccttgtcgggccgcctcgcgccctcgaagaagcttttcaaaaccatttcgttttggccgcgcggggccccagaaaggtaaagggaaacatgggtcaataccctgctttcccaaggaaaatccctgggtcatggcactagtgggcttgggattttctctaccaaataaaaaaaccgcccgcgggggggaaccccggaagcggttcctggaaaaaaatccccacaaagggagaggtcccgggagggcctctctcaccggggattccatacccaccaggggaagtcccaaggccggagcctttctgaatattccaaatatcaatggtcccccgcccgccctggacgcccatcgtctatcccgggcgataggtgggtgtgtttcttcctcgcactttatcgcgccgtttctctgtcaccctcactattggggtggatataccc

SEQ ID NO: 260316 - DNA, 834 bp, Homo Sapiens; identical to SEQ ID NO: 176296

SEQ ID NO: 260317 - DNA, 243 bp, Homo Sapiens
  misc_feature (137)..(137): n is a, c, g, or t
  misc_feature (164)..(164): n is a, c, g, or t
acttgtgacattttattggcgtatgacaatttacaagggtccctgttgcatcattatacatcacactgaggtaagaatcgtttagccatctacattcaatgtaactgggtaataattttctcaaattataattcccnacactgattttccctgtgacaaaaggncaatagtaattccttgaagaagactaactggaaaaaacattttgcttttagtataaaaattcctaggatgctgaaaggt

SEQ ID NO: 260318 - DNA, 484 bp, Homo Sapiens
acttgccatttctcataacagcgtcagagagaaagaactgactgaaacgtttgagatgaagaaagttctcctcctgatcacagccatcttggcagtggctgttggtttcccagtctctcaagaccaggaacgagaaaaaagaagtatcagtgacagcgatgaattagcttcagggttttttgtgttcccttacccatatccatttcgcccacttccaccaattccatttccaagatttccatggtttagacgtaattttcctattccaatacctgaatctgcccctacaactccccttcctagcgaaaagtaaacaagaaggaaaagtcacgataaacctggtcacctgaaattgaaattgagccacttccttgaagaatcaaaattcctgttaataaaagaaaaacaaatgtaattgaaatagcacacagcattctctagtcaatatctttagtgatcttctttaataaacatgaaagcaaag

SEQ ID NO: 260319 - DNA, 1068 bp, Homo Sapiens
  misc_feature (781)..(781): n is a, c, g, or t
  misc_feature (826)..(826): n is a, c, g, or t
ccgccccggttcccaggcaagtttagggaagtgaaaggcgccaggtgccagtcctggcctctgatgtaacccagcgccccgcagtcccgacacagattcctggatctcagccccatagcagctatgatcccgctgctgctggcagcgctgctgtgcgtccccgccggggccctgacctgctacggggactccgggcagcctgtagactggttcgtggtctacaagctgccagctcttagagggtccggggaggcggcgcagagagggctgcagtacaagtatctggacgagagctccggaggctggcgggacggcagggcactcatcaacagcccggagggggccgtgggccgaagcctgcagccgctgtaccggagcaacaccagccagctcgccttcctgctctacaatgaccaaccgcctcaacccagcaaggctcaagactcttccatgcgtgggcacacgaagggtgtcctgctccttgaccacgatgggggcttctggctggtccacagtgtacctaacttccctccaccggcctcctctgctgcatacagttggcctcatagcgcctgtacctacgggcagaccctgctctgtgtgtcttttcccttcgctcagttctcgaagatgggcaagcagctgacctacacctacccctgggtctataactaccagctggaagggatctttgcccaggaattccccgacttggagaatgtggtcaagggccaccacgttagccaagaaccctggaacagcagcatcacactcacatccncagggccggggctgttttccagagctttgccaagttcagcaaatnttggagatggtttcatctcacctttgtcttgctgcccgcaatctctggcttggtcagctcaggaaacccctggtgccagagatccggatgaagatgagggactagttcggcctgttgcggtatctcagcggggtgagacgcctcccgtgggggaaggcagagtggaaaaaccgacgccttccaccagcaactctgtgaataagggggtgttgggggttatgttggctagccaaggagtggag

SEQ ID NO: 260320 - DNA, 686 bp, Homo Sapiens
  misc_feature (94)..(102): n is a, c, g, or t
  misc_feature (599)..(613): n is a, c, g, or t
tcaagaacaccaaccagtaagtctttgccaaattctcagacccactcaggacacgagtctctacatggcttaacagaagagagataattaggannnnnnnnncctcagtctttctgaggtttttatttaaatgcactcagtggtcatagggcagaagctcaagctagctggggcgaagggaggacgccagggagagtatgtttctcatccctgggaggcattcagcctagctcctgcagccaaattacagcaccagagaacaatgtgatgcattcctggggcaggtcggtgggaccctggggcgcctgggccttgtggagagaggtgccagacacagagttctccgtaagcaatcctgcagagccggcccccctgggtgcagaaatgaaatacgggagagcttcacattacacagagacctgtagctcacacctggttattgatggccttggtggaggcctctgccccgaccctccacttgggaactgcctgctactacgggggttgggcatctttgaagcaatgttggataacaagaaagagatgcttccttttcactctttgtcctccctgtcagcctgagcacaaccatgaggttnnnnnnnnnnnnnnngaggtgtacatatacagacacatagagaacttctctcaggctgcataggagttctgctcatcctcctctcccc

SEQ ID NO: 260321 - DNA, 551 bp, Homo Sapiens
agggaaaagttatgccatctgggcatggtcaggtcagaagctcaaaagacatttggcacagtctgcagtcatttccagaaactactacccagacgtaccttggcaagcaggtgagctgtggagcacacaggacatcacttctgaaggtgcccaggagcacctggctcgaggaggctttcatagaaggagaagtccccagagcccattccctttctctgtgccatctgccatactactgaaagttattcggggcagacagggtccactggctctaccgcattccatgactgctcagcgagacccacatgctcggagagaaagtgtggacacaaactctgtggatgcagcccgaaagagggtgctgccgcatccggatcctcgccagcatggcactccagaaaagaaagtaatggcgggggtcaggggggtggtcagagacacagggggtccccagactgcctagcacatacatacataccactggggacagtacagaggggagcaggtccgccaaggttagaaaccaagagacacaaatattgcacattcag

SEQ ID NO: 260322 - DNA, 577 bp, Homo Sapiens
gaagatggcggcgcacaagtcaggtccggcacatgtttccgcggagcggacccagcaatgacggatgatatcacctcttcttctctggtgagagtctgaggatagagacttttttctcaccatgaatgtcaccccagaggtcaagagtcgtgggatgaagtttgctgaggagcagctgctaaagcatggatggactcaaggcaaaggcctcggccggaaggagaatggtatcactcaggctctcagggtgacactgaagcaagacactcatggggtaggacatgaccctgccaaggagttcacaaaccactggtggaatgagctcttcaacaagactgcggccaacttggtagtggaaactgggcaggatggagtacagataaggagcctttctaaggagaccacccgttataatcatcccaagcccaacttgctgtatcagaagtttgtgaagatggctacattgacttcaggtggagagaagccaaacaaagacttggagagctgcagtgatgacgacaaccaggggtccaagtccccaaagattctgactgatgagatgctgctccaagcctgt

SEQ ID NO: 260323 - DNA, 657 bp, Homo Sapiens
aagatggcggcgcacaagtcaggtccggcacatgtttccgcggagcggacccagcaatgacgaggtcaagagtcgtgggatgaagtttgctgaggagcagctgctaaagcatggatggactcaaggcaaaggcctcggccggaaggagaatggtatcactcaggctctcagggtgacactgaagcaagacactcatggggtaggacatgaccctgccaaggagttcacaaaccactggtggaatgagctcttcaacaagactgcggccaacttggtagtggaaactgggcaggatggggtacagataaggagcctttctaaggagaccacccgttataatcatcccaagcccaacttgctgtatcagaagtttgtgaagatggctacattgacttcaggtggagagaagccaaacaaagacttggagagctgcagtgatgacgacaaccaggggtccaagtccccaaagattctgactgatgagatgctgctccaagcctgtgaggggcgaacagcacacaaggctgcccgtcttgggatcacaatgaaggccaagcttgctcgcctagaggcccaggagcaggccttcctggctcgtctcaaaggccaggaccctggggcccctcaactgcagtcagagagcaagcccccccaaaa

SEQ ID NO: 260324 - DNA, 1757 bp, Homo Sapiens
  misc_feature (1009)..(1133): n is a, c, g, or t
  misc_feature (1170)..(1170): n is a, c, g, or t
  misc_feature (1181)..(1198): n is a, c, g, or t
  misc_feature (1317)..(1326): n is a, c, g, or t
  misc_feature (1331)..(1422): n is a, c, g, or t
  misc_feature (1452)..(1481): n is a, c, g, or t
  misc_feature (1621)..(1656): n is a, c, g, or t
ggggaagatggcggcgcacaagtcaggtccggcacatgtttccgcggagcggacccagcaatgacggatgaagaggagaaaatgggggtcttggaggaaggaggaaaaggcaaggaggctgcaggcagtgtcaggacagaggaggtagagagcagggcatatgctgacccatgcagccgaagaaagaagaggcagcaacaggaggaggaggacttgaacctagaagatagaggtgaggaaactgttttaggtggtggaaccagggaagcagagagcagagcatgcagtgatggaagaagcaggaaaagcaagaagaaaagacagcagcatcaagaggaggaggacatcttggatgtaagggatgagaaggatagcggggctagggaagcagagagcagagcacacactggctcaagcagcagaggtaagaggaagaggcagcagcatcccaagaaggaaagagctggagtcagcactgtccagaaagccaaaaagaaacagaagaagagagactaaaggtctggtaaaggtagggctcaattgattgattttcaggagttgaagcctcaaagaccagggttgatgcaggtctgcaggtcttctgcacccccctcaatgaggagtccctcccagaaaggaaactgatctctgggatgtcagctgctgagaggagcaagcggtagtaccaccccttagttgagggagtcagcacagtcctttctgcagcttctaacccaggaaccatgaactcaggtgcctagaagccaggcagctaaaggacaaggaatgctgggggctgtgggaacaggaatgcagataccctttgaaggagcattcctgctaaaagaagctgaaaatgtagacctatgtgaagtgctctgatttctaaatattgtgaaggttaagaaaaacataaatttaggtctatgggctagatttagcccacagttgccagtttctagcgctaccaaatgaatgaataaacatgagcttgcgctcctagcctagnnnnnnnnnnnnnnnnnnnnnnnnnnnnnnnnnnnnnnnnnnnnnnnnnnnnnnnnnnnnnnnnnnnnnnnnnnnnnnnnnnnnnnnnnnnnnnnnnnnnnnnnnnnnnnnnnnnnnnnnnnnnnggagcgcggccaaaagaaaaaaacaaaagaaaaaaanggtcttggggnnnnnnnnnnnnnnnnnnaaaaaaatttttaaaaactttttgtgggggcgcggggccccccaaaggaaagaggaaaagggccatatcttttttccaagaaaaacccgggaaaaggaaagagggttgggtttcccccnnnnnnnnnnccccnnnnnnnnnnnnnnnnnnnnnnnnnnnnnnnnnnnnnnnnnnnnnnnnnnnnnnnnnnnnnnnnnnnnnnnnnnnnnnnnnnnnnnnnnnnnctcaatatataaaattgcgccccccgcccnnnnnnnnnnnnnnnnnnnnnnnnnnnnnnaaatttcagaacagcttttcgcgcgcgagggggagacccctccccccaacggcggtggggggaaacacttgaagtcccccgcggggggaaaaacgaaccccttgtgggcgcgcgtgggggaaataaatatttttcgcccnnnnnnnnnnnnnnnnnnnnnnnnnnnnnnnnnnnnttttgtctcctcatttgtcggccgccgccttctacaaacaacacagaaggtgggggagaacaccctccccaccgcggggggtgggtgtgtgcagaaacagc

SEQ ID NO: 260325 - DNA, 784 bp, Homo Sapiens
catctttgccaggactgatgcagatgcccctcctccaccagaggactgggaggagcatgtcaacaggactggctggacaatggcccagaacaagctattcaacaagatcctcaaagccctgcagtctgaccggcttgcccgcttggccaacgaaggggcttgtaatgagccagtgctgcgccgtgttgctgtggacaagtgtgcaaggagagtgcggcaggctctggcaagtgtgagctgggataccaagctgatccagtggctgcacaccacccttgtggagaccttgagtctgcccatgctggcagcctacctggatgctttgcagacgctgaaggggaagatcccaaccttgattgaccggatgcttgtgtcatccaacacaaagactggggctgcaggagctgaggccttgtctctcctactgaagaggccctgggaccctgctgtgggtgtgctttctcataacaaaccaagcaaactccctggctctccgctgattctcatcgcctcctctggtccctccagctctgtgtttcccacttcacgccgccaccgcttctggcaatctcagctgtcctgcttggggcaagtcattccctgtagccacccatctgctgaacaatggcagtggggtagggagttctacagtgtcctcgagcatatgatttgggggcagtgaaaaagccaaggggctgggagaattcccaggcccattttcccaccacaaaaccccaattaatccttgaattggggcttgggaaaacccaaggggaaacctttt

SEQ ID NO: 260326 - DNA, 599 bp, Homo Sapiens
aggccgtgggtccttagtcaagtgacgcgaagcggccggcctgggcgccgactgcagagccgggaggctggtggtcatgccggggttcctggttcgcatcctccctctgctgctggttctgctgcttctgggccctacgcgcggcttgcgcaatgccacccagaggatgtttgaaattgactatagccgggactccttcctcaaggatggccagccatttcgctacatctcaggaagcattcactactcccgtgtgccccgcttctactggaaggaccggctgctgaagatgaagatggctgggctgaacgccatccagacgtatgtgccctggaactttcatgagccctggccaggacagtaccagttttctgaggaccatgatgtggaatattttcttcggctggctcatgagctgggactgctggttatcctgaggcccgggccctacatctgtgcagagtgggaaatgggaggattacctgcttggctgctagagaaagagtctattcttctccgctcctccgacccagattacctggcagctgtggacaagtggttgggagtccttctgcccaagatgaagcctctcctctatc

SEQ ID NO: 260327 - DNA, 712 bp, Homo Sapiens
ctaaagctgcttctcccaacaccgtccaaagtctccactgcctgagttttgtttcggctggtttgaactcatttcgggtgtgtgcatttttcttttggtacccatgtgagacatgaacaacaggagggagggaaagagcccaggtgggacgtgggacaggcttaggggaaagagcttgtcctatctcaggaacaaaattatagactgtgggcagagggtctgaaaggtgggctttggggtagtgcccaagcctggtcgtgttgccaggagtggtgacaagaaatgcagcttacatcaaacgaacatgtagtgcatgcccactgcctgatggccagatggctgttaggaagagctaccagggcttccagacctgtggaacgaagaggatggggaaaaggcagagggcactgagtgtccctttaaaaactaacacactgaatattccgtgtgatctagaacagtgtgggcagctttcacagcacaggaccgttcatcgggggcctaaacgtttccctcagctctgtcaccaactcacttctctcggcttcgttgtctgtaaattggatgaaaagagctctaatgcctttcaggttctttagaagccataagatttgggacaagcccagcaaggatggggtgtccttccaggcctctttccccttttcctccatctctggcaacagttcttgggggtttggcaatttgtttggaa

SEQ ID NO: 260328 - DNA, 1253 bp, Homo Sapiens
  misc_feature (657)..(657): n is a, c, g, or t
  misc_feature (693)..(693): n is a, c, g, or t
attcattccgcgccgggcctgccagacacctgcgcccttctgcagccgcccgccgcatccgccgccgcagcccccagcatgtcgggcccagacgtcgagacgccgtccgccatccagatctgccggatcatgcggccagatgatgccaacgtggccggcaatgtccacggggggaccatcctgaagatgatcgaggaggcaggcgccatcatcagcacccggcattgcaacagccagaacggggagcgctgtgtggccgccctggctcgtgtcgagcgcaccgacttcctgtctcccatgtgcatcggtgaggtggcgcatgtcagcgcggagatcacctacacctccaagcactctgtggaggtgcaggtcaacgtgatgtccgaaaacatcctcacaggtgccaaaaagctgaccaataaggccaccctgtggtatgtgcccctgtcgctgaagaatgtggacaaggtcctcgaggtgcctcctgttgtgtattcccggcaggagcaggaggaggagggccggaagcggtatgaagcccagaagctggagcgcatggagaccaagtggaggaacggggacatcgtccagccagtcctcaacccagagccgaacactgtcagctacagccagtccagcctgatccacctggtgggngccctcagactgcaccctgcacggcttcgtgcacgngaggtgtcaccatgaagctcatggatgaggtggctgggattgtggctgcacgccactgcaagaccaacatagtaactgcctctgtggatgccatcaatttccacgacaagatccggaaaggctgtgtcatcaccatctccggacgcatgaccttcacaagcaataagtccatggagattgaggtcctggtggacgctgaccctgtggtggacaactcacaaaagcgctaccggggccgccagtgccttcttcacctacgtgtccctgaaccagggagggcaagccaatgcctgtgcctcagctttgtgccacaaaccggaggatgagaaaaaccgctttccaaaaaagggcaaaggcgtttttcctgcaaatgaagggcgaaccgaccggggccccccaggagccctcagccccaaggtgtcttccctcctgtccccgggtccaaacaagtttttggccacttaccccattatggagtcgccctttagaaaatggcccccccttggtccaaacaccgcccaaatttcccccccgcaaacccttggtgttttccgcccaac

SEQ ID NO: 260329 - DNA, 578 bp, Homo Sapiens
aaacacgagtccaagctgcagctggcagggattgcggggtgccggccgtctgagtttttttaaaactgctcgccgcgaagtctgtctgcagccaaaatgtccaacagaaacaacaacaagcttcccagcaacctgccgcagttacagaatctaatcaagcgagacccgccggcctacatcgaggagtttctacagcagtataatcactacaaatccaatgtggagattttcaaattgcaaccaaataaacactcagcaaagaactagcagagctggtgatgtttatggcacagaacatcctaaatgtatgcatctgaattataggagagaaagagagcaacttcagaagagcctttgctttgttacagattagtcactgctacccagagtacctaagtaattttcctcaagaggtgaaagatcttctctcctgcaatcataccgtattggatccagatctgcgaatgacattttgcaaagctttgatcttgctgagaaataagaatctcatcaatccatcaagcctgctaaaactcttctttgaactttttcgttgccatgataaacttctgcgaaag

SEQ ID NO: 260330 - DNA, 792 bp, Homo Sapiens; identical to SEQ ID NO: 14924

SEQ ID NO: 260331 - DNA, 1164 bp, Homo Sapiens
ggtaacctggtccggagagtagggatatcgtcgaccacgcgtcgatttctcgccatggcccctgcactgctcctgatccctgctgccctcgcctctttcatcctggcctttggcaccggagtggagttcgtgcgctttacctcccttcggccacttcttggagggatcccggagtctggtggtccggatgcccgccagggatggctggctgccctgcaggaccgcagcatccttgcccccctggcatgggatctggggctcctgcttctatttgttgggcagcacagcctcatggcagctgaaagagtgaaggcatggacatcccggtactttggggtccttcagaggtcactgtatgtggcctgcactgccctggccttgcagctggtgatgcggtactgggagcccatacccaaaggccctgtgttgtgggaggctcgggctgagccatgggccacctgggtgccgctcctctgctttgtgctccatgtcatctcctggctcctcatctttaacatccttctcgtctttgactatgctgagctcatgggcctcaaacaggtatactaccatgtgctggggctgggcgagcctctggccctgaagtctccccgggctctcagactcttctcccacctgcgccacccagtgtgtgtggagctgctgacagtgctgtgggtggtgcctaccctgggcacggaccgtctcctccttgctttcctccttaccctctacctgggcctggctcacgggcttgatcagcaagacctccgctacctccgggcccagctacaaagaaaactccacctgctctctcggccccaggatggggaggcagagtgaggagctccactctggttacaagccctgttcttcctctcccactgaaatctaaatccttaacatccaggcccctggcttgcttcatgccagaagccccaaatccatggactgaaaggaaatgccccttctactacttgaaaactttattcctctggggtccagctcccttaccctaaatttctgaggtttcaggccactggaacttccagggtccaacttcttccccattcaaggaaaaaatggggggaatgggaaagccttctggtcccctttccctggttagaagaaatgaaaattcttcccccttaaaaagcctccttg

SEQ ID NO: 260332 - DNA, 451 bp, Homo Sapiens
ggctccaggttgggagctttaggggtgccaccacccccgcgggactagagggagctgagggcaggggtccggtgaggtctggcgctcccgctcggtggctgtcccgtgtttcaccagctcacccagcaccgtgttggtgtctgcctggacgcccagcttctgcaggacgctgtggatctccgtggatgaatagcccagcgtccggaagaagtccaccttcatctgcagttccagggccgaggcctcctcagcggccagctcttgacccggccttggggtgccctgacggctgtggctgtcctcaaattcccacagactcatggtggggctggcttccaggacaggcttctctccacaggggccactcatagctcagactcctggaaggccccgcgccacagctccccgccatgcgccagcggcggccggcggcgtctccatggggccgagt

SEQ ID NO: 260333 - DNA, 638 bp, Homo Sapiens
  misc_feature (554)..(554): n is a, c, g, or t
cccagctccctccccctccccaagatgtcctctggtggatcttttttcattttctctacagtctcccattagcccaggttcatggagtccttaatgttcatattcagtcattttaatacaccaataaatgcgggaagggcaatcaagactaaagaaggtgcaatggcatggagctggcactggtgctagctacaaaggtgacttgtctactgaagacacatgggatccacctgtgatgaacaaatctgagatgaaggcacgcattctgcattactctgaccttttagcagaccttctggtctggcagtagtggattgctctgaagtgaattcaaatggccattgatgagagctgtaggtctatcatgttcacaaaataaactgccattgatgtagtgaaaccgatctcccgggaccaggcgattccggcaggtagagcatgtaaaacacttaagatgatacacattgccttgcaccctcatgacgagttcactcgcaggaatcgactgtccgcaagcgctgcaagcaccgctatttccaaataacctaatgtantcatttctgcaaaggatcatgccacttttggtgtaacaggacgtgccgatgtcgcccagctgcgcctggcagcaggagcacttg

SEQ ID NO: 260334 - DNA, 537 bp, Homo Sapiens
  misc_feature (472)..(472): n is a, c, g, or t
  misc_feature (485)..(485): n is a, c, g, or t
  misc_feature (503)..(503): n is a, c, g, or t
  misc_feature (520)..(520): n is a, c, g, or t
ggcgatgttgtaaactttctgatactctcttcttccaagtccaatcttgctagtttggaccaggttgttcagtattaccctcttttttgggcttcttttttgggatcataatcactatcattcccatcccattggatgtgtttcttctacatcatcatcactgtcaccctgattatgtctattagctagtttacgagcctggcgatccatcaaacttgtcctagagcgagtttttttccaagaatagtaatattttacaaggcttgcaattgtcttatctggaagcatttgctgaatcctgtgaaagctctttccatgaaaactaaaggcttgttcaaatagggactttatcttccactgtccactcatccggaaaggggagtgaaattaggggagatcaggcaaggggacttctcaatgttatgtttatggccaggaacaacatgccaagtgcctgttccacattgtaggncatggtttttccnttggcaattggcaatggnattcatcccattggggnatcggggggtaccgtgg

SEQ ID NO: 260335 - DNA, 467 bp, Homo Sapiens
gatggccgagcgcgtcgcactcgcgtccctgcgccgtgcctgcctcgcgctccctgttacggcgttcgtccccgggcctggcgcccgcgtccggcccggctccgcggcggcctggtccgatggctcctcagcggagggccgcaaccaatgcgcccgagggcaacggagcggccgagcgccggaaccggagcagcaccaagaaggaccgagccccgcgggaggtgcagaggctgtggcagaggccatggctaaggaccgcgggcctgggggctggctttgtgctcaccgcactcctgctctggagcagcttgggggccgacgacggggtcgcagaggtcctggcccgccgtggcgaggtcgtggcagggagattcatcgaggtgccctgctctgaggactacgacagtcaccgcaggttcgaaggctgcactccccgaaagtgcggcagaggtgtcaccgatgtcgtc

SEQ ID NO: 260336 - DNA, 732 bp, Homo Sapiens
tacggtcccagttgtaggatatcgtcgaccacgcgtccggtcgtgatgaagaaaaattaaagtatattaaaaaatatcttcaggctgtaggaatgtttcgagatttcaatgacccttctcaagacccagacttcacccaggttgtggaattagatttgaaaacagtagtgccttgctgtagtggacccaaaaggcctcaggacaaagttgctgtgtccgacatgaaaaaggactttgagagctgccttggagacaagcaaggatttaaaggattccaagttgctcctgaacatcataatgaccataagacctttatctatgataacactgaattcacccttgctcatggttctgtggtcattgctgccattactagctgcacaaacaccagtaatccgtctgtgatgttaggggcaggattgttagcaaagaaagctgtggatgctggcctgaacgtgatgccttacatcaaaactagcctgtctcctgggagtggcgtggtcacctactacctacaagaaagcggagtcatgccttatctgtctcagcttgggtttgacgtggtgggctatggctgcatgacctgcatggcaacagtgggcctttacctgaacctgtggtagaagccatcacacagggagaccttgtagctgttggagtactatctggaaacaggaatttgaaggtcgagttcaccccaaaaaccgggcaactaatttaagctctccccct

SEQ ID NO: 260337 - DNA, 668 bp, Homo Sapiens
ttaaatctcgatcatataccttcacacgtagcttttgatcaaggctttggattggcaatacaactatctcatcccatactgggttcaagttcttatatatgactttacttttgtacagcgtcttcccattcagcttaaatttcacataaggatcacttgtgccacagcgatctcggacaaccaggttccggccttccttcaggtgtatggtgaggaggtacgcaaaagggctggggaggttactcaagccatcactggcttcccccggtacagattgttcttcaaaatgttgagatgtcatagaagcattcaggtcactgcttccacatagcttctctggctcttctggtgcatcccctccaagggaagttttctgaagatcaaagatgccgttgctggacacccgtctccgctcagcaggagaggcataggcctcctctgagtctgtttccaccacatggaggtgactggcttcttcctggctccaatccaattcttcttcagactgtttcaaggagctactgctgctcttgggaaagatccctgcagtggacagactgctgggcaccgaggtgtaggaagactgtggcccggagtaaggccggccctctggggccaaggcctcagcctccaggagatcaggcacagagaggctgagacggcggtcc

SEQ ID NO: 260338 - DNA, 1688 bp, Homo Sapiens
  misc_feature (11)..(11): n is a, c, g, or t
  misc_feature (981)..(981): n is a, c, g, or t
  misc_feature (1150)..(1150): n is a, c, g, or t
  misc_feature (1243)..(1243): n is a, c, g, or t
  misc_feature (1263)..(1264): n is a, c, g, or t
  misc_feature (1302)..(1302): n is a, c, g, or t
  misc_feature (1359)..(1367): n is a, c, g, or t
  misc_feature (1601)..(1601): n is a, c, g, or t
  misc_feature (1603)..(1603): n is a, c, g, or t
ctttctcctgngactcgcgcactccccgcacaccggagccgtggcggggtggcgtttcagacgaggcggcctgttatctccttttgcgcgacacggtctcagctgttccgcctgaggcgagtgacgctggccgccaacgaggtatacgtactgggaccctcgccctcagtctcgtctccggcgcggctacctgccccgttttccctgtgagttgacctgctccgggccgcgggccgccaatggcaggggccgctccgaccacggccttcgggcaggcggtgatcggcccgccgggctcagggaagaccacgtactgcctgggcatgagtgagttcctgcgcgcgctgggccggcgcgtggcggtggtgaacctggacccggccaacgaggggctgccgtacgagtgtgccgtggacgtgggcgagctggtggggctgggcgacgtgatggacgcgctgcgcctggggcccaacggcggcctgctctactgcatggagtacctggaagccaacctggactggctgcgtgccaagctcgaccccctccgcggccactacttcctcttcacctgccccagatcaggtggtagctctgagcccatccccgttaccttggcccagcatccttcttaccaaaatgcacgcacaaggcgaccatcaggactgaactgcccgatcccaccatccatgggatctcccgactaccatgccaccacaaccccctggccaaaggtctacctgtccgcgtaaatgggcgtttacccttaccctatgggttcaacccatggcatggctacggcgggacaaaccccggcccaccaatattcccaaaccccccgccagtgttcccgcaataaatttggaacgcgttttacctttgtaccccgctctctcttgtgcccgcgaccgtcttgcgcgccccttttattataccctctggggcgcccgccacccgttcataacaccttattaccgcggctcnctcctctctggagacacacacctcactgtttgtcttttgcatgccttggggtcgccttttctggtggaacccatgtaatgcaccctgttggaaacaccatatttttcccttgcgagggacatacccgtctatcggcgtcgcctctttccaagcacggagactcgcctcncatttcttaaactcggcgggggccccacgagacagtttttgtccaaatatttggacccttccataaaacgaccctgacccaaaacttaagtgntcgttgactccttctttttnnttgtcccgcccaccggacccaaatttttataccctcgngggcccccccactcctggtgggaacattttatcccctctgtttacagatctccacannnnnnnnntcctatttattccgccgctcttttctgtgtttatgcggcgtatcataggcgggggggtaaatttgtagaggtattttcccctccccacatacaggtgaaaggaaggaaagtatttgctactaacaggggcgcatttcggttctgacttgcattgtacaaatcactccccccccacattctcgaccccacgcacccctgtgtatttatctactcatgatagagggccatcccttngntgaataagcatcactgctccgcatacacaaagccgtcgcccctggtataagttgaacattcaacccggcaccccggtcttgttta

SEQ ID NO: 260339 - DNA, 1079 bp, Homo Sapiens
  misc_feature (977)..(977): n is a, c, g, or t
aaagagagattcctctgaaatacaaaatgaaaatcaaatgccgtttccagaaggcctatcggagggctttggaccatgaggaggaggccctgtcatcgggcagtgtgcaagaggcagaagccatgttagatgagcctcaggaacaagcggagggctccctgactgtgtacgtgatatctgaacactcctcacttcttccccaggacatgatgagctacattgggcccaagaggacagcagtggtgcgggggataatgcaccgggaggcctttaacatcattggccgccgcatagtccaggtggcccaggccatgtctttgactgaggatgtgcttgctgctgctctggctgaccaccttccagaggacaagtggagcgctgagaagaggcggcctctcaagtccagcttgggctatgagatcaccttcagtttactcaacccagaccccaagtcccatgatgtctactgggacattgagggggctgtccggcgctatgtgcaacctttcctgaatgccctcggtgccgctggcaacttctctgtggactctcagattctttactatgcaatgttgggggtgaatccccgctttgactcagcttcctccagctactatttggacatgcacagcctcccccatgtcatcaacccagtggagtcccggctgggatccagtgctgcctccttgtaccctgtgctcaactttctactctacgtgcctgagcttgcacactcaccgctgtacattcaggacaaggatggcgctccagtggccaccaatgccttccatagtcccccgctggggtggcattatggtatataatgttgactccaaacctataatgcctcagtgctgccagtgagagtcgagttggacatggtgcgagtgatggaggtgttcctggcacaggtgcggttgctcctttgggatgctcagccccagctgcctccaaaaggctgctttcgggcctacaanggagggctaatgacctgggagctaaccggctggtctggggctccgccaagggagaaacgggccacaccacccccaccttacctccccggggcagtttttggc

SEQ ID NO: 260340 - DNA, 898 bp, Homo Sapiens; identical to SEQ ID NO: 78073

SEQ ID NO: 260341 - DNA, 367 bp, Homo Sapiens
  misc_feature (25)..(25): n is a, c, g, or t
  misc_feature (87)..(87): n is a, c, g, or t
aacaatcttgaaggtagggaatggnaagctggggaaggggccccagaatccctgtcaagaaatcctgccatgtcacttttgggcaantttcgcaagcattgaaaaagatcattggctggtggctctgcactgtttccagctatgacgatgtaccacttgggaccctttctttggatgttattccaccggcattgttttcagtggtcgttttgttgctttcttcttcacaccgcgattgaagctgtcctcaaatcattttcttgtcttcttgtctggtacatcggggtggcgcgtgccagacaccaacggtcggaaaccgccagacaccaacgctcggaatccacgccaggccacgacggagggcgac

SEQ ID NO: 260342 - DNA, 1570 bp, Homo Sapiens
gtagcgaggcctgggtggcgaattcggcacgaggccaagttccacctgtgcagcgtccccacccgcgcgctgctcctgtccacctacatcaagttcgtgaacctcttcccggaggtgaagcccaccatccaggacgtgctgcgcagcgacagccagctcaggaacgcagacgtggagctgcagcagcgtgctgtggagtacctgcggctcagcaccgtggccagcaccgacattctggcgaccgtgctggaggagatgcccccattcccggagcgggagtcctccatcttggcaaagctcaagaagaagaagggccccagcacggtgacagacctggaggacaccaagcgggacaggagtgtggacgtgaacgggggtcctgagcctgccccagccagtaccagcgccgtgtctacgccttctccgtcggcagacctgctgggtctcggggctgccccccttggccccgcggggcccccaccctcctccggcggcagcgggctgctcgtggacgtgttctcagactcggcctctgtggtcgcgcctctcgctcctggctccgaagacaactttgccaggtttgtttgtaaaaacaatggtgtgtttgtttgaaaaccagctgcttcaaattggacttaagtctgaatttcggcagaatttaggtcggatgtttatcttttatggtaataagacctccacgcagttcctaaactttaccccaacactaatctgttcagacgaccttcagcctaacctgaacctgcagaccaagcccgtggacccgaccgtggaggggggcgcgcaggtgcagcaggtggtcaacatagagtgcgtgtccgacttcacggaggcgccagtcctcaacattcagttcaggtatgggggcaccttccagaacgtgtctgtgcagctgcccatcactctcaacaaattcttccagcccaaagaaatggcttctcaggatttctttcaacgttggaagcagttgagcaatccacagcaggaagtgcagaacatcttcaaagcaaagcacccaatggacacagaagtcaccaaagccaagatcattggatttggttctgcacttcttgaagaagttgatcctaatcctgcgaatttcgtgggagctggaatcatccacacgaaaaccacccagattggatgcctgctgcgcttggagccgaacctgcaagcccagatgtaccggctcacgctgcgcacaagtaaggaagccgtttctcagagattatgtgaattgctctcagcgcagttttagtcctgaggatggaagaccaggctcgtgtgtcttgtgttgtcttcgtctgtgccgtttgtcttcgtggccatcctgcagatgagcaccgtgtccagtgccacagcacaaggcgcctccccgccccgccgccccacacctctcccctttgggctggacgggaacacacgtgtgtggctcaggaggaaaagctcagcctggactgtggcagccacggcagaaggtggatcttgggatcaatttttataaaaatcgagacagttctgtggttaaatctacaaattaaagggaaattag

SEQ ID NO: 260343 - DNA, 1611 bp, Homo Sapiens
  misc_feature (1186)..(1186): n is a, c, g, or t
  misc_feature (1294)..(1386): n is a, c, g, or t
tgtacttaggccgggcagaggagttcattggcgcaggcgagcaggcccggtactgtcatgggggctttggctacctgttgtcacggagtctcctgcttcgtctgcggccacatctggatggctgccgaggagacattctcagtgcccgtcctgacgagtggcttggacgctgcctcattgactctctgggcgtcggctgtgtctcacagcaccaggggcagcagtatcgctcatttgaactggccaaaaatagggaccctgagaaggaagggagctcggctttcctgagtgccttcgccgtgcaccctgtctccgaaggtaccctcatgtaccggctccacaaacgcttcagcgctctggagttggagcgggcttacagtgaaatagaacaactgcaggctcagatccggaacctgaccgtgctgacccccgaaggggaggcagggctgagctggcccgttgggctccctgctcctttcacaccacactctcgctttgaggtgctgggctgggactacttcacagagcagcacaccttctcctgtgcagatggggctcccaagtgcccactacagggggctagcagggcgcacgtgggtgatgcgttggagactgccctggagcagctcaatcggcgctatcagccccgcctgcgcttccagaagcagcgactgctcaacggctatcggcgcttcgacccagcacggggcatggagtacaccctggacctgctgttggaatgtgtgacacagcgtgggcaccggcgggccctggctcgcagggtcagcctgctgcggccactgagccgggtggaaatcctacctatgccctatgtcactgaggccacccgagtgcagctggtgctgccactcctggtggctgaagctgctgcagccccggctttcctcgaggcgtttgcagccaatgtcctggagccacgagaacatgcattgctcaccctgttgctggtctacgggccacgagaaggtggccgtggagctccagacccatttcttggggtgaaggctgcagcagcggagttagagcgacggtaccctgggacgaggctggcctggctcgctgtgcgagcagaggccccttcccaggtgcgactcatggacgtggtctcgaagaagcaccctgtggacactctcttcttccttaccaccgtgtggacaaggcctgnggcccgaagtcctcaaccgctgtcgcatgaatgccatctctggctggcaggccttctttccagtccatttccaggagttcaatcctgccctgtcaccacagagatcannnnnnnnnnnnnnnnnnnnnnnnnnnnnnnnnnnnnnnnnnnnnnnnnnnnnnnnnnnnnnnnnnnnnnnnnnnnnnnnnnnnnnnnnnnnnagatttgacccggcagggctttctgcgggagggctgctttctacaaacgcctgaactaccctgggcggccccgagccccgggcttggcaaggtggaactggggcaggcccaggaaagaaaggagggaaaccccctggaaaggggcctggaaaggtggatggaaatgtttttcccctccgggtttccccaggggcctcccaccctctttttcggggccgttaaaaa

SEQ ID NO: 260344 - DNA, 557 bp, Homo Sapiens
ccaaaaagcagaggggctggggaacaggacttctcaagactcagcggcagggacctcctaggggggtctgaaataacagtcccaaagtaataacaatagctgctctttattgagtgtctactatgtatgagatacaacttgtttgtgatttgggagcagaagttcaaaaagggaagcagtgccagcatgtggatggcctggtgtgtggctgcgctgtctgtggtggctgtgtgtggcaccagccacgagacaaacacggtcctcagggtgacgaaagatgtgttgagcaatggcttctccccaatctcgtggacaatttagtgaaccgagtcctggccgacgtcctccctgacttgctctgccccatcgtggatgtggtgctgggtcttgtcaatgaccagctgggcctcgtggattctctgattcctctggggatactgggaagtgtccagtacaccttctccagcctcccgcttgtgaccggggaattcctggagctggacctcaacacgctggttggggaggctggaggaggactcatcgactacccattgggg

SEQ ID NO: 260345 - DNA, 1298 bp, Homo Sapiens
  misc_feature (803)..(803): n is a, c, g, or t
atggatataactcggtttggacatatatttgacttttccaggtcgatttattagaaaactgtgaccatgttgattctctcctcttggagaagggcagtgttgacaactggaagactgagtagggctgggtttgttaggcaatggtttctgtggtagagttggtagctgtactgactcagataacagttcattcatcagaccgtacgcttgtgagattcgacgactatagtgttcagagagcagcaatctggaggtgcccatagcttgttctgttaagccaagttcttcactggaaactccgtctttaattataaggtcatcaataatgtctgcaatatcagtcaatccagtcatctggagcggatgtactgaaacactctcacacaattcatcactgctattcataccaggagaagtagtattctgatcactggaactggaaaggctgacagctgaatcggcagtaggaaacacacaggttttctgaccagaataattttctgttattgaaaattcaggttctgaagtctcctttttgtcactttgatcttcttcatccatatgggtcaaaaaacgcacttcttcagaaatgctaatggtttttgaagctaatgtttttttgaattcagggccagaagagaattcaatgtgatccactggtccaatcttatcacaatgtagatctagcatttcaggcttggggaaatcctgttctatgttttcagcaatgttctgtattggctagcaactgctcgtcaattttctgaaggcttaggcactgagatgctctagttgggtgagcntgcagagcttgggtgcaggggcaagctgcagagacaccttgcagccgtttccacaatagataatcttctgcagagtctgactttgtgctctgtcctttgaatcggaactctggttttggcagacctttgttctgctgtatgtctgatggtgtaggtgaggtgacactaggctccttcacttctgtaatgcctgctctcaagctttttccatccagacaagctggagttacttcttgactcttaaaattatgtgggggaacagcattagtaactgaagctgccatataatgtaactctgcagacgatggaactgctagatgatcgctttgctgtttgataacattatcatttgaaggctcttctctcacaggtaattcctgtagaagatcattagcttcaatgtcaatcacatttatataagtatgtccaacctgagccaaaacacataaaaccaaagagggttacattctttttactctatgtggtcactccgcc

SEQ ID NO: 260346 - DNA, 1295 bp, Homo Sapiens; identical to SEQ ID NO: 15014
  misc_feature (452)..(587): n is a, c, g, or t
  misc_feature (742)..(804): n is a, c, g, or t
  misc_feature (898)..(908): n is a, c, g, or t
  misc_feature (1215)..(1225): n is a, c, g, or t

SEQ ID NO: 260347 - DNA, 486 bp, Homo Sapiens
gggggaacttcctagacgccgtacgtgccagatggtgttacctggagcttaaaaagctgcacgcaagtgttaaacttctgtaggaggaatactgttggcgttcaaaagcattgctgtttcaacaatggccaagaacaaattaagagggccgaagtccaggaatgtatttcacatagccagccaaaaaaactttaaggctaaaaacaaagcaaaaccagttaccactaatcttaagaagataaacattatgaatgaggaaaaagttaacagagtaaataaagcttttgtaaatgtacaaaaggaacttgcacatttcgcaaaaagcatttcacttgaacctctgctgaaagaactgattcctcagcagcgtcatgaaagcaaaccagttaatgttgatgaagctacaagattaatggctctgttgtaatatactggtgatgcatctaattctccacaaagaccaataaattgaatgttttattgaaa

SEQ ID NO: 260348 - DNA, 485 bp, Homo Sapiens
  misc_feature (249)..(249): n is a, c, g, or t
  misc_feature (252)..(288): n is a, c, g, or t
gggacaggtcatgtggcgaaatctccgcaccagggctcaggggagccaggatgggtggcgacagggagccagaggcccgggccacctcggtttcaaagtgctgcaggaagagctcagcaaaacggcgggagaaggcagcctcggccccgggccccgcatattgggggtgggaggccaggtagaggcgaaaacggcgggcaaagtccagagccgcagcccgggcgtgggactcacagaactcccgccaantannnnnnnnnnnnnnnnnnnnnnnnnnnnnnnnnnnnnaggccccgtcctctggggaaggggcaccattcatgatgggccccaggaggtggagagggggagcctgtggggcacaaagagggaggcagccagaagacgaggggtgggcggcagcagctgcatctcggtccccgaggttagctccggcggcggcggcggctcccgctcccagcgcccccacccactacgcgaccaaa

SEQ ID NO: 260349 - DNA, 835 bp, Homo Sapiens
gtgtccgggagggaccgcagcgccactctctgcggggcgccgttcccgcgccaccgagggcagctaactcctagcagaggaccggggtcgcggccgccgggggcgcagcgcggttagggcggccccgccacggcccaggcactcccgctgggccctgccgggcctcacccttccccgcgcagcgactcgggaagtaggacatcctgtggagagcccaggacccgggagacgccctgggaggagcccggcctcagcctggagctccagctacccacatgcaccttacctgggttccgcccggtccctgagtccccacaaaatggctgatggaggaagccccttcctaagtcggagggactttgtctacccttcctcaacccgagaccctagtgcctctaacggagggggcagcccagccaggagggaagagaagaagagaaaggccgccaggctcaagtttgacttccaggcgcagtcccccaaggagctgactctgcagaagggtgacattgtctacatccacaaggaggtggacaagaactggctggagggagagcaccacggacgcctgggcatcttccctgctaattatgtggaggtgctgcccgcagatgagatccctaagcccatcaagcccccgaactaccaggtgctggagtatggagaggctgtggcccagtacaccttcaagggggacctggaggtggagctgtctttccgcagggagagcacatctgctgatccgcgaggtgaacgagaactggtacgagggacgcatcagggcacgggcgccaaggcatattccttgccagctacgtgcagtgtccgtgacccg

SEQ ID NO: 260350 - DNA, 1063 bp, Homo Sapiens
  misc_feature (92)..(92): n is a, c, g, or t
  misc_feature (119)..(157): n is a, c, g, or t
atattttgaaagagggtgtttagggaggagggagggtccccccagggtcccagggggaagggcttgggacctcggagagttgggacaagagnctggacccaggggtgcccaagattttnnnnnnnnnnnnnnnnnnnnnnnnnnnnnnnnnnnnnnncccagtgcgacgggggggaggtctgtccccccagtccggtggggtcagttgggctgcgcaggctggagggggagctggggtgacgggctgagcgggcggcagcggtcaggcggggagacgtggggagctgggggccgtcgtcacagagccggaggccggggttcacgagacaccggcacgtagctggcagggaatagtgccttggcgccccgtgcccggtgagtgcgtccctgcgtaccagttctcggtcaccttgcggatcaggcagagtgtgcgtctccctggcggaaggacagcgcgcacctgccaggtcccccgtgaaggtgtacgtgggccacagcctctccagactccagcacctggtaggtcgggggcttgatgggcttagggatctcatctgcgggcagcacctccacataaggtagcagggaagatgcccaggcggccgtggtgctctccctccagccagttcttgtccacctccttgtggatgtagacaatgtcacccttctgcagagtcagctccttgggggactgcgcctggaagtcaaacttgagcctggcggcctttctctaggcaggggagaggacagagtgggctctctcagttgggcgggtggcagatccaggatggcagccttgggaccactccaggtcccccacacctggtcccctccttaccttcttctcttccctcctggctgggctgccccctccgttagaggcactagggtccggccgggggccgctgctccggggcccgtcggggcgccggcgagctctgcgcggggaaacggcagcaatcaggcgacgcgtggtcgacgatatcccagggattccggaccgtaccagcctgctttaaaacgaccaagagggttttaagtatccgatataaaagatgtgtgt

SEQ ID NO: 260351 - DNA, 959 bp, Homo Sapiens
ctgtcctcaagcatatcgagaacaagaacctcatgccacctcttctagtggtgcagaccctggcccacaactccacagccacactctccgtcatcagggactacctggtccaaaaactacagaaacagagccagcagattgcacaggatgagctgcgggtgcggcggtaccgagaggagaccacccgtatccgccagggagatccaagagctcaaggccagtcctaagattttccaaaagaccaagtgcagcatctgtaacagtgccttggagttgccctcagtccacttcctgtgtggccactccttccaccaacactgctttgagagttactcggaaagtgatgctgactgccccacctgcctccctgaaaaccggaaggtcatggatatgatccgggcccaggaacagaaacgagatctccatgatcaattccagcatcagctcaagtgctccaatgacagcttttctgtgattgctgactactttggcagaggtgttttcaacaaattgactctgctgaccgaccctcccacagccagactgacctccagcctggaggctgggctgcaacgcgacctactcatgcactccagtgaggggcacttaagcaagcctggaggaagatgtgggcaacagtggaggaccaagagaacagacacaatgggacctgggcgggcgttacacagaaggctggctgacatgcccagggctccactctcatctaatgtcacagccctcagaactaaagcggactttctttccctgccttcttatttagtcagcttgccatccctcctcttcactagcagtgtagatcattccagatcagtgggggagggcacctcagcaacctctgagtgtggacaatagctgctttcttctctatccaagagcaccaggctgtgcttgggtccttgctctcagagtctataaataaaagaatataatgattaaaa

SEQ ID NO: 260352 - DNA, 1838 bp, Homo Sapiens
  misc_feature (854)..(865): n is a, c, g, or t
  misc_feature (1073)..(1073): n is a, c, g, or t
  misc_feature (1078)..(1078): n is a, c, g, or t
  misc_feature (1107)..(1107): n is a, c, g, or t
tgtgggttgagaggcacggcaatggggaacatagtgacggcggggcgatgagcggcaggagatccaccatgatggggccatagcggttgtagcgaccacacgccggtcggcgagagcggtggagcgaagaaccgaatatcaccggcgccgccggggggcggggacaggaacacagagaggataggtgacagaggcataggcagaggcggtgtccgggacacactggcgagctgagcgagacgagagcgataagtgtaagcgaggggctggaatgaagaggaagcgggcaccgccgccgcccgacgggcgcgatccgaccaggacggcatacagagggtgtagggggcggcgaccagaccacggcggaggaagatggggaacactccatgtactgagggcgcgtgggtcatgcgcggccgtccaatgggttgcggcgggtgtgccgacggcgcgtagcaccagggtgcgcgcggccgcccgtgcgcgcctatggcgtgagaggcggaggggagccttatacgacgcccggacacgttaggcccgcccgcaaggcccggcctcgaggcccgcagcgcgcgatgagtaggggcgtcgggcacggcggcggcggcacagcgcgcgcggaagcgatggctatggcgagagaaacgaagggggggagacggaagggagcgggaggcgtcgggaagggataagcgccccgggcgggggcggcgccggccgatccgaggccgcgcggccgggaaaggtggtgctgtcgaggaggggggttttgggcagaggggaagggtagtggatgtggggggtagtgcgcggcgcgccagtacttattggtggtagtgagtcgggtttannnnnnnnnnnngggtctaatacatgtttatttcactgggatggagagcaggccctacttccagggaacaggttgagatctggagtccctgtaggtcagagctagaggacccagaggaggaagtcctggaaggccttcctggaggaggggctgtcagagctgagtccaaactgaagaggcatttgcaatccaggagaaagcgacccctggtaggggacanttcgnttcatctcaaactccctccaaacccgggntgcaacttgggcctccttctggctttggggtgggggcagggagctcagcagggcctccagctgcctgagctttgcctgtgcacaccccacctcgtgctggagctccaagaactctccgtactggtcctggaacactgcgacatagcggctccgttccctctcactgctcactggcgggtacttaagctcatagtcgggcactgggtggggcctaggcttatgccccttagggatggctccaataggcttcttggcgcccaggagggcctgggagagcaactcatcctcaaacacaatcttcttggtctttgccttgtggggtcccggctggggctggcacggagggcggggggcgctggttttgaggcctcggggcgccagtccctgcagcgggggcccaggcccaggcgggtgagtatgcaggtgcccccgggagccgcgagtctttgggggctcccgggtgggcatcggcctccgggagaagcagctcaggggtttccgggctgatgagcgggtcctgcggggggcgtcgtgtcccgcgcgcggcgggggtggtctgcgggcggcctgtgggtggacacgcggagaggacacgcctgacgacgcgcacggagaaaaggacacgcgggcagcatcgccgaagagcggccaactctcaccccgcgggagcagagttcgccagaacgaccgctatttgcatagacgcacgcgattggtccgcagcgccgtcc

SEQ ID NO: 260353 - DNA, 1706 bp, Homo Sapiens
  misc_feature (1282)..(1282): n is a, c, g, or t
agcatgtgccgggagattggcgagaaccacgaggcagctgccgcatccaactgaaattgattgagtctcagccctgggaggacagcctcaaggatgggcaccagctgaaacaactgctgctgaaggccctgactctgatgttggatgcagcagagagttatgccaaggactcctgtgtgcgacaggcccagcactgtcagcggctcaccaagttgataactctgcagattcactttctgaacactggccagaacacaatgctcatcaacttgggccgccacaagctgatggactgtattctggccctacctcggttctaccaggcttctattgtggctgaggcctacgattttgttccagattgggctgaaattttataccagcaagtgattcttaaaggagactttaattacttggaagaatttaagcagcaaaggttattaaagtccagtatatttgaagtagatttccaaaaaatataaacaacatcagcctactgacatggtcatggaaaacctgaagaaattactcacatattgtgaagatgtttacctgtattacaagttggcatacgaacacaagttttatgaaattgtaaatgtgcttctgaaggaccctcagacaggttgctgtctaaaggacatgctagcaggttagatgatttcataggtgtctgttttcttgtactgttagcagattctgacagatgtgatgagaagaagaatgcattggagatctttgctaaagttgaacaatcccggtactgtaccatatcagtcctttgtgggtagtaggtagcaagtaagaaacttttcaggaggaaattcctatttaaaatagattgattttagatgattgttcatccacaccattttatatagatactagtattaagatcaaaagcttcctcttcctcaggacagcttctactttagatgatccaataatgattaaagaatacctgtacctgcagattccagtttcaaagaaatttaattattatttacacagttaaggaacaggtgatacattttcatttgttagaaactgatctttctgtaataaaatagattttcaattcagtgtatgtcattattactgctaaggaaatcttagcccttgtctgcccttaaagggaatctttatttaatttactgtaattattgctgtgtagtcactacttttgttaatttctcaaatcacttagatgatggtcttgttttccacttagtaggtatacagagctttgacgttcctattatttcctatataagagaaattnaaaacattttttgttctttctgtcttaggggaataaaaaaacactaaccacacatttggttaaactgcttaggagaagacataataaagattccccaatctatacttaacagccataaacctgagttacaggctcagttactccaaataaatagttcttataggtacttaattaattaggccttggtatctaaataacaaaataatgtccccaaataaataagaggaaggcagccctatacctttgttgctctatggtgacaacataaggacctggcaaatcactcatgttttaaagctgtaactatgtcaagcatttattaagatttagtagagaacgtagagaactgtactcccaagagctgtgttctatactctcaaaaagtatctcttgggaggtaacacaaaatttaagtcctcacacc

SEQ ID NO: 260354 - DNA, 885 bp, Homo Sapiens
  misc_feature (836)..(845): n is a, c, g, or t
cccccgatgggtcctccaaaccaatgcgtccagccgatttaaccgccagcctacttaaacgactactaggacacttgacaagaactggtacgcgaaactggcccctcgaggaactctagaccgccccatgcgaacaccgcaccccgggggccggcctttgcggccccggccccgggccgggcaatgccggcccaggaccacgcgtctactttcagagcccccccgggccgcaggagagggcccgggcggggcggacgatgagggcccagtgaggcgccaagggaaggtcaccgtcaagtatgaccgcaaggagctacggaagcgcctcaacctagaggagtggatcctggagcagctcacgcgcctctacgactgccaggaagaggagatcccagaactggagattgacgtggatgagctcctggacatggagagtgacgatgcccgggctgccagggtcaaggagctgctggttgactgttacaaacccacagaggccttcatttctggcctgctggacaagatccggggcatgcagaagctgagcacaccccagaagaagtgagggtccccgacccaggagaacggtggctcccacaggacaatcgctgccccccaacctcgtagcaacagcaataccgggggaccctgcggccaggcctggtgccatgagcagggctcctcgtgcccctggcccaggggtctcttcccctgccccctcagttttccacttttggggtttttttattgttattaaactgatgggactttttgtgtttttatattgactctgcggcgcgggccctttaataaagctaggatacgcctttggtgcnnnnnnnnnncgacgcgtggtcgacgatatcccgtaattccggccgtacc

SEQ ID NO: 260355 - DNA, 748 bp, Homo Sapiens
acttggctcggagcgggcgaggggacgcgtgggcggagcggggctggccagcctcggcccccatgacccgctgtcctgtgccctttcccagcgatgggcgtgcagccccccaacttctcctgggtgcttccgggccggctggcgggactggcgctgccgcggctccccgcccactaccagttcctgttggacctgggcgtgcggcacctggtgtccctgacggagcgcgggccccctcacagcgacagctgccccggcctcaccctgcaccgcctgcgcatccccgacttctgcccgccggcccccgaccagatcgaccgcttcgtgcagatcgtggacgaggccaacgcacggggagaggctgtgggagtgcactgtgccctgggctttggccgcactggcaccatgctggcctgttacctggtgaaggagcggggcttggctgcaggagatgccattgctgaaatccgacgactacgacccggctccatcgagacctatgagcaggagaaagcagtcttccagttctaccagcgaacgaaataaggggccttagtacccttctaccaggccctcactccccttccccatgttgtcgatggggccagagatgaagggaagtggactaaagtattaaaccctctagctcccattggctgaagacactgaagtagcccacccctgcaggcaggtcctgattgaaggggaggcttgtactgctttgttgaataaatgagttttacgaacc

SEQ ID NO: 260356 - DNA, 439 bp, Homo Sapiens
aatttggtatatcaaacagtaaaggctacatataaatgttgtttccccagaatgtactttgtctacaactatgcactgtagctattatgcacacactaaaagcattcatgataaagtacaaaaataagaaaagattaaataagaaggtatccttgagttataaaatgtctactaaagtatacctggtaatcacacagttgtgtcacagctaaaaacacacaaattaacatatactgctatgcaactatttgatctaatatagatctactaggaaaatattaaggctgtagtaacacttcacaggtaaaggctaagttctgggacatgaaagcttttagaaaattcacaaaacaaacctgagacatctttttgttttggaaaaaagcaatttgcttatagagtcaaagctttgacatacaaatgaagcatttaataaaca

SEQ ID NO: 260357 - DNA, 476 bp, Homo Sapiens
taggcttcagactgctggtacgcccgcagctccttcatgtactgctgcttctctctctcggcctcatccaggtaccgctgcttttccgttggctgcagcttgctccactcggcgcccagcatcttggtgatctcgggaaagggcagatccgggtggcgcgtgcggatctgctcgcgccgctcgttcaggaagcgcacgtagcccgtgaccggtgcattgggcccattcggcagaatcttcttccgcttcttgcccttgggccagccgcgtttcttcaccggctcctcctcgtgggaccccttctcgcccgcgcgtggaccctcgccgcgctcttgcttgacagtcaccacgaagcccccatgctggcccggagcattgccgcccgccggcgcggcggccgcgccgggctgcttggggccgtgggacatggccgctccgggccggacctccaaagaaactttcccggacctcccgac

SEQ ID NO: 260358 - DNA, 992 bp, Homo Sapiens
  misc_feature (87)..(87): n is a, c, g, or t
atgaaccagcccccaaagggtggaccccccagcctttggtccccggggtggggtttgcccagggcccgcgccccacagcttctcctntgcatcgtggggccgccccactcctcaccaggtgctcgctggcgacctgggcccaggatttcccttgatgcggacgatgagcttctcgtgctgggcggggtcgcgctcgatggctccgtgaagccgggccatgtagaagtccagagtgcccagcgtgggcgtttcgcccgtgcccggcaccggcagtgaggcgaagctggcggtgagcgcctggcgcacggcctggagctgctgctgcagcgccagcgtcctccgctcctccagcgccagctcctgctccagacgctcgcgcgcgctgctcatgctctgcgtgtgcctctgcagtaccgcgttctgctcctcgaaggccacattcatcttccgcaagcgccgaagctccgcctcacgcgctttgttttggtccaagaactcttcagtgaagatgggaacatcgaaggtggagaagccatcgcagtccccacccttgtgtccattcaggagagtgttcatgagcccagagctcgagtctttcttgatcttcttctcctggatcttctccgtgcacatcttataggcttcagactgctggtacgcccgcagctccttcatgtactgctgcttctctctctcggcctcatccaggtaccgctgcttttccgttggctgcagcttgctccactcggcgcccagcatcttggtgatctcgggaaagggcagatccgggtggcgcgtgcggatctgctcgcgccgctcgttcaggaagcgcacgtagcccgtgaccggtgccttgggcccattcggcagaatcttcttccgcttcttgcccttgggccagccgcgtttcttcaccggctcctcctcgtgggaccccttctcgcccgcgcgtggaccccctcgtgccgaattcgccacccaggcctcgctac

SEQ ID NO: 260359 - DNA, 1090 bp, Homo Sapiens
  misc_feature (647)..(647): n is a, c, g, or t
  misc_feature (932)..(932): n is a, c, g, or t
aaggagcgaggcctgggtggcgaattcggcacgagggggtccacgcgcgggcgagaaggggtcccacgaggaggagccggtgaagaaacgcggctggcccaagggcaagaagcggaagaagattctgccgaatgggcccaaggcaccggtcacgggctacgtgcgcttcctgaacgagcggcgcgagcagatccgcacgcgccacccggatctgccctttcccgagatcaccaagatgctgggcgccgagtggagcaagctgcagccaacggaaaagcagcggtacctggatgaggccgagagagagaagcagcagtacatgaaggagctgcgggcgtaccagcagtctgaagcctataagatgtgcacggagaagatccaggagaagaagatcaagaaagactcgagctctgggctcatgaacactctcctgaatggacacaagggtggggactgcgatggcttctccaccttcgatgttcccatcttcactgaagagttcttggaccaaaacaaagcgcgtgaggcggagcttcggcgcttgcggaagatgaatgtggccttcgaggagcagaacgcggtactgcagaggcacacgcagagcatgagcagcgcgcgcgagcgtctggagcacgagctggcgctgngaggaccggaggaccctggcgctgcagcagcagctccagggccgtgcgccagggcgctcaccgccagcttcgcctcactggccggggcccgggcacggggcgaaaacgccccagcctggggcactcctggaaattctacatgggcccgggcttcccggagcccttcaagcggcggaccccgccccagcaccaaggaagcttcattcgtccggcattcaaagggaaatccctggggccccaaggttcgcccaagccgaagcacccttggtgtaaggaagatggtgncacggtccccccaccgtaattggccaaaaaggggagatacaacctggctgggcgcggcgccggggacccccttgtgtcctagaagagcccatacaaccccccgggggttgtggcaaattaaacatcagagagccgcgtgggggcgccgtaagtcacct

SEQ ID NO: 260360 - DNA, 1016 bp, Homo Sapiens
cacagtacgtgacggggcggcgctctgtgtggagtggcctcctgtgtgtggtgatcatggcacccgatctccggcgtagatgtttttcccgcgggagaccaaggcgaagacaggtcggtttcgaggttcaggccgacgcatgtcatccgccaccctcagacattgaggagagtgccccaaaaacaagtgcttgtcgtgggagcaacacatgcggcagctcttaaactggatatgtactagtacaagagcaaagggtaagaaaccccaaatactataaagatgcacttataaccagtgtggggttatcaacactgtctacgtactctcccattctaggacacagggtgaagagaccacctgggttccctctaaagccctgaacattaggaccactgaggaggaaatatttgtccttaaaaataaatgtaggttcctggattgttctctttggctgccacatttggagcctgagtggaggcccttcaaattaacactggttctgtagggactgcccagtcagggtgcaatgggatcagacacaggatcaaatcagccaggggcagaagggcatggtggccctacgggtagaatgcactgtattgttagttaactttctaaattgttctctatttagcttcagcctgagtcaggtctacaatggccactatttagaaaataatttaaatcagtgaggtaagcacgccgatttgaaatatatccaaacatcattaagcctctgggtcataaaacttggtccctgaactaacaggagtatcttactcattaatgactaggtttgttccaaacggcccctgctgacacacatgatccttttgtgtggcacaataaatctggtaatagcagaacaatagcatggcttttaaatagggtaattttataattccttaagatgctggtttgcttcttataatgtgttgtgtggaattacagtacttagacaaggttcacatttactttaaaagacttctatattttaatgcaaatctaaggatcat

SEQ ID NO: 260361 - DNA, 512 bp, Homo Sapiens
tacgtccaacatccccatcatcctgcagtctgccctggtgtccaacctttatgtcatctcccaaatgctctcagctcgcttcagtggcaacttgctggtcagcctgctgggcacctggtcggacacgtcttctgggggcccagcacgtgcttatccagttggtggcctttgctattacctgtcccctccagaatcttttggctccgtgttagaagacccggtccatgcagttgtatacatagtgttcatgctgggctcctgtgcattcttctccaaaacgtggattgaggtctcaagttcctctgccaaagacgttgcaaagcagctgaaggagcagcagatggtgatgagaggccaccgagagacctccatggtccatgaactcaaccggtacatccccacagccgcggcctttggtgggctgtgcatcggggccctctcggtcctggctgacttcctaagcgccattgggtctggaaccgggatcctgctcgcagtcacaatcatctacc

SEQ ID NO: 260362 - DNA, 976 bp, Homo Sapiens
aattcccctgggcccttacagggttgattttggccacctcccccgcttgggcctctcccaaaagggggtgggagcccacctgtgccccaggcccaggaggtttctattcttttgaagatatcttttgaaaagaagccgcctggaaaggggcaggatccaaaattaaatggccatgaaaagtgtactccccctccggcctgctccttataagggaaccccttatgactagaacccaagaccagtacccacagcctgaaagggaatttcagacaaccctaccatagaagtagtgaagaaaccttaatttctaatctcctagtgaatacagtgaggattccatttgtgggcaatggggatgctgggagttcctccctcacagactagagacagcacccaagattctgtaactctgagaagggtaccagccttatagaaattccagtgggtcaactgcctcttgaagcatgcttaaagtctcttaacaggtttataaatgccaatttctggttggtattatatccacagcatagcactgtctactgcatcaggagggctatggagacttaatatactagacatgcgattaaaaaaactgaaagaaaagggaaaggacaacagagtaagggggccaaagaaatggtgatgcagtcttctaatagatgtgaatggggaaggaagaaaagagaagtttagatccaaaatgaacaaagaagtcaagcattaaattccaaatgaacaggtatacagaaatgaaaagttaatgaaatcattgtattatcacaatccaagagctcaagatggaatttaagctttttctccttcactagcttcatcctttggcagccagtctaagaatctctgaaattcaggtttttcaggagattatctctatcctgaatacctgaagacctaatctaaactgttatttctttctgtgaatttcaaagtcatagcattttgtcttaactggccttga

SEQ ID NO: 260363 - DNA, 730 bp, Homo Sapiens
  misc_feature (72)..(72): n is a, c, g, or t
catctacgcctcggcaccacggggtgtgggaccccagcccggagagaacagagggaaggaaccgcgcccccnacctggagctgaatcacatgacctagctgcaccccagcgcccgggcccgcccccacgctctgtcccacaccccacgcgccccgggagcggggccatgcctcccagccccccagctcgcccgaccccatcctgttcgtgaataggtctcaggggttgggggagggactgccagatttggacactatatttttttctaaattcaacttgaagatgtgtatttcccctgaccttcaaaaaatgttccaaggtaagcctcgtaaaggtcatcccaccatcaccaaagcctccgtttttaacaacctccaacacgatccatttagaggccaaatgtcattctgcaggtgccttcccgatggattaaaggtgcttatgtttttgtgagttttaagtaaatatttgtattgtattgttataaatgttaagtgtgcctggctttcaatcatgcacggaaacccagtctcagtcccacggacagaatgggcgaggcatggattctgggttgcagtaccgttctgattagaaataggaagtctccccacccccgccctggccaagaacgtgcaataaattggaagtttgccccggggcagcaagaatttatgctgccattgaaaagcaggtaccagtgccccttttcagacagtttttgattcgctct

SEQ ID NO: 260364 - DNA, 628 bp, Homo Sapiens
  misc_feature (203)..(241): n is a, c, g, or t
tcgattgagtctgaaacagcagcttctgaggaaaccttgttcaacgcgtcccagcgcatcagcgagttagagaggaatgtggaagaacttaagcggaaagctgcccaaaactccggggaggcagaatatattgaaaaagtagtatatactgtgaagcaaagtgcagaagatgttaagaagactttagatggtgaacttgatgnnnnnnnnnnnnnnnnnnnnnnnnnnnnnnnnnnnnnnnctgaagagtcagctgatgccagaaggaaagccgaaatgctacaaaatgaagcaaaaactcttttagctcaagcaaatagcaagctgcaactgctcaaagatttagaaagaaaatatgaagacaatcaaagatacttagaagataaagctcaagaattagcaagactggaaggagaagtccgttcactcctaaaggatataagccagaaagttgctgtgtatagcacatgcttgtaacagaggagaataaaaaatggctgaggtgaccaaggtaaaacaactacattttaaaaactgacttaatgctcttcaaaataaaacatcacctatttaatgtttttaatcacattttgtatggagttaaataaagtacagtgcttttgtatat

SEQ ID NO: 260365 - DNA, 689 bp, Homo Sapiens
agggcaaaggcaggccgagtccgtatggccaggacagggcagagtggtcatggcctggaaacgggagtgggagggggccagaaagcccctgccgccgtgactaagacccgcggtcccacaggtgtgggctgtctctcccaaagtccagcagccccctggggggccaaggccagtcctccacgcccactgaaaggcacaagttggtagggcagaggcctgacccatggacccaccccacagggtgggggccaaagagccacacagtcaaatgaggctcgggggcttctgggaagggacctagacctgagtccttgcccacccctgctgtcccctgcccaggaatgtgttggggctccagggaaactagaggggaagaggaacgctaggcgcagaagggggaaagaggacaagatcgggggcgggaggggaaggcttccgttccctttgagcgctgggcaggtcctcagagccaagcagggcaggcgagctccgagtgtgaggtaccctggggtccctcggacagcccgggaggtggccacagatggaaggagagtcccagtggtgaacaaagcaggatgtgccgtggctgggcctcccccgggtttccggccaagtcagctgctcaccccacgggctgggccatcttggcgtgcaggctctgatgcctcgtgccgaattcgccacccagg

SEQ ID NO: 260366 - DNA, 757 bp, Homo Sapiens
  misc_feature (674)..(674): n is a, c, g, or t
ggggcgggtaggtaagagcagcggcgggcggtggcgctcactcccggcttccaaccgcgcggagcctctgccttggagattctcagtgctgcggatcatgtccctaaggggcagcctctcgcgtctcctccagacgcgagtgcattccatcctgaagaaatccgtccactccgtggctgtgataggagccccgttctcacaagggcagaaaagaaaaggagtggagcatggtcccgctgccataagagaagctggcttgatgaaaaggctctccagtttgggctgccacctaaaagactttggagatttgagttttactccagtccccaaagatgatctctacaacaacctgatagtgaatccacgctcagtgggtcttgccaaccaggaactggctgaggtggttagcagagctgtgtcagatggctacagctgtgtcacactgggaggagaccacagcctggcaatcggtaccattagtggccatgcccgacactgcccagacctttgtgttgtctgggttgatgcccatgctgacatcaacacaccccttaccacttcatcaggaaatctccatggacagccagtttcatttctcctcagagaactacaggataaggtaccaacaactcccaggattttcctgggatcaaacctttgtatctctttctgcnagtatttgtgtaataattgggtctgaaagaaaccgtgggaccccttcctggaaccatttttaatttttaaaaagaacttaatg

SEQ ID NO: 260367 - DNA, 864 bp, Homo Sapiens
  misc_feature (646)..(647): n is a, c, g, or t
  misc_feature (762)..(762): n is a, c, g, or t
ccaaagcccaaaccccggccatccatcacaaaggcaacctgggagagtaactattttggggtgcccttaacaactgtcgtgactccagagaagccgatccccatttttattgaaagatgtattgagtacattgaagccacaggactgagcacggaaggcatctaccgggtcagcgggaacaagtctgagatggagagtctgcagagacagtttgatcaagaccacaacctggacctggcagagaaagactttacggtgaataccgtggctggtgccatgaagagctttttctcagaactgcctgaccccctggtcccgtataacatgcagatcgacttggtggaagcacacaaaatcaacgaccgggagcagaagttgcatgcccttaaggaggtattaaagaaatttccaaaggaaaaccacgaagtcttcaagtatgtcatctctcacctaaacaaggtcagccacaacaacaaggtgaatctcatgaccagcgagaacctctccatctgcttctggcccaccttgatgagacctgatttcagcactatggacgccctcacagccacgcgcacctaccagacaatcattgaactctttatccagcagtgccccttcttcttctacaatcggcccatcaccgatnnccccgggccaggcccagctccccctctgccgtggcttccaccgtccccttcctcacttccacgcctgtcacaagtcagccgtcgcccccacagtcgcctccacccaccccccagntccccaattgcagccactgcttccctccccgcttcatccccaccgtcccactccacaagccttcccgaaacattccctgggcaaacaaaggaacactaggag

SEQ ID NO: 260368 - DNA, 443 bp, Homo Sapiens
cacaggactgatcgatgcacacctttatagcttgaccatatgctgtcatgaaagtagcaccccgacggtgcttgctttactaagtcaccgtgtgtggatgcttttgtcgcattttgcttcactgtgagtagcatgggaaaagggtccacgtctccaaaagactcttccacttgtttgtcccacagccctaagtgccacattgctgttggatgctcccgggatgccttctagaagggggcctcccaccttaagttcaggcgccatctgatagccttttctgcaggcttcatgtccttagctgaccctcctttatcttgcaaacccctgcccctgctgtcccaggggaggacgggcttctgtagaggcttctggggaaatgagctgtctgcaggaggtgaagcagtgttttccttggaatgtttgaggacctgcaatagaagatg

SEQ ID NO: 260369 - DNA, 931 bp, Homo Sapiens
cttgcggaagtgacggcagttccgagtccagtgggggcggtgggagcgatgagggtctgagacggtgggagcggttgtgtgaagatggagtttcccggaggaaatgacaattacctgacgatcacagggccttcgcaccccttcctgtcaggggccgagacattccatacaccaagcttgggtgatgaggaatttgaaatcccacctatctccttggattctgatccctcattggctgtctcagatgtggttggccactttgatgacctggcagacccttcctcttcacaggatggcagtttttcagcccagtatggggtccagacattggacatgcctgtgggcatgacccatggcttgatggagcagggcggggggctcctgagtgggggcttgaccatggacttggaccactctataggaactcagtatagtgccaacccacctgttacaattgatgtaccaatgacagacatgacatctggcttgatgggggcatagccagttgaccaccattgatcagtcagaactgagttcccagctgggtttgagcctagggggtggcaccatcctgccacctgcccactcacctgaagatcgtctttcaaccaccccttcacctactagttcacttcacgaggatggtgttgaggatttccggaggcaacttcccagccagaagacagtcgtggtggaagcagggaaaaagcagaaagccccccagaagagaaaaaagaaagatcctaatgaacctcagaaaccagtttcagccatatgcttttatctttcgagatacacaggctgccctccaggggacgaatcctaatgccccttttggtgagggttccaaaattgtgggcccccctgcggggataatcttggcaaaggaactaaaacccggtattttaaaaaggaaaaactggaggttgcc

SEQ ID NO: 260370 - DNA, 2121 bp, Homo Sapiens
  misc_feature (38)..(38): n is a, c, g, or t
  misc_feature (1190)..(1190): n is a, c, g, or t
  misc_feature (1320)..(1320): n is a, c, g, or t
cactgtgccacacgtttaaaacccccctcaggggtaanaggtagcgaggcctgggtggcgaattcggcacgagggacccttcctcttcacaggatggcagtttttcagcccagtatggggtccagacattggacatgcctgtgggcatgacccatggcttgatggagcagggcggggggctcctgagtgggggcttgaccatggacttggaccactctataggaactcagtatagtgccaacccacctgttacaattgatgtaccaatgacagacatgacatctggcttgatggggcatagccagttgaccaccattgatcagtcagaactgagttcccagctgggtttgagcctagggggtggcaccatcctgccacctgcccagtcacctgaagatcgtctttcaaccaccccttcacctactagttcacttcacgaggatggtgttgaggatttccggaggcaacttcccagccagaagacagtcgtggtggaagcagggaaaaagcagaaggccccaaagaagagaaaaaagaaagatcctaatgaacctcagaaaccagtttcagcatatgctttattctttcgtgatacacaggctgccatcaagggacagaatcctaatgccacttttggtgaggtttcaaaaattgtggcctccatgtgggatagtcttggagaggagcaaaaacaggtatataagaggaaaactgaggctgccaagaaagagtatctgaaggcactggctgcttacaaagacaaccaggagtgtcaggccactgtggaaacagtggaattggatccagcaccaccatcacaaactccttctccacctcctatggctactgttgacccagcatctccagcaccagcttcaatagagccccctgccctgtccccatccattgttgttaactccaccctttcatcctatgtggcaaaccaggcatcttctggagctgggggtcagcccaatatcaccaaggttgattattaccaaacaaatgttgccctcttctattactatgtctcaaggagggatggttactgttatcccagccacagtggtgacctcccgggggctccaactaggccaaaccagtacagctactatccagcccagtcaacaagcccagattgtcactcggtcagtgttgcaggcagcagcagctgctgctgctgctgcttnctatggcaactgcctccaccccgactacagccccctccattacaacagatgccacagcccccgactcagcagcaagttaccattctgcagcagcctcctccactccaggccatgcaacagcctccacctncagaaagttcgaatcaatttacagcaacagcctcctcctctgcagatcaagagtgtgcctctacccactttgaaaatgcagactaccttagtcccaccaactgtggaaagtagtcctgagcggcctatgaacaacagccctgaggccatacagtggaggcaccttctcctgagactatctgtgagatgatcacagatgtagttcctgaggttgagtctccttctcagatggatgttgaattggtgagtgggtctcctgtggcactctcaccccagcctcgatgtgtgaggtctggttgtgagaaccctcccattgtgagtaaggactgggacaatgaatactgcagcaatgagtgtgtggtgaagcactgcagggatgtattcttggcctgggtagcctctagaaattcaaacacagtggtgtttgtgaaatagtccttcctgttctccaagccagtgaagagttatctgctgggaaagtgtccaagagcctgtttttgaaacacaagctgggcttctggtagtgcctcatcacaacccatgatggctgttcatgtttcaccccttttcttccttcagcagaggccaggctatggagcagggccactgaatttgctgtaatctggagatgctttttactttcaaccataagcggtaatagcagaggaaagggtgaagggagtctgggcaagcaaagcatagagatggtggggtggtggtggggttgaagaaacttgttggtataattgtcataggacttgcctaaaatattattaaaattacgggagtgtactcagcaaaa

SEQ ID NO: 260371 - DNA, 432 bp, Homo Sapiens
  misc_feature (324)..(324): n is a, c, g, or t
  misc_feature (352)..(352): n is a, c, g, or t
  misc_feature (358)..(358): n is a, c, g, or t
  misc_feature (405)..(405): n is a, c, g, or t
  misc_feature (411)..(411): n is a, c, g, or t
ttaagctctgttctgctggctgctcaacgtgattcaggccatttttgaataaatccctccgtgtgccagctatcacattcaaatttgaatcctaggatgtgaaggccataataaaagcagaaaacactttttcccaaaaaccacaataaataattttcaaaccagacattgtacaattttaaattatttttcaaggtaaaatctacctacatgggtaaatttcatttattcagggtggaaattaaggtctttgttgggtgaggcctttaggccacaaggaggagggaacaaggtaataccccaggtgtggccggggggataggnggtacctttggtcttccccctaatgccntgcccnttggctggggggtaagggccttgaccaatggttttgcccccttaccntggggntaagggcccccctcggggggg

SEQ ID NO: 260372 - DNA, 452 bp, Homo Sapiens
aaagcactgccagggatgtaatccttgcccccgggtagccctcctagaaattcaaaacacagtggtgtttggtgaaaataagcccttccctgttcctcccaagcccagtgaagagttatcctgctgggaaagtgtcccaagagcctgtttttgaaacacaagctgggcttctggtagtgcctcatcacaaccccatgatggctgttcatgtttcaccccttttcttccttcagcagaggcccaggctatggagcagggccactgaatttgctgtaatctggagatgctttttactttcaaccataagcggtaatagcagaggaaagggtgaagggagtctgggcaagcaaagcatagagatggtggggtggtggtggggttgaagaaacttgttggtataattgtcataggacttgcctaaaatattattaaaattacgggagtgtactcaa

SEQ ID NO: 260373 - DNA, 685 bp, Homo Sapiens
  misc_feature (612)..(612): n is a, c, g, or t
caaaagaaaattgtacctggccactcaaatgtgcctgttagttcttcagctgctgaaaaagaggaggaagtacatgctcgtttacttcattgtgtaagcaaacagaaaattttacttagccaggctagaagaactcagaaacatttgcagatgctcctggcaaagcatgttgttaagcactatggtcagcagatgaaattgtctatgaaacatcaactccccaaaatgaagacatttcatgaacctaccacaattttgggtaatagtttacctaaatgcactgaaattaagccagaagttaacacattgactgcagagaataaattgtgggatgatgcaaaaaatggctttgcacggtgtacagctgcggaaatccaaagatttgcattttctgctacagggctgttgtctcatgttgaagagggtttggattccgatgcaactgatagcagctctgatgacgatttggatgaatatacccttagaaaaaatgtggcagttaactgtagtactgaatggaagtggcttgtagacagagcacgagttgggcagccgatggacttggctttcaagctcagattttcagacctaggatggcaaaattccaacaantaacagacttttcacagggcaatttcgtggcctccaagggggttagtggttcccaggaggatgttcagtttcc

SEQ ID NO: 260374 - DNA, 1012 bp, Homo Sapiens
atggctttcctctggactctgtggtcaatgtcatcagtatcgctgtcgtgctttcctcatcctcttcagccaaggttcctcgagtcaggatcaaatcagaaggatgcagcacaggagataagctgtctgtggcagtccctgcatccaggctacagaacccatatctgttcgaaggcgttccagttgttctctctgctgttggctctctgcgttggccagtgagtttttttcagacgttcatattcaggacgatagtccctttcatattcttcggcagcactggtaacttgcacaaagagttcatctaatccagtacccagagacagcagagacacccaccaccatgagtgagctgtaaaactcatctaacaccaggctcattgaacgagtcaggttactgacgtatgtagtctcttgattcaaggcatcttggaaagcctcaaaatcctgcatccattccactgcaaagctgtggtcaatgatgtcagttttattcatgaccacaatgaaaggcagcttggttttgtataagatgctgcaggcatagagcatgttggacatgaaggtcactgggttggtacttctcgatgtgtccattacatagatgacaactgttggaaatgaggatgcaagggcttcagtgataattgtcccagaagctgaccaggtgaatacctcaatctgtccaggtgtgtcaatcaacacatatttggacatgttctgggccttctcaataaatttcatcacctgatcaaatctggtagcaaagagattgagtgaggtcactatgccgccattgggtccaagtccatattgtttcattacttctttatactttacagtatcacggaatatcaatattggcaggaaagggaacttcatgtactgctggatccaggttgatcacatacggtggagtgccttgggcatgcaggtgtcctgtgagcctctgtacaaaagtggttttcccggatcccgccattcccaacaccaacagacacactgggtgccg

SEQ ID NO: 260375 - DNA, 882 bp, Homo Sapiens
  misc_feature (644)..(676): n is a, c, g, or t
gtgtgaatgccggcccgggcacaggggtcaggatctgggtgctggggcccgtccccgtgagcccgccagctcaggggccgcttccgccgccgcaggccagatagcaagccccgggcatccttcccgccttcctccagagacagcttctcagccttggcgagctctcgctccagatggtggaaatagtcttcaatgccgctccacgagttcttctcaatgagcgacttcaccaggctccacggctgctttcggtagcggatctcagaagacactcggagccgcgccttgttccgggccagacccaggatgcagtagcggtgggcagtgtagaagtagtcctggtaggggatgccctgcgtcagcacctcggagtccaccacacacccgccggcctgggggccgcgccggaacagcgtctgtgtctccaccacggaggcgctcttggggcccagtgggttgctgatggggatggtgtacgtcagcacccggcgctggtggcacttgctgtccccactccaggggctcagcgtcacgtctgtgaacttgcactgctgtaggaagcctggaggaagggcgagtccgagaagagcatctgctggagccgctcagcgcccacatggaagacagagttgatgaggagaccnnnnnnnnnnnnnnnnnnnnnnnnnnnnnnnnnttcctccccagtggatgaagaggagttacttgtgtctgtcaatagctcctcactgggcagcagatccaagggggcccagggtggtgggcccgtcaggctgggtgggctctgtgctcgggggttcagccaccggggtcactgtctggctggaggaggcgtctgctgccgacgcgtggtcgacgatatcccgaattccggaccgtaca

SEQ ID NO: 260376 - DNA, 571 bp, Homo Sapiens
  misc_feature (444)..(476): n is a, c, g, or t
tgagcaccgaccgtgccctctgcccagggctgggtcctgagcagctggttttcctgcaggaaggttggagcaagcaaagtccttctctgccctcagggtcagctgcccagactggggcggatgccagagaggcaggtgggctgtggctggactggtccggagctggcttccttaccagaaaagcctcagccttcctctggaagcatcccccgttctgggcaagggggaagggctcctttaaggggtgtgctttcccagtggggagcagtctggccctgccccctactaaagcctctgctctcagcactttcccccaagtccttgtaacttgcttgaaggtgggttctggctgccagccagtccctggacaaactctcctgccccttttaaatttcactcattttgtataaacccagcaggctggtgtttacttagccctgtagnnnnnnnnnnnnnnnnnnnnnnnnnnnnnnnnngagttcacggttcaatattgcctcctcgccctggtgagggggaggtgctgcttttctgccccacctgccggctggttccagcagcgctggggccc

SEQ ID NO: 260377 - DNA, 1331 bp, Homo Sapiens
  misc_feature (334)..(334): n is a, c, g, or t
  misc_feature (403)..(403): n is a, c, g, or t
  misc_feature (539)..(550): n is a, c, g, or t
  misc_feature (729)..(1023): n is a, c, g, or t
gtggggggacaagggagttaatgggactgggcaacagcctcaacatgagaccacccaatcttccacgaaagagacgacattcccacaagcagataaaaagagcagtttaaaaggtgaggagttttagtgctcttgtagccagcccaccttaaacctaaattagaagctttttacaacatacaaaatagactgataactatgcagatcacattcccatcttcaatagtaaatatacatagtaataaaatctattattaaccagtgggaccaaaataacatataaggccagacatttaaaacaggtgttgtatcatcaacatgctctaaaaaaaanctcatctgactagatctagacccaggcctttttgcatgaggccaagacaacaagtatacaatcaatacnccatgtgacacagtccaagtgctggggaatatgagggggcagtgggccatggggaggaagatatcagccccagtgaaaagctggggtttggctttactcgtgatattttgatgctctatgtctgagtaaaggaggnnnnnnnnnnnncactttgataacgtacaaaaggcatcgactcccatttcaaaaataaatgggaagacttcacagtcaaagttcagtcacttgtcagtatctgccctggaactctgatgcagtatcaactcttgtactctctccttttccctccactagcatgccctctctcagttgtttggtttgtttgnnnnnnnnnnnnnnnnnnnnnnnnnnnnnnnnnnnnnnnnnnnnnnnnnnnnnnnnnnnnnnnnnnnnnnnnnnnnnnnnnnnnnnnnnnnnnnnnnnnnnnnnnnnnnnnnnnnnnnnnnnnnnnnnnnnnnnnnnnnnnnnnnnnnnnnnnnnnnnnnnnnnnnnnnnnnnnnnnnnnnnnnnnnnnnnnnnnnnnnnnnnnnnnnnnnnnnnnnnnnnnnnnnnnnnnnnnnnnnnnnnnnnnnnnnnnnnnnnnnnnnnnnnnnnnnnnnnnnnnnnnnnnnnnnnnnnnnttgcttcaggatgctagggatacttctgggagataactgctaacagattagaaagaagaatgatacataaaaaatgattaggaaaagtttggtgacagacctaatcatggtctgtcccagagttaatatggtccaggggatggcaaaggacagcagaccccatacacattacccccgttgagccctccctcacctagcactggggagacttgggtttcacctggcaccatgcacagatccctagcctgtgatccaatcaactggaaaggtctctaagacagtttaagcctgtgatgtgtgtgattaaa

SEQ ID NO: 260378 - DNA, 993 bp, Homo Sapiens
gggagtcaacgcctgcctcctctcgagcgtcctcagcgcagccgccgcccgcggagccagcacgaacgagcccagcaccggccggatggagcgtccgcaacccgacagcatgccccaggatttgtcagaggccctgaaggaggccaccaaggaggtgcacacccaggcagagaatgctgagttcatgaggaactttcagaagggccaggtgacccgagacggcttcaagctggtgatggcctccctgtaccacatctatgtggccctggaggaggagattgagcgcaacaaggagagcccagtcttcgcccctgtctacttcccagaagagctgcaccgcaaggctgccctggagcaggacctggccttctggtacgggccccgctggcaggaggtcatcccctacacaccagccatgcagcgctatgtgaagcggctccacgaggtggggcgcacagagcccgagctgctggtggcccacgcctacacccgctacctgggtgacctgtctgggggccaggtgctcaaaaagattgcccagaaagccctggacctgcccagctctggcgagggcctggccttcttcaccttccccaacattgccagtgccaccaagttcaagcagctctaccgctcccgcatgaactccctggagatgactcccgcagtcaggcagagggtgatagaagaggccaagactgcgttcctgctcaacatccagctctttgaggagttgcaggagctgctgacccatgacaccaaggaccagagcccctcacgggcaccagggcttcgccagcgggccagcaacaaagtgcaagattctgcccccgtggagacttcccagagggaagcccccactcaacacccggctcccagggtccgctttctccaagggggcccttacactcagcttttctgggggggcaacattcgctgaaaggctttttatgcctgtggaattgcagcatgcttgttcccaggaccatgaac

SEQ ID NO: 260379 - DNA, 1067 bp, Homo Sapiens
  misc_feature (964)..(964): n is a, c, g, or t
  misc_feature (968)..(968): n is a, c, g, or t
attatatagacagtaaacaaaaaccttaatacttactatcttcttttcagaattagtttatttttgtcagttacagtcctagatatacttactgctggtacagttgtactctaagattggtatttgatattcactttactcacaagtagtgcgggaggccagctcctggcaggccctcgcgatgagcagtgggtcagctgcggtgtgggatgctggagtttggctgcaggctgacatcatttatttttgcatccctgtctgctttgttacaagctcccaggggaggtggggtttgtgtcttccaacttccctacatgcagaaactgctccctttgaactctcttggctgaacagcagattactgacagacaatctgtgatatggtgttttatacgcttcctcgtacgctggggccaaggcagtatacattcctctgactttatactgttattactgcatttattatttgctatattaatagctactaactagaaattagatgaagcaagcatgacagacacagctgtggaggtcacagctgctcctttttggtcaatgagcgtttctatcccctccccctggggtgtgctgtgtcccacctggcccaccagaggctcacgacgatggcacctgaccaggtgacgtgggcgtggtcacctcacctgcaaggctttgtggactctgcacaccgtatgacccccggttttacagtttttagctgttgaattttggaaattggcactgggtgaaaaggtcggaggactggctcttgtagtcacagagtggctgcaggcctttgaaaagtggaggaaagaaaagcccttctccttgccccgcacacatttcactcccactgtactgggcttccaagccttggcattcagggcccctatattttctgtaggaaaaatcccttgaaaacacttttctatatgggtgattttgagaccatcgttacgctgtncaanaggaatgtacagagaaatttgtaggtattttttgaaggaacattaatttgttaatgatatgtaggctatttaatttttccctttcctattgtaatcatt

SEQ ID NO: 260380 - DNA, 1175 bp, Homo Sapiens
  misc_feature (167)..(310): n is a, c, g, or t
  misc_feature (842)..(842): n is a, c, g, or t
ctgaaaattggggcgtgtggggaagaccaccaacagtatttacatgacttgccccaaactgtacatttaaaacatgactgttgggatagtcaccaacaacctgaaatttcttactctaaaacacattaccaaatcccactgatttattttgtgtgtgctttcgtggnnnnnnnnnnnnnnnnnnnnnnnnnnnnnnnnnnnnnnnnnnnnnnnnnnnnnnnnnnnnnnnnnnnnnnnnnnnnnnnnnnnnnnnnnnnnnnnnnnnnnnnnnnnnnnnnnnnnnnnnnnnnnnnnnnnnnnnnnnnnnnnnaattcactattttatctttcttccagacaaagcaaagcatttttctctaacaacataatagtcaggattttgcttattaacttacgtgggtggctttatactcccagaacaaatgatctagctgactactaggaaaaaggtttcatagtttaggaatatatcacatcacgtgttagttccaaatgtacatgaagacaatttttaattgctgcaatagcagaatattaaggcaacatcagaaagcagaggtgttttaaaacactaagccctactccctgcctggtggaaaacaaaatgatgttactaaatcccttaatacaaaaactttccaaaataatctgttgagcttgacttcgcagtttaatcttttacagtttgatggcagtgagagagaacctgcagctataattcccttggcaaaagaattcaacatctgatttactcacaatgcttaaaataaggaagggaaaatataaaataagttttccttgcttggcaaccatctttttaattatctatttttatactgtantccaggctatgccctgggtgtggatggctaactcgcatatagaaaatatcaagcatcacatctggaagaatcacaaacgagacaatgaacttctcaatcagtacatcaacagtcaaggtaagcaagaaaaggactttaccaagaaactaacatttacactttctgacggaactgaaatacactgaattacaggcatattcactgaaacaacaaaaaaaattctgtccatgtaaaggctatattttttacccccaaaaaagtgtttcaattctgatactcacaccacaactggttaagaaaataaagcgcagtgtttagcaactgagcatccta

SEQ ID NO: 260381 - DNA, 947 bp, Homo Sapiens
  misc_feature (518)..(518): n is a, c, g, or t
gcgcaccttggccgacccgaaccgacccgagtcctgtccttccaggccgttcgcaatggtggatgagttggtgctgctgctgcacgcgctcctgatgcggcaccgcgccctgagcatcgagaacagccagctcatggaacagctgcggctgctggtgtgcgagagggccagcctgctgcgccaggtacgtccgccgagctgcccggtgcccttccccgaaacgtttaatggcgagagctcccggctccccgagtttatcgtgcagacggcgtcttacatgctcgtgaacgagaaccgattctgcaacgacgccatgaaggtggcattcctaatcagcctcctcaccggggaagccgaggagtgggtggtgccctacatcgagatggatagccccatcctaggtgattaccgggccttcctcgatgagatgaaacagtgctttggctgggatgacgacgaagacgacgacgacgaagaagaggaggatgattattaggccctcgaccctcgggcctcgnggggggagggccctgcacgccgccaccccctccccgcagccctcaccccgccaggagccactgctctcccccttgccctccggtccccttacctacccgcgcccgtctgctctctctcttcatttctccgtagtgcttgtctttgttccaggaatagcgctcccgttacctgctgctggggtcggggctggagcctcactcactccgaagtgcttggaagtgtcatctacccctggccatccccggggatcccctcccccgctaattcggaactggggccatgaaccccaagcttttggcccaggccccctgttactaacccgcccagaccagccccgaggccctcgcggctggcacccggccctggcttgccgggctttacccccttccccggaggagcactgtgggccccgtttcacctcccaggtt

SEQ ID NO: 260382 - DNA, 1208 bp, Homo Sapiens
  misc_feature (248)..(307): n is a, c, g, or t
  misc_feature (607)..(633): n is a, c, g, or t
ccttttcaaatatatactcaattcaacctctgtatgtcacaaacccagaaagtttcttgtgagttgtgagacggaagaactttaaaattccaggcaagcaaaatggacatttaaaaaaggggactagagaggggaatctggccctaaggcgacaagtggttacacaaggcaattgaacacacagcagaactttaaaacctgtaaaacaaactggagccttttttccctttaatcaaccttatatgtcnnnnnnnnnnnnnnnnnnnnnnnnnnnnnnnnnnnnnnnnnnnnnnnnnnnnnnnnnnnnacttcagttatgtggtatgttgcattttccagtttgttcaatgctttaaagctcaaggatgcctctgctttcaattgtacatgggcctgaagcatcctagcttttggcaagcaggcaggagactcaacaaaaatcaaaataggaacaaggcagactaaatgcagggcacatctgtaaacatattatacatttgaaaattacaatatcagtcaaagtgatacagtttacaggtgaaatgaaactatctggaactggcctaccacaagtttctgaacctggactgatacaataagttatttnnnnnnnnnnnnnnnnnnnnnnnnnnnaaaaaaagttttgtttacatcaagtggaattggcaatccatgcttatacttttaaaatctaagcagggcagaaatccagactaaaaaaatagttactctactctatgttgagtccaacagcttctttcatgaactacttgttttaaaagcctcaaataatcaacaaaacaagaaaacccatccatactacagtcactcaaaactggacatttctaggggtagagccaaagtagttactttctccccaaataccccaggggatccagtctacttttatcagaagactacaactctttatataaatgccctgatattttaacctgtatttgacatacatggatatactaatttctgtgtgtgtgatgtgatgctgtgtcaggccagacaacttgttattatgttactaacatcacccaatctcaattggacccttaatttatgcacacacacacaaaaatttattttagcatgctatacacaagctgcagtgcaacaggatggcaatgtaatgataagacagggctaatgctcttctctgccccaaagaaaatttccagaatttcacattattttcc

SEQ ID NO: 260383 - DNA, 898 bp, Homo Sapiens
ggaaccggcaggatgtcggaggtgcggctgccaccgctacgcgccctggacgactttgttctggggtcggcgcgtctggcggctccggatccatgcgacccgcagcgatggtgccaccgcgtcatcaacaacctcctctactaccaaaccaactaccttctctgcttcggcatcggcctcgctctcgccgggtacgtgcggccacttcatacgctcctgagcgcgctggtagtggcggtggccctcggcgtgctggtgtgggcagctgagacccgcgcagctgtgcgccgctgccgccgcagccaccctgcagcctgcctggccgcagtgcttgccgtcggcctcctggtgctctgggtcgcgggcggcgcttgcaccttcctgttcagcatcgccgggccggtgcttctgatcctggtgcacgcctcgttgcgcctgcgcaaccttaagaacaagattgagaacaagatcgagagcattggtctcaagcggacgccaatgggcctgctactagaggcactgggacaagagcaggaggctggatcctaggcccctgggatctgtacccaggacctggagaataccaccccacccccagcccataattgggacccagagccctttcccagcacttaaaacaggagcctagagccccctgcccaaacaaaacaggacatctgtgaccgccctacccccacgccagccccaaactaagatatccctcacacccagccccccattaccctaagggacaagaagtcttccccaacccttgaaccctagggacccaagaagccacctaacatcccagcccccaaaaaatggggggctttcaaggcccagaaacaatcccaatgggcccaaatttttcaaaaatttgtggaaaccccaaggaaaa

SEQ ID NO: 260384 - DNA, 1165 bp, Homo Sapiens
  misc_feature (937)..(937): n is a, c, g, or t
  misc_feature (1014)..(1014): n is a, c, g, or t
caacatgtttgagcaaggccacggcaagctcgatctgctcagagcctatcagatcctcaacagctacaagccacaggcaagtttgagccccagctacatagatctgactgagtgtccctacatgtggccctactgctcccagcccatctactatggaggaatgccgacagttgttaatgtcaccatcctcaacggcatgggagtcacaggaagaattgtagataagcctgactggcagccctatttgccacagaacggagacaacattgaagttgccttctcctactcctcggtcttatggccttggtcgggctacctggccatctccatttctgtgaccaagaaagcggcttcctgggaaggcattgctcagggccatgtcatgatcactgtggcttccccagcagagacagagtcaaaaaatggtgcagaacagacttcaacagtaaagctccccattaaggtgaagataattcctactcccccgcgaagcaagagagttctctgggatcagtaccacaacctccgctatccacctggctatttccccagggataatttaaggatgaagaatgaccctttagactggaatggtgatcacatccacaccaatttcagggatatgtaccagcatctgagaagcatgggctactttgtagaggtcctcggggcccccttcacgtgttttgatgccagtcagtatggcactttgctgatggtggacagtgaggaggagtacttccctgaagagatcgccaagctccggagggacgtggacaacggcctctcgctcgtcatcttcagtgactggtacaacacttctgttatgagaaaagtgaagttttatgatgaaaacacaaggcagtggtggatgccggataccggaggagctaacatcccagctctgaatgagctgctgtctgtgtgggaacatggnggttcagcgatggcctggtatgaaaggggagttcaccctggccaaccatgacatgtatttatgcgtcagggtgcagncatcgcgaagtttcccgaaagatggcgtcgtgataacacagactttcaaggaccaagggatggaagggttttaaagcaggaaacagccagttgtttgaaaacttcccccatttggggactttatcagaattcccacctgaagggttggagc

SEQ ID NO: 260385 - DNA, 1838 bp, Homo Sapiens
  misc_feature (57)..(70): n is a, c, g, or t
  misc_feature (257)..(257): n is a, c, g, or t
aggggaaaaggcccccgggttgcacttaaaggggggttttcaaagccaaggccctcnnnnnnnnnnnnnnccccccccaccagccccagggttttgccccagtttcgggttcccaaacaggggactccccagggccacccttccattaggccaactggacaggcagctggtgggggggccagactgaccccagggccccagctccccagctcctcccgccctggccctgcccacgcgccgggctctattcttgtggnctcattcattttccatgtctgacaccaggatgttcttctcagtggcctcggtggggctggagctgctgcggctgtagcgggcaccctcaaaggccccgcgctcgatgctctggcgcctccggtaaaggatgagggctgcggtcagcaaggccaggagcagcagcaccgccatcagcaccaccaccagggccgctgggttctctggaagcgctgatggggagaagctgctctgctcagcacgaggaagcttgcagacgacacccatggtgatgttggtgcaagcgccggggcgccatagcccgctgttgctctgaatccagtagcagctgttgtggctcagcatgctggggcccaagcccgggggcccccagttggagtagttcacagctgtgttgtcctgccagaccagagtgcctcctttggggttgaagttcatgcccagccaggcgccccgactctggccctcatagctctgcaggtgctcccagacaaacacattctccatctcatccaggatagacaggacggccccacccgctctctggcagcgctgtcgcgcctccttgtggcccagcagcagctccatgtggaaagaatagcagtgctcccggaagggaatccacgcggagtctgccagtccctggggacagctgccatggtagcttattcttcggggaggagggggcccactgctaaccccacacacagccccctgcagcttggtgtcacagctggtggtgcgccaggccccgttccacatcttacgtaggtacagccccccggctgctgcggctccccgtcctgccagcccacgtagttcagcggctcctctgagacccaggagtaccgccgagagccctcctcgccagccagcccaatccagagcggcgtgcgcagccctcgggcagcctgcgtgaggaaggcctgggtgtaggggtcgggcacgtaggccaggctggcattgtggctctcacacagcaggagggcatcgtgccagcgcagcggcttctgaagcagccggaaggtgccgttgaggtaggagagctcagtgcccggggcggggggcagcgctgctggggacgggctcagggaggggtccgtgcccttctggcagatgaagccatgggtctcctccgtgcagctccgatcgtcccagcggccagtgaagtgggctgaggggctgtgcaggaccaccgcacagctggtcggtttgttgccactgggagcagggctagggccagagggctccccaggtgcccagttggcatacatcaaaggctcctgctccacccactggaagtccctctgcgaggcatggaggccaatccaaaggtcaaaggtcacattgggcaggctggctgtgatgaatgcttgctctaaggggtttgtgatggtgaccagctgggcctcttgctgttcacaggagaactgtgcctctgaccacttcacccggctctggggttcctggccctggacctgaaaacacttgttgaggaactggatccagtcagaggggcagccccccagggctgtagttggcaggtctgggggctgcgtttcatcccggagaattccggaccg

SEQ ID NO: 260386 - DNA, 997 bp, Homo Sapiens
  misc_feature (983)..(983): n is a, c, g, or t
attcggcacgagggcaaagtggtttggccaaaagaaaaatcgcacagatgacagaagaagaacagtttgctctggctctcaaaatgagtgagcaggaagctagggaggtgaacagccaggaggaggaagaagaggagctcttgaggaaagccattgctgaaagcctgaatagttgccggccttctgatgcttccgctaccagatctcgacctctggccactggaccgtcttcccagtcccatcaagagaaaaccacagactctgggctcactgaaggcatatggcagctggtacctccatcactgtttaaaggctcacatatcagtcagggaaacgaggctgaggaaagagaggagccttgggaccacactgaaaaaactgaagaggagccggtctctggcagctcaggaagctgggaccagtcaagccagccagtgtttgagaatgtgaacgttaaatcttttgacagatgtactggccactcggctgagcacacacagtgtgggaagccacaggaaagtactgggaggggttctgcttttctcaaagctgtccagggtagcggggacacatctaggcactgtctacctaccctagcagatgccaaaggtctccaggacactgggggcactgtgaactatttctggggtattccattctgccctgatggagtagaccctaaccagtataccaaggtcattctctgccagttggaggtttatcaaaagagcctgaaaatggctcagaggcagctccttaataaaaaaggttttggggaaccagtgttacctagacctccttctctgatccagaatgaatgtggccaaggagagcaagctagtgagaaaatgaatgcatctcaaaagatatgggagatgaagacaaagaggagaggcaggagtctagggcatctgactggcactcaaaaacaaaggatttccaggaaaagctccattaaaagcctgaaagagaaaacttttggntggagggaagaacc

SEQ ID NO: 260387 - DNA, 982 bp, Homo Sapiens
  misc_feature (53)..(80): n is a, c, g, or t
tgtttgatatagtactcatcatcttggggtccagagtctagtcttgattggcnnnnnnnnnnnnnnnnnnnnnnnnnnnncttaagcattcgtttttggtgaataaggttttggaagatttgattaacatggttatgtctcaatttgttcatctaccaatgtggtattaaagttaattgtaggaatagcatgagaatttgctaatttgatgtcaagatccagagttttttattctaactggccatatattctgatagttacaactacgaactagtgtctataatatgctctgagaatcttgaagtaagttaaataattgcatatcaaagacaccaaaccagaatggaagaaaatttaaaacatctcagatagatatgctgaactatgtagatgtatggccttcaagtaagacaacgtagccttaaccacaaccaagtggtataggaagtctagatatttttaatgttgtatctttttttctggtttacagggaaagccagagagctgtgcagttactcctcgatttcccaaatcaaaagacgaaggatggtttttgatattaggagaagtggataagagagaacttattgctttgaaaagagtaggatatattcgaaatcatcatgttgcttccctttctttttatacccctgaaatacctggaaggtatatctacacattatatttcatgagtgactgctaccttggcctggaccagcagtatgacatctatctcaacgttacacaagcgagtctttctgcacaggtcaacaccaaggtctctgattccctgactgacctggcattaaagtaacttgacctgaacaatccatttgaaaggagtggctaagaattctctctgttcagtcatctagacaaatcgaattacttgatgtttgccttgaaagaatcaacttctaacctcaaccatccaggaaattgacagtggctgcagtattgactccagtgacataaagttaac

SEQ ID NO: 260388 - DNA, 1317 bp, Homo Sapiens
  misc_feature (888)..(888): n is a, c, g, or t
  misc_feature (913)..(913): n is a, c, g, or t
attacatctaagcaagatgcattggattatatcacctggacttactttttccgacgtcttatcatgaatcccagctattacaatttgggtgatgtgagccatgattctgtgaacaagtttctgtcccatctgattgagaagtccctgattgaattggaactttcctactgtattgaaattggagaggataatcgcagcattgaacctctaacttatggccgaattgcctcctattactatttgaagcatcaaacagttaaaatgttcaaggaccgcttgaagcctgaatgcagtactgaagaactgctttcaattctaagtgatgcagaagaatatacagatttgccagtgagacacaatgaagatcatatgaatagtgaactggcaaaatgtcttcccattgaatcaaatcctcattcatttgacagccctcacaccaaagcacatctcctgctacaggcacatctcagccgagccatgctaccctgcccagattatgacactgataccaaaacagtcttggaccaagctctcagagtatgtcaggcaatgctggacgtggctgcaaaccagggctggctggtgactgtcctgaatatcaccaacctgattcagatggtgatccagggtcggtggttaaaggactcttctcttcttacactaccaaacatagaaaaccatcatcttcaccttttcaagaaatggaagccgattatgaagggcccacatgctaggggtcggacctccatcgagtgccttcctgaactgatccatgcctgtggagggaaagaccatgtatttagctccatggtagaaagtgagctacatgctggcaaaaacgaaacaggcatgggaatttcttatctcacttgccagtgataaatgttnggcataagtgttaaaggctcgtggngattgacttagtttgaaggacataatgaactctctgtctcaactctgactgcagacaaacgagatgacaacaaatggatcaaattgcatgctgaccaagagtatgtgcttcaagtgagcttgcagagagtccactttgggttccacaagggaaagccagagagctgtgcagttactcctcgatttcccaaatcaaaagacgaaggatggtttttgatattaggagaagtggataagagagaacttattgctttgaaaagagtaggatatattcgaaatcatcatgttgcttccctttctttttatacccctgaaatacctggaaggtatatctacacattatatttcatgagtgactgctaccttggcctggaccagcagtatgacatctatctcaacgttaca

SEQ ID NO: 260389 - DNA, 772 bp, Homo Sapiens
  misc_feature (484)..(484): n is a, c, g, or t
  misc_feature (698)..(698): n is a, c, g, or t
agaaatagtaaacttgcagctgcccctaatgcagcatatttttcttaccaaaggagtcttcagccctataaaaggattcctctatagtgtatttctctagtgtatttagtgtgtcgtcaaaattttgatttatacagagctttcaagaacacacaatgcaaagtgagcgcagcatagctgttaacaaacatacaacttttttctagggctttaagggtggtcatttttttcaagttctctcaagtgtcccaaatcagggtagcaatcttgttgccacatgtgcagcaaacaaagtggaagtatagatcttcttctcccttagggaggctcttgaaggagcaggaggtacagtactgggtagcagtctggccctcctgtcgtctggttggtgttggggcctccagccagggccctctaggggaaccaagcctctgctctccacctgtgggttcttgcccatcagggtaattgtattgagaactcnaaatatacgtgcacttacatgtgtggttcgtactcaagtgatctattatctagctgcaaagcctggctttgatttgaaattttgtaaaaatttcatggcacccaaggtttctgattctgacccagcagtggtcctgaagagagctaatggcaagtcttgtagtcattttgattttaattgaagggtgagcataaccttgtgaaccagcactagnttgttccaagctggaatttatctaatctatttttgtgtttaaaaaagctgtacctaccaaataaataaatagtt

SEQ ID NO: 260390 - DNA, 1005 bp, Homo Sapiens
gaaaatagaagcaactggagtgatacaatcttgtgccaaagaggctaaaaggattcttgaagatcatggctcacctgctggagagattgatgatgaagacaaagacaaggatgaaactgaaacagttaagcagactcaaacatctgaggtgtatgatggtcccaaaaatgtaagatctgatatttctgatcaagaggaagatgaagaaagtgaaggatgtccagtgtctattaatttgtctaaagctgaaactcaggctttaactaattatggaagtggagaagatgaaaatgaggatgaagaaatggaagaatttgaagaaggccctgtggatgtccagacttccctccaggctaacactgaagctactgaagaaaatgaacatgatgaacaggtcctacaacgtgactttaaaaagacagcagaaagcaaaaatgtcccattggaacgagaagccactagtaaaaatgaccaaaataactgtcctgtgaaaccctgttacctcaatatcttggaagatgagcaacctttaaatagtgctgcccataaggagtcacctcctactgttgattcaactcaacagcctaaccctttgccgttacgtttacctgaaatggaacccttagtgcctagagtcaaagaagttaaatctgctcaggaaactcctgaaagctctctggctggaagtcctgatactgaatctccagtgttagtgaatgactatgaagcagaatctggtaatataagtcaaaagtctgatgaagaagattttgtaaaagttgaagatttaccactgaaactgacaatatattcagaggcagatctaagaaagaaaatggtagaagaagaacagaaaaaccatttatctggtgaaatatgtgaaatgcagaccgaagaattagctggaaattctgagacactaaaagaacctgaaacggtgggagcccagagtatatgagatgtcttcagaggctcatctaactctgtccttacatactcaatgca

SEQ ID NO: 260391 - DNA, 946 bp, Homo Sapiens
  misc_feature (601)..(616): n is a, c, g, or t
  misc_feature (833)..(833): n is a, c, g, or t
gatgtttgttctcaaggacttatcccctacaatattctcccactccatacttctccttctaccccaccatgtgctcccgtgcactcctcagatggtcagaggggtaacccaagtccttagagaatttggggaccaatagaatatgtgatgtgtgaattttctttaaaaaacttaaggagtctttgctaccttctgcttgttgagttgttttggcattcatattaaaagccagcatctcactatttattgacaggttgggctgtgtgtgtgcgcatgtgtgtatacatttccaggcgtgcctgtgtcctgtagctttttaaaaggaaacccagtcatcccactatgaatctggcatcttcttatgcttctagtgttttggccatacatcaaccaaggggtttaatttatccaatgcttgacgacatgttcaggaggggctggatcaaattttgagagggttatgggaaagggagggggagaagaaattgacatttattttattatttattttaaatgtttacatcttctttatgttgtatcaagcctgaatagaaactgatagcattaaaatactccgttcctctctctcttctcgcttccnnnnnnnnnnnnnnnnaaatttaggataacacatttttgtttctaaagtgatttgtgatttgtgctgtataaactgtataaaaggttctgtttttaaaggtggattttcattcctctggggacagtggtcgccaagacatctacattgtaagagaacacagtggaagatcctgtcctgattctcaaaaattattttctctgtatgattaaaagtttattccatttattttagnttgggtttacttgattttggagaaaaaaatatttgactttgtgtaaagagtaagggatcagggtgtccttttcttgcggggggagatgtgaatatatataggaattttggcgg

SEQ ID NO: 260392 - DNA, 671 bp, Homo Sapiens
caaatgatgacaagtatgtgatagatggtaaaatgtatgagctttccctgaggccaatagaggggaatgtcaggcttcctgtgaactctttccagacgccaacatttcagccccacggctgtctctgcctttacaattcaaaggaatcgctatcctatgtagtggaaagtatagagaagagtagagagtccacgctgggccggcgggataatcatttagtccatctcccccttacattaattttggttaacaagagaggagacaccagtggagagactctgcatagcttaatacagcaaggtcaacaaattgctagcaaacttcagtgtgtctttctcgaccctgcttctgctggcattggttacggacgcaacattaatgaaaagcaaatcagtcaagttttgaagggactcctggactctaagcgtaacttaaacctggtcagttctactgctagcatcaaagatttggctgatgttgatctgcgaattgttatgtgtctgatgtgtggagatccttttagtgcagatgacatactttttcctgtccttcagtcccaaacctgtaaatcttcccattgtggaagcaacaactctgttttacttgaactaccaatcggactgcacaagaagcggattgaactgtctgttctttcataccattcctccttt

SEQ ID NO: 260393 - DNA, 1602 bp, Homo Sapiens
  misc_feature (1582)..(1582): n is a, c, g, or t
gatcatgtcatgtttcgcatgggattattagctgtcctgaggtcaaaacagacaaaatccactataggagtcatggtaacagcgtcccacaatcctgaggaagacaatggtgtaaaattggttgatcctttgggtgaaatgttggcaccatcctgggaggaacatgccacctgtttagcaaatgctgaggaacaagatatgcagagagtgcttattgacatcagcgagaaagaagctgtgaatctgcaacaagatgcctttgtagttattggtagagataccaggcccagcagtgagaaactttcacaatctgtaatagatggtgtgactgttctaggaggtcaattccatgattatggcttgttaacaacaccccagctgcactacatggtgtattgtcgaaacacgggtggccgatatggaaaggcaactatagaaggttactaccagaaactctctaaggcttttgtggaactcaccaaacaggcttcttgcagtggagatgaatacagatcacttaaggttgactgtgcaaatggcataggggccctgaagctaagggaaatggaacactacttctcacagggcctgtcagttcagctgtttaatgatgggtccaagggcaaactcaatcatttatgtggagctgactttgtgaaaagtcatcagaaacctccacagggaatggaaattaagtccaatgaaagatgctgttcttttgatggagatgcagacagaattgtttattactaccatgatgcagatggccactttcatctcatagatggagacaagatagcaacgttaattagcagtttccttaaagagctcctggtggagattggagaaagtttgaatattggtgttgtacaaactgcatatgcaaatggaagttcaacacggtatcttgaagaagttatgaaggtacctgtctattgcactaagactggtgtaaaacatttgcaccacaaggctcaagagtttgacattggagtttattttgaagcaaatgggcatggcactgcactgattagtacagctgttgaaatgaagataaaacaatcagcagaacaactggaagataagaaaagaaaagctgctaagatgcttaaaaacattattgacttgtttaaccaggcagctggtgatgctatttctgacatgctggtgattgaagcaatcttggctctgaagggcttgactgtacaacagtgggatgctctctatacagatcttccaaacagacaacttaaagttcaggttgcagacaggagagttattagcactaccaatgctgaaagacaagcagttacacccccaggattacaggaggcaatcaatgacctggtgaagaagtacaagctttctcgagcttttgtccggccctctggtacagaagatgtcgtccgagtatatgcagaagcagactcacaagaaagtgcagatcaccttgcacatgaagtgagcttggcagtatttcagctggctggaggaattggagaaaggccccaaccaggtttctgaagataattttcatattcctgagaaactgggactttttacaagtctttacaaaactgtncaattattatgggcagtact

SEQ ID NO: 260394 - DNA, 604 bp, Homo Sapiens
gaaagattcatgaaccaaggagacagttctgcattgatcacacatgatcatactagttagttcaccaccaaagatgcggtcaacaaaacttggcattgattttttcttctcataatctttaactttattttttagttcttcatccaacttttcagtagaattaccaaatgctttaagtattcctttactcactctttggtgttcttctgctctcatcccatccaataagtagcgaagcagctcctggctgtcttgctgctgatagcctttaaaccgcactgcttttttacagacctgagaaaagagttctttcggtgtcacaaccccctttttggtctcttgcatctcattaagaaactggctcatggctaaagtaagagggcctggaggctcaaggtttatttctaatggttctgttaatgccaaatcaggtggttcaatttttacaattgttccagacattttcacttcttttagtagttctctaagcactggtgtttgtgacaagttctgcataactgcattgaagaaacatgtgtttcccaaattactgagtcctttcacggttatttggcaaggagaattcatgggaggattctcttta

SEQ ID NO: 260395 - DNA, 434 bp, Homo Sapiens
  misc_feature (163)..(183): n is a, c, g, or t
  misc_feature (197)..(197): n is a, c, g, or t
  misc_feature (260)..(261): n is a, c, g, or t
taattgataacacagaaaagaaagtaccatcaaagactgtggagtcattgagggtctgtgtgtcctcaccgagagggacctggtgtgcccgccgggtcgatcttcccacgtgttagggtttatttttatacaacacatcttttgacactttaaggtgggtggnnnnnnnnnnnnnnnnnnnnncgcgcgtccccatngttggtaaaggttttatgttgctgttatttatttacgaacttcagatacgtttttatgtattnntcattccttcctggagcttcctaaaaattgataagcatctgcactgaaatataatttaacagcaaaagtaaaaaaggattgaaagttgtaaattcctcatatcactacagtgacgattattctagaaatcgttgccttgtgtagcaaagaccaaataaaatagatttcagaca

SEQ ID NO: 260396 - DNA, 783 bp, Homo Sapiens
ggggcattaactggttggtagcttctatcctgggggctgagcgactgcgggccagctcttcccctactccctctcggctccttgtggcccaaaggcctaaccggggtccggcggtctggcctagggatcttccccgttgcccctttggggcgggatggctgcggaagaagaagacgaggtggagtgggtagtggagagcatcgcggggttcctgcgaggcccagactggtccatccccatcttggactttgtggaacagaaatgtgaagtttttgatgatgaagaagaaagcaaattgacctatacagagattcatcaggaatacaaagaactagttgaaaagctgttagaaggttacctcaaagaaattggaattaatgaagatcaatttcaagaagcatgcacttctcctcttgcaaagacccatacatcacaggccattttgcaacctgtgttggcagcagaagattttactatctttaaagcaatgatggtccagaaaaacattgaaatgcagctgcaagccattcgaataattcaagagagaaatggtgtattacctgactgcttaaccgatggctctgatgtggtcagtgaccttgaacacgaagagatgaaaatcctgagggaagttcttagaaaatcaaaagaggaatatgaccaggaagaagaaaggaagaggaaaaaacaggtgcctacagaacatataacagaattatcagaggctaaaacagaagagcccacagtgcattccagtgaagctgcaataatgaataattccca

SEQ ID NO: 260397 - DNA, 1180 bp, Homo Sapiens
  misc_feature (18)..(18): n is a, c, g, or t
  misc_feature (40)..(40): n is a, c, g, or t
ttttgccaatgttaacancaagggcccaaaggaagccccngagttgtctttggttgtggggaacagagggtaactgttccatgaaaatagtgagtgtctgaagatttaagaaaatcatgctgcagccagaggagaagggagaggaagacaggaagggaaaggagatgcctgagggtcaaaagctgagcccaagcctaagcccaagctcaagctcaagccccagcatggcataattttgtgaattaactcaggctgagttgcctccagtctttggaatgtcatcttatactggtactgctgaggcagagggcagtaattggtgctttgggataggagaaggggcagttgctgaaatacaaaattaatagcatcccaagttcctcaattgcagccaaaatacatgtgttcgggcctttcggcagtatcgcccccagaactacctgctgtagtgtggtccattcccagacagcaacatgcaagaataagtttacaatacactcagcccttctggcttcagatcaggggctcagaggctgtgacaactcatgatgctgaaaatgtatccagtgaaaatgaagtactagctctctgcttcattaaaagctcttggaaagaatattaaatctcaagacaacaaaataattgaacacacaatacatttgtgtctttgtatccaatatattacctttgtcttattaacaaaaattatatctctcattatatatttcttggatctgaagtttttattcacactcagtaatttctgtaaaggacaaatctgtctctattttccatatcatttagaaatataccacattcactctttttgatgtgaactttcccaggaaaattctcttgtgcccatttagttttagaagagtgtcattttgtgctattatgtcaatatcctgttttatttccattatgtttttcaaaaaccgaagaaaataaggtttttcttaaaaagttagacattttctcttgttaattctgtatcctgttatttacagctgaagagaaactattttaacttaagtgtaaaatggtttagaatagcaaatgatacagtccactcagagtttacaaaaaaaacatttaccaggtagacacttaataaataaaacaagcacttggaaaaagttctttgaaaacagacctagggacatccacctgcatcttt

SEQ ID NO: 260398 - DNA, 731 bp, Homo Sapiens
atcttatcaatagtatttaatgttttgaagaaatagaccagtgtacaaagggatagggaattcatttctgttaatgtatttattagttcttactaggagaagaaatgtaactattctcttcaaaaccgttaaaaatcaagcactgaggcagccacaccatcgtttgctccctatgttccgatatccttaagatgagctcaaagaaaaattaaatcttgattcagggtaaaagtttctgctaatccagttcttttatcataaccatgaaaaaaatcactgaaaattactttatacaagttatgcagctcagaatttttcttgatatttgatcattttgaaatatgactaagcttctgctagagcctctaaaccaatctcttgacttcatcttctctttcattctgcaaccaaacctgattaatcttctcaaagtacaactccagtcatattgcttcccaggttaaaaggtgtcattaatgcctcaatatgaaaggaagtctctacccagaatctacctagaaatcaaagtcctttgtaatttagaaccacctttgagaggatggtattttataattgaagcaaaatacaacgcatatgttttctctttttccaaatagatctgtgtttttgctgctccataactctgttcactgcaagtgtcttcctgtggaaatcctagctgcacttaaacagcacttgatttcaattgcacatttcttgttgaaaatact

SEQ ID NO: 260399 - DNA, 1105 bp, Homo Sapiens
aagaaacccatgtcagcaagtgctctttttgttcaagatcatcgtcctcagtttctcatagaaaatcctaagactagtttagaggatgcaacactacaaattgaagaactgtggaagacattgagtgaagaggaaaaactgaaatatgaagagaaggctactaaagacttggaacgatacaatagtcaaatgaagagagccattgaacaggagtcacaaatgtcactaaaagatggcagaaaaaagataaaacccaccagcgcatggaatttggcccagaagcacaagttaaaaacctcattatctaatcaaccaaaacttgatgaactccttcagtcccaaatggaaaaaagaaggagtcaaaatattaaaatggtacagatccccttttctatgaaaaacttaaaaataaattttaagaaacaaaacaaagttgacttagaagagaaggatgaaccttgcttgatccacaatctcaggtttcctgatgcatggctaatgacatccaaaacagaggtaatgttattaaatccatatagagtagaagaagccctgctatttaaaagacttcttgagaatcataaacttcctgcagagccactggaaaagccaattatgttaacagagagtctttttaatggatctcattatttagacgttttatataaaatgacagcagatgaccaaagatacagtggatcaacttacctgtctgatcctcgtcttacagcgaatggtttcaagataaaattgataccaggagtttcaattactgaaaattacttggaaatagaaggaatggctaattgtctcccattctatggagtagcagatttaaaagaaattcttaatgctatattaaacagaaatgcaaaggaagtttatgaatgtagacctcgcaaagtgataagttatttagagggagaagcagtgcgtctatccagacaattacccatgtacttatcaaaagaggacatccaagacattatctacagaatgaagcaccagtttggaaatgaaattaaagagtgtgttcatggtcgcccattttttcatcatttaacctatcttccagaaactacatgattaaatatgtttaagaaga

SEQ ID NO: 260400 - DNA, 532 bp, Homo Sapiens
ccagagtggccaaatgaagtactttgtcaaataaaacgaggatgggaacaactgagtcaactgcagcggccctggaccctgtgcgactctagatagatcgttcttaacacgcatttcacagactgctttttcattttagaaaaaaagtcaaacagaagtaacatttctagttgccgaagtgtctgcttcatggtgctgaacgtgtcaggcccagtgcagcatgaatgtgaagtgaacccactgaaaagtgatttttaatgttctccagcaaacttcactcctgtttcatgttcactggtatttggtgcatttgcttgtaatacagttttttataactttactgttttgtaaatgctagtagtttacattaaattgccttatatttttaatgatttaatgttatgatatcatgaaagaaccaagaatctagtaatttatcagttttgtggaaaagcagttttaatttttagcctaccatgtgtacaaaatctacttcataagaagttatataaataaaataggtttgtagtat

SEQ ID NO: 260401 - DNA, 157 bp, Homo Sapiens
aaataacaaaaaaagaaaggaggtgagaaatggcagataaaaatagacctagcacaccacacaataatccaaatggtgctggttatccatctactactggaaatcgatctggaacaggaagaggaaacaacaatccaagaagataattttatatctt

SEQ ID NO: 260402 - DNA, 1083 bp, Homo Sapiens
  misc_feature (89)..(89): n is a, c, g, or t
  misc_feature (572)..(582): n is a, c, g, or t
cacctgaaaagttttcttatcttctgtgcttttggtccctggaaacaaacccgccctatgtatgaagcctagttgatttcccagttgcnactatttcccagttgccctctgaagttccacaggcaatacattgtcctagtcctttgcgaatttctctgatttgtgggcacagttatgaagtttccccacatgtgaagacaggtacaaaatagcagagccaagcagacagtgggtctattcttcattagctcagtgacttgtccacactcgtcttagcacttacgtttcaaaagcttgtcacaaacccttggagtcattcccagataatagaactggaaatgataaatcccctaatgccaagggtctagtgtgttcttagtggttatactgggaagtgtgtggagatttaggtgctgctctgctgctctggatggctgaaggctcctgggccatcttcatgtgctgcttgaagagctcctattttgtactcctggctagaatgctgtggaacaaatacaaagtgaaaaaagttctctgtagatttctgaagtgcatattcattgatgccaagnnnnnnnnnnngttgcctttttgaagtgatgttttttgctgtcttcttaaacacaaggcttttttgaatgattagtatatttcatggtaaagaaaacagcctgtctggctcaaagcaattaaatagaatgtaatggtgagtacaaatgagtgcacatgtcaggactcaggtctaactccttgtctcctgagcctaaagattgcaacatacacaagaacacactcctattcctaccccacacactcagggacaagcccaactaaagcttacaaggagaccagggtggctctgtccaggggagaagccagttatggaacagtgcattgagagccatggtaggagaggcccacagttctctggagcatgcagcaggggcaccccacctggccttgaggatcagggggagtcaaaggataaagcatggggctgatgacgtctgagggagtgtgatcctccatgtatggcctctgcctgctgtctcacatgtcccttctggtggtcacttgggctct

SEQ ID NO: 260403 - DNA, 922 bp, Homo Sapiens
ccaaggcgccgaggtttctcttctgggaatacacagcttaagggccccatttttccttatgccctaattgaggcccgccgcgcccaaaacgaaagggttttagaaaaaatttttcgagggcggaaggcggccccccaaaaccttggaggggtgcgcgataacatgggttacaagttcaaaaaaggcacctttttctttgtctgggcatcaacgaatatgcacttcagaatttgaccagagaacttttttcactttggtatttgttccacagcattttagccaggaatacaaaataggagctcttcaagcagcacatgaagatggcccagagccttcagccatccagagcagcagagcagcacctaaatctccacacacttctcagtataaccactaagatcacactaggcccttggcattaggggatttatcatttccagttctattatctgggaaggactccaagggtttgtgacaagcttttgaaacgtaagtgctaagacgagtgtggacaagtcactgagctaatgaagaatagacccactgtctgcttggctctgctattttgtacctgtcttcacatgtggggaaacttcataactgtgccccacaaatcagagaaattcgcaaaggactagacaatgtattgcctgtgaacttcagaggcaactggaaatagtgcaactggaaatcaactagcttcatacataggcggatttgtttccagggaccaaaagcacagaagataagaaaacttttcaggtgatggccatattctcatcatatcctctctgtgtggagtctgcctgttgtcacaaaaaccttgaccctacatcaagttacaccttaacaaagggaagatacaggcatcagataaaaggtacttgtttgaaaggcagccataagggagaactgaacttaa

SEQ ID NO: 260404 - DNA, 608 bp, Homo Sapiens
gaatgtggaaaggcattctcttggctcacttgccttctacgacatgaaagaattcacactggagagaaaccctatgaatgtctacaatgtggtaaagccttcactcgttcccgtttccttcgaggacatgaaaaaactcacactggagagaagctgtatgaatgtaaggaatgtgggaaagcattgagttctctccgttccttgcatagacataaaaggactcactggaaagatactctctaaatgtatggaatgtgggaaaacattcagtactttaatttcagaaacttgaaagaactcactttggagatagaccctatgaatgtaaacatgggataaagccttaagtagtttcaatttttttaaatacagttatcccccaatatattgcaggggattggttccagcaccctctaaatccacagatgccaagtcctttgttatatggcatatttgcatgtaacctatgcatatcttccagtatactgtgtaaatcatctctagatgacttttaatacctcatgcattgtaaaagctatgtaaatagttgtttgattgtattgtttagagaatcatgacaagaaaaatagtctctacatgttcgatgc

SEQ ID NO: 260405 - DNA, 774 bp, Homo Sapiens
gtataaaaacagatccatttcttggtaatcaaagcacatttgtttggtcttcctccaaccctttgcatttgatttctaaacattccttcatatgcctttaatgaaagccagcaattatcccatgggccctacttgaatttatctgaggcagctacagattgccctgcaagatgagtttttggagataaatgaaataactggacacacactcacacaagtaacaccacagcagacctcggagtactgctaagtgtacctgtgtcaaatccgcacaggactcaatatagcaatttattcttgatgtatgcaattgcacattgtaattatattaacagagcacactaataatttgtatagattatatatattagatcttgggtatggtttttaccttctcccatggggaacttcttccttcctgatgtggaattgtacatttaaagcttggtcggtgacctttgcataccatcaacgagcacagctaagaacagagtgagagaggcccatggctgattttaccatgtgcccagattaatgtatatagttgattggaatgaggttttatgaatattcatgtttttgaaggcctttaatttctgtctgcatattagcttttaatgtgtgattttaagagagaatactttgacacctgtaaaaatcaaaatactactctttataagacatttcacaaatattcacttacattacaggctggaagtattttattcatatgtatatttataccaataaaatgattttacaagtggaaaaaaa

SEQ ID NO: 260406 - DNA, 833 bp, Homo Sapiens
  misc_feature (116)..(125): n is a, c, g, or t
  misc_feature (701)..(735): n is a, c, g, or t
ctgatatgaatgcattgcctcaaaggtgatgtcatcttaatttttattcactttaaataactacatttttgtttataactaagtttggagggatcctaagagcatttttgtgggtnnnnnnnnnncctgtggacataatgaattttgagacattgattggtgaggcttttatttcccttgaggagtctcttgtacctagcatacatgatagctccttgttgggaagataacaagaaggatctttgaatactctattgctgatataatgcaagatttaaatttatacatataactaatttcaaatgtaattatcacactatgttaaaattacttttttcccttagataattcaaatttctccacttgcttgagattatatcatttctttttcaattatactattatttctgagaatgaaatggacgattacacttagaaaatgagtaatagtgtttaataagtcagtgattatatgtgtgctcaaataagtgttatgtatcagctagatactgagctttgatagaataattttcttttgattattcatgatgtgtcatctctgaccttgtttcagcaaagtaaacagcactccccaccccaccctcctttttttactcatcttggaaaaggttagtctttcagtacacgttactggtaagtagtttccaagttacgtgttgtcactgggttgaagtatattnnnnnnnnnnnnnnnnnnnnnnnnnnnnnnnnnnnaaccataaactatattcatatctgtttcatttggaggattttcttctttgtaatgtaaagaaattaaagttatcaaagttccttaaatgtgttagttt

SEQ ID NO: 260407 - DNA, 665 bp, Homo Sapiens
  misc_feature (292)..(320): n is a, c, g, or t
gagaatgaaatggacgattacacttagaaaatgagtaatactgtttaataagtcagtgattatatgtgtgctcaaataagtgttatgtatcagctagatactgagctttgatagaataattttcttttgattattcatgatgtgtcatctctgaccttgtttcagcaaagtaaacagcactccccaccccaccctcctttttttactcatcttggaaaaagttagtctttcagtacacgttgctggtaagtagtttccaagttacgtgttgtcactgggttgaagtatattnnnnnnnnnnnnnnnnnnnnnnnnnnnnnaaccataaactatattcatatctgtttcatttggaggattttcttctttgtaatgtaaagaaattcaaagttatcaaagttccttaaatgtgttagtttagattctttatgtgcctttcatgaaagatatgttttcattaattttactggtggacctgtaatatccacattgtgaagctgtgtatgaaattcaactataatatgaataaatttgaatcatgagaattatgggttaaaaagccacaaagaagcacatattggtgaccatcattaatgaaatcctgaactttattctgtgtaattgtgttaataaatcctaataaatttaaatttttaaaattttac

SEQ ID NO: 260408 - DNA, 870 bp, Homo Sapiens
  misc_feature (555)..(571): n is a, c, g, or t
  misc_feature (573)..(747): n is a, c, g, or t
  misc_feature (765)..(765): n is a, c, g, or t
  misc_feature (816)..(816): n is a, c, g, or t
  misc_feature (823)..(823): n is a, c, g, or t
  misc_feature (840)..(840): n is a, c, g, or t
ccccttacaaattcaaaggactagaataatgatagtcatctggaaaaagtaaatcatgaatggctataattttgaaactgatgcttaatgatggcagtgatttttaagtgtggtaacaaacgttttgggagcatgtatcctctgtcaagatggtactagtaacagattcaaagtagtaccatatcgtatcagactgatgtgggggtttttatgtttgacatcagttggtgagcctgttgttccttagtaaattgatgccataagctaaagttaacatattcatattttccctgccaatagtccttcataaatacctggtcataaactgaaaaaaaagtaatatctgcaatataaatgtgttgtctattagagacggggctagatgtcttaaggatttctaagtacatcttaaaatttataatatagtcgttcataccaagaatcatctggggaattttaacaaaatatgtatatgttctaaacctcatcactaccccataaatgcagcttaggtctgtaagtctgaaggagtatgtgtatctatctgggtgttgnnnnnnnnnnnnnnnnngnnnnnnnnnnnnnnnnnnnnnnnnnnnnnnnnnnnnnnnnnnnnnnnnnnnnnnnnnnnnnnnnnnnnnnnnnnnnnnnnnnnnnnnnnnnnnnnnnnnnnnnnnnnnnnnnnnnnnnnnnnnnnnnnnnnnnnnnnnnnnnnnnnnnnnnnnnnnnnnnnnnnnnnnnnnnnnncaccttctgcagaggatnggggcaaggaaggaaacaaatgggatttttttctttcaggcccacagtgtnaaaacantagggaactgttatttnctacttacaagttacgggttttaaatagtt

SEQ ID NO: 260409 - DNA, 1058 bp, Homo Sapiens
  misc_feature (993)..(993): n is a, c, g, or t
  misc_feature (1016)..(1016): n is a, c, g, or t
  misc_feature (1041)..(1041): n is a, c, g, or t
gtagcgaggcctgggtggcgaattcggcacgagggctccttccctgactgcagcgccaattacagcaaagcctggaagcttgacgcgcacctgtgcaagcacacgggggagagaccatttgtttgtgactatgaagggtgtggcaaggccttcatcagggactaccatctgagccgccacattctgactcacacaggagaaaagccgtttgtttgtgcagccaatggctgtgatcaaaaattcaacacaaaatcaaacttgaagaaacattttgaacgcaaacatgaaaatcaacaaaaacaatatatatgcagttttgaagactgtaagaagacctttaagaaacatcagcagctgaaaatccatcagtgccagcataccaatgaacctctattcaagtgtacccaggaaggatgtgggaaacactttgcatcacccagcaagctgaaacgacatgccaaggcccacgagggctatgtatgtcaaaaaggatgttcctttgtggcaaaaacatggacggaacttctgaaacatgtgagagaaacccataaagaggaaatactatgtgaagtatgccggaaaacatttaaacgcaaagattaccttaagcaacacatgaaaactcatgccccagaaagggatgtatgtcgctgtccaagagaaggctgtggaagaacctatacaactgtgtttaatctccaaagccatatcctctccttccatgaggaaagccgcccttttgtgtgtgaacatgctggctgtggcaaaacatttgcaatgaaacaaagtctcactaggcatgctgttgtacatgatcctgacaagaagaaaatgaagctcaaagtcaaaaaatctcgtgaaaaacggagtttggccctctcatctcagtgggatatatcccctcccaaaaggaaacaagggccaaggctcatcctttgttgttccaaaacgggggagttcaccccaactgttgttggggaaggacaagatggntttttcggacagtttgccgttanttacccttgggttaaggacttgcantgttttgtttttaaggg

SEQ ID NO: 260410 - DNA, 1430 bp, Homo Sapiens
  misc_feature (1279)..(1288): n is a, c, g, or t
  misc_feature (1292)..(1295): n is a, c, g, or t
  misc_feature (1297)..(1297): n is a, c, g, or t
  misc_feature (1302)..(1306): n is a, c, g, or t
ggggagccgtgggccgggcgcgccggttcccggcacgtgtctcggcacgtggcagcgcgcctggccctgggcttggaggcgccggcgccctggatccgccggccgtggtcgccgagtcggtgtcgtccttgaccatcgccgacgcgttcattgcagccggcgagagctcagctccgaccccgccgcgccccgcgcttcccaggaggttcatctgctccttccctgactgcagcgccaattacagcaaagcctggaagcttgacgcgcacctgtgcaagcacacgggggagagaccatttgtttgtgactatgaagggtgtggcaaggccttcatcagggactaccatctgagccgccacattctgactcacacaggagaaaagccgtttgtttgtgcagccaatggctgtgatcaaaaattcaacacaaaatcaaacttgaagaaacattttgaacgcaaacatgaaaatcaacaaaaacaatatatatgcagttttgaagactgtaagaagacctttaagaaacatcagcagctgaaaatccatcagtgccagcataccaatgaacctctattcaagtgtacccaggaaggatgtgggaaacactttgcatcacccagcaagctgaaacgacatgccaaggcccacgagggctatgtatgtcaaaaaggatgttcctttgtggcaaaaacatggacggaacttctgaaacatgtgagagaaacccataaagaggaaatactatgtgaagtatgccggaaaacatttaaacgcaaagattaccttaagcaacacatgaaaactcatgccccagaaagggatgtatgtcgctgtccaagagaaggctgtggaagaacctatacaactgtgtttaatctccaaagccatatcctctccttccatgaggaaagccgcccttttgtgtgtgaacatgctggctgtggcaaaacatttgcaatgaaacaaagtctcactaggcatgctgttgtacatgatcctgacaagaagaaaatgaagctcaaagtcaaaaaatctcgtgaaaaacggagtttggcctctcatctcagtggatatatccctcccaaaaggaaacaagggcaaggcttatctttgtgtcaaaacggagagtcacccaactgtgtggaagacaagatgctctcgacagttgcagtacttacccttggctaagaactgcactgctttgtttaaaggactgcagaccaaggagcgagctttctctcagagcatgcttttctttattaaaattactgatgcagaannnnnnnnnncccnnnncnaccannnnnaaaaaaactcgaggcatctatgtcgggtgcggagaaagaaggtaatgaaattggcacatggctcataactgtttcctgaacccagctttcttgtaaaaaaggggaaaatctgccgggtctcccc

SEQ ID NO: 260411 - DNA, 756 bp, Homo Sapiens
  misc_feature (446)..(503): n is a, c, g, or t
  misc_feature (551)..(632): n is a, c, g, or t
tcgagctcttagttccaaaggattaaaatcccagttaatagcccgattgacaaaacagcttaaagtagaggaacaaaaagaagaacagaaggagttagagaaatctgaaaaagaagaggatgaggatgatgataggaaatctgaagacgataaagaggaagaagaaaggaaacgtcaagaggaaatagaacgccagcgtcgagaaagaagatatattttgcctgatgaaccggccatcattgtacatccaaattgggctgcaaaaagtggcaagtttgattgtagcatcatgtctttgagtgtcctattggactacagattagaggataataaagaacattcatttgaggtttcattgtttgcggaacttttcaacgaaatgcttcaaagagattttggtgtccgtatatacaaatcattactgtctcttcctgagaaagaggacnnnnnnnnnnnnnnnnnnnnnnnnnnnnnnnnnnnnnnnnnnnnnnnnnnnnnnnnnngagatgatgaaactgatgaaccaaaacccaaacggagaaaatcaggcnnnnnnnnnnnnnnnnnnnnnnnnnnnnnnnnnnnnnnnnnnnnnnnnnnnnnnnnnnnnnnnnnnnnnnnnnnnnnnnnnnctgaagaagataacaatcaagatgaatatgaccctatggaagcagaagaagctgaggatgaagaagatgatagggatgaggaagaaatgaccaaacgagatgacaaaagagatatcaacagata

SEQ ID NO: 260412 - DNA, 1884 bp, Homo Sapiens
  misc_feature (105)..(188): n is a, c, g, or t
  misc_feature (225)..(285): n is a, c, g, or t
  misc_feature (1588)..(1622): n is a, c, g, or t
  misc_feature (1809)..(1809): n is a, c, g, or t
tggtaccggctccggaattcccgggatatcgtcgacccacgcgtccgagagattttggtgtccgtatatacaaatcattactgtctcttcctgagaaagaggacnnnnnnnnnnnnnnnnnnnnnnnnnnnnnnnnnnnnnnnnnnnnnnnnnnnnnnnnnnnnnnnnnnnnnnnnnnnnnnnnnnnncccaaacggagaaaatcaggcgatgataaagataaannnnnnnnnnnnnnnnnnnnnnnnnnnnnnnnnnnnnnnnnnnnnnnnnnnnnnnnnnnnnatgaaactgaagaagataacaatcaagatgaatatgaccctatggaagcagaagaagctgaggatgaagaagatgatagggatgaggaagaaatgaccaaacgagatgacaaaagagatatcaacagatactgcaaggagaggccctctaaagataaggaaaaagaaaagactcaaatgatcacaattaacagagatctgttaatggcttttgtttattttgatcaaagtcattgtggttaccttcttgaaaaggatttggaagaaatactttatactcttggactacatctttctcgggctcaggtaaagaagcttcttaataaagtagtgctccgtgaatcttgcttttaccggaaattaacagacacctcaaaagatgaagagaaccatgaagagtctgagtcattgcaggaagatatgctaggaaacagattattacttccaacaccaacagtaaagcaggaatcaaaggatgtggaagaaaatgttggcctcattgtgtacaatggtgcaatggtagatgtaggaagcctcttgcaaaaattggaaaagagcgaaaaagtaagagctgaggtagaacagaagctgcagttactagaagaaaaaacagatgaagatgaaaaaaccatattaaatttggagaattccaacaaaagcctctctggtgaactcagagaagttaaaaaggaccttagtcagttacaagaaaacttaaagatttcggaaaacatgaatttacaatttgaaaaccaaatgaataagacaatcagaaacttatctacggtaatggatgaaatccacactgttctcaagaaggataatgtaaagaatgaagacaaagatcaaaaatccaaggagaatggtgccagtgtatgataaaatccatgtagtgatgaggaatggtgttaaataatgtaatatataaaaatcatgatataagaatgtttgaaggtgatgcatgtttgattttagtagtataaatgtattttagttcaaatgatgtataaagttttatgaatgtgagtttctgcttttgaaaattgcttgtaattcctagccttcaaattattaaacactccttgagtgaaataattccgcattgcaaagtgttttaagatgaactttgttatagttttaactccaataaagttcatcagtttaattgactgtagtatttaattaccaaatttcttttattaaaatgcctagaaatttttaatttatagaattattaggttttaaaatttttagttcatctgttaaaatttcagtcaaaatcataaaatagcatgatgcttaannnnnnnnnnnnnnnnnnnnnnnnnnnnnnnnnnnactcatcaccaaaaaatcccctcttgatcagtctctaaaagcattcattaaaaattcattacaggcgtgagccaccgcacccggccacatctcgcttttttttcctctgccaggttgtctatgacaatcaatgcagctgggttttacaagtacaagttcactgtggggagagaggagggttacctgngcccagtcccacagaaagatcccacaaagcaggctttcctggacctgaactcacaggaattacctggtattcttc

SEQ ID NO: 260413 - DNA, 507 bp, Homo Sapiens
  misc_feature (217)..(286): n is a, c, g, or t
  misc_feature (322)..(413): n is a, c, g, or t
ggggccatcattgtacatccaaattgggctgcaaaaagtggcaagtttgattgtagcatcatgtctttgagtgtcctattggactacagattagaggataataaagaacattcatttgaggtttcattgtttgcggaacttttcaacgaaatgcttcaaagagattttggtgtccgtatatacaaatcattactgtctcttcctgagaaagaggacnnnnnnnnnnnnnnnnnnnnnnnnnnnnnnnnnnnnnnnnnnnnnnnnnnnnnnnnnnnnnnnnnnnnnnctgatgaaccaaaacccaaacggagaaaatcaggcnnnnnnnnnnnnnnnnnnnnnnnnnnnnnnnnnnnnnnnnnnnnnnnnnnnnnnnnnnnnnnnnnnnnnnnnnnnnnnnnnnnnnnnnnnnntaacaatcaagatgaatatgaccctatggaagcagaagaagctgaggatgaagaagatgatagggatgaggaagaaatgaccaaacgagatgac

SEQ ID NO: 260414 - DNA, 636 bp, Homo Sapiens
gtttaattgtatttcctattctccactttgtaaacgtttagcatctggaagcacagataggcatatcagactgtgggatccccgaactaaagatggttctttggtgtcgctgtccctaacgtcacatactggttgggtgacatcagtaaaatggtctcctacccatgaacagcagctgatttcaggatctttagataacattgttaagctgtgggatacaagaagttgtaaggctcctctctatgatctggctgctcatgaagacaaagttctgagtgtagactggacagacacagggctacttctgagtggaggagcagacaataaattgtattcctacagatattcacctaccacttcccatgttggggcatgaaagtgaacaataatttgactatagagattatttctgtaaatgaaattggtagagaaccatgaaattacatagatgcagatgcagaaagcagccttttgaagtttatataatgttttcacccttcataacagctaacgtatcactttttcttattttgtatttataataagataggttgtgtttataaaatacaaactgtggcatacattctctatacaaacttgaaattaaactgagttttacatttctctttaaaaaaa

SEQ ID NO: 260415 - DNA, 388 bp, Homo Sapiens
aaaactttgcaagtcaaatttaacttcttcaggattttgcttagtaaagaagtttacttggtttactatataatgggaagtgaaaagccttcctctaaaattaaagtaggtttaggaaaacagaccctcaaattctgacattcattttcctaagcaactggatcaatttgctgacttgggcataatctaatctaagcatatctgaatacagtattcagagatagatacagtagagattccccagactttttcgctctttgtaaaacctgtttgtttaggttttgcgaggtaaactcaacagaggttgggagtggaagagggtgggaagcttatatgcaaattaacagacgagaaatgctccagaaggtttattattttaaagcacatt

SEQ ID NO: 260416 - DNA, 2512 bp, Homo Sapiens
  misc_feature (570)..(570): n is a, c, g, or t
  misc_feature (820)..(820): n is a, c, g, or t
gtccggctattagcctactgtggctagtcacccccggggtcccggccttctcgggctggggccgccgccaccgcggcaggacggggaggcgggccatggcgtcctgcgtggggagccggaccctaagcaaggatgatgtgaactacaaaatgcatttccggatgatcaacgagcagcaagtggaggacatcaccattgacttcttctaccggccgcataccatcaccctgctcagcttcaccatcgtcagcctcatgtacttcgcctttaccagggatgactctgttccagaagacaacatctggagaggcatcctctctgttattttcttctttcttatcatcagtgtgttagctttccccaatggtccgttcactcgacctcatccagccttatggcgaatggtttttggactcagtgtgctctacttcctgttcctggtattcctactcttcctgaatttcgagcaggttaaatctctaatgtattggctagatccaaatcttcgatacgccacaagggaagcagatgtcatggagtatgctgtgaactgccatgtgatcacctggngagaggattatcagccactttgatatttttgcatttggacatttctggggctgggccatgaaggccttgctgatccgtagttacggtctctgctggacaatcagtattacctgggagctgactgagctcttcttcatgcatctcctccccaattttgccgagtgctgggtgggatcaagtcattctggacatcctgttgtgcaatggcggtggcatttggctgggcatggtcgttttgccggtttttagnagatgaggactttaccactggggcaagcttcaaagacatttcataccaccaccgggaagatcaagagagctgttctgcagttcactcctgctagctggacctatgttcgatggtttgaccccaaatcttcttttcagagagtagctggagtgtaccttttcatgatcatctggcagctgactgagttgaataccttcttcttgaagcatatctttgtgttccaagccagtcatccattaagttggggtagaattctctttattggtggcatcacagctcccacagtgagacagtactacgcttacctcaccgacacacagtgcaagcgcgtaggaacacaatgctgggtgtttggggtcattggtttcctggaggccattgtttgcataaaatttggacaagatctcttctctaagacccaaatactctatgttgtgctttggcttctttgcgtggctttcaccactttcctctgtctgtacggcatgatttggtatgcagaacactatggtcaccgagaaaagacctactcggagtgtgaagatggcacctacagtccagagatctcctggcatcacaggaaagggacaaaaggttctgaagacagcccacccaagcatgcaggcaacaacgaaagccattcttccaggagaaggaatcggcattccaagtcaaaagtcaccaatggcgttggaaagaaatgaaaaaccctggttaatcaaagatgttccagagtgcctagaactgagagggaaatggaactcatttggaactccccgtgaggaggtcgaggcgcacagggcaagcaggaagaggcgagggcacttgggggtcattatttgagatcgtaagtcttgtttcccacagacctggccgcgtcaggcagatcatcgcctggggggcctttgccaacgtggggtctcttctaacttcagcacttgacatgcggtcaccggtggcagcgcggtgtgttgaagggaaacggtagctattcattcacagttgccaagagcagctccgcgcctgctggatcgtggatgcagcgtaaacatcttccttcagacgaggcattaaccccatggttaatggactggtcaccagtttttattttatttttatgaatctacctttccattgattgatttaagttcaggccacttttctggcttttatttggttactgttgttatttgtttttaagttaggatgctttttaacagcctttagaagcccgctgctgaaattgatactgggggaagggttccccttccttctagagcagaaaagggagagaggtgttgtattcctgtttggtaacctcagtctcctgtaagacctcctaccacatggcgagtatacaccaatcaggagagggtagctgcctgcataggagcctcgcttccgattattcccttcccaatattattcatccagacttagccacagtgcacaaaagcaaacctgctagagaggcagtgaacaccacagcttctccccagctaggtgccttttacatcgggtttgttctccttccatggtgtgttgctgacattgtcactgagtcccatgtgaggtgctggtgagtattacctttcatctgtgccatgctctagaaccttgaccttgatagttcaccacctctgatggatccctgttttaaataaaaacgattcactttaaagcctatcaaaa

SEQ ID NO: 260417 - DNA, 813 bp, Homo Sapiens
cctgatatggctctttgccgaaatgctagagaaatgggtgtatttatgtacatttctaatagacatgaatttggaaggctattatccactgctaattacaatacttcccattataacaatgacctctggcagatttttgaaaatcctgtggactggaaggaaaagtatataaaccgtgattattcaaagattttcactgaaaatatagttgaacagccctgtccagatgtcttttggttccccatattttctgaaaaagcctgtgatgaattggtagaagaaatggaacattacggcaaatggtctgggggaaaacatcatgatagccgtatatctggtggttatgaaaatgtcccaactgatgatatccacatgaagcaagttgatctggagaatgtatggcttcattttatccgggagttcattgcaccagttacactgaaggtctttgcaggctattatacgaagggatttgcactactgaattttgtagtaaaatactcccctgaacgacagcgttctcttcgtcctcatcatgatgcttctacatttaccataaacattgcacttaataacgtgggagaagactttcagggagggggttgcaaatttctaaggtacaattgctctattgagtcaccacgaaaaggctgggagcttcatgcatcctggggagactcacacatttgcatgaaggacttcctgttaaaaatgggaacaagatacattggcagtgtcatttatagatcccctaagttatttactttttcattgaaattggaattttattttggggtgaatgactgggcatga

SEQ ID NO: 260418 - DNA, 825 bp, Homo Sapiens
gcaataataatcgcaaggaggagaagtaagtccctcctccttctgtatgaacttttctcccacatgctgctgtatggtttagtgagagtgaagttttaaagaacatcaatatgattggtgggataatccaaagacattttttcagaatcaaatggcatgtcgaaggtttgtttcttgcatatgtatttactggtccacagcacaaaataaagtgaccacatatacataggaaagttgaatttgtacacatacagcatctgaaatgtatctgatgttcagcatcaagatttcactgaacattgtagaaatgtgtatcttttgcatgtatattttacattgattttctatttatgtacatctagaaagttttaaccctaataaatagttttgtaattttgaataatagtgtcagtttatatgtgagggagtagagacagagaggttagcactggataataattagtaaggccaaaggagaaaatttcatagaaaatattgttgttgtcataatgagtacagcatgaaaggcttcctctacaagacactagtcaaagagttgagagctgcggtttctaatctttgtccattactcccttactccttatgagactgtggacctgtcacttggcctctctggtcttcagttttctcaccagtaaaacaaggaacttgaaccaaatgacctctagtgttccccttgggtttaaatgtctataaatgttcaatgactagaatgtattgcgtttttctttattctttttgctttgagaaaagagaatgtatttaagagtaataatttgaataccaattatccacattaaaatt

SEQ ID NO: 260419 - DNA, 541 bp, Homo Sapiens
ggaagctgggggcgtctccacagtcttggggggcagacgcgcgctcggtgtggggtacagttcacgatcattttcatgactttttaaaggcagtaatcgttctggtcactgggacacagctgccctcgcccattctaaaaagtcagcaccctcaggcccgcgggtaaccacctcctcctgagcacggtgaccaggtcaaaggctgtccctcgggcctcagtgttctcatctgtatgtcgagcactgcacagaatcagctcatgcgctgaggctttcactcctgtgatggaagagacagagaagggggtggcctctcctctccctggggacctgccattctcagcacaggcgcatggcaggcagcagcctcccttctgccagcagaggggcttaatgcaccctgctccatttgtaattcatgtgcggtgagctcactgggatgagtcagtttggatatatattcctccctgggtctgccccattttatggggtgttgcttaatcatttgcgttattccattgacatgaaatatttagcactc

SEQ ID NO: 260420 - DNA, 538 bp, Homo Sapiens
gtaagccgacattatttgggattgctgtttccaaggggaaaaaccaatagtgtgtttcttccattcatggaagggaaatatgattttaatttgtatgactggcaaccaaacaatgggcagcctcccagttcttcagtccctgaaggacagaaaaaggaacgacttgcaacatcttccaactctgaagtcagtttctcctcctgagtcttctaaagctaccattaatattctcttgcaagttttaggttactaaggtaccacctggtcttacaacatgcaacagtgtttaaatgtgattttcacagattcttgttaataaagcactctttggtggaagacaagcagcttgggtacttaacagagttaacattacaacagtattacaaatagtcaagtgaagatgattaagccaaatagtatcaaattacagaaagtaccatttcagtaatgccttttgtatctttataaattttgacacagggtcacaaggtgaacagaaaataaatacataaaaaacctccatcagatcctcaattcc

SEQ ID NO: 260421 - DNA, 1669 bp, Homo Sapiens
  misc_feature (203)..(203): n is a, c, g, or t
ggggagaaaaggggggcgcgcgtagtgggggagaatcatacacgcgggcaaaaaactcgtgtgggcgcgcagcatatggttgcacgctggctaaagcgggaggcgggcgcgcgttactcggccgggatgggaatgtcggaaaatttgggataggtgcgaggttgggttcgattcgggttatggaaaaggccgcggcgagtgancatccgcgtcgtctttaagggacgggcaacgggggaaaggaagcggcatagggtatagaacgcgtcggcttggaattgtggaaagtaaagcgtgggtacggaagggaaatttcccggggcgggcggaaaaggtgatggatggttcggcatgtatggtggccgggtaggaaggaagggaatcggggcaaggaataagaggtatttaattttaccgcaggggaggcaaatgtcgccgtaggggatgggttccctttggaatggtattgcgcccaggacccacgctggcgaaggctcagcaggtaaggaacagaaacgaaaaatactaacagaaagcgtacaaggaaggcacctcaatttgtgatcctcaaccaagggtgggttgcacaggggatatttctcaacaagacaacaaaaacaaatactgcacaaacagagaaggaagccagggccccacaggagcaattatctgatccaccccacatgacggtgctttaagccccacatcctaggaagaaagttcttttggaattcagcctatgcgccggacagagcagaattaaattggaagttgccctccggactttctacccacactcttcctgaaaagagaaagaaaagaggcaggaaagaggttaggatttcattttcaagagtcagctaattaggagagcagagtttagacagcagtaggcaccccatgatacaaaccatggacaaagtccctgtttagtaactgccagacatgatcctgctcaggttttgaaatctctctgcccataaaagatggagagcaggagtgccatccacatcaacacgtgtccaagaaagagtctcagggagacaagggtatcaaaaaacaagattcttaatgggaaggaaatcaaaccaaaaaattagatttttctctacatatatataatatacagatatttaacacattattccagaggtggctccagtccttggggcttgagagatggtgaaaacttttgttccacattaacttctgctctcaaattctgaagtatatcagaatgggacaggcaatgttttgctccacactggggcacagacccaaaatggtactgtgccagaagaagagaagccagaaagacaatgaaggatggcattaaggggggttgggaaagcaaaagtggctagtagtctttttccatcctgcctgtgttctcagaagctctccgcctgaggaagtccataaaacccctttgtgaggagaatgcacccccttaccaatgaccaaagtggtctccagttgctattaaagatgatggagaacaacagaggggtgtttgatgcaagtaaaaacagaaacttccaagaatgtaactctgaatattccagccctatagaacaatctctctcacaggtgttccaatatcgcagttatctccgcgtggacactccattaaaccgaccccgcgtgtgaacacacttgatgatgttcc

SEQ ID NO: 260422 - DNA, 176 bp, Homo Sapiens
acaccatacatctgtgcattttctctttaggtgactgtttaaaaaatttgtgggcaaagttactcagtttttatgaactgttgtatcctgttaaagcaaattgctctgtgactccagtaaatcttacctggactgaccaaacctaaaaaaagatttttattgtaactccttaaaaa

SEQ ID NO: 260423 - DNA, 754 bp, Homo Sapiens
ggcccgaaggggacaatacaggggagcaggtggctgttaaatctctgaagcctgagagtggaggtaaccacatagctgatctgaaaaaggaaatcgagatcttaaggaacctctatcatgagaacattgtgaagtacaaaggaatctgcacagaagacggaggaaatggtattaagctcatcatggaatttctgccttcgggaagccttaaggaatatcttccaaagaataagaacaaaataaacctcaaacagcagctaaaatatgccgttcagatttgtaaggggatggactatttgggttctcggcaatacgttcaccgggacttggcagcaagaaatgtccttgttgagagtgaacaccaagtgaaaattggagacttcggtttaaccaaagcaattgaaaccgataaggagtattacaccgtcaaggatgaccgggacagccctgtgttttggtatgctccagaatgtttaatgcaatctaaattttatattgcctctgacgtctggtcttttggagtcactctgcatgagctgctgacttactgtgattcagattctagtcccatggctttgttcctgaaaatgataggcccaacccatggccagatgacagtcacaagacttgtgaatacgttaaaagaaggaaaacgcctgccgtgccccacctaactgtccagatgaggtttatcaactttatgagaaatgcctggaaatccaaccatcccatccggacaagcttttcagaaact

SEQ ID NO: 260424 - DNA, 974 bp, Homo Sapiens
tgatgcctacagttaaccagacacaggtgtttaaaagaacccctcctggtgttcggaaaatagtaattgctaccaacattgcggagactagcattaccatagatgatgtcgtttatgtgatagatggaggaaaaataaaagagacgcattttgatactcagaacaatatcagtacaatgtccgctgagtgggttagtaaagctaatgccaaacagagaaaaggtcgagctggaagagttcaacctggtcattgctatcatctgtataatggtcttagagcaagtcttctagatgactatcaactgccagaaattttgagaactcctttggaagaactttgtttacaaataaagattttaaggctaggtggaattgcttattttctgagtagattaatggacccaccatcaaatgaggcagtgttactctccataagacacctgatggagctgaacgctttggataaacaagaagaattgacacctcttggagtccacttggcacgattacccgttgagccacatattggaaaaatgattctttttggagcactgttctgctgcttagacccagtactcactattgctgctagtctcagtttcaaagatccatttgtcattccactgggaaaagaaaagattgcagatgcaagaagaaaggaattggcaaaggatactagaagtgatcacttaacagttgtgaatgcgtttgagggctgggaagaggctaggcgacgtggtttcagatacgaaaaggactattgctgggaatattttctgtcttcaaacacactgcagatgctgcataacatgaaaggacagtttgctgagcatcttcttggagctggatttgtaagcagtagaaatcctaaagatccagaatctaatataaattcagataatgagaagataattaaagctgtcatctgtgctggtttatatcccaaagttgctaaaattcgactaaatttgggt

SEQ ID NO: 260425 - DNA, 600 bp, Homo Sapiens
tgcccgagggtcagcaagtggtgagcaatgtacatacagttgttgtgatgaatagcagccaactggggaagtttttgaaggttctccttgtgatatgttggtacaacatcatggaacaaatggaagatattcctcactgagtagaaaagttgaacagcacattgatcactactggttgttgcctctagtaaagtctgataggcgagttccattaatttcttcacagactcactgatacggcatgtgggcaaggaaaaggaatgttggtccaatgtattttcaggctctaaattcatcacttcgtggtactgagtattggatactttctgtacttccagtttgttatcctcatcaggagtgggtaactctggcacatttatcttagaatcaggaataatcttcacagtgttatgaatttctgaggtcattagatttctggctgccacaatcacatcctggcactttttgtttgcaaaatgagaattgatgttacgagcgtatttcagcaaatctgtagtatctccttttaaaaatctcatttcctttagggcattttcaaattcttcagtggactgtatgatctcttcatattgctgtaat

SEQ ID NO: 260426 - DNA, 1552 bp, Homo Sapiens
  misc_feature (1061)..(1061): n is a, c, g, or t
gcagagagaaaacagctacaggtcgaactccaatcccgaagggcagaactggtatgcttaaacaacactgagatttcagagaacagctctgacctcagccagaaacttaaagaaactcagagcaaatacgaggaggctatgaaagaagtccttagtgtgcagaagcagatgaaactcggtcttgtctcacctgaaagcatggataattattcacatttccacgagctgagggtcacggaagaggaaataaatgtgctaaagcaggatctgcagaatgcattagaagaaagtgaaagaaataaagagaaagtgagagagttagaggaaaaactggtagagagggagaaaggtacagtgattaagccacctgtggaagagtacgaggaaatgaaaagttcatattgctctgttattgagaatatgaataaggagaaagcatttttgtttgagaaataccaagaagcccaagaagaaatcatgaaattaaaagacacactaaaaagtcagatgacacaggaagccagtgatgaagctgaggacatgaaagaagccatgaataggatgatagatgaactcaataaacaggtgagcgagctgtcacagctgtacaaagaagcccaggctgagctggaggattacaggaagaggaaatctctagaggatgtcacagctgaatatatccataaagcagagcatgagaaactgatgcaattgacaaacgtgtccagggctaaagcagaagatgcactgtctgaaatgaagtctcagtattcaaaagtgttgaatgagttgacccagctcaaacaactggtggatgcacaaaaagagaactctgtctctatcacagaacatttgcaagtgataaccacgctgcggactgcagcaaaagagatggaagaaaaaataagcaatcttaaggaacaccttgcaagcaaggaagtggaagtagcaaagctggagaaacaactcttagaagagaaagctgctatgactgatgcaatggtacctcggtcttcctatgaaaaactccagtcatccttagagagtgaagtgagtgtgtnggcatcgaaattaaaggaatctgtgaaagagaaagagaaggtccattcagaggttgtccagattagaagtgaggtctcacaggtgaaaagagaaaaggaaaatattcagactctcttgaaatccaaagagcaaaaagtaaatgaacttctgcaaaaattccagcaagctcaggaagaacttgcagaaatgaaaagatacgctgagagctcttcaaaactggaggaagataaagataaaaagataaatgagatgtcgaaggaagtcaccaaattgaaggaggccttgaacagcctctcccagctctcctactcaacaagctcatccaaaaggcagagtcagcagctggaggcgctgcagcagcaagtcaaacagctccagaaccagctggcggaatgcaagaaacaacaccaggaggtcatatcagtttacagaatgcatcttctgtatgctgtgcagggccagatggatgaagatgtcccagaaagtactg

SEQ ID NO: 260427 - DNA, 1226 bp, Homo Sapiens
  misc_feature (362)..(387): n is a, c, g, or t
  misc_feature (1167)..(1167): n is a, c, g, or t
  misc_feature (1197)..(1197): n is a, c, g, or t
  misc_feature (1199)..(1199): n is a, c, g, or t
tggtacggctcggaattcccgggatatcgtcgatcccacgctgtcgcatgatgaggagcagctgggggagggtgggtcctgggggcttgggggtccagtcttcctgatcgcagtgccagtgcccggtcactcctctctgctcccggaacccagctaatagaagacagccacagagggcctgtttcagaatctgggtgggcttcccaggcactttggcaggctcagtatgggcagggcagacccaagaagggagaaggttcctaagccccagcagggccgtctccctctgcagccctgcctgcccctggcccctcaaatgcacgatcccaggcacagatctgcgcactcatacacacgtgtgnnnnnnnnnnnnnnnnnnnnnnnnnntacactcactcctatgctgtctggcacactggacgatgtctgagggctccgagagaggaagtgcgtggcatcctcctccaaggtggccttgagctcccagaacgcgtgagccagcggggacaaacacaggctgctgcggaccaaacacggcagggcacgatgggacaacacagggacaaatcccctatgacagtttccacaaataccctctaacaaaccacaagcctttgcagtatccagagaggaaggcgtctggtggagaggagtggggcaaggacaacaaaagaggtttcgtaaaaactctaagtcaaattactgataaaattgcaaaatgagcacaggttcaagagcaccttgctcacttctctccacagcctcccaacctcccagcctctcccactctggggtggccagaaccaaggcagaattcagtcactgatgcagttccaggctccatgcagctgaggaggagaggaggcagatgtggacagttctgtctcttcgtttaaaaaatatattcctgtagagagttattgcttgtcctcccgtgggcaggagggcgcggtggctcagtgggccagagccgcagcctccagggcccgagctttcttccgcctcttcagcagcagagggttggatgcatcttcaatcttttttatcttgatctgctcgtagtcaacgcgcattgtggccaaggcactggtcatctcctccctgacatcctcccaccgctccttgcctccttcagacccggctggtggcagtgggttgagggacctngtgattgatgacccagggtggtcataactngngatggcattcctgggggggcttgttaa

SEQ ID NO: 260428 - DNA, 1041 bp, Homo Sapiens
  misc_feature (63)..(76): n is a, c, g, or t
  misc_feature (265)..(265): n is a, c, g, or t
  misc_feature (364)..(387): n is a, c, g, or t
  misc_feature (461)..(472): n is a, c, g, or t
gctttgtgggattttatttaggtccaagttcttagtacacggcaacaattccaaatccaattnnnnnnnnnnnnnngtgatgttcctccactcatctggaggtggtttaatggcacacaaggaacattactggcaacagactgctccctcaagttcccctggatggtttttactcaactcataataccaccaactctccctctgggagctaaaagtacaactggccagatcacaaattgtttacattcttttttgtaagccattntaagaaaaatggtgcatggacacaaaatatgataaaaactgcttttccatagaattcttaagttgcaaaagaggtttcattttaatgtgaaaataagcnnnnnnnnnnnnnnnnnnnnnnnncttacaaaaaaccttaagatattcagcaaggatcatttatacacagctaggccccgccgtttcgttttaattgnnnnnnnnnnnnaataattacatgagattctcaaaacaggaacaaaggtcagcacaaagtaaacttaaaggtaatgagctcaatgcctccatttaatcacttttataaggctctctccaataaggctgctgtgctgtgctcctgccagtgttggagtaatataacatttttactgcacacaccttatgggaaagtgtttatactgagtgtagttttaggaggggtaaatgaagattatttccacaaattaagattgcacttagtacacgcctttacacaactctgatggtatttaccaaaacatggcatgtcttttcacgtatattcctgaaaacaccaaatagaactcttaacttttaaagaaaaatacagcacatttagttaagacagttgtggtgcagtggaaaattaagtactgagcactgagtgagaactctgctgttattaactagctgttcatatgaagaagaaaactcacctcatcagtctaatgagacaaccagaaattttaaaaatttcatctagctcaaactcagtgattctaaatcttatatgggggaaattaccaccttaacaccaat

SEQ ID NO: 260429 - DNA, 1138 bp, Homo Sapiens
actagtttgaaagggtacgagtgatttacaagtatgccctggacagaatttcaaaacaagatgcccaagaactctttaaaaattataccatctttgagaagaagtttggtgataggcggggtattgaagatatcattgtgagcaaacggagattccagtacgaagaagaagtgaaggcgaatccacacaattatgatgcatggtttgattacttgcgcttggtagaaagtgacgcagaagctgaagccgtgagagaagtctatgaaagggccattgccaatgtcccacccattcaggagaagaggcactggaagcgctacatttatctttggatcaactatgcactctatgaagaattggaggcaaaggatcctgagaggacaagacaggtgtatcaagcctctttggaactaattcctcacaaaaagttcacatttgccaaaatgtggatactgtatgcacagtttgaaatacgacagaagaatctgtcattagccagaagagcattgggaacttccataggcaaatgtccaaagaacaaattatttaaagtttacatagaattggagctacagcttcgagaatttgacagatgccggaagctttatgaaaagttcctggaatttggacctgaaaattgtacctcatggattaaattcgctgaattagagacaatccttggtgatattgacagagcacgggcaatctatgaattagccatcagtcagccacgtttagacatgccagaggtgctttggaaatcatatattgattttgaaattgagcaggaagaaacagaaagaacacgaaacctttaccggcggttgcttcaacggacgcagcatgtcaagggatggatcagctttgctccagtttgagttgtcttcacgaaaagaaggaagtttgactaaatgcaaacaaatttatgaagaagctaaccaaaccctgccaaactgtgaaagaaaagggaagagaggacttatgctgccgggaatctttggcgaagtttttgaagaaggaatttgggaacagctttcagataagggagagagtagaccaaactctcgggccggagaaaaggccaggaagaggaggaaggggcccaaattggagaagggggcctgaatgcaggcctggg

SEQ ID NO: 260430 - DNA, 750 bp, Homo Sapiens
gcaaacatttcaagaggaagcagaagctgccagtccttttaaagatgaggcttgggtgtgacatggttgttcttgcagaacatgccagcagaagcattcaccaactgacatgtgccctgaaagaaggcgatgtcactattggagaagatgcaccaaatctttcttttagcaccagtgtgggaaatgaggacgccaggacagcctggcccgaattacaacagagccatgctgttaatcagctcaaagatttgttgcgccaacaagcagataaggaaagtgaagtatctccgtcaagaagaagaaaaatgacccccttgaggtcattagaacatgaggaaaccaatatgcctactatgcacgaccttgttcatactattaatgaccagtctcaatatattcatcatttagaggcagaagttaagttctgcaaggaggaactctctggaatgaaaaataaaatacaagtagttgttgcttgaaaacgaagggctccagcaacagctaaaatctcaaagacaagaggagacactgagggaacaaacacttctggatgcatccggaaacatgcacaattcttggattacaacaggtgaagattctggggtgggcgaaacctccaaaagaccattttcccatgacaatgcagattttggcaaagctgcatctgctggtgagcagctagaactggagaagctaaaacttacttatgaggaaaagtgtgaaattgaggaatcccaattgaagtttttg

SEQ ID NO: 260431 - DNA, 518 bp, Homo Sapiens
gattgttttcattttcaagtatagattcatgtcagaatggccaacttaacgtgggtttctgtattccctggtgttgctcttaacctgaactcataatcagttgccatactgaggcaagagcactcagggtgaacatagtcaagttactttaaaagtgataaaagtgtttttcccatggtgaaaccttcagtatttggctgaatgtaaagtatgttgaagtggtatattgatggtaagttgttaatcactaaccttgtttgcacttttgtacaccactgcttgcactaggatcttggtgtgaattttcaattgttttacagtgtatacagattattaaggataatttatataaagatgtttctgtttaactttgtgtgttttacaacaaagagctataatagatggttaaacgtttttgaattgtgtttatatgttagtttgattatgttctattatcttttcacctgccatgaatttgagtgttaggaagggaaaaataaaatactaatctggtcttg

SEQ ID NO: 260432 - DNA, 562 bp, Homo Sapiens
aaaagccatcatcaaacttcaatatgtagaccagattcttaaggctgcaaaggggacagtgggatctattttggaccgaaaagatgaaacaaagacacaggcaattgtatgtcagcagcttgatttaacccacttaaaagaacgaaatgttgaagatctttcaggaggagagttgcagagatttgcttgtgctgtcgtttgcatacagaaagctgatattttcatgtttgatgagccttctagttacctagatgtcaagcagcgtttaaaggctgctattactatacgatctctaataaatccagatagatatatcattgtggtggaacatgatctaagtgtattagactatctctccgacttcatctgctgtttatatggtgtaccaagcgcctatggagttgtcactatgccttttagtgtaagagaaggcataaacatttttttggatggctatgttccaacagaaaacttgagattcagagatgcatcacttgtttttaaagtggctgagacagcaaatgaagaagaagttaaaaagagtgtgtatgtataaatatcc

SEQ ID NO: 260433 - DNA, 889 bp, Homo Sapiens
taaggtcccgtaaaaattagccccccctcaaagttggcggttattgtcaagaggtctattgattccccccttatttccccagttgtgaccgagggatttttttaaaccggttcaagaaattatatttggcgcattcccaaatttaaagccctttgtttttttaaagaagttcttaccagaaaagtgaaatattgggtggcaaaaaaatttaccaacagttgggttcagaattccagaggttttttaaagaaactggcctttgcctgagatttaacccaaaaaggttcaagaccaattaggaattcaatattgtttcgcgtgccataaaaaagtttggatttgaatgcctgggtggtgaattgaaatttagtctcaaaagcttcataaaataaaaatctgacttaagacgtagtcataccagtataccaattctcccatcacttggactttcggcagaggagattagagcaaaaaatattcagggagaacagtggagttacattgtattatgtatgtttaatataatatcaattttaaggttaaggttaaggaaatcttaattttaaggttaaacctggagtactagttatagaacttaatattcctggttaaagagtaagttaactgggttattatgtggccttggtcgaagaccataaattatgcatttatgcatttgtggttgctttggttctcaatacattgaatatgcatagccccttctagaaatatatatagtgagaaatctgtaaaatgggggagttagactaagtgtgaactaaaatcttcccactgtgtacaggacacatcagctgagagcaaatcagtttttatgtttactcagcaccatcctcactaaaactattatttttgtcttattttcaccccc

SEQ ID NO: 260434 - DNA, 1068 bp, Homo Sapiens
gaacaaaccactgaatcacacaacatggaccaatctcaaatcattatgctgatggaaagaaaccattcataagaatacacagtacatgacgccgctttcatgatgttctggaacaaagaaaactaacctatagtgatagaattccttatcaatggctgccaacaattgggagtgaaaggaactgactgagcaggtatacaagagaaccttctggggtgatggaaatattctgaagcttgactggagtgttggttacatgggtatatcaatttatcaaaactcactgaattgtatatttaaagtaggaacattttattgtaaataaattacacctctataatgtttgttttaaaaaatattagatacatcagctggaaatcacttggttttaacaaaaaattttctctgtaatcttatttattctagcacttttcttgtcttcaaaagcaatgcaaaacttcactgtagctaagcctatgttagactcttacaaattcctaaatagtagaattagttcaatgagtaattcttataaataattctagatttactttacctacatgaataactgatttgctacatagagccacattaatgcttagtataaatcatacaacatgatgaacatgctcacgtatatttaaatataaacatatttggactttaaaaagtaagtacatcttaggagatgatccaattctgggagttagcaaatgtctaagtgctcccctccttccacacataaggagagaaaagcattcatcagctgtgtgagtctgttaccagtgcacatgtgaggacagaccacagcacagtgagatgaggctgaggaaacgactacaacagcattggctatatcaggttttcttccttcttccagccacctggaaaaatgttcacagagagttatagtggttacaagaccaaaacttggaatcaaaaaaattaaataatgcaaataacccaattaatctgctaatatctattaccacagaaatagtgttagaggtagtttattaaagaggcatttttaaaatcatcccactcatcatatcctgcatttcaaaa

SEQ ID NO: 260435 - DNA, 1031 bp, Homo Sapiens
gtaagtcataaatattacttaatcaggcctgattctacttttgaaaattacagttcttgaaatgcagataatgtttactttgaaaacaaatgtcatgaatgatttccagtttttaaagctatatgtttcactgcttcatatctctgtccactttctgaatgagaacttattttgtgcctagagctctcactcactgataatgcttattaccttctgggcatttattccaaagtgggatcaactgtacgcctttggtatctgaccataaagtcttttgctccgctgacatttgggtgatgtcttcacatggaaatataataaaaataaaaatctagtttaatactgcattatttattttcctaaggctaaagaggagcagtcctatgcttttattcagcatcctttatctgtgacttcatgctctgataactgcctttccttccttctgtgcctttgaatacaaatttcagttctgcaaaagtgaaacattaaacattgccaacgcaaatggcgggggaatgacgccaaaccggcgccggggggccctcgtactcgccctgtatcccgaatttacgccttgctcgggccgcctttgtccccccccaaaaaaaccctcctcctataaccattccccgttatggtactcccgcgctttcccccccgttttggcctaaggcgcgataacactcggcgccataaagctgtgatcccccttttgtataccccccccttgcttttttgacccctcaagggcttttgccacctcttcccccgcagtataaaaatcaccggctccggcctgattgacttgcacaggcattatattaaaaaacaataccccgacagaggaatttaatgtaacagtcccatcttaacgggccactcccttttctttttggggtatacccccactcctctcccttctttattctcgcaatatttatgctgtcccaacatcgcccacccccttttttaacagtgattgcccccactattcgccctcgcgtgcactcccccggcgctacaccgcg

SEQ ID NO: 260436 - DNA, 909 bp, Homo Sapiens
tctacatgaaccagcaaggcagatggaataatgtgaagccaatcgctcttaatggaaccaaagattctatgtttggcattgcagtaaaaaatattggagatattaatcaagatggctacccagatattgcagttggagctccgtatgatgacttgggaaaggtttttatctatcatggatctgcaaatggaataaataccaaaccaacacaggttctcaagggtatatcacctcattttggatattcaattgctggaaacatggaccttgatcgaaattcctaccctgatgttgctgttggttccctctcagattcagtaactattttcagatcccggcctgtgattaatattcagaaaaccatcacagtaactcctaacagaattgacctccgccagaaaacagcgtgtggggcgcctagtgggatatgcctccaggttaaatcctgttttgaatatactgctaaccccgctggttataatccttcaatatcaattgtgggcacacttgaagctgaaaaagaaagaagaaaatctgggctatcctcaagagttcagtttcgaaaccaaggttctgagcccaaatatactcaagaactaactctgaagaggcagaaacagaaagtgtgcatggaggaaaccctgtggctacaggataatatcagagataaactgcgtcccattcccataactgcctcagtggagatccaagagccaagctctcgtaggcgagtgaattcacttccagaagttcttccaattctgaattcagatgaacccaagacagctcatattgatgttcacttcttaaaagagggatgtggagacgacaatgtatgtaacagcaaccttaaactagaatataaattttgcacccgagaaggaaatcaagacaaattttcttatttac

SEQ ID NO: 260437 - DNA, 919 bp, Homo Sapiens
  misc_feature (340)..(370): n is a, c, g, or t
caacttaatgttctatagtacttcagatttttaaatccagagtttggtgtacacttaggaaattatagtaagagtagattagagaagatttgcttgttttccttttgaagccatgtgaaggtttattaccctgtgtattttcatcactgaaaagttccccggtgactaataaaataaaagtgtcacaagctacatgatggatctcttcttttaatgttgcatagagtttcagtttggctagtgagggctaactagctcagccctagtttcattttattagagttgaccactaaaaactaaataaggaagttaccagtaaagctaattcccaatacaagcnnnnnnnnnnnnnnnnnnnnnnnnnnnnnnncattcacataataaaatatatccttaacacaaaataagggtataacatattctgcagcatgacattttattttatttctcagctgtagctttttcattcagaaactggagaccatcttttcactgagttgttattccttcctcttcccttagcttagggatatgttgaaaaaggcttttcaacaagtattttattttttacaagttgctatgaaattaaaatttatatatatatcttaagtgtttataaagcactcaaaattgtagcttacatgtatatgacttctgaaaataaaaatcacacttctaacataatctttctgctctgcaaaaatattctacatacatgcatatgatcaaaacaatcttttcatgtttggggtatttcttacacatagtaaaagaaaagtcaacaattatatcagtacttcccctgttaagataactgagtgccacctagtgttcaatttctgcaactactaagcttacaaattcaatactgctattaaaacccaggttctgaaaacggcattttggaaatctttttttt

SEQ ID NO: 260438 - DNA, 240 bp, Homo Sapiens
agatttcctttgtggccccataatagaatgttccaggttcatttcatatttttccatcccaggagccattattactctacttttgagtatgtcctcaaaactggtttaacaagtcatttcagaaaataatttcacttcaacaaaacactgtttgttgattcaacacaaactgcatgggctgcttagatcaatttacacttggttcatccccatctttggctgtttcaaacataccctgtt

SEQ ID NO: 260439 - DNA, 544 bp, Homo Sapiens
atatacacaagaaaaggggtagaaagcccaaaaagctacagtatgcaaagccagaagatttagagcaaaataatgtgcatcccatcagagatgaagtacttccttcttcaacatgcaattttctttctgaaactaataatgtaaaggaagatttgttacagaaaaagaatcgtggaggtaggaagcccaaaaggaagatgaagacacaaaaattagatgcagatctcctagtccctgcaagtgtcaaagtgttaaggagaagtaaccgaaaaaagatagatgatcctatagatgaggaagaagagtttgaagaactcaaaggctctgaaccccacatgagaactagaaatcaaggtcgaaggacagctttctataatgaggatgactctgaagaggagcaaaggcagctgttgttcgaagacacctctttaacttttggaacttctagtagaggacgagtccgaaagttgactgaaaaagcaaaagctaatttaattggttggtaacttgtaccaaaatattttacttcaaaatctataaagca

SEQ ID NO: 260440 - DNA, 717 bp, Homo Sapiens
caatctgtagctggagctgatacaatacaatgtttacctggccaaagagggttcgaggggacaagctggcctcacaataagatgcacagtgttagctaggtcatcgtgacaggcatgcctcacaccaagacggactatcaagacctgagccgacctgacttacataaatgacaaacactagtgctttacaaaggtggctggagttctccatcttctaaaatcaacatccaatccccttcagtcagcatcttcagtattcccttgaggactggaaaaccaaagcagctacgtccatctgtaacgcacccgcaccggacaggcacgagatgtcacgtccacctggcaccatccaaagagggtaaattggagaaatcacacctttcaaatgttaatctgacactgtaaacagcagttgagttctcatttacatgggcaaagaaagcactttaagctattttcacaactttcctacggaagaaaaggaaacgattcagacggttaatggctaagttttaaacaaatgctctgcatcaatacgtggttaagaaataacacaaaaatagcccttgtgtcccttaataaaaaaggattttgttgtcctctgaccaaactgaggggtgggaagtgcagatggtggactagaaaggtcatctgtatagtaggcaaatctctgtggccggggttgagggattggttgtccaagaaaatatccttctt

SEQ ID NO: 260441 - DNA, 602 bp, Homo Sapiens
agcatggattgcgaagcaacagagaatcaatttggatcggcttatcataaccagtgctgaagcttcccctgctgaatgttgccaacatgccaaaattttggaagatacacaatttgttgatgggtataagcaattgggatttcaggagactgcttatggagaattcttgagtcgattgagggaaaatcctcgtcttattgcctcctctttggttgctggagagaaacttaatcaggagaacacacaaagtgttatttacacagtttttacctccctgtatggcaattgcatcatgcaagaagatgaaagctacctccttcaggttttgcgatacttgattgaatttgaacttaaagaaagtgacaaccctaggcgacttttgaggagaggaacttgtgccttcagcatcttatttaaacttttttctgaaggactgttttctgccaaacttttcctcacagccactttacatgagccaattatgcaactgcttgttgaagatgaagatcacctggaaacagatccaaacaagctaattgagaggttctctccatctcagcaggaaaaactctttggagagaagggctcagatagattcaggc

SEQ ID NO: 260442 - DNA, 902 bp, Homo Sapiens
ccgggtcgtcagctcagttctgcggtttctgcggcggctggagaggtggtcggagaagtaggaacctcctgccgggctcgtggcggcttctgtccgctccgcggcgggaagcgccttccccacaggacatcaatgcaagcttgaataagaaaaacaaattcttcctcctaagccatggcatatcagttatacagaaatactactttgggaaacagtcttcaggagagcctagatgagctcatacagtctcaacagatcaccccccaacttgcccttcaagttctacttcagtttgataaggctataaatgcagcactggctcagagggtcaggaacagagtcaatttcaggggctctctaaatacgtacagattctgcgataatgtgtggacttttgtactgaatgatgttgaattcagagaggtgacagaacttattaaagtggataaagtgaaaattgtagcctgtgatggtaaaaatactggctccaatactacagaatgaatagaaaaaatatgacttttttacaccatcttctgttattcattgcttttgaagagaagcatagaagagactttttatttattctagaattgcagaaatgactacactgtgctataccagagaattccagtagaaagaaacttgtaactctgtagcctcttacatcacctttattatacagcatgaaaaaccataacttctttttaaggacaaaagttgttgccttcctaagaaccttctttaataaactcattttaaaactctgagtaataactggtgaagctattaaggtagcaatatgaagatattagataatgcattttcccatttcctttgcaaggaacatgatgccctttcagaatgcttatttcaataaagtcatgttttgtcagttgtaa

SEQ ID NO: 260443 - DNA, 613 bp, Homo Sapiens
  misc_feature (195)..(233): n is a, c, g, or t
gagagacagtggacatggactgtacattggttagtgaaaccgttctcttaaaaatgaagaagcaagagcagaagggagaaaaaagttcaaatgaagaaagaaaaatgaatgatagcttggaagatatgtttgatcggacaacacatgaagagtatgaatcctgtttggcagacagtttctcccaagcagcagatnnnnnnnnnnnnnnnnnnnnnnnnnnnnnnnnnnnnnnnactcatggtgataaacaagacaaagtcaagcagaaagcgtttgtggagccgtattttaaaggtgatgaaagagagactagcttgcaaaattttcctcatattgaggtggttcggaaaaaagaggagagaagaaaactgcttgggcacacgtgtaaggaatgtgaaatttattatgcagatatgccagcagaagaaagagaaaagaaattggcttcctgctcaagacaccgattccgctacattccacccaacacaccagagaatttttgggaagttggttttccttccactcagacttgtatggaaagaggttatattaaggaagatcttgatccttgtcctcgtccaaaaagacgtcagccttacaacgcaatattttc

SEQ ID NO: 260444 - DNA, 615 bp, Homo Sapiens
ggaaaataagaatagggaggcaattgtatgaaagaactgatggtatgcattaaaactagttaaggagcattaagtttaaattgttatgtatagggcattaaaactaaatacaaaaatagaaacataagctgggtgtaaaatttcagtttacgtttaaactggaagggcataccacaagttcaatatattggacaaatactgttttatttttagcatgtagtattgtagatacaaatacgcatgttcttaagctaaacctaagtaaaagggctttgtcactgtagatttgacaaataacattctaaatgtcaaatctgacaattggaaaacagtacagttttatttcccttatttttaagtatagcaggaaaaaaataacaagtttgtccatgttactactgatactgtaaagaaacttccaaatcactgggttggggaggggggtggatacatcctcattttctgtacatgatgcatgggggaaaaacagtagttactgcatcatataattccaagtaaatcatatagttccacagtaaattggacatggaaataagtgttaactacaaaaatagaatatatacattccaatgtttggaaaagaagtggtaaaaa

SEQ ID NO: 260445 - DNA, 1559 bp, Homo Sapiens
atgagccaccgtgcctggccttattggcttagtttttaaattatcctccaaaaattttgggccttttatctgtggggaaacaagtgaagctgctcttcagcatagacactacctttatcccatcattttagtaaaaactaggtttgtttcacttctgaggtgtcttattaatgtacttcatctgagaatttgttgatcttaatgttcgagctatataagaactgccattaaaaaaaatgggataatagatgattttatcagtatacctgtggaatatgtacaaactggatctatagatattttgaactggaccaggtgggtattgaagtaacccatcaaaatatgctctgcagtgattccgcttaatgtttaaattcagtaacgtacttgaaaggcaaatttcagtgcttttgtatgttggaggagggcttactgatgcgtgctaagaccgatttctgattgagggatgaaccttgggctcatttttttcttgtgaagtctctttctagaaaattttttggttttgttctttttaaaaaatacatacttttttgaatgtatcatgtcttcattaacaacagaaaatccacatggtgtttactaaacttgtttacgacattaaaaatttcctttttatttttagtagcccaggttgagtttttcacaagagatttttttcttagctgaggtatagttgtatagcaagaagaattaagccagatttttgtgtgtggaaagacagttttctatccacgtctttttctgtttgtcagaaggtgggagtatggtccaaataaatccattaggttactcctgcagcatgcgcttttagcttctctcttgactgaggatcaaatatccctttgtgagctggccctcagctcctttgctcatgtgtacaaacctcagatgttactacattttatatctaccagagctattcaagcaatagtatttgaaccactagccttttaaataaaattctgccccattactgatgtgcagatattgagttcactttcattttttgccagatttctttgcactactttaggtaaaaatagttaatctatttttctttgacatcctagtttgcgtcagtgacagaacttactgcttagtctttgtactttttaaaaaatctataaatttaatgcactgtccaagtgaaatgtcctagttgtcattgtgattaaggggccaactttccaggcagctagcagagatactattctcttcctctcccagcaaatttgtattccttcgcccacgcattcctgctatactagatggcagccagtgatggaactataaagatgtctgtggtcatatgttgaatgtggcagcttgaagatgtactgccacgggtgatctagggcaggctgtcttccagtccatgtgttctcggtcgccgtagacagcgctctggctaccaccgtgaggctacttgaactgtcaggggcatctgcctaaaccagaatcttttgtcagaaaccttaacccaacaaaacaaatcttgagtagctcatgcccggctcttaggaattttgtctgtttaa

SEQ ID NO: 260446 - DNA, 918 bp, Homo Sapiens
aaaactacaaaaagcagtggagagctttacctggaatattaccatcttaaagggacaagcagatcttttgaaatatgctaagaatgagacattggagaacctgaaacaaatccattttgctgctgtttcatgtggactgaataaaccaggcaccgaaaatgctgatgtccagaagccacgccggagcttggaagtcatacccgaaaaagcaaacgatgaaactggagaatgaggaaacttacaataaaccattatggagtttataactctaggaccaattgtagtcagatgggacatttgctttgcactcactaatgagaataatattcgggattttaaagcacaactggaatagctaattacagtctattaaaactgtgaatgtatgtagcaatcctgcgtgtgaaggcaaataaactctttaacaggcaattatattgctggccaaaatatgctatatttgtatacaaagacattctaactcagttccagtatgaagaaagattattcactctagctccactgagaaacattttcctaagtgaaaacaatttcttaagatggaaatggattggattgtcaaattattatttattggagaaaaaaacctgatctacacatttttacttatatggggttgccagagtctctgggttctagatgattttggtggcatgcttgctgagccataattactaaagagaatgtaagtggacgggttccctgaatccccggggtccttggagagccatcgaggagaatgtgcaattggactgaagctccctggctgaagatacatgccgagtcagcacatgggtagagatgatgtaaaagcagccaatctggaaacaatacattgtaaatagtttttcattgtatgaagtagtgttcacattaaaaagatgttttatgataaaa

SEQ ID NO: 260447 - DNA, 1457 bp, Homo Sapiens
  misc_feature (574)..(574): n is a, c, g, or t
  misc_feature (671)..(671): n is a, c, g, or t
  misc_feature (1224)..(1253): n is a, c, g, or t
  misc_feature (1411)..(1411): n is a, c, g, or t
cagatgtcaaaactgatttcagaaatgcatagttttatccagataaagaaaaaaacaaacccgagaaacaatgaccccaagagcatgaagctaccccaggaacagagtcagcttccaaatccttcagaggccagcacaaccttccctgagagccatcttcggactcctcagatgccaccaacaacaccaaccagcagtttcttaaccaagaaaagtgaagacacaatctccaaaatgaatgacttcatgaggatgcagatactgaaggaagggagtcattttccaggaccgttcatgaccagcataggcccagctgagagccatccccacactcctcagatgcctccatcaacaccaagcagcagtttcttaaccacgttgaaaccaagactgaagactgaacctgaagaagtttccatagaagacagtgcccagagtgacctcaaagaagtgatggtgctgaacgcaacagaatcatttgtatatgagcccaaagagcagaagaaaatgtttcatgccacagtggcaactgagaatgaagtcttccgagtgaaggtttttaatattgacctanaagagaagttcaccccaagaagatcattgccatagcaaattatggttgccgcaatgggttcctggaagtatatccttttcacacttgtggctgatgntgaatgctgaccgaaacatggagatcccaaaaggattgaatagaagtgccagcgtaactcctaaaatcaatcagctttgctcacaaactaaaggaagttttgtgaatggggtgtttgaggtacataagaaaaatgtaaggggtgaattcacttattatgaaatacaagataatacagggaagatggaagtggtggtgcatggacgactgaccacaatcaactgtgaggaaggagataaactgaaactcacctgctttgaattggcaccgaaaagtgggaataccggggagttgagatctgtaattcatagtcacatcaaggtcatcaagaccaggaaaaacaagaaagacatactcaatcctgattcaagtatggaaacttcaccagactttttcttctaaaatctggatgtcattgacgataatgtttatggagataaggtctaagtgcctaaaaaaatgtacatatacctggttgaaatacaacactatacatacacaccaccatatatactagctgttaatcctatggaatgggggtattggggagtgcnnnnnnnnnnnnnnnnnnnnnnnnnnnnnnaataaaaatggcatatttttgcatctacaaccttctataatttttgaaagaataattaaagcttattccttttttgtggaaaggaaaacctccaataatcaaattacccccccgcccctgcaccattgtgttcaaaaaaggatgaaaattcataaaanaatttccttgttggggccgcctcggccctctaaaaaaattttttaa

SEQ ID NO: 260448 - DNA, 571 bp, Homo Sapiens
tctaagctggttataagcggctggtacggtccggaatcctgggatatcgtcgacccacgcgtccgataggattaaatctgcctgcagggagacgtaaagctgccaacgttaccctgctcacatcactagtagagggagaagctgtccacctagccagggactttgggtacgtgtgcgaaaccgaatttcctgccaaagcagtagctgaatttctcaaccgacaacattccgatcccaatgagcaagtgacaagaaaaaacatgctcctggctacaaaacagatatgcaaagagttcaccgacctgctggctcaggaccgatctcccctggggaactcacggcccaaccccatcctggaacccggcatccagagctgcttgacccacttcaacctcatctcccacggcttcggcagccccgcggtgtgtgccgcggtcacggccctgcagaactatctcaccgaggccctcaaggccatggacaaaatgtacctcagcaacaaccccaacagccacacggacaacaacgccaaaagcagtgacaaagaggagaagcacagaaagtgaggctc

SEQ ID NO: 260449 - DNA, 280 bp, Homo Sapiens
aaaaaaaatctaatataaaagaaaccatgtttatattttgttagtgatcaatgactttgtttatatggaaatttgtatattgttggcacacattttgttgaggtttacgtgcataaaggcctgcaataattagcacaatgaaaacggctttttctaacatgttcatttttttgaaagattgtggtgcaaaggcttactctaataagtaaccttctggactatggaatgaatataaatgaagggcactttgagtgttaataaagctaatatttttttcccc

SEQ ID NO: 260450 - DNA, 826 bp, Homo Sapiens
acagagtacttattcattcatttcccagatcatcatgaaggacacttaactttgttgcgaagctctttggtgaataatagaactcaggccaaggtagcggaggagctgggcatgcaggagtacgccataaccaacgacaagaccaagaggcctgtggcgcttcgcaccaagaccttggcggaccttttggaatcatttattgcagcgctgtacattgataaggatttggaatatgttcatactttcatgaatgtctgcttctttccacgattgaaagagttcattttgaatcaggattggaatgaccccaaatcccagcttcagcagtgttgcttgacacttaggacagaaggaaaagagccagacattcctctgtacaagactctgcagacagtgggcccatcccatgcccgaacctacactgtggctgtttatttcaagggagaaagaataggctgtgggaaaggaccaagtattcagcaagcggaaatgggagcagcaatggatgcgcttgaaaaatataattttccccagatggcccatcagaagcggttcatcgaacggaagtacagacaagagttaaaagaaatgaggtgggaaagagagcatcaagagagagagccagatgagactggagacatcaagaaataaagggaggcatgcaagtgtggagtatttacttgctcagtaactgtgactggtgtctattgagacctagcctagttttcctgcagaacatgaacgaaatgtgctcattgaaattaaatacggagtcaaatcgcctattggtggggttaaaggaaccggtttttagctggaatgggct

SEQ ID NO: 260451 - DNA, 1293 bp, Homo Sapiens
ggggtttccgtacggaagcaaaggagccaagaccatggcgaaagccggggataagagcggcagcagcgggaagaaaagtctaaaacggaaagccgctgccgaagaacttcaggaggctgcaggcgctggggatggggcgacggaaaacggggtccaacccccgaaagcggctgcctttccgccaggctttagcatttcggagattaaaaacaaacagcggcgacacttaatgttcacgcggtggaaacagcagcagcggaaggaaaagttggcagctaagaaaaaacttaaaaaagaaagagaggctcttggcgataaggctccaccaaagcctgtacccaagaccattgacaaccagcgagtgtatgatgaaaccacagtagaccctaatgatgaagaggtcgcttatgatgaagctacagatgaatttgcttcttacttcaacaaacagacttctcccaagattctcatcacaacatcagatagacctcatgggagaacagtacgactctgtgaacagctctccacagttataccaaactcacatgtttattacagaagaggactggctctgaaaaaaattattccacagtgcatcgcaagagatttcacagacctgattgttattaatgaagatcgtaaaaccccaaatggacttattttgagtcacttgccaaatggcccaactgctcattttaaaatgagcagtgttcgtcttcgtaaagaaattaagagaagaagcaaggaccccacagaacacataccctgaaataattctgaataattttacaacacggctgggtcattcaattggacgtatgtttgcatctctctttcctcataatcctcaatttatcggaaagcaggttgccacattccacaatcaacgggattacatattcttcacatttcacagatacatattcaggagtgaaaagaaagtgggaattcaggaacttggacctctttttaccttaaaattaaggtctcttcagaaaggaacctttgattctaaatatggagagtatgaatgggtccataagccccgggaaatggatacaagtagaagaaaattccatttataaagtactgagagaatgatattggattttgctgaacaggcctatcttgaactttggtaaattatttttgacagaatactcttttcaaaatggcatttgctgatttcataaacctttcacgtctggacgaaataccaaatgccatgaattgccactgtgtgtttatgtagaaaatacaaataaaagttattttgatggcttaggtttcctt

SEQ ID NO: 260452 - DNA, 756 bp, Homo Sapiens
ggtggttgataactaagacaaagtgctgaagaaatgatagaagttgcaaagagacgttagtgtactatacttggtgaatgttggaaactgcaggacctgctgtagggaagaaaaagttctagctggaaagaatgaggaaaccaaagagctctgcagagggagggggaagacaagacagactgcagctgtgcttctgtggaccccaagaacagcactgttcatacacagaggatagctctgaagagagatacctgtgtagtgcagcttctaaatttcataataaagtcagagcaccataacatggtgtgggaagtgaagacaaatcagatgcctaatgcagtacagaaactcctgttggtgatggacaagagagcctcaggaatgaatgactcattggagttgctgcagtgtaatgagaatttgccatcttcacctggatataactcctgtgatgaacacatggagcttgatgaccttcctgaacttcaggcagttcaaagtgatcctacccaatctggcatgtaccagctgagttcagatgtttcacatcaagaatacccaagatcatcttggaaccaaaatacctcagacataccagaaactacttaccgtgaaaatgaagtggactggctaacagaattggcaaatatcgcgaccagtccacaaagtccactgatgcagtgctcattttacgatagatcatctcctgtacacatcatagccactagcaaaagtttacattcctatgcacgccct

SEQ ID NO: 260453 - DNA, 533 bp, Homo Sapiens
aaactgcaggacctgctgtagggaagaaaaaagttctagctggaaagaatgaggaaaccaaagagctctgcagagggagggggaagacaagacagactgcagctgtgcttctgtggaccccaagaacagcactgttcatacacagaggatagctctgaagagagatacctgtgtagtgcagcttctaaatttcataataaaggtaaaaatgggaaatgttttcagttcagataaggttgactgtgcagctcacatctgtatgtgaagcatagtaccggatattcattaaggatttttagttatcaaaataggttaaattatattctgtatacttaagatgccagaaatacttctatggaaagagttaaaatctcctatctaaactgttaatattaggtgtttaaagaactcacatagtatgactagtttctctcttaagagttaataaataaggaatctgcactgagaaccattgcaaaggaagctggagacgggtggctttcatagagactgggaatgtgagtgctctcttt

SEQ ID NO: 260454 - DNA, 852 bp, Homo Sapiens
  misc_feature (101)..(101): n is a, c, g, or t
tcttcaatagcatgccttgccgatttgtcatcttttccagttctttagtatcatgatttatagcatccatatgttctttttccatatttttcccagcgctnccatactcttctgaaagctccttaaattccagcttctgtttatatcaatggaattgtccaaatcttctgatcgtgccatagtgtcttttactcttttattgatggctccaagttctgatgttgtggctgtgagaacagtacccccttctgtctctctcagctcattaagttcctgttctacttggtccaagcgttttctcagattctcattgagataagtctctactcgagtaataataccttctaatttaattctttcatttagcaactgtctgttttcctgctgaagttgacgaatctcatcattcagtgcatctactctcttctgatcttccaaactcagttgagaaagcaaatcagttcccagttctgctttcaatgactctctggtagactccatagcatgcaagcttgcctccaaactctgtaagctacgttgcttaggcatgaaggttttctctgactgctgcctcttctcttttagcatcttcatttctgataatatgctatctctagatgctttaaatttcctttgctgggtctcgatctgttgcatttggttcatcaactgatcaatttcattattaatcctttcaatatttctgcgcaggttttcattgagctttgcttcaagttcacctagttcttcttctgcttttctaacatctttttgcaattcaagtcgagacttccttgtgtcataataacccccagttagagcaccccgatggctgacttggtcaccttcccc

SEQ ID NO: 260455 - DNA, 1752 bp, Homo Sapiens
gccgcgcgcgcgggagcgcgggaggatcggcggctcgcggtcactggtccctggctcggttccccgcaccccggggctcacacttacccgcgcggaggagcagcggccgggtgtccacccccatcctgcgcccagtctcctcgattcccctcgctctgagccgggagagccgaacagctgaagagagttcactgactccccagccccaggtgggccttgtgcacatcatgaccagttttgaagatgctgacacagaagagacagtaacttgtctccagatgacggtttaccatcctggccagttgcagtgtggaatatttcagtcaataagttttaacagagagaaactcccttccagcgaagtggtgaaatttggccgaaattccaacatctgtcattatacttttcaggacaaacaggtttcccgagttcagttttctctgcagctgtttaaaaaattcaacagcttagttctctcctttgaaataaaacaatatgagtaaaaagaccaatctgatcgtggacagcagagagctgggctacctaaataaaatggacctgccatacaggtgcatggtcagattcggagagtatcagtttctgatggacaaggaagatggcgagtcattggaatttttttgaggactcaatttattttatctccaagatcactcttgcaagaaaaacaacgtggccaccacacaggcccataccggagtatggcacttactcgctctgctcctcccaaagcagttctccgacagaacatggatgaaacatgagtcatgaacacagaaagtctaagaggagaaatatgatggatgaagagctctgtagatgctgtatagacactaaataagagttgattagggtagtatattatagtcatctgttatgctgtgaaatttggaattcaaaattttgaagtctgtaaattgtgttagtcattaacttagtcacctgttgtattctggatctacacaaaattattttaagtgctcttattaatctgtgaggattaatatacaaaaagtatcctttgagatgaagtcgtgttctcaaaataaggttatattattttctttttctgcttgattttcatcttgtgttttgctttgtttttgtaaggaaccatctcttggtttggtcacatcagttcacaacagccatttgttttcaaggtcaaggctccaggcaggttgttactggtgtttgcagcctgtcagtacttgcagtactggaataggttctaggctagtgtctgcgcgtcactgtggttttagcatgggaggacttatttgagaaatactaccttacttttctatgatttctttttttacagagttatagtgtgtttactcctaagatgacagttctctttgtctatattcagcatctaagacaaatatttaaacattttaaagaaccactgtgttaagtttaggattatttacttaccaaattagaagtttgacttttatgtgttatacacaatcttaaaatttcacgaattcacctttttaatagtatccatgtacataataaaatcaaagtttaattagccattttctttgaatttttttctaaataagggaaataactgttcttgggccactttacagagataaatgtatgtgaatgtttatgataaacgcttaaatatttctaaaatgttaacttcaaaaaagtctttttcagttcttaaataaaaatttttttattttaggataccttattcgacttatccttaac

SEQ ID NO: 260456 - DNA, 466 bp, Homo Sapiens
catatgttaagtatgtaagaaaaatatatactttgacataaataagaaacggtgagttgataattggatagaatggtggatagagtgagagatatgtagtaaagcaaatataccaaaatgatgtccaatttaagtggttggactataaatatgcacttcccacaacatttttatatgtttaaacagttttataataccatattagggaaactgtttgtttcaaggaaatagagattgtgatatattttagtacaatgaagtgtaatcatgtaaaataaaagcttttacttctggcaattaaagttagtcatgttagaacactgtctaggaatggttggaaaatcatattttattttctaatcaatatatttatgtcatctgtcaatcagaattacactgactttaaaaagcaataatatgactgtatattcatgatgaaatatagcctaagaccaaaataatgccc

SEQ ID NO: 260457 - DNA, 624 bp, Homo Sapiens
atcttgactggctatggccctggccagctcctttcctgatagtctgattctgccttcatatataggcagctcctgatcatccatgccagtgaatgagaaaacaagcatggaatatataaactttaacattaaaaaatgttttattttgtaataaaatcaaatttcccattgaaaccttcaaaaactttgcagaatgaggttttgatatatgtgtacaagtagtaccttcttagtgcaagaaaacatcattatttctgtctgcctgcctttttgtttttgaaaatgaagactatcattgaaacaagtttgtcttcagtatgaggacatgttgacggagaggaaaggtaggaaagggttagggatagaagccaggttattttatgccaacaaagtctgctctaaaaagccttattgtttcactacctattaatatgagaactctggattcattttcccttatctcatgtttatagtgttttaagcttactttgtatatgtttactgggttaatgagtcacagcttttcaggatgaactcctattctactagagagatactcaattgaaacacacttttagattgtgttcttgcaagcccactctcagctgtcaaagttaacaccca

SEQ ID NO: 260458 - DNA, 628 bp, Homo Sapiens
gtcatgttggacttctccttcagctttgattggagtagtgtgtgttccacaatgccaattctaatgtccatctctacagtttcttgcttcagttttgttaagctctgtttaatcttcaccaaaggagcaccatcagtcatgctgctgcccttttcttccatttcttgttttaccttttctaattcttccataacctcagagaggagtctggttctttccgtcactcctccatttccctgctggtatcgctcctttgcctcactcagctgggcttgagctgcacgatattcttgaaccaaattctcaagctgattgttgatgtacttttctcggctgctgatcttttccaaagtcctagtaatttcattatggagtttgtccaaaaatccctcggtctcctttagagcagattcaattccacttctgtgctggtgcatttggtcaacatggattctccaatccttattgtcagtcctaatcgtgactttcagttgcggtagtacacgttccacttctaggctccattctgcagcatctgttgtggattccaaaatatcttcttgtttggcagtctcgttcatatccaagtgatatgtctgggcctttaaaacgttgagatcaataaagt

SEQ ID NO: 260459 - DNA, 1244 bp, Homo Sapiens
  misc_feature (459)..(461): n is a, c, g, or t
gtcagtttacacatacatcatgttaatattagaccaaggcacaaaacgtttagtgcataaacccagtttcttttaagatttagcattttattttagtctcttatcttagtttggaccacttgtacccagtactctacctactacagactatttaacttacccaacaaaatcaaaagaggttgctgaccagatttataggggacataactgtttatattatcaaagtgtttgcataaccaaaagtacaataataaagatgaaaatgcctcctatttcttttaggaaaataatacttaataagcttgctgcatctttgatgtttttactactactgcatgacaatgaatatctgatagaaaaaagaaatgtatacttgaattatgatagctcatccatcacagtttaatctaaaaatgaaatttctacagaaacaggaactattttgacaaagaaaaaaannntccctcatccaaacttctttgtagtggtaaaggctgcaaatttgcagcgtttagaaaactacactatcaacaagctttgctttatggactgagatgtacaaaatctagaaagcagatgaaagtgaattatttcaaagttttagtaaaacttctgataatcagagttcaaagcaaatatggcacataacaactcaagcataaatcaagatggagagcctggagagtttcttaaattttccaaaaagctatcattccaacatgtaggatttctcccctattttaaccttaccagtttcaaaggaaagaaaagggagtggcttccatatagacagcacgtgcgcgagagcacacacacgcagagtggcaggcagagtgtctaattccttcttcccaccttccttcttcccaccacccaagtctcactttacttattaaaagaaaactgcagaactcctcattggttttcctttacctaatgatttctgtgaccttaattgctgccatcattgttatttcttgcatttcaacataacaaaattcaaaagcagcttcattcaggaacacgtatctaaacacctgtgtaacagcgggggtacctaggtaataataactgccaaattcagtgatcaaacttttgagttccacagttaagatattatgtgaagctcagaatcatgtttcagaccattgaaattactggttaaaatacaaatagctgaagacatgatgtaaaagattaagtacttggttttgtaacatatttaccaattaaagtcacaaaat

SEQ ID NO: 260460 - DNA, 472 bp, Homo Sapiens
cactttaaatagacactttattagatccacaggcgataaaatcccagagctactgttaggcacgtaaatatagaccctgctaaatatttaatattatcaagcttgtgtgactcaagcatggttttgagaccagcaacctcagtttcgatcttcctgtctgtctgggtaagggcccgatcttgctgggcatgcaatgccactatttctgttctcaattccagcagcttcttttcgttcaatgaatacaattcttttactctgctcttttctaggttgaagtctaatttggtatctgttcggactttgatcacttcatccattacttgttgttttaactgatgtagttcgagttttattttctcattttctgctctgagggctgaaaattcactcttctccaaaataatcatatcctttttcacattcgcaatctgagacattacttgctgaaaagtgatttcccctcgtgccg

SEQ ID NO: 260461 - DNA, 1183 bp, Homo Sapiens
  misc_feature (75)..(75): n is a, c, g, or t
  misc_feature (88)..(88): n is a, c, g, or t
gttgctgaaacgctgccgctgagggtggactcgatttcccagggtcccgccgcgggagtctccggcgggcgggcngcgcgcgagccanccgagcgaggtgatagaggcggcggcccaggcgtctgggtcctgctggtcttcgcctttcttctccgcttctaccccgtcggccgctgccactggggtccctgggccccaccgacatgggcggcggtgttgcagcaagtcctgggagcgcacggagctgaacaagctggcccaagtctgtccagaacaaacttgaaaagttccttgctgatcagcaattccgagatcgatgggccttgaaggggcgggcatggagaaatttaaaggtgggagagcgaacagaaaagaggttgtcccacagtcaggagagacttgtgaatgaaacccgagagtgtcaaagcttgcggcttgagctagagaaactcaacaatcaactgaaggcactaactgagaaaaacaaagaacttgaaattgctcaggatcgcaatattgcccattcagagccaatttacaagaacaaaggaagaattagaagctgagaaaagagacttaattagaaccaatgagagactatctcaagaacttgaatacttaacagaggatgttaaacgtctgaatgaaaaacttaaagaaagcaatacaacaaagggtgaacttcagttaaaattggatgaacttcaagcttctgatgtttctgttaagtatcgagaaaaacgcttggagcaagaaaaggaattgctacatagtcagaatacatggctgaatacagagttgaaaaccaaaactgatgaacttctggctcttggaagagaaaaagggaatgagattctagagcttaaatgtaatcttgaaaataaaaaagaagaggtttctagactggaagaacaaatgaatggcttaaaaacatcaaatgaacatcttcaaaagcatgtggaggatctgttgaccaaattaaaagaggccaaggaacaacaggccagtatggaagagaaattccacaatgaattaaatgcccacataaaactttctaatttgtacaagagtgccgctgatgactcagaagcaaagagcaatgaactaacccgggcagtagaggaactacacaaacttttgaaagaagctggtgaagccaacaaagcaatacaagatcatcttc

SEQ ID NO: 260462 - DNA, 657 bp, Homo Sapiens
ccttatgaatctgttgtgttgttttgattccatcattaatgcacttgtggagacttgtgataagctgctgctcctatattttttaagaaatataataaagcacttagggcaggggaaatcatctcggtaatcatggaacctaaggatgtgatttgttttcattgtttgtatgtactacttttatggcagtcatatgaaccattatcttagcatggtaaacctgggttttgttcatattttctccagacagaaatgcaaagatcaaactgtgcaaatattaaaaaaatgcacatgctgttttattcaaatgcctcttttgtacatgttcatgtttagtgttttctcagaatcagcaactcaaggtactatgaggatttttctcactaacataatttgattacatactaaataagaggatatgttaatatgaggaaatgtaaattaaattagttataaataaataaccaaaaatgtatgtaaacattcaaatgattatctgaacaaatgagattttgtggtgttttctttaacccatgtgatgtcctccaaaatgtgtagggtaaaaattcacagggcttccagatcactttttcaatattaaattttatttacataatgttgacatctcatacttcatgaagtaattttgactcatgc

SEQ ID NO: 260463 - DNA, 986 bp, Homo Sapiens
  misc_feature (126)..(134): n is a, c, g, or t
  misc_feature (315)..(339): n is a, c, g, or t
  misc_feature (427)..(436): n is a, c, g, or t
  misc_feature (757)..(766): n is a, c, g, or t
tgggttcagctgcttattgcaaggagcaattgccaaggagagtttaaactcaattactgtaaccatactgaataaaaaatactgccaagaacaaaaatacgcctgggtaaagacagccactgaatnnnnnnnnntcgacataaagcgtatcaaatatttatttatctgggcaacaaaggactatgatacattgacaggcatggaaactactgccagcacaactcaatacaatgcaactagaactgcttccaatatggccagtgaaaatacagaataccaggtggtcccaaatgtttgaagttctttgaacagaannnnnnnnnnnnnnnnnnnnnnnnngaaaattccctaacccttggtttaaagacaatattcatttattgctcaaatgatgcttttaagggaggacagtggaataaaataaacnnnnnnnnnnctccctacaatacatagaagggttatcaaaccactcaagtttcaaaatctttccagggtccaatatcactttttttctttcggttcaatgaaaagctaaatgtaataatactaattatagataaaattttattttactttttaaaaatttgtccagctgtttgtcacctttaacatgctacaacagggctaaattcatgaatcccagagaaaaaaatcccccaaacactggatttctaaatcagtaccatgaaccacatgaagaactaatagggaagattcaaaacccactaaacaagaggtaaacaagatcagataaatnnnnnnnnnnggcttaaaacagactcaccatatttacaattcccattaaattacacataaataaatatatacagagacgtgaacactgattcccttatataactgcgaatcgtgttgccagagaaagttcaagttggtcgctttaccttaaagaggaaaaacttctacaactgaagacatgacatggaacttcgtgtatttgtgttcaagtttattcaccggacgcgtgg

SEQ ID NO: 260464 - DNA, 773 bp, Homo Sapiens
  misc_feature (508)..(589): n is a, c, g, or t
cggcacgaggccaaagctcgtttaactgacaaacatctttctattgaagaggcaaagtctgtggcaatgtgtgagatggaaaaaaagctgaaagaagaaagagaagctcgagagaaggctgaaaatcgggttgttcagattgagaaacagtgttccatgctagacgttgatctgaagcaatctcagcagaaactagaacatttgactggaattaaagaaaggatggaggatgaagttaagaatctaaccctgcaactggagcaggaatcaaataagcggctgttgttacaaaatgaattgaagactcaagcatttgaggcagacaatttaaaaggtttagaaaagcagatgaaacaggaaataaatactttattggaagcaaagagattattagaatttgagttagctcagcttacgaaacagtatagaggaaatgaaggacagatgcgggagctacaagatcagcttgaagctgagcaatatttctcgacactttataaaacccagnnnnnnnnnnnnnnnnnnnnnnnnnnnnnnnnnnnnnnnnnnnnnnnnnnnnnnnnnnnnnnnnnnnnnnnnnnnnnnnnnnctcttgctactcagttggatctagcagaaacaaaagctgagtctgagcagttggcgcgaggccttctggaagaacagtattttgaattgacgcaagaaagcaagaaagctgcttcaagaaatagacaagagattacagataaagatcacactgttagtcggcttgaagaacaaacagcatgcta

SEQ ID NO: 260465 - DNA, 455 bp, Homo Sapiens
  misc_feature (81)..(93): n is a, c, g, or t
  misc_feature (97)..(97): n is a, c, g, or t
tacttaccatactgggaggtagaagagatgcagagaaatgtggaatttgtggacctatgggtaatttatgctttcctcctnnnnnnnnnnnnngccntctttcccaccccctccccatctcccctttttgaatagataatggatccaattatccatataattcaataggtatttattgagaggctcccttctattccccatccctaatccctaacgaacccacgggcacacacttttggaaaccctggtaaagtaacacttagggggaaatggggacaaactggctctctggattagtgcgggtatagacacccccaaataggtgggtaggcccattgattcagctccttgcagctgtctctgttcaaaggaactgtgcagatttagaacgaattggagcttgagcttcacaccaccagcttccagagattaaagtttgtacaaaacattgcaaa

SEQ ID NO: 260466 - DNA, 522 bp, Homo Sapiens
agagtccataggctctaaaaactaaaagaaatgggatgcagggggaacaagttatttgtcctgagttactgtacttgcttgacatggttgttgggtactaaatcacaaaagaatccattccaggtatgcatgtctgggggttgggctgtgtctagattagaaactgggtttcaagctttgcattgatgggagagcgtcctctcctctatcagctgcgtgtgttctggataggacagtagcccagagatggaaaccaccttcagtaccattagcccaccataccaagtaacaagttaggcaggaatcgtgggaatttattgagtcagctttgagtgtttgagagaatgtaaacaagattggctcgaattgtaaacgtttgtactttggatgagttcatggttctttaggtcaccttaataccagctatctttggtagaagctacagcatttcagtttctctgggaaactgtattcacatttttggcattttaaaaaattttaacagtattcaaaaaaccaaat

SEQ ID NO: 260467 - DNA, 1047 bp, Homo Sapiens
accattgcagcatatactttattattatcatcattattttccacaacatttaataccaagtttccttctctcacatagaatattacccaatagaagtctccaaaaggggccatagcacattcataacaaagatagaaaagaaaactttcaatgtctgctttccaatatgatgattcaactaaaacaaagctgaatttctcagctatgaaactgaaaaaatgaaaatcagcccatgtgtacatcacggccagccatgatcattaacacctccatgaaatgagggagaaaaagagagaaacaactgcttcttcttaccaaacttctatataacttcaaattactgttaaaaaaatttcctaaaaggcattctgctcccgttctgaggcaatgaacattggggggtcttctcaaggaccaaccccgggcaagcaggtggcgcctgtgaaatggaaaacattcggaaaacagcagcccctcttcagctccatgtacaggagactttctgatttccaatcttggctcaggtcagaagaaaaaggggaaaggttacattcctggaaagaaaatacagcctatttgagggcatgcctgactttcagtccatgcactagtcctcttggctcgtagagttttcagtgccctgaaaccatgatccctctgcctccatggtcctctgagtgtagttattatgtctgcaaaccagtaatgtcacaagtcaaagggtctggggcttcccagggaaccactatgactgagtatattctgatttgagaaacctgtgacaagtcttctcagcactcgccttctaatttttggagccgatgcctgggttcccagcatccaggtcacagtagctggaaatcatgcaggaagggcaaaaagccagcagcccagaatggactgtctctgcagctctggcacattctctacacatcgccacaccactcaaatgtcctataaaatatcaaaaccaataacctggacatggccgattaatctgtacaaaaaggctttataaaaatactcccggccgggcgcggtggctca

SEQ ID NO: 260468 - DNA, 893 bp, Homo Sapiens
  misc_feature (745)..(745): n is a, c, g, or t
  misc_feature (818)..(818): n is a, c, g, or t
agaaagcatgaaaaaagtgaaatgcatttgaagtcattggaattttggagagaataccaattttgtgatggagctgtcagtgacgatttatctattcattcgaaacagattgagggaaataaaaagtacctaaagcttataattgaaaatattttatttcttggaaagcagtgtttacccttaagaggaaacgaccagtcagtttcatctgtgaataaaggcaattttttagaattgttagaaatgagagcaaaagataaaggagaagaaacatttcgacttatgaattcacaagttgacttctataacagtacacaaattcaaagtgatattatcgaaataataaagactgaaatgttgcaggatattgtgaatgagatcaatgactcctcagcattttcaatcatatgtgatgagacaatcaatagtgccatgaaagaacagctttcaatttgtgtaagatacccacaaaaatcatcaaaggctatcttaattaaggaaagattcttgggttttgttgatactgaggagatgactgggacccacttacataggactatcaaaacttatctgcagcaaattggagttgatatggataaaatacatggccaggcctatgatagcaccactaatttgaagataaaatttaataaaatagcagcagaattcaagaaagaagaaccaagagctttatacatacattgttatgcacactttttggatttatcaataattaggttttgtnaagaagtaaaagaactccgaagtgctctaaaaactctcagttctttgttcaacactattttgtatgtctgggngaaatgtttggcaaattttcgaaaacattttataggctaagtcaaaaacaaaacatggcaagaaacattatatca

SEQ ID NO: 260469 - DNA, 530 bp, Homo Sapiens
gttgctgctccattcaaacggtggcttcgtcgcgttcctcggcgcgcgcgggccggatctggccgcgctccttcacgaacacgatctgctcgtcgggcgtctcgctgttgacgaaggaacggaagcgttggcgcacctcgggcgtcgtgacggcggtcttccattcgcactggtagctgtcgacgacggcctgcatctgcgcctccagctcggcggcgaggcccaggctgtcctggatcagcacgtccttcagatagcccaggccgccttcgaggttgtcgcgccaggtgctggtgcgctgcaggcggtcggccgtgcgcacatagaacatcaggaagcggtcgatggtgcggatcaagtcggccttgctcaggtcgccggcgatcagctcggcgtggcggggcttcatgccgccgttgccgcagacgtagaggttccagcccttgtcggtcgcgatgacgccgacgtccttgccctgggcctcggcgcattcgcgcgtgcagccggacacgccgaacttgatcttgtgc

SEQ ID NO: 260470 - DNA, 2130 bp, Homo Sapiens
  misc_feature (1836)..(1844): n is a, c, g, or t
aaaacagaaactccaagtactgtatcaacaaatgcaagtacaccacaatcagtgagcagtgtggttcattatctggcaatggcactctttcaaatagagcagggcattgagcggcgttttctgaaagctccacttgatgccagtgacagtgggcgttcttataaaacagttctggaccgttggagagagtctctcctttcttctgctagtctatcccaagtttttcttcacctatccaccttggatcgtagcgtgatatggtctaaatctatactgaatgcgcgttgcaagatatgtcgaaagaaaggcgatgctgaaaacatggttctttgtgatggctgtgataggggtcatcatacctactgtgttcgaccaaagctcaagactgtgcctgaaggagactggttttgtccagaatgtcgaccaaagcaacgttctagaagactctcctctagacagagaccatccttggaaagtgatgaagatgtggaagacagtatgggaggtgaggatgatgaagttgatggcgatgaagaagaaggtcaaagtgaggaggaagagtatgaggtagaacaagatgaagatgactcctcaagaagaggaagaagtcagcctacccaaacgaggaagaccacaagttagattgccagttaaaacaagagggaaacttagctcttctttctcaagtcgtggccaacaacaagaacctggaagatacccttcaaggagtcagcagagcacacccaaaacaactgtttcttctaaaactggtagaagcctaagaaagataaactctgctcctcctacagaaacaaaatctttaagaattgccagtcgttctactcgccacagtcatggcccactgcaagcagatgtatttgtggaattgcttagtcctcgtagaaaacgcagaggcaggaaaagtgctaataatacaccagaaaatagtcccaacttccctaacttcagagtcattgccacaaagtcaagtgaacagtcaagatctgtaaatattgcttcaaaactttctctccaagagagtgaatccaaaagaagatgcagaaaaagacaatctccagagccatcgcctgtgacactgggtcgaaggagttctggccgacagggaggagttcatgaattgtctgcttttgaacaacttgttgtagaattggtacgacatgatgacagctggccttttttgaaacttgtttctaaaatccaggtcccagactactatgacatcatcaaaaagcccattgccttaaatataattcgtgaaaaagtgaataagtgtgaatataaattagcatctgagtttattgatgacattgagttaatgttttcgaactgctttgaatacaaccctcgtaacacaagtgaagcaaaagctggaactaggcttcaagcattttttcatattcaggctcaaaagcttggactccacgtcacacccagtaatgtggaccaagttagcacaccaccggctgcgaaaaagtcacgaatctgactttgtccttctaaaggatatatttgaagaaaaacaaattgttcatgaaaatggaacattaaatcatgctgtataaagcaataacaaacaattgattgaccacatgaaagtgtggcctgcactatattctcaattttaatattaagcactcaggagaatgtaggaaagatatcctttgctacagttttgttcagtatctaataagtttgatagatgtattggatacagtactggtttacagaggtttttgtacatttttgagatcattcatgtgtccagagatcttggaaaatattttttcacccacgatttattttgttattgatgannnnnnnnnaaagtggtggtattaagggagagttatctacatggatgagtcttccgctatagcacagtttagaaaaggtgtttatgtcttaattaattgtttgagtacattctttcaacactacacatgaatgaatccaatcttataaaccttgaaagtgctgtaaccagtgctgggctgcaggtaataaagtccaagttttatttaactagaaaatttatttttagtaattgaggaggtaattttggcgaaaatttgggtctttgaattttatataaaaatttaatacccctgg

SEQ ID NO: 260471 - DNA, 771 bp, Homo Sapiens
  misc_feature (24)..(24): n is a, c, g, or t
  misc_feature (52)..(52): n is a, c, g, or t
  misc_feature (63)..(63): n is a, c, g, or t
  misc_feature (69)..(69): n is a, c, g, or t
  misc_feature (102)..(102): n is a, c, g, or t
  misc_feature (107)..(107): n is a, c, g, or t
  misc_feature (113)..(113): n is a, c, g, or t
aagccgtaccccccaaggtcaaancccaagataaacagcatcaacaagaggncacagactaanacaacncccctggggccccggggaaaagacctgtatccnttttntttttncccttccaaaagtcctaacctcctaaggcaaccggtttcctaaaaccctcaaaatacacaaatacactttcatgttttaagtctcatcttcactaaatgttcagacacatccgttttaattatcccttttatgagggtctgtgtttttcctgtgataaaggattcaggaaataatttaccacattataatctatttaacataactaccctcagtaaatagttcataaaatacttgaggctggtgacatttgtcttgtaacctgctcatttagtgggttgggtttacaaaatgtatctaagcttttattgcaatctgcaattatgtacattaacaaccttacaaaccttgaacatagtatatatatccccttctctagcctttcaaatggggcttaagagagagaaaatggcaccacttcactgctataatgatttaataataaatcaagcagacttatcatccacatggataacgaagctctccctagggaaactgaaatacctctagtcatcttccaggttctcctagactggaccagtatttaaaaaatcccaaagatgatgttactcaagccattaccatgaaggaactaaagtcagccctttaagttcgcaaaactttaacataactaccctcagtaaataatttattttttct

SEQ ID NO: 260472 - DNA, 844 bp, Homo Sapiens
attttgtacataaagtagacaaacttatttaaagaaatcatgaattgcaataccataaaagtcctgataaactgaatgtaactttatcttcacagtaatgcaaacatttatattaattttacagttttggaattctcattcttagttttaaaatctgcaagtataaaaactgcctcttattattatgaggtcttaaaaatccaatttttaaaacaacaatataattaatataagaaactgttagaaaaacagttcttacattcattagaatcataccttctttgttttggggtacttggtaggacatttattaagtgctggaacttcagtttcagtaattatttctgctagtgcagtttcagtttctggttctattgtaagtacagtattttcaatatcattttgttgtgaagtaacttctatatcaggagaagatggctggatatctgaacacatgctgacagttctgtgtctccgacgctgctgtccaatgtgagtcctactccgagaaaaactttttctctgtttagttctatttactttggcaggggttggcttgctagcattttcttcttttgcttgttcctgaataacttcaacatcactgacaatctgtgtatctttacattcagttttaacttcagttttggctgtgctgatcctttccaaagcttgttctcttcttttctctctcttttcaagtctggcaaaagcttgcaaaattgcttccatttttctttcttctcttgtcatcttccttttcctttctgcaatctgctcctctgattccatttctacttcattactaataggagttttttcttctatatcatcaataaaatct

SEQ ID NO: 260473 - DNA, 963 bp, Homo Sapiens
ggtcaccttcatcttgtataatttcatagattggctgacttagggtctttcaatagtttgggaattgaaagattcttgttatatatagctagtttgggtttgtttttgttttaactattttgaaggttaggtgagatgggcaaataggcttaactattttgaaggttggatgaaaagagatgggtcagtattcctacagaattcttattaactcaaataactaaatttcagaaaattaagaagctgactttatatttggtggtttgaagtatcttgttgttagcatttgtaataatgctaaaaaaggcctaataaaatgcccaagaaaatattcagtgcatttatagagaaggatattttgtagtagtatagtaatgtgttatgtagtacagttttaaagctataaatggaattttgtgtaaattcacaaaaatgtgatataaacaggatctaagactggattccctgtcactaaactgcaccactatacctgtctctctgtgtgggggacactgctgatgattcccaagattgagatgatgacggtgatgacgactgggtgaacagccatcacttcaacattgtgataatccttcacagcaagaaaccgaataaaatactaacatttctaacaactgctctgacattgtaaagagatccaacagaatcactcctgctgaaaaatacgctttctgccacctacacatttctatttaggaagtaaaatttgcttcatggtcatgaccccattagtcagtgttacagctgtgttggggataggaagtatatctggcagattgatatttatacacttttttataaagcagattttaaaatatagtaacatccatttttttcccttgaaagtgattctcttataaaaaatgaaagtggagtttaaggtatatcaaatcgttgtggaaggtgattaaaaatcaaaattcttttaaatatcaacttaat

SEQ ID NO: 260474 - DNA, 1293 bp, Homo Sapiens
  misc_feature (1166)..(1166): n is a, c, g, or t
  misc_feature (1195)..(1195): n is a, c, g, or t
gggtggtggatctcaatccggttgttcagggggccggggtcttctttaggaaacgattaaaaggccgcggggtcccctaccttagtagggccccgcgtcgtccaaagggaatgtgtttagagaaactatttgaagggtgcgaagccgggcccccaggctattgcggggatagtgggttgtggcggagtccgaggggagatgtttattgactgtaatgtaattgtttggcatacaaattacttaagtatatttacaattcttacataatgtacattttagaagataatgtactttgctccatttacaatgacaaactactgtaaaactacattccatgaattagatacaaatcctctacatactaataaaaagtaaatggactgttggttatacattctttaaaatataccttttcacaggtagcaagaaatagtacatgtaataagtctttatgactggaatgatccagaaatatcacaaagcatgagtaaacacatatataaaagtagctcatcatttccaaaagttaacctttagcctttgtgtaaaataaatggtgccaacaatctttataatgtagcaagctttccctgtttaatatccaaaaaatggagggtggggaggttgaagaaaaataagaaaagttagcaaataagatagtgaaaagaccaatgcagagaaaagtttatgtaatcaaatcttgctttgtctccacattatcacattttaagtggataaatttatgtaaacagaaaaagatgtccacaaaaccatatctgtagatgtcatttggaagcatcaagaaattgataagtatgtggtgaattaaaattacttttataatgttttgctttcattaatgtttgttattgcaaaaatgtaagatttcctacaattttgtcttcaaatcccaatctagcccttcaaacttttatccaggttctccagaatatttggagtctttgttatcaaagcacaaggaaagctggcattcattatcagacttcgctgctttacaatgatttcaaatcatttcatgatacaaataaagtgcctctgactgggtgggtcagtcagacctggggtaatgggtgccaattctgccaccagctaggcaaatcaaggtgaccctggctctggtaaaacaaaagggagcaccctagggnttcaaaaaaggtagggacaactttggggnggcttagggattaagggtccttcagggaaatccctaccctgggggattcccggtggggggttaaggccattgcccaggttacactgttaggtaggggc

SEQ ID NO: 260475 - DNA, 186 bp, Homo Sapiens
acctagtgcccacagacttgcccagtggtaacttatttgtccggttcaagataactctgtagttttctttcctaggacttgttgttaaacgccaaaagacatttttgaactgtacatttgatcagattgttagcttttctgttttatttcttttgagaacctttgaataaaaaacatctgaaattt

SEQ ID NO: 260476 - DNA, 1539 bp, Homo Sapiens
  misc_feature (1186)..(1186): n is a, c, g, or t
  misc_feature (1381)..(1381): n is a, c, g, or t
ggcaaagaaatcacactgtttcattccacctcaacaaactgaaatacaacagtactgtgaaggaatctcggaatgatatttcacttattctcaatgagtatgctgaattcaacaaggtgatgaagaatagcaaccaattcattttccaagacaaagagctaaatgatgtttctggagaagccactgctcaagagatgtatctgcctttcccaggacggtcagcctcctatgaagacataatcatagacgtgtgcaccaatttgcacgtcaaactaagaagtgttgtgaaagaggcttgtaaaagtaccttcctgttctaccttgtcgaaacagaagacaaatcattctttgtaagaacaaagaaccttctgaggaaaggaggccatacagaaattgaacctcagcacttctgtcaagctttccacagagagaatgatacactaatcatcatcatcagaaatgaagatatatcatcacatttgcatcagattccttctttgctgaagctgaagcatttccccagtgtcatctttgctggagtagacagccctggagatgttcttgatcacacctaccaagaactgtttcgtgcaggaggctttgtgatatcagatgacaagatactagaagctggaacattagttcaactgaaggaaattatcaaaaatcctggaaaaactaaatggaaatggaagaatgaaagtggttgcctcactacagggaaaaataaaaagctaaaagaagaatgaaagagtggattcaactgcacataagaagaacataatgttgaagtcatttcagagtgcaaatatcattgaattgcttcattatcaccagtgtgactctcgatcatcaacaaaagcagaaattctgaaatgtttgctaaacctgcaaattcagcatattgatgccaggtttgctgtcctcctaacagacaagcctactatccccagagaagtctttgaaaataatggaatccttgttacagatgtaaataactttatagaaaacatagaaaaaatagcagctccatttaggagtagctattggtgactcaactacagcctgcctggatatggatgatgccaataaaaaattagtattttccctttggaaaacttgtgaacatgtgaatacacatgtgaacagtcttacatttgaaaaaccaatgttctacaacttgganagttttcattttttatattttgctgaaatatgtcacagtggcattgcagttgtctgttagctttgggttgcagtgctagatattgttttaaatattttcattttaacaagatgccttctaagctattgagcttattaaaataattttacatgtttacttagttggagcaaaaataagtctattttaacaaatagnctttgtttttgcatgctaatgtcagaaaggcatacgatgcacattatgctcccgggtttaaaaggtttaaccaccccttggtaaaactataatcctttaaaaagggttttaatttgtgctggttaacccaaaccaacccttacctttaaaactttttt

SEQ ID NO: 260477 - DNA, 554 bp, Homo Sapiens
gcttacccccaggctgacgggcagatgaaactggccgccggctggctgatcgacaaggcgggctggaaaggctttcgtgatggcgatgccggtgtgcatcgcttgcaggcgctggtgttggtgaactatggcgcggccaccggccaggagattgccgggctcgcgctacgcatccagcaggacatcgaaaagcgtttcaaggttgtgctggagatggagcccaaccgctattgaactaagctggttttttgacgcaccaagccctgcatagcggggcttttttattgccgctgagttaacttagctgactaccgatattttttaatcaactcatagatgctgtttatcaaaaccagctacgtgtttggcaggaggcgaaggcctgatggacagtgttgatctgaatgtgttgcgcagcgtgctggaatggcgccgcgccgggcagcaggtggtgctgtacagcgtggtccagacctggggcagtgcgccgcgtccgccgggggccatgctggccttgcgcggcgacggggtggtgattggctcggtgtctggcg

SEQ ID NO: 260478 - DNA, 969 bp, Homo Sapiens
gggggcggcccaagcggtttcaaacggcttagagcaggccgcttggttctgacccagctgaggaaatactcttaattctaaggaaaacctggaagcacaatgggagatgacagtgagtggttgaaactgccagttgatcagaaatgtgaacacaagctgtggaaagcaaggttaagtgggtatgaagaggccctgaagatcttccagaaaataaaggatgaaaagagcccagagtggtccaaatttttaggattgatcaaaaaatttgtcactgattccaatgcagtggttcaattgaaaggattagaagctgcacttgtttatgttgaaaatgcccatgtagcaggaaaaaccacaggagaagttgtgtcaggtgttgtaagtaaggtgttcaatcaacctaaagctaaagccaaggagctgggcatagagatctgtcttatgtacatagagattgagaaaggagaggctgttcaagaagagctcctgaaaggcttggacaataagaatcccaagatcatagtggcctgtatagagacactgaggaaagccttaagtgaatttggttccaaaatcatcttgcttaagccaattatcaaagtgttgccaaaactctttgagtctcgagagaaggctgttcgagatgaagccaaactaattgctgtgggagatttacagatggaatcgggatgctctgagacccccattacaaaatataaactctgttcagttgaaagaactaaaagaagaatgggtcaaactgccaacaagtgctcctagacctactcgatttcttcgttcccaacaagaactagaagctaaattggaacaacaacagtctgctggtggagatgctgaaggaggtggtgatgatggtgatgaggtgccacaaatagatgcttatgagcttttagaagctgtagaaatcctttccaaacttcccaaagacttttatgacaaaattgaggc

SEQ ID NO: 260479 - DNA, 391 bp, Homo Sapiens
tttaattcagatgaacccctatcgatattcaaaaggcaaaacaaaaaaattaattccagggacattagaccttggtgaaatgccaaatggaaaatggtgctttaaaaggtagtctcttaccatataaggaataagtaaaacattagcttgtgatttctcattattcagggcaatgttttagacacgactaacaagggacagttcaaactattaaagagaacaaatttttacttaagcactttgaggtatccactccccttaaatgtaagttatgtattttatctgttgattaaggggaggtccaagcatttgtacttggcaggaatgctggcaaaagcttgtgccagattactgtataaacttgaaagtaataaaaatgttttttaaaagt

SEQ ID NO: 260480 - DNA, 1079 bp, Homo Sapiens
  misc_feature (1009)..(1009): n is a, c, g, or t
  misc_feature (1063)..(1063): n is a, c, g, or t
ccagtcggtactgttgtggaatatgagtgccgtccaggttacagaagagaaccttctctatcaccaaaactaacttgccttcagaatttaaaatggtccacagcagtcgaattttgtaaaaagaaatcatgccctaatccgggagaaatacgaaatggtcagattgatgtaccaggtggcatattatttggtgcaaccatctccttctcatgtaacacagggtacaaattatttggctcgacttctagtttttgtcttatttcaggcagctctgtccagtggagtgacccgttgccagagtgcagagaaatttattgtccagcaccaccacaaattgacaatggaataattcaaggggaacgtgaccattatggatatagacagtctgtaacgtatgcatgtaataaaggattcaccatgattggagagcactctatttattgtactgtgaataatgatgaaggagagtggagtggcccaccacctgaatgcagaggaaaatctctaacttccaaggtcccaccaacagttcagaaacctaccacagtaaatgttccaactacagaagtctcaccaacttctcagaaaaccaccacaaaaaccaccacaccaaatgctcaagcaacacggagtacacctgtttccaggacaaccaagcattttcatgaaacaaccccaaataaaggaagtggaaccacttcaggtactacccgtcttctatctgggcacacgtgtttcacgttgacaggtttgcttgggacgctagtaaccatgggcttgctgacttagccaaaagaagagtttaagaagaaaatacacaccaagtatacagaactgttcccaagtttcttagacttatctgcatattggataaaataaatgcaattgtgctcttcatttaggatgctttcattgtctttaagatgtgttaggaatgtcaacagagcaaggagaaaaaaggcagccctggaatcacattcttagcacacctacacctctttgaaaatangaacaacttgcagaattgagagtgattcctttcctaaaagtggtaaggaaagcnttagagatttggttcg

SEQ ID NO: 260481 - DNA, 564 bp, Homo Sapiens
gcaaataatttacaggcatatgtaaaatacagtaagaatactgggtcatagtttcatccagtgaaactctgtgacaatccttcactagaaggagagtacttttttcacacagtcaggggatgaggatctgatccgaattacattttgtcgagtcactcattcccacagatttgagtttgaatgcagcttgtggggtacatcatcaggaacattgcacaattattttatgtcatttaaaagaatgatggaaaggaatgttagcggtgcttaaaggcctcagtaggcactcaataattttatagaatagttaaataaatattgcttacacataaaaactcatctcatttcaagatgagggggaaaaaggcatttgggaatctcttaatttaaaacaaaacaaaagtacttgctaagggcatgatcctcttatgaatccacaagaattcagccatcaacaaaaatcccgtgagtggaaaattgtatggatctctaacatgacataaaaacgcaactgcgttttacttgctaccttattgcacacctcacttccttgattgagccttt

SEQ ID NO: 260482 - DNA, 1210 bp, Homo Sapiens
  misc_feature (68)..(142): n is a, c, g, or t
  misc_feature (260)..(315): n is a, c, g, or t
aggctggaccggtccggattcccgggatcggcctccgaagcggagcggggctctgaggagacactttnnnnnnnnnnnnnnnnnnnnnnnnnnnnnnnnnnnnnnnnnnnnnnnnnnnnnnnnnnnnnnnnnnnnnnnnnnnggtcagccggagcctgctggggcgagcggttggtattgcaggcgcttactctccggggccgcccggcgagtagctggccggggaaggaggcaggaaccgcgatggcgcctcagaagcnnnnnnnnnnnnnnnnnnnnnnnnnnnnnnnnnnnnnnnnnnnnnnnnnnnnnnnnttcgggggttcggcggcgacggcttcgagcggcaaatccggcggcgggggctgtggaggcggtggcagttactcggcctcctcctcctccgcggcgttaccggtgaagaagtcgaaaatggagcacgtccaggctgaccacgagcttttcctccaggcctttgagaagccaacacagatctatagatttctttgaactcggaatctcatagcaccaatatttttgcacagaactcttacttacatgtctcatcgaaactccagaacaaacatcaaaaggaaaacatttaaagttgatgatatgttatcaaaagtagagaaaatgaaaggagagcaagaatctcatagcttgtcagctcatttgcagcttacatttttggtttcttccacaaaaatgataagccatcaccaaactcagaaaatgaacaaaattctgttaccctggaagtcctgcttgtgaaagtttgccacaaaaaaagaaaggatgtatgttgtccaataaggcaagttcccacaggtaaaaagcaggtgcctttgaatcctgacctcaatcaaacaaaacctggaaatttcccgtcccttgcagtttccagtaatgaatttgaacctagtaacagccacatggtgaagtcttactcgttgctatttagagtgactcgtccaagaagaagagagtttaatggaatgattaatggagaaaccatgaaaatattgatgtcagtgaagagcttccagccagaagaaaatgaaatcgtgaggatggggaaaagacatttgttgcacaaatgacagtatttgataaaaacaggtaatgttgatgaacaagcgaggctcccacaatgttctggaaatgttttcattctgaagcagaatataattctttatattgattaaaa

SEQ ID NO: 260483 - DNA, 740 bp, Homo Sapiens
  misc_feature (89)..(113): n is a, c, g, or t
gtaccggtccggaattcccgggatatcgtcgacccacgcgtccgtacacattatatttaagcttttctctgggccaactgcttcatccnnnnnnnnnnnnnnnnnnnnnnnnnagccttatgatgaatttgtttgaagggcattttctttatgaacaaaggcttggatgcatattcctttctttctgtgaatgggtattattccctgaggaaagttgcacagtgaaaaccagtctggttgtgacccactacatgttttgtttttaatcactattacctgagttgaactttgctcaccatgtttgtacttgttggtctgtttaatgaagtttggttgatgccatcctttgcactgccgaagcgtaatcttgtgtattacttagctctctgctgatctcagtatggacagtgtaacaacaaaaccaaaatggctggacagacttcttgtgttttgtaaatataaactaggacagttctgtaggtttgttcagtgtgctagtggagtatttccttaatgtaaaacttcacttaacagagagattctttgtttagcaagcttggagtgatgataaaatggtaagaaataatataaatgttgaagaaagcatcacaacagaactataggagtctaaatttaataaatctttaaaaaaaaccagtgtctagaatatataccatgttttattatttaaaatcattgtcttaaatttttgttcaaaaaataaaaatttgaatacaatc

SEQ ID NO: 260484 - DNA, 387 bp, Homo Sapiens
gttttgaaagcatactctatatatagttacgggcagaggcacaggcatcctcagcagctgattcaggagatgatggtaaagctagctaactatgaattaaacattcacatatccagtctacctggtccagtaataatacaagcaaatcttgtatttcaggaacaaatcaaggttctcttaattttttggcttatatacaatgaagtaaaaacttgataaacatggtttcaaattgaggaggagagtcttggatgtatgttttaatatgtataccttataattctgcctctagccaaatgctatgtttgcaaaatgtggcatctgttagtttttattgtctgtgtcttctttgtttactataccttgggtaattttgtgttaccaaaa

SEQ ID NO: 260485 - DNA, 1388 bp, Homo Sapiens
tacccttgtggaccttagctattaaggtggacaatgactttattttctttacgtaagttttatattttattatgacattcattttttctacatgaagacacaaataaaaattataccaactacataaactattttgtactttccttgctaaaccacagatgtatttcatggaaagaggggcctttaaaggcacttatttatcattgtaggtgtgtctaaacaattgatattcaaaaacacaactttttgtgtacaaaattttacaatttttaacaaaagcagtgaagacactaaataacccagtggcgacctcttcaaagtgcagtgtccttggtcaccaatgcagatgctactggggcagccagcgggctcagagggtccaactccagacactgcatccatggctgtcctagactgagttgcacttgtaaaagagatggtcccacacctactaaaaaaacaagctactctagtatcaatatgacatcactcttttaccatcaatcatattgcaaaaccatagtatttaacgaccaataaacagccaaatacctaatgccacattgtcgttcaatttacctggctggttaatatcagtctgtgtttgagtatttcttttgagcacacaaaaacaaatgtatagtcacttgatgaggaaattcttcactttgactcaaatggattcaccatgctgtcagttatgaaaacaactctaattttaatctccacagggcaaccttcacttttcacagcagttctaaaactgacctacagaaaagttcaagattttttaaaaaatttggctaccatactatgtttcttatttaattttctctaatcaatactactcttacgttccaaatatttcatgggaaatttttccctcaaacttaatatgtttcttaaacgaattgaagccactaaagttcctgtttaaaccactgataactgccccagttaaaataataataatttaaaatgattacacttcaaataaaggtactaaaatcacgccccccaaatttgtaagcgcttttgttgttattggctacggcactgtgaatagaagtaaagtgtacttgacctgtatgagaataaacattttatcaagtacagcaaaaaaaacggaactgaattgtgaaaagcccatggggataggactttaaaacagcggtaagacgctggtttatcaccagaaacctcatgtgcctctgtgcacttgaagtaaagaccacatttgagcaggcctggtgggctggcacaggcctcagaacaggtgctgtttgtgtgaattctcctccctgcattgtccattctgttctagggcagtctgattctggcaacaggagtctctaagttccaatcactcactcacaaaagagttttct

SEQ ID NO: 260486 - DNA, 1258 bp, Homo Sapiens
  misc_feature (1200)..(1200): n is a, c, g, or t
attgtctgaaacggttaggcagaatactaaattcttttttgacccagtccggaagtgtaatggtcagccagtaccttttcaacaaccaaagcacttcactggaggagtgatgcgatggtaccaagtagaaggcatggaatggcttaggatgctttgggaaaatggaattaatggcattttagcagatgaaatgggattgggtaagacagttcagtgcattgctactattgcattgatgattcagagaggagtaccaggaccttttcttgtctgtggccctttgtctacacttcctaactggatggctgaattcaaaagatttacaccagatatccctacaatgttatatcatggaacccaggaggaacgtcaaaaattggtaagaaatatttacaaacggaaagggactttgcagattcatcctgtggtaatcacgtcatttgaaatagccatgagagaccgaaatgcgttacagcattgctattggaaatacttaatagtagatgaaggacacaggattaagaatatgaagtgccgtctaatcaaggagttaaaacgattcaatgctgataacaaacttcttttgactggtactcccttgcaaaacaatttatcagaactttggtcattgctaaactttttgttgccagatgtatttgatgacttgaaaagctttgagtcttggtttgacatcactagtctttctgaaactgctgaagatattattgctaaagaaagagaacagaatgtattgcatatgctgcaccagattttaacacctttcttattgagaagactgaagtctgatgttgctcttgaagttcctcctaaacgaggagtagtcgtttatgctccactttcaaagaagcaggagatcttttatacagccattgtgaaccgtacaattgcaaacatgtttggatccagtgagaaagaaacaattgagttaagtcctactggtcgaccaaaacgacgaactagaaaatcaataaattacagcaaaatagatgatttccctaatgaattggaaaaactgatcagtcaaatacagccagaggtggaccgagaaagagctgttgtggaagtgaatatccctgtagaatctgaagttaatctgaagctgcagaatataatgatgctactttcgtaatgttgtaatcatccatatttgattgaatatcctatagaccctgttacacnagaaatttaagatcgatgaaagaattggtaacaaaatttctggggaagttctttgatt

SEQ ID NO: 260487 - DNA, 832 bp, Homo Sapiens; identical to SEQ ID NO: 2931
  misc_feature (776)..(776): n is a, c, g, or t
  misc_feature (778)..(778): n is a, c, g, or t
  misc_feature (794)..(794): n is a, c, g, or t

SEQ ID NO: 260488 - DNA, 595 bp, Homo Sapiens
agactaagagggcctgaacaataagaggacagaaccaagaggagttggcaactaattggatgtggggattaaggaaaggtaagcatcaaagattacctccaagtttgttagaaggttagtagcaggattctgatgccattcaagtaaatacaagtctcagtcggatggaccccaggagccacatgtatttgaggggtactttgtctcgcacttttgcctgttacatggttttcagtgatttagaatttaagccagtagtggggcgactgtacatctatcgacatggtgaggtagagcatgtttgggaggaaagacgttgaatcccatttggtgacagtgagcttgaggtgctgccagaacactgcactgaagataggaggagactgtaggaaatacaagataggaaaggtctccactgaaatgttaactctttctctctaaacggccatccaggcctcaatgtctgcagtttctgatctgtgattatgacttatccaaatcttacatttcttaaaaatagtcatagatgaagggaatcacagttgatggttatatggtgacattagtggcttgaattctggatgactggaaactg

SEQ ID NO: 260489 - DNA, 790 bp, Homo Sapiens
gggcctctctgctctcgcggccgactcgcaagatggcgccgcagaaagacaggaagcccaagaggtcaacctggaggtttaatttggaccttactcatccagtagaagatggaatttttgattctggaaattttgagcaatttctacgggagaaggttaaagtcaatggcaaaactggaaatctcgggaatgttgttcacattgaacgcttcaagaataaaatcacagttgtttctgagaaacagttctctaaaaggtatttgaaataccttaccaagaaataccttaagaagaacaatcttcgtgattggcttcgagtggttgcatctgacaaggagacctacgaacttcgttacttccagattagtcaagatgaagatgaatcagagtcggaggactaggcaaaggctccccttacagggctttgcttattaataaaataaatgaagtatacatgagaaataccaagaaattggcttttagtttatcagtgaataaaaaatattatactcttgaacttttgtctcatttttttgagtatgctgtttatatgattttgatttccctctgataactatcaacagtatttaaatagcttatagctggtaatatttttttcccacgatttccaaaatcttttatgtactcaggtaaaagtagcgttatataggaaatcttttttttagacactctcgttctgtcacccaggctggagtgcagtgactcagcttcctaaatagctggaattcaggtgtgagccaccatgcccggctaattttttgtactttta

SEQ ID NO: 260490 - DNA, 621 bp, Homo Sapiens
  misc_feature (271)..(300): n is a, c, g, or t
caatgtgtgccctataacacaacattgtctccgatctcatctttctatcaaatgacttccaacactcttaagtctcaggtattcttaaatctgtatcatcaaacatgaagcttctcttgtttgttagagtaattaatctttctttggattaaagtttccctttgaaataaaaccacctacctaatctgactgctaaatttctagcttctttgttttaaatatgctcaggagtcaacccaaattctgcagcaaataagtttgcttattaacnnnnnnnnnnnnnnnnnnnnnnnnnnnnnngatgactaattctacagatagctgtaaggatgaattactcaagttcaaaatcaaattctgattctaaacacataacaattgtttacattcaggattaagatgtctttaagagttgaaacgactttggagatcatccagcccaacttccatccagatatcacgcctctcacatatagtagtcttcttactaaaatcccacaaattataagtcaattaatgttctgatttcattaattttggcttgtttcatttcgtcagcatttggttttttagttccaaaggctcctgctgcaagttctctctttttgttttgtattttca

SEQ ID NO: 260491 - DNA, 462 bp, Homo Sapiens
gttctctgggttcctgataaaagtgtctagatagatggtagagggcaattccaagagggcaactccaagatagaaaatttggaaaaagaacaaattttagggggaaaaccagaagataagcgagttcaggttcccagtcaatgcggtgttggagatgcctgtgtcatctgatgaagactagtacgcagctggatagcagagtccgaaactcaggtggaggtgaagttatgagggaattatcacaatctagtttggattcatatttcttaaatatgtatgacaacttaccaactggaatgttctagctaatatctcaacttagaatccatctcactaccaatgggcaaacacttgtgttctaaagttacttgcaagtagtttatactgccaacttgatatatatacatgctatagtttgaacattttgtgtacttccaaaattcacattaaaatctaatccac

SEQ ID NO: 260492 - DNA, 408 bp, Homo Sapiens
tcggaagagccctttggtgccccgaagtttggaacctccagtgctggagttgtcacctggagctaaggcacaactggaagaacttatgatggttggagatctcctggaagtatctctggacgagactcaacacatatggcggattttgcaggccacacacccaccctctgaagacagattcttgcatatcatggaggatgacagcatggaagagaaaccactaaaagtgaaaggaaaggactcttcagagaagaaacggaaacggaagctagaaaaggtagagcaactttttggagaaggaaaacagaagtccaaggagttaaagaaaatggacaaacctagaaagaagaaattaaaattaggtgcagacaaatcaaaggagctgaataaactggccaagaaactagc

SEQ ID NO: 260493 - DNA, 414 bp, Homo Sapiens
ccaacagaaactatacccactaaacaaatctccatttcttcttcccttcagcctctggtaacctctgttcgactttctgtctctccgaatgtgtctattctaggtacctcatataagagagtaatactgttttttaactgtcttgctttaaaattgttccctaaatttatatttttgaaggatgacagccatggaagagaaacccactaaaagtgaaaggaaaggactcttcagagaagaaacggaaacggaagctagaaaaggtagagcaactttttggagaaggaaaacagaagtccaaggagttaaagaaaatggacaaacctaggaaaggaaggaaattaaaattaggtgcagacaaatcaaaggagctgaataaactgggccaaggaacttggcaaaagaggagggggg

SEQ ID NO: 260494 - DNA, 988 bp, Homo Sapiens
ggcaattcggacgagggatttaagtcacatccatcggctacaaatctgacaatagacattttagtctacgataaccatgttcatgtggcaagatctctgaaggttggaagctttcttagaatctatagccttcataccaaacttcaatcaatgaattcagagaatcagacaatgttaagtttagagtttcatcttcatggaggtaccagttacggtcggggaatcagggtcttgccagaaagtaactctgatgtggatcaactgaaaaaggatttagaatctgcaaatttgacagccaatcagcattcagatgttatctgtcaatcagaacctgacgacagctttccaagctctggatcagtatcattatacgaggtagaaagatgtcaacagctatctgctacaatacttacagatcatcagtatttggagaggacaccactatgtgccattttgaaacaaaaagctcctcaacaataccgcatccgagcaaaattgaggtcatataagcccagaagactatttcagtctgttaaacttcattgccctaaatgtcatttgctgcaagaagttccacatgagggcgatttggatataatttttcaggatggtgcaactaaaaccccagatgtcaagctacaaaatacatcattatatgattcaaaaatctggaccactaaaaatcaaaaaggacgaaaagtagcagttcattttgggaaaaataatgggattctcccgcttttcaaatgaatgtctacttttgatagaaaggagggacactcaggtgaaatttgcaaactctccaaacaagtttaatagtgtaattcctgtgagatctggccacgaagacctggaacttttggacctttcagcaccatttcttatacaaggaacaatacatcactatggatgtaaacagtgttctagtttgagatccatacaaaatctaaattccctggttgataaaacatcgtggattccttcttct

SEQ ID NO: 260495 - DNA, 267 bp, Homo Sapiens
  misc_feature (192)..(192): n is a, c, g, or t
gggtatttgggtgttaattaacttgtttctgtagccaaaggaaaagctcacctgctgatgattataagctggctgctcatggacttggaatcctaggtggagaagatagacaatgaggtccttatggctgcctttcaaagaaagaagaaaatgatggaagaaaaactgcacaggcaacctgtgagccatagntgtttcagcaagtcccataccagttctgcaatgtggtatgcagagttggctttcaaagaatgtactcgacacctt

SEQ ID NO: 260496 - DNA, 1161 bp, Homo Sapiens
agacactgcctgttgctgtccatcagcacttggtctcttatcttcagtgagaaggtgacccgccttcttcccatggtggctgcctaaagtgcttcttttctaacccaaaacagttctactcacttccttttacagaattcaccggccattttcctgttacctgatccttctacaggatttttaaaaagtaagagagtttcagagaagccgatcccataatccccagtgcagccagggtttgtgtgtcatcgtactggagtagagggccgactcttcccatgaaggtgagcacagctgtgagtgagtgagctcatatctccatttgtcagtgctggactggtaccagatcgtaaccttcccgttggtcggaaacttttccatctgtcgccctagaaaaagagaaagcttaccatcgagggtgtggttgatccttgaagctgcttggtaaagttatcatttcctcagtcttttcttttgtactcctatcatgtattcattaatatctaccagtcccttttcattctaagacaaaacatttctcctaaatctctgaataaaatcagtgctgtaggaagatggactgtgttgatcatgggtgtaagcaacccagtttaagaaacatggcaactaaagggatacctcaggctttctttcccagtgggtcatttttgtcctagttcagtgtgtctgttactatttaaatatttatacaaaagggttttcgtttatagcttaaggaatgatactgtgctctgcttggtgcatggaggaacacacggaagacccgtactctccacaccctagagcttttctctaaactattgtgcaaagttttggctagtttaatcttctgacttgggactagtttagctgcagagtagtgtcgcttgtgattttcctctggatagtgtactgtgcacaacccagatgtgttccacactccgtgactccgcaagttagtcctggagtgacattacacattccacccatggaaaagggaaggcattctctggcctgtggcttcctcaagtacttggaaagacacttctcctgaagaaacctacaggaatctcaggggttcctacgtcaccggaagcaataattctgagtccctgaacatttcctaaggttggaaagtgcagcagtttaattccctaaaag

SEQ ID NO: 260497 - DNA, 474 bp, Homo Sapiens
tgctccaccatctcatactaatcggtatattccattaatagtcgacatatgttgcaaattagttgaagaaagaggtcttgaatatacaggtatttatagagttcctggaaataatgcagccatctcaagtatgcaagaagaactcaacaagggaatggctgatattgatatacaagatgataaatggcgagatttgaatgtgataagcagtttactaaaatccttcttcagaaaactccctgagcctctcttcacaaatgataaatatgctgattttattgaagccaatcgtaaagaagatcctctagatcgtctgaaaacattaaaaagactaattcacgatttgcctgaacatcattatgaaacacttaagttcctttcagctcatctgaagacagtggcagaaaattcagaaaaaaataagatggaaccaagaaacctagcaatagtgtttggtcccacccttgttccaac

SEQ ID NO: 260498 - DNA, 1510 bp, Homo Sapiens
ggggtgttcgagtggacaaaatggcgaagatcgccaagactcacgaagatattgaagcacagattcgagaaattcaaggcaagaaggcagctcttgatgaagctcaaggagtgggcctcgattctacaggttattatgaccaggaaatttatggtggaagtgacagcagatttgctggatacgtgacatcaattgctgcaactgaacttgaagatgatgacgatgactattcatcatctacgagtttgcttggtcagaagaagccaggatatcatgcccctgtggcattgcttaatgatataccacagtcaacagaacagtatgatccatttgctgagcacagacctccaaagattgcagaccgggaagatgaatacaaaaagcataggcggaccatgataatttccccagagcgtcttgatccttttgcagatggagggaagacccctgatcctaaaatgaatgctaggacttacatggatgtaatgcgagaacaacacttgactaaagaagaacgagaaattaggcaacagctagcagaaaaagctaaagctggagaactaaaagtcgtcaatggagcagcagcgtcccagcctccatcaaaacgaaaacggcgttgggatcaaacagctgatcagactcctggtgccactcccaaaaaactatcaagttgggatcaggcagagacccctgggcatactccttccttaagatgggatgagacaccaggtcgtgcaaaggggaagcgagactcctggaagcaaccccaggctcaaaaatatgggatcctacacctagccacacaccagcgggagctgcttactcctgggacgaggtgatacaccagggccatgcgacaccagggccatgggaggcgcaacttccagttgcttcgttaaaaacagatggggattgaaacccccaaaacagaggagagatactcctgggcatggaagtggatgggctgagactcctcgaacagatcgaggtggagattctattggtgaaacaccgactcctggagccagtaaaagaaaatcacggtgggatgaaacaccagctagtcagatgggtggaagcactccagttctgacccctggaaagacaccaattggcacaccagccatgaacatggctacccctactccaggtcacataatgagtatgactcctgaacagcttcaggcttggcggtgggaaagagaaattgatgagagaaatcgcccactttctgatgaggaattagatgctatgttcccagaaggatataaggtacttcctcctccagctggttatgttcctattcgaactccagctcgaaagctgacagctactccaacacctttgggtggtatgactggtttccacatgcaaactgaagatcgaactatgaaaagtgttaatgaccagccatctggaaatcttccatttttaaaacctgatgatattcaatactttgataaactattggttgatgttgatgaatcaacacttagtccagaagagcaaa

SEQ ID NO: 260499 - DNA, 777 bp, Homo Sapiens
  misc_feature (126)..(126): n is a, c, g, or t
agcctccagaactgcgaaaaaaatcaatgtctgttgtttaaggcacccagtctgtggtatcttgctatggcaacccaagcagactaatacagtccataacagaaaaaaattttttaccagtaatancaaaaaacaaaaagaaattacctctgcctgatcccaacttgatagttttttgggagtggcaccaggagtctgatcagctgtttgatcccaacgccgttttcgttttgatggaggctgggacgctgctgctccattgacgacttttagttctccagctttagctttttctgctagctgttgcctaatttctcgttcttctttagtcaagtgttgttctcgcattacatccatgtaagtcctagcattcattttaggatcaggggttttccctcctgcagaaaagaacagcaacaggaaaaagagtacaaataaataaaaaataagcaggttccaactgatttatcctgccctgctcctaaatattatgttattcccataatccatttaaattattttttgatggaaaactttaataattatacatcttactttttattgagtttgctgatcaatttaacctgtttgaacacaaacatctacagcagtttaaaacaaatattttaatgcatataaaaacaaaataacagcacagtttagagtcttcagaagtgatgggttcctgggttgctaatccggaatacgtacctttcgtgcctttgtctccatcagcagacattttattaaataagtctatgggataataacagcaac

SEQ ID NO: 260500 - DNA, 510 bp, Homo Sapiens
ttttcactatttaaaataaatgtatatcctaaataccacctcattcaaatttgatgtactaccttatatccttctgggaacatagcatctaattcctcatcagaaagtgggcgatttctctcatcaatttctctttcccaccgccaagcctgaagctgttcaggagtcatactcattatgtgacctggagtaggggtagccatgttcatggctggtgtgccaattggtgtctttccaggggtcagaactggagtgcttccacccatctgactagctggtgtttcatcccaccgtgattttcttttactggctccaggagtcggtgtttcaccaatagaatctccacctcgatctgttcgaggagtctcagcccatccacttccatgcccaggagtatctttaaaaagaaagagtgagtaaaaccacaattttaatcactgttaaaataatattctttattctcaaacagttatactcaaaactatcaagttctaaaatagaatattccta

SEQ ID NO: 260501 - DNA, 711 bp, Homo Sapiens
  misc_feature (47)..(62): n is a, c, g, or t
  misc_feature (64)..(159): n is a, c, g, or t
  misc_feature (611)..(665): n is a, c, g, or t
cccaagctagttcggattacaggtgcctgccaccaaacccagctaannnnnnnnnnnnnnnnannnnnnnnnnnnnnnnnnnnnnnnnnnnnnnnnnnnnnnnnnnnnnnnnnnnnnnnnnnnnnnnnnnnnnnnnnnnnnnnnnnnnnnnnnnnnnnnataagccactgcgcccagcctcccattttttcaatctcctcagttcttctattctcaacgttttttgacttcacctttcgtttccctgatttgattttaattctccttcatgagtttcaaagttgaactcaattggcctgttgctatttcattgtttatctccgattctggttggctactgtatatgtgatgccttctttatctctgaaaacaagactctagcccattgtttgaaatcctcgagtttccctgttgggagatcccatttcaggtattagatttatccgtgtccttgctgttctgatccattcttcctcaaaataagccaataactaattccataaaattttctttttgtctgtacttctgctttaattatctgattccttgctgttaataccaaacagcacacaacatttggttttgggttttatgagacaaagtctcactcnnnnnnnnnnnnnnnnnnnnnnnnnnnnnnnnnnnnnnnnnnnnnnnnnnnnnnntgtgttcaagcgatcttcccacctcagcatccctactagctgggac

SEQ ID NO: 260502 - DNA, 676 bp, Homo Sapiens
tgatccaccacacctggcccttgcaatcttctactttaaggtttgcagagataaaccaataaatccacaccgtacatctgcaatatgaattcaagaaaggaaatagtaccttcaatacttaaaaatagtcttccacaaaaaatactttatttctgatctatacaaattttcagaaggttattttctctatcattgctaaactgatgacttactatgggatggggtccagtcccatgaccttggggtacaattgtaaacctagagttttatcaactttggtgaacagctttggcataatagtcaatttctacttctggaagtcatcctcattccactgttggtattacataattcaaggagaatatgataaaacactgcccctcttgtggcgcattgaaagaagagatgagaaatgatgaaaagggtcgcctgaaaaatgggagacagcctcttacttgccaagaaaatgaagggattggacccgagctggaaaacctcctttaccaaatgctgactggcactggtggtttttgctctcgacagtatccacaataactgaccgctgggtgtttcaatttgaaaatattttgttgccttcatcttcactgaaattttgtgtaaatttctcaaaaatctgaattaaataaataaaattcatttctacagacccacaaaa

SEQ ID NO: 260503 - DNA, 677 bp, Homo Sapiens
tatcagtagccatggagtcatcggcttgagggtaaactaatcccttataccacttgatttattttattaattagttaataatgcagttaattttcaactgcaaaaagaaaaaattattttgtggagtagaaagaccacagcaataattacttgatgcaaaaaataagacaccttaattgtatttgctcaaatctgttgtcttaatgataccaatatgtatcattataatctattttttaaaaattttcctcattatgccctagaacatcattatactctaaaaagtcaaattccatttcctttagatttccttaatgttgcttgtggactgatgtagtgatattttacattggagcccaccaatgatttgaacaatgagtggttcaaccctagtctaaattgtgcttgaaacagcacctctagccactgagagataacactcaaaggcaccaataacagttatattctagtctacaggtgcaaaaaggaggccttgtagattctaactatacataatgaaaaattatgcctcataattaaaaaacatacatccactgtattttagccagattcaggaccttacacacaattatgtgccttaattctatacgcaattttaggaaccatcccaactgcaaaggcactcaaatttttatatatttgggagtgtaataaat

SEQ ID NO: 260504 - DNA, 981 bp, Homo Sapiens
ggagtgatgatgcatcatagcaatttgatagctggaatgacaggccagtgtgaaagaatacctggactgggaccgaaggacacatatattggctacttgcctttggctcatgtgctagaactgacagcagagatatcttgctttacctatggctgcaggattggatattcttctccgcttacactctctgaccagtccagcaaaattaaaaaaggaagcaaaggagactgtactgtactgaagcccacacttatggctgctgttccggaaatcatggatagaatttataagaatgttatgagcaaagtccaagagatgaattatattcagaaaactctgttcaagatagggtatgattacaaattggaacagatcaaaaagggatatgatgcacctctttgcaatctgttactgtttaaaaaggtcaaggccctgctgggagggaatgtccgcatgatgctgtctggaggggccccgctatctcctcagacacaccgattcatgaatgtctgcttctgctgcccaattggccagggttatggactgacagaatcatgtggtgctgggacagttactgaagtaactgactatactactggcagagttggagcacctcttatttgctgtgaaattaagctaaaagactggcaagaaggcggttatacaattaatgacaagccaaaccccagaggtgaaatcgtaattggtggacagaacatctccatgggatattttaaaaatgaagagaaaacagcagaagattattctgtggatgaaaatggacaaaggtggttttgcactggtgatattggagaattccatcccgatggatgtttacagattatagatcgtaagaaagatctagtgaagttacaagcaggagagtatgtatctcttgggaaagtagaagctgcactgaagaattgtccacttattgacaacatctgtgcttttgccaaaagtgatcagtcctatgtgatc

SEQ ID NO: 260505 - DNA, 1015 bp, Homo Sapiens
  misc_feature (721)..(856): n is a, c, g, or t
  misc_feature (905)..(949): n is a, c, g, or t
aacaagagcactggccaagtcagcttcttctgagagagtctctagaagacatgatgctacactcagctttgggtctctgcctcttactcgtcacagtttcttccaaccttgccattgcaataaaaaaggaaaagaggcctcctcagacactctcaagaggatggggagatgacatcacttgggtacaaacttatgaagaaggtctcttttatgctcaaaaaagtaagaagccattaatggttattcatcacctggaggattgtcaatactctcaagcactaaagaaagtatttgcccaaaatgaagaaatacaagaaatggctcagaataagttcatcatgctaaaccttatgcatgaaaccactgataagaatttatcacctgatgggcaatatgtgcctagaatcatgtttgtagacccttctttaacagttagagctgacatagctggaagatactctaacagattgtacacatatgagcctcgggatttacccctattgatagaaaacatgaagaaagcattaagacttattcagtcagagctataagagatgatggaaaaaagccttcacttcaaagaagtcaaatttcatgaagaaaacctctggcacattgacaaatactaaatgtgcaagtatatagattttgtaatattactatttagtttttttaatgtgtttgcaatagtcttattaaaataaatgttttttaaatctgnnnnnnnnnnnnnnnnnnnnnnnnnnnnnnnnnnnnnnnnnnnnnnnnnnnnnnnnnnnnnnnnnnnnnnnnnnnnnnnnnnnnnnnnnnnnnnnnnnnnnnnnnnnnnnnnnnnnnnnnnnnnnnnnnnnnnnnnttttgtgggggccccccgggcccctcaaaaattttttataaaacccttnnnnnnnnnnnnnnnnnnnnnnnnnnnnnnnnnnnnnnnnnnnnntctatttgtgttcttcctaaagaaaaccccggggcaagaaaaaagggggtggggaaccccccccac

SEQ ID NO: 260506 - DNA, 873 bp, Homo Sapiens
ggggattgataataaacaattgcttattaaaatagctgcaattgataatgggctagcatttccctttaaacatcctgatgaatggagagcatatccatttcactgggcttggcttcctcaagcaaaagttcccttttctgaagaaacaagaaacttgattctaccatatatttctgacatgaactttgtacaagacttatgtgaagatctctatgaactttttaagactgacaaaggatttgacaaagccacttttgaaaatcacatgtctgtgatgagaggccagatcttaaacctcactcaggcactgacagacgggaagagtcctatccagctagcacagataccatgtgtgatcgtggaacgcaccaaagtggcagccagggccgtgcggtacaccctgggcagctccttcaccccaacggtccactgccagaaaccgttcttccccctccccggtaccccccaatgtaaggggaaccaactgcgttgggggtcacccgtgcctcataccctatttaccccggatgtacccccctgctggccggaaaacccccatttcgcccaaaaactcccacttatcccccaccccccttaaataccctttaaacacccaccactaccaatttttgaaaggccacttaaaaccccatctattccttgtcctacttaaatcccgccggccgcagcccaaacttcggtcccccctaaaaaactccctttctcaaaccccacctttccttttagaatataatcccgcccctccgttcggagaaaagggaaccccccgcccaattaatagtgattcccattcccgctaacccttttgccccctgcaccccccgcccctgtcgaatccctcaaacacaaaaa

SEQ ID NO: 260507 - DNA, 872 bp, Homo Sapiens
ggatgtcttggcctcccagacagtctttggaccactattttactggcctttgaaagaacaaagtttacttcaactaaaatgtttcttcctgtgaagacatatggtatcattttaatttaaggggcagatttccattcttttttggcatgtccttaaaaagaggatttgaaatcaactatatgctaccaagaactttaggatccaattttccaagccaccgtgaagcctcttatggctactattatagttcatgagatgttggacagcatttggtttgtttggtaagagaagaacaaatatggctaattgttaataaggtcccctggctatggtttttgttcttataacagagtttagaatatcagagcatttcttgaatcatacatcattattgtccagtgaattcaagaccaaatacaatatcgggagaaaatacaaactccctgtgtttaagaataggggattataatggctcaaattggttcatttgatttctaaaaataccatgacctttaaaaattcttttaatagatcatgttattggcagtatttatataaaaaccatggatttagaaaggtatatttagctttattataatagatacgttactattttggaaatatatatattttcacacctgtagtactcttccccatttcctctgacactcatgcagaatgagatcaggcatatttgtgggttgacatactctagataggcttttccaacaaatctttgaaaagcagtcttggaaaggaattcattaactaaatggggtaaaaggtttctttttctttgagagtaaagtccttcctcaaaaaattttcttatgctccataaaattgaggtagaatattttcattattcttgc

SEQ ID NO: 260508 - DNA, 1238 bp, Homo Sapiens
  misc_feature (1056)..(1056): n is a, c, g, or t
  misc_feature (1117)..(1117): n is a, c, g, or t
  misc_feature (1147)..(1147): n is a, c, g, or t
  misc_feature (1166)..(1166): n is a, c, g, or t
ttggcaaaaagagaagatgtgcaataagattaataaagtaaattctgaaggcgaatttgataaagatagagactctatatctgaaacagtcgacttaaacaaccaggaaactgtcaaagtgcaaatacacagcagagcttcagaatatatcactgatgtccattcgaatgacctgtctacaccacagatccttccatcaaatgaaggtgttaatccacgtttatcggcaagccctcctaaatcaggcaatttgtggccaggattggcaccaccacacaaaaaagctcagtctgcatctccaaagagaaaaaaacagcacaagaaatacagaagtgttatttcagacatatttgatggaacaatcattagttcagtgcagtgtctgacttgtgacagggtgtctgtaaccctcgagacctttcaagatctgtccttgccaattcctggcaaggaagaccttgctaagctgcattcatcaagtcatccaacttctatagtcaaagcaggatcatgtggcgaagcatatgctccacaagggtggatagcttttttcatggaatatgtgaagaggtttgttgtctcatgtgtccctagctggttttggggtccagtagtaaccttgcaagattgtcttgctgccttctttgccagagatgaactaaaaggtgacaatatgtacagttgtgaaaaatgcaaaaagttgagaaatggagtgaagttttgtaaagtacaaaactttcctgagattttgtgcatccaccttaaaagattcagacatgaactaatgttttccaccaaaatcagtacccatgtttcatttccgctagaaggcttggatcttcagccatttcttgctaaggatagtccagctcaaattgtgacatatgatcttctgtcagtcatttgccatcatggaactgcaagtagtggacactatatagcctactgccgaaacaatctaaataatctctggtatgaatttgatgatcagagtgtcactgaagtttcagaatctactgtacaaaatgcagaagcttacgttcttttctataggangagcagcgaagaggcacaaaaagagaggagaaggatatcaaatttattgaacataatgganccaagcctccttcagttttatatttctcgncagtggcttaataaatttnagacctttgccgaacctggccctatttcatattaatgactttcttttgtattcatgggaggtgttcctccaa

SEQ ID NO: 260509 - DNA, 620 bp, Homo Sapiens
aacaaatgaacttactgcaagtagctcaacatagtaaaaacaatagaaatgtttggctttacccatcagccaaataaaaaaatctccttgtaaggttaaaaggatcaaaatgtaggagaccgtgaatattcaccaaaacccttcatcttttcaatttcttcatctgtttctgggctgctcattttggatgctttatcttggttactactaccagtatctgctttagatcgtttgtcttgtgtatctaacaaccgagatctcttgaattgccatctgtcatctaagtctaaggttttatgcttaatgatttgtggtgtactagctggactagcttcaggaatgtcagtgtgttctaccattaaggtcagattgtctactacatcgagatggtggttgtagttacagctacttttagaaacatgtctattttttaaagacataacacatgaatgaagaaattcagaatttggaaaaaaggtccgtaatgcctgacaaagaaaaatgttctcctgagggtctttttggatgttcttctctcttgctgcctgaatctgtgctcctctccttttctcaatttctcgttttaatctgtttacatcctttactagtttatctactgc

SEQ ID NO: 260510 - DNA, 480 bp, Homo Sapiens
ctgagccgactgcggtggtcaagagtgtaacacagccagcctcgaagacttccctctgagttggaatgataatgaccgaatcccgagaagttatagacttagaccccccagctgagacttcccaggagcaggaagaccttttcatagtgaaggtggaagaagaagactgcacctggatgcaggagtacaacccgccaacgtttgagactttttaccagcgcttcaggcacttccagtaccatgaggcttcaggaccccgggaggctctcagccaactccgggtgctctgctgtgagtggctgaggcccgagctgcacacgaaggagcagatcctggagctgctggtgctggagcagttcctgaccatcctgcctgaagagttccagccctgggtgagggaacatcaccctgaaagtggagaagaggcggcggcccctcgtgccgaattcggcacgagggggagcggcggccgctccacca

SEQ ID NO: 260511 - DNA, 335 bp, Homo Sapiens
  misc_feature (43)..(61): n is a, c, g, or t
ccatgtatctaatcctcccatttgggcagtataggtgtttgcnnnnnnnnnnnnnnnnnnnaagaaaaaaccttgaaacctttgacactgacagatgtgtttgcaaggatacggctgcagtattactaatttccatgtgtatctggaagtatttttaaatggcataccaaaatccagaaagttaaagatgcctataaaagtaaacaacatttatttaaaaagaactctgaatatgccttcttttttaattagaaatatcttcgagacttgggtgtttgttaataactaataactggagtaagctacaggatctaaagcagccctttttacagtct

SEQ ID NO: 260512 - DNA, 989 bp, Homo Sapiens
gggagaaggaagaagcctcaaaccacccatttcctgctttttagagatagagtctagtggaaccatggctctaactgggtcaagtcctcctagctctgaagctaaggctgcagagctgtcctttggactgtatttcttcatgctttccagagttagagccttgatcacggaacatcattgtgtgcagaagaatactgtacctagtactaagttcttttcatctttgatttttctttagcttcatcagtccttccttcctaatctctaatcccctgaagcctaacacagttcctaatgtgttttgccttaacctcttttctcttcccacattggtacttctggatggggctctctttacttactgcttaggcacatagtcaccttctctggactccctgcttccatgctttctccttcagcccattccccaaactccttgtgatcttccaaaaattagctctggattagcctttccactttccgggaggaagcccccaaaccagccctccctctgcctcggggcacttttgggcctggtgggcccatggtgaatcccacaaaatttaacctcttcccctaattggggaaattttaccttaacttcccggttttggggctaaccgactgggtaatttgggggaaccctcccctggggcccccaaaagcttatcgccaaaaaagaatggcggaaccctctctttgggaattccctccccaagaaagccaccactacttaaaaagggggtctcccgtgaaccattgcctttttacacaccctccttttttgaaaaggggccttaattgtggcccccccctgtggtggaaaaaatcaccttcacacttaaattccggattgcgcccccccctttttccccggggaggccagttttgggacgtgaaaaatgcgagaattttcccttttcctccccctttgggaaaacctcttttaaaaggggttgataccctctaaggcgccaccctccctaatc

SEQ ID NO: 260513 - DNA, 1428 bp, Homo Sapiens
  misc_feature (80)..(80): n is a, c, g, or t
  misc_feature (170)..(180): n is a, c, g, or t
  misc_feature (1095)..(1183): n is a, c, g, or t
cggaagagaaaacccctgcagtcgtggtgtctggtcgcgacgcttgccgggcggcagttctctcggtttccacatcccgncgcggggaaacaaacttttttccggaagcacgcccggatcgcggtggcgaggagggtgtgcgtccgggggtatttcctctcggaggcgcnnnnnnnnnnntcggcctaggatgtgtagttgtggtgcgcccaatagtcctttcccccacttttttgggccggtataggcccgtggggggctccccccgcgcgtggtttgctccccccagcgattgcgggtatcatatgggctctgtcgttttaattaaaaaaagtgggcgctttcccctcttcgataagagggcgggcccccgaaatgggacctggcccccggaaaacaacgcgattgtcgccatagttgttggggttggcgctgtatagggggggataggaagccgggtttcgcccccctggacccaaataaagccaggagcgtcgcatggtgccactcccaccccgggggggcacggcattaaactccgtcatggagaagaatgctaggtagggttaagtagggatgagagaaatgtttgtcactccccaaaaatatctggagaggaaaaatggaggattgccattgagatccatgtggacaagctaagtgggctctgtctgaaagctggcattcatccacaacattaaaaaaatatcaaaataagaaaggctgtaaattaaaaagaaaacacagaaaatactgctctcataaagatctgattgccttggcacaggccctgtgggcagaatcaaacgcatcactcccaactcccattgcagaagaaaagctattcaactctcagcggtggaggagtgcatgtggcggcagtttcaggtacaaacgatgtactgcactttcagacgcggatcttggaaatccaggacttcttggtaaagttgactgaaggtatattagatatttccccacaaaaatactatttggattctcccaccccctccctcccttgatgggacaacatcctgtatttttccttgggcaatacatatcattacttccaatttgaaacaacgttagtatagnnnnnnnnnnnnnnnnnnnnnnnnnnnnnnnnnnnnnnnnnnnnnnnnnnnnnnnnnnnnnnnnnnnnnnnnnnnnnnnnnnnnnnnnnttgttttaagtggtattcgtttttcctataggctgtccttgtcactctttcacggttacggtttggtcggaattagctgccggggcctccaccggcttgggctcttctgcagaggctgcggggccctgggccttgggtgtggaactaggcgcttccgtggcctgcgggggtctccttggaagagggggcagcctccgagctgccgggttttgagtctgaagccggacgcgtgggtcgacgatatc

SEQ ID NO: 260514 - DNA, 704 bp, Homo Sapiens
ttggaagaagatattttccaccaaagttccaagatgcacacttcgagttttatcaatcaaaggtgttccttgatgatctccctgaggattttagtgatgctttagatgaatataacatgaaaattatggaggactttaccactttcctacgaattgtttccaaactggctgatatgaatcaggaatatcaactcccattgtcaaaaatcaaattcacaggtaaagaatgtgaagactctcaactcgtatctcatttgatgagctgcaaggaaggaagagtagcaatttcaccatttgtttgtctgtctgggaactttgatgatgatttgcttcgactagaaactccaaaccatgttactctaggcacaatcggtgtcaatcgctctcaggctccagtgctgttgtcacagaaatttgataaccgaggaaggaaaatgtcgcttaatgcctatgcactggatttctacaaacatggttccttgataggattagtccaggataacaggatgaatgaaggagatgcttattatttgttgaaagattttgcactcaccattaaatctatcagtgtttccttgcgtgagctatgtgaaaatgaagacgaacaacgttgtcttagcctttgaacaactgagtacaactttttggggaaaagttaaacaaagtctaaaaacaaagtctatgcaaaccacttaaaaataatt

SEQ ID NO: 260515 - DNA, 874 bp, Homo Sapiens
tggaaaagctcgtgttagtattggcaaatttgtttggaagaaaatatattccagcaaaattccaaaatgctaatttaagtttttctcagtcaaagacactttttccccaaggaattgaggaaaagctcgtgttagtattggcaaatttgtttggaagaaaatatattccagcaaaattccaaaatgctgatttaagtttttctcagtcaaaggtgatccttgccgaactcccggaggattttaaagctgctttatatgagtataacctggcagtaatgaaggattttgcctccttcctgctgattgcttccaagtcggtgaacatgaaaaaagagcatcaactccctttgtcaagaatcaaattcacaggtaaagaatgtgaagactcccaactcgtgtctcacttgatgagctgcaagaaaggaagagtagccatttcaccatttgtttgtctttcggggaacacagataatgatttgcttcgaccagagactatcaaccaggtcatcctgcgcacagtcggtgttagtggcactcaggctcctctgctgtggccatggaaattagataaccgaggaaggagaatgccactaaatgcatatgtgctcaatttctataaacacaactgcttgacaagattagaccaaaaaaatgggatgcgtgtggaacagcttttaaagtgtttgaaagattttgcattcaacattcaggctatcgagtgactccttgagtgaactatgtgaaaataagcgtgaaatgagtcccttggcaaagtaaaattgggacagcttttaaagtgtttgaaagattttgcattcaacattcaggctatcagtgactccttgagtgaactatgtgaaaataagcgtgacaa

SEQ ID NO: 260516 - DNA, 483 bp, Homo Sapiens
aacttcagttgttaaaggttcccactttcctgttggagtagtccctccaagagcaaaatcaccaacacccgaatcttcgacaatagcttcctatgtaaccttgaggaaaactaagaagatgatggatctaagaacggaaagaccaagaagtgcagtggaacagctctgtttggctgaaagtactcgaccaaggatgactgtggaagagcaaatggaaagaataagaagacatcaacaagcgtgcctgagggagaagaaaaaagggttaaatgttatcggtgcttcagaccagtcacccttacaaagcccttcaaatttaagggataatccatttaggactactcagactcgaaggagggatgataaggaactggacactgccattacagaaaatgatgtaaagccagaccatgaaactcctgcaacagaaattgttcaactaaaagaaaccgaaccccaaaatgtggacttcagcaaagagtt

SEQ ID NO: 260517 - DNA, 728 bp, Homo Sapiens
tgtaccggtccggaatctcgggatatcgtcgacccacgcgtccgggaggaccaagaaacctgtggttattcgtgccagcaagcagtggtttataaacatcacggatattaagactgcagccaaggaattgttaaaaaaggtgaaatttattcctggatcagcactgaatggcatggttgaaatgatggacaggcggccatattggtgtatatcaaggcaaagagttggggtgttccaattcctgtgtttcatcataagaccaaggatgaatacttgatcaatcagccaaaccactgagcatattgttaaactagtggaacaacacggcagtgatatctggtggactcttccccctgaagcataccttcttccaaaagaagtcgttatctgaggttggtggccctgtatgccttggaatatgtgccatggtcaggatattttggacatctggtgtgatagcggaacttcatgggtctgtatgtgtctttccaggtcctgtaccaaagagcagatttgttacttggaaggaaaagaccagctcgggggttaggtgtcagtcatccttattaacaaggtgtggcaggcacaggaacgagagcaccttataagacagtgattgttcatggatttacccttggagaaaagggatgaaatagatgtccaagtctcttgggaatgtcgattcatcctgatgttgtcgttaatggaggacaagatccagtaagaac

SEQ ID NO: 260518 - DNA, 227 bp, Homo Sapiens
aggcttaaagaggaaattgaaaaatcatcaaaacagcgagccatgctggctggagccacagcagtttactcccagttcattactcagctaacagacgaaaaccagtcatgttgccccgtttgtcagagagtttttcagacagaggctgagttacaagaagtcatcagtgatttgcagtctaaactgcgacttgctccagataaactcaagtcaacagaatcagagct

SEQ ID NO: 260519 - DNA, 1486 bp, Homo Sapiens
  misc_feature (117)..(126): n is a, c, g, or t
ctttgaggggctcgcgtgggggcccgcccggtgtataatatcgccctggtgggaccctgggacgcccccccctcggagttgtggttgaaaaggcgcggtgggtggcccccggggggnnnnnnnnnngtgggggagttcccaacgccttttttcttagccccgggtttttctgtggggaaagaacgttttaccccccggtccgctccctcacggggcgccccgcgcccaaaaaaaagggtttttgaaaagtttttctagggggggagggcgggcccccacgccgctctttcgtgcgttcagccgggacttggaagaagggggggtgttatcgggcctcgcagggtctcattttaggggcgcgcggagcgtgttcgccgggctcgtccgcgccgcctcgccgctcgggggtcaagctaaattatttctttattaggaaagcaccaacaccacattcttcgaaattactggaattttatttgcctcaggcttatgacttgcaaccaaagacattgtgcaaagaaagcaaagattaagtacactttagggagaaggagacgatacacattggtaacataggagatcagggtgacaaaagaagccatccaatacactatatagattgcaatattcaatagcgctttcaacaaaacttttttttaaatcaagagcaaaaaaattaagcaatgtttacagtagacataaatcttatacaattcaaaaagcttttgttcagatcatagagcataaaatggaaaaatgtatatgcaggtgaaatctaactactgtacatttatcacctattaaagttgcttatatgtaccacagtgtaaaaaaacaataccgaacaaataaaaacctcgaaaattgcctgatgaaaaataaaataaccagtggcttttaatggcttctcctggttatcagtgctacaaaagacaaaaatcttctcatctgaacaggtgataaaaccaggcacaatcaaaccgttaccaaattagacccacccatagaaatatactatccacccacatattttccatcaaaagctttttgtttgtttcaatctgaatctttgaggcccatttggtcacaatatgttacaaatatttgtgtatgtgtgtgttttttacaccatgatatcatatgtttgtctggcactatcctaaagctagtttatagacgatgatgatatagaaacaacccagtgcctatatgacaaatgaactcactgggtagaaatgagacaggggaggaaggaattcagttctaccaaggaaaaaggtccatactgatcactcatcatccgtcccacttccttctgactgttcacgttcatcctgctcctcatcgctgtcaaaatcgctcactacaggtttggcttttcctcgatttggccttttcttgcctttccctttgtcccggcctttgtcatcttttttattgagcttaattttcaccttgactgattttgcctcggactctgactctt

SEQ ID NO: 260520 - DNA, 963 bp, Homo Sapiens
  misc_feature (832)..(832): n is a, c, g, or t
  misc_feature (892)..(892): n is a, c, g, or t
gggggtgagacagaagtgaagaaagatgaggccggagaaaactattccaaggatcaaggtggtcggacattgtgtggtgtaatgaggattggcctggttgcaaaaggcttgctgattaaagatgatatggacttggagctggttttaatgtgcaaagacaaacccacagagaccctgttaaatacagtcaaagataatcttcctattcagattcagaaactcacagaagagaaatatcaagtggaacaatgtgtaaatgaggcatctattataattcggaatacaaaagagcccacgctaactttgaaggtgatacttacctcacctctaattagggacgaattggagaagaaggatggagaaaatgtttcgatgaaagatcctccggacttattggacaggcagaaatgcctgaacgccttggcgtctcttcgacatgccaaatggtttcaggcaagggcaaatggattaaaatcatgtgtaattgtcctccgcattctgcgtgatttgtgcaacagagtccccacatgggcaccattgaaaggatggccactagaacttatatgtgaaaagtctataggtacttgtaatagacctttgggcgctggggaggccttgagacgagtaatggagtgtttggcatctggaatactacttcctgggggtcctggtcttcatgatccttgtgagcgagacccaacagatgctctgagctatatgaccatccagcaaaaagaagatattacccacagtgcacagcatgcactcagactatcagcctttggccagatttacaaagtggctggagatggacccccttccatctagtaangccttttcagaagtattcctggtcagtacctggataaaggaaggtggctggggtcttcangctctaaagaggcccattttgaagatgggatttaggggggatgataaaagacccccaacaaggaagaggaa

SEQ ID NO: 260521 - DNA, 751 bp, Homo Sapiens
gggggaaatcacggggacagaggaggaattcacgggatcagagcactgagaaactccagaggcttctggttcaccgccctgattccacagatgtgggtcagaggcagagatggaagttggaatggacaagcctgccctctcctcagctctccatggctctgtcctcaggctgtttctgcaatttgacatgaggcctggccccagggaaaccagtggggcctcatctcctccctgtgctgctctgaggtggagccttctcagggtcagtccagctctggagcccctctccagctcggtcaccaaagctgtctggtcccagggcggtgcggagtgacaggcacgccagccaatccaatcggcaatttcatacccaatgcatgtgactgataaagagataacaccctgtctccaagacacaggctttacataaacagctttaatgacttcttcacttagagacaagactccttagtggtggaacctcaggcatccatgcaggacgtaagaaacctcccgtatatacatgaactgagaagtgtgtagaagagtaaatactgtaataggtagtaaaatggatggatttttatttatgcgctactttggcctttctccctctctggggatatacccatacataccaaaatggatttccttctatgggaaacctggaaagatgtaatattcctttacatatgaaaatttaaattaaatgaattttttttccggatcctattgaaccccccaaattata

SEQ ID NO: 260522 - DNA, 705 bp, Homo Sapiens
  misc_feature (635)..(647): n is a, c, g, or t
aaaaatagaggaaaaaattatatattcaaagggtgaggaacatgacagatgggcaatgcactttgattcattaaagagttatcctggttctcaatctcagctgttctctcggtcaacacacaaacaacctgagtacttctgtgtctctcctgacactcaggagctggctgatgtcagcagtgtttgtacacctacaaccggaagccaggttgaaccttcagaggaggagcatatagcaaaacctattaaggatgtggttatggcaaacagtaagaaaacaaactttctccgttctatgactgctctcttggacccagctcagattgaggaacgagacagacgacgacaaaaacaattagagcatcaggtattgcattgttaaacattgttctttaccttaataagtaacagtcatggtgaacatatacctaagtaaatggaaatttaaattctgatgtaaactttacagcataggtcctgtccagttgtgtcacgaatccaatccctaccacaactggcattgtaatattagaattagcttatcaaatgctacagccacctgccttccagtacagaaggtctttaatatattaagttgtatatgtgaatttgtgttgtcttaggttagtactggnnnnnnnnnnnnncatcaatttatttctcctgagttctgtttaaggtgaggaattcattctttggataggg

SEQ ID NO: 260523 - DNA, 604 bp, Homo Sapiens
  misc_feature (408)..(448): n is a, c, g, or t
gggaaggaaagagctcaaagatttggtttgaatgtctcttcaatctccagaaagtctgaagatgatgagaaactgaaaaagaggaaggagcgatttgggattgtcacaagttcagctggaactggaaccacagaggatacagaggcaaagaagaggaaaagagcagagcgctttgggattgcctgatgaaaagttcctgatactttctgttctccagtgttttccatttctctccttcttcttggtcacatatatgcctaaatgcacagtcatgtgcctacgtcctgcctcgcaatgagggagcatgtaccccaggtacatccatgaactgcggcagcagtttgacttattgctgtttcagctttaaggttgttgtgtttttgtttttgattatgttgcttgttaatnnnnnnnnnnnnnnnnnnnnnnnnnnnnnnnnnnnnnnnnntggcgggcggcctcgggccctcaagaagcttttcaaaaccttttcttttgggcgcgcggggcccacgtagggaaagggaacatgggccttaactggttttcccaaggaaaatccccgggcctggacctaaagggcttgggaattccccccccaaat

SEQ ID NO: 260524 - DNA, 824 bp, Homo Sapiens
gggctagtggagtgaggggtaacaagatggcgaccgagacggtggagctccataagctaaagcttgccgaactaaagcaagaatgtcttgctcgtggtttggagaccaagggaataaagcaagatcttatccacagactccaggcatatcttgaagaacatgctgaagaggaggcaaatgaagaagatgtactgggagatgaaacagaggaagaagaaacaaagcccattgagctccctgtcaaagaggaagaaccccctgaaaaaactgttgatgtggcagcagagaagaaagtggtgaaaattacatctgaaataccacagactgagagaatgcagaagagggctgaacgattcaatgtacctgtgagcttggagagtaagaaagctgctcgggcagctaggtttgggatttcttcagttccaacaaaaggtctgtcatctgataacaaacctatggttaacttggataagctgaaggaaagagctcaaagatttggtttgaatgtctcttcaatctccagaaagtctgaagatgatgagaaactgaaaaagaggaaggagcgatttgggattgtcacaagttcagctggaactggaaccacagaggatacagaggcaaagaagaggaaaagagcagagcgctttgggattgcctgatgaaaagttcctgatactttctggtctccaggggtttccatttctctcccttcttcttgggcacatatatgcctaaatgcacagtcatgtgcctacgtcctgcctcgcaatgagggagcatgtaccccaggtacatccatggaactgcggcagcagtttgacttt

SEQ ID NO: 260525 - DNA, 464 bp, Homo Sapiens
agctggaactggaaccacagaggatacagaggcaaagaagaggaaaagagcagagcgctttgggattgcctgatgaaaagttcctgatactttctgttctccagtgttttccatttctctccttcttcttggtcacatatatgcctaaatgcacagtcatgtgcctacgtcctgcctcgcaatgagggagcatgtacccccaggttcaagtgctggattgtgtcatgtgaccatcccaaaactcagagcaccctatggccgtctttgccctctgtcacataacttgaaaactgcctgatggcctttttgcagtggttccctccaggaagccttgatctcagttgaagaagttctttcctggcattccaatgcccctgtcagctccatactcctcagacacccttaacaaaggctgtcaatgcacacaatgtgacaaatacacaaaataaatgataattacacta

SEQ ID NO: 260526 - DNA, 268 bp, Homo Sapiens
ggaaaattattcagaaagacatcattaaggaagcatcagaagcttccaaggaaaatagagatatagaaatctctactgaagaggaaaaggatactggagatctaaaagatagctctctcttgaaaacaaaaaggaaacataagaaaaaacataaagagagacataaaatgggagaagaagttataccattaagagtgctatcaaagagcgaatggatggatttgaaaaaagagtatttagcgctacaaaaagctagcatggcttcttt

SEQ ID NO: 260527 - DNA, 439 bp, Homo Sapiens
aacagaaacagctaatttccaatgtattgttgggaaaaagcacaaactgtgtttttaactcaaatattgtcttcgactgctatgtgtataggaaagcagtctctgtatcaatgtttacatgttactactttttaaatttcaatacttttataactgttcttaaaaataagagttttaaatactgaatcctttgtcttctaaattgcaatagctataatcacaagagcaatatctctttgaatgactgtctggacaaacacaattgcaaataagggaagggaaaaatgcttttctatttttcagtaactggattgtcttaagaaactacatctgcttaataaacaatttctcagcaatgtttgctgggtatgggagtttaagcccggcagatgtgtctcctggttgaacatgcctttttcatggagtttgggttctaaat

SEQ ID NO: 260528 - DNA, 428 bp, Homo Sapiens
  misc_feature (151)..(151): n is a, c, g, or t
  misc_feature (158)..(158): n is a, c, g, or t
  misc_feature (341)..(341): n is a, c, g, or t
  misc_feature (413)..(413): n is a, c, g, or t
attaaagccatgcccgaggatgctaaggggcaggtgaaatcccagcatccactaagctggtgttgtcctatcgacccagctggatcgtgtaaccagtctatgggaagtgaggattggatagctttagtcaaagcagctgctgcagctgcanacaaagnaacaaaacagggagtaaacctcgaaccagcgctaacagcaataaagataaggataaagatgagagaaagtggtttaaagtaccttcaaagaaggaggaaactttcaacttgttattagccacaccagacgtaggaggaaggaaggaagatctgcctacatctagtggaaacatttgtaggganttcatgttaggaggaacgttccaaagatggtctttccacagccagaggagcacttattcaaaccaggggganaattattcagggcaa

SEQ ID NO: 260529 - DNA, 473 bp, Homo Sapiens
  misc_feature (19)..(19): n is a, c, g, or t
  misc_feature (55)..(55): n is a, c, g, or t
ctaaggcaaaaccccctgnacaaaaaccgccatgggttatttccaaacccagccntgttttttatgtaaccctgttttacccggcatccttcctcagcagccttcctgacccactgcctcaattttcctccctttacagcccattgttcctggtggacaaataaccctaggtactcccaaatccccggcaggaaaaatatacagcattatgaaacagcactcagtaatccctaaaatgatttccaaagctggttacacatgacctgcaaagtcttttaaattaaaagactttctcattacagagtttagtcaacgtagcaaaaccatgggaaattaaatggaaagataattaaatatgtaaattcataaggaacaaaagacgagaagttaattatacaataggctggtgacaccagagttcattgttatgtgccacaagaaaattaaattttttaaaaaactaattatgttta

SEQ ID NO: 260530 - DNA, 759 bp, Homo Sapiens
gaaaagtcacctttgcacataaattggccatttctgaaaatctcctccaagagactgaaaccaaagctctaaaacgccgcttcttcagtctctggggagcacgttgagttggttcacatccacattctggctgtgtagccactccacagatgggtggtctcttgggatcagaatgcccctccactcatgagactcttcattttgtccactttgacaggaaaagtgggaatgtatgcagagctctcaaaagaaacaaaaaaggccaaaacggtgccttcagccacatcctctgaattggccctgacttggactaaatgcactaatgcaaaatcccttgacaaaagcgcataggttatttcaaaccagcattgttttttatgtaacctgttttaccgcatcttctcagcagcttctgaccactgctcaattttctcctttacagccattgttctggtggacaaataacctaggtactccaaatcctggcaggaaaaatatacagcattatgaaacagcactcagtaatcctaaaatgatttccaaagctggttacacatgacctgcaaagtctattaaattaaaagactttctcattacagagtttagtcaacgtagcaaaaccatgggaaattaaatggaaagataattaaatatgtaaattcataaggaacaaaagacgagaagttaattatacaataggctggtgacaccagagttcattgttatgtgccacaagaaaattaaattttttaaaaaact

SEQ ID NO: 260531 - DNA, 1357 bp, Homo Sapiens
  misc_feature (146)..(146): n is a, c, g, or t
tccttatatatctcccacgcccgttagtttccacccccaagggggggcttggcgtttcccgcggccaaagagcccataaggtaatctgggggaaaaaaccacattttccttttgcgggttctttgcgggttatttgagaagcctcntacccccaaatttttgcgccagccattttaaatgttttccccaaacaacgaaaggtatttaaaagcgggggcccaaaggagggtcaattgggtatgtcccacaaaaaggggggctccccttatcctctggctagggaaacccccccaggccccatgaaatggcaaccagggaagacctaaaccccattttttaaggagaggggtctattgactaaaataaacaatacaggctacaatcccatccacaggagtgtttctgcttgtgtgaggctgctccctccataacaaagttcggctgacggcaacagacaaaacattcccgagacagagtcgcagataagactttacaggaaagaatccattccaagagtacactttgaggtgtaactttattgtacagaacattttataaaatacatttttgtgatcatttacacatatacaaagacttaaatggttttagcaaataataatttttctaaaacacaatcacagtttacataattctgaggtaaaggtcttgaatctatcctagatgaaaagtcctagcccatgagggtctctaacagggggatgtgtccactgaaccttgagttctggcacccagacggattgatgagagggcaggctacacctgcttcatttcagagatgatccaaaatttcagaacttaatgctcctggtccagttctactaagtaaatgcttctttttttccccaacatgtaactctctcagtcttgtcagaacacaacttctgctatggaggaaatatttccatcaggaaagggccaagttagtgtcttaacttgactgccttgaatggggactctggaccccaggaagaatgtatttaggctcctcacaaaaaagagtgatggctgggcaaaacaaatgtactgcaagacccatcttccctccagttaatacactcccaggatgggctgcagagggggagactctgagagaagctggaggcccacaaaagtccactgaccctctttctgtcccagaaatgaataaaggacccagttgtgctttccttccaaaatcctcaacaaagttgtttgtgctccaagaaaatgtgggaataaaaaaatcatgtcccaggtcatctttgtgtgtgtgcgggggaggtggatgggaggaaaaggcatgtattaatagatactgctgctataaaatgacataaatcatagcccttgatctgtt

SEQ ID NO: 260532 - DNA, 1251 bp, Homo Sapiens
ggggatgcccagtgatatacacgttaaagcagtaatgtaagtctgtgagccactgttcctgaacacttccactcttcaatgtcgtgatattcttgatgatctgctgcaccaagatcgcattggtcaacatatgagtcctgaggggtgcatgctgaagcagcagtcgaagcagctggcccacaacaggcagctcctcaggcccaactctgttcacccgcaggctctgcagcatcaacctgaggactcgaggcaagagagccaggatggagacacagaccccccacagcttgtccctctttcttagatgttctgcttcccctttctctatagtgagcagaaaataaagaagactgtagcaacaagaagccagaaatggcagtagagtctcactaactacacaagtatgatccaggagcttacagataacaccaaaaaccacagccagccgtgctgtcaggaattacagtcaacccaaccaaatgcttactgatggcactttgcaagatgtcaaagttctgacttcgggcaggaataaccaataaactgtgaaaaactgcctctgttacatcccagtggtgtaaaaattgatccaaatctgtaaggtagagaagcacaggggaaagctgtgtctggatgacatgaggaactcctcgaaggctctgaagccaagtcaactcctctttcgaaaaccctgtaagtgtggaaaataagaagctgaaatagtctacatcactcatcaaccagtctttagctgaatacttccacccagaaaatgatgatctcatgtgcagtatcccgataagcatggcagccaaacttgaactgagtcttcccataatacagcaacgacttaaccgagaaagcaaatcagccggcagactgggtaggaaatatacaagctgaaccaaacgctgctgagagtctgcagggagaaccaccacagcaccttcttgtggatcataaattcggagggcagtagcttgtaaactttttagtaattctttatttgctcgtgctgcagcggtatgaatgatatcgataagctgtgtagagagctcaggatttcgggagccaagatgagcaagttgcaatggtaagccagccagccaacgggataacactttactacgatatctgaatctacaagatctcagttcttctgtctgatagattttactgaaaaacttcaataacaaagtccgaactggaaggataaggcccctctgctgatataatgtataaactgcctta

SEQ ID NO: 260533 - DNA, 955 bp, Homo Sapiens
cttagatgggtggaactccgacgagggccagtgattttcgggtaacgaaagtcatgggatcaagtcggacgaatatagtcgtttctcgtcgaggaggggaggaaaggtgaagcgattgtatgcgttgcgggaagaggtaacattgaaggggttttggaagtttacgtgtcaattctgggatcataacttaaaggccttacactctccgttccagttgccaccagttgatgttggaaagagccatattttcgctcttcggaaggcggtagtgaaataatggggtttggagagcccatgttcgcccatggcgcacaaagaagagaatagggcggttggtaagtaatgttgggctaaggagtgaagggtaccgatgtgaagattttattccatagtaataacaataccaatttggagagcaaagttattttcagcatttttctaaaagtctagtgatatattctgggggtggtaagggtacatgaaaaaagggacttgggatataagttaatgggagatataggtgcactttgcggtatttggtggttaatgttttgaaagtatgcaaaatccacactcaataaagcacactgataaaatagatttccaataagactacaggctctgaaaaacaaactggctaagttggttgagaacataggtagaaattatcgctgattagaaatatttacaaaaaatagctttaaattcatacactgaagaataaaagaaatgtcttccaagtatacctgatgtcaataagatcccaaataaatcaaatgtaaacaccatctggatggatctgtgttacctagtgacatgcagcgctgcttcatggatagtgaaaacttggcatcccacctctagcataaaactttttctgtaactacaggtttggggagaatgaaagtgatttaactatttatgcctatctgattttttaaaaaataaggatttc

SEQ ID NO: 260534 - DNA, 884 bp, Homo Sapiens
gacagaccttgtccttcttccttgtggaaagtgtttcctctgctgctactgctcatgagactcttccccctccctgtcccagggaaccaaagggctttctaccacaccctttcttgccccccgcctcccatgtctgctgtgcctttgtactcagcaattcttgtttgctccattatcttccagccggatacagagtgaatagttaaccacacttaggtcaaataggatctaaatttttgttcctgctccgtgtaaagaggccagtgtttgtgtgttgcaagcagccttggaatagtaactcttctcatttgtttgggatctggccaccaagttccagaatgatacacggatcagtgcagaagttcatcaggctctcggaccttagggctgttggagaaggcttcagcagcagaactgatggtgaaggctcgtgttctccatcctcaactttctttgcttcgatcatacacaagaatacatttggaagggcaaaaaatgaacactgtcgttcattgcagccgtgttttgtgacacagatgcacagtctgctgtgaagaccttctctcaagtggcatttgggagtccatgccagatcatggtgcttcatgagagactgacagctatcaggggttgtggcacttagtgaggactctcctcccccagtgtgtgctgatgacacatacacacctgacaatagcttgagtcttctctgttccttttactctgtagccaacatacacatgatttaaaaccctttctaaatatctatcatggttcatccttgtccaaatgcagagtcagagctatttgtacttcattattatttccaaggcgaatagttggctttctttttgcaaaaataattaaaatttttgtatgttgca

SEQ ID NO: 260535 - DNA, 763 bp, Homo Sapiens
  misc_feature (67)..(94): n is a, c, g, or t
  misc_feature (493)..(517): n is a, c, g, or t
tgagaacttggaaacaaagtaaactataaacttgtacaaattggttttaaaaaaaattgctgccacnnnnnnnnnnnnnnnnnnnnnnnnnnnngtagccttgacattcacccacctcccttatgtagttgaaatatctagctaacttggtctttttcgttgtttgtttttactcctttccctcactttctccagtgctcaactgttagatattaatcttggcaaactgcttaatcttgtggattttgtagatggtttcaaatgactgaactgcattcagatttacgagtgaaaggaaaaattgcattagttggttgcatgaacttcgaagggcagatattactgcacaaactgccatctcgcttcatttttttaactatgcatttgagtacagactaatttttaaaatatgctaaactggaagattaaacagatgtgggccaaactgttctggatcaggaaagtcatactgttcactttcaagttggctgtnnnnnnnnnnnnnnnnnnnnnnnnnatatgtacagatgataatagggtgtggaatgtcgtcagtggcaaacatttcacagatttttattttgtttctgtcttcaacatttttgacactgtgctaatagttatattcagtacatgaaaagatactactgtgttgaaagctttttaggaaattttgacagtatttttgtacaaaacatttttttgaaaaaatacttgttaatttattctattttaatttgccaatgtcaataaaaagttaaga

SEQ ID NO: 260536 - DNA, 327 bp, Homo Sapiens
  misc_feature (54)..(78): n is a, c, g, or t
gccaaactgttctggatcaggaaagtcatactgttcactttcaagttggctgtnnnnnnnnnnnnnnnnnnnnnnnnnatatgtacagatgataatagggtgtggaatgtcgtcagtggcaaacatttcacagatttttattttgtttctgtcttcaacatttttgacactgtgctaatagttatattcagtacatgaaaagatactactgtgttgaaagctttttaggaaattttgacagtatttttgtacaaaacatttttttgaaaaaatacttgttaatttattctattttaatttgccaatgtcaataaaaagttaagaaat

SEQ ID NO: 260537 - DNA, 1297 bp, Homo Sapiens
  misc_feature (1224)..(1224): n is a, c, g, or t
  misc_feature (1265)..(1265): n is a, c, g, or t
  misc_feature (1283)..(1283): n is a, c, g, or t
ggtacccggtccggaagtctcgggatatcgtcgacccacgcgtccggtctgtgtgaaaaaaccttccattaacacttcatcccttcgtaaacatgagaaaaaccatagtggagagaaactatttaagtgtaaagaatgttcaaaagcctttagccaaagttcagctcttattcaacatcaaataacacatactggagagaaaccctacatatgtaaagaatgtgggaaagcctttactctcagtacatccctttataaacatctaagaacccatactgtggagaaatcctacagatgtaaagaatgtggtaaatccttcagccgaaggtcaggcctttttatacatcaaaaaattcatgctgaagaaaacccttgtaagtataatccgggtaggaaggcatctagttgcagcacatccctttctggatgtcaaagaattcattctagaaagaagtcctacttatgtaatgaatgtggcaacacctttaagtctagctcatcccttcgttatcatcagagaattcacactggagagaagccttttaaatgtagtgaatgtgggagagccttcagccagagtgcctctcttattcaacatgaaagaattcacaccggagaaaagccctatagatgcaatgaatgtgggaaaggctttacttctatttcacgacttaatagacaccgaatcattcatactggagagaagttttataattgtaatgaatgtggtaaagccttaagctcccactcaacacttattattcacgagcgaattcatactggagaaaaaccatgtaaatgtaaagtatgtggaaaagccttcagacagagttcagctctcattcaacatcagagaatgcatactggagaaagaccctataaatgtaacgagtgtgggaaaacattcaggtgtaactcatcacttagtaatcaccagagaattcatactggagagaaaccatatcgatgtgaggaatgtgggatatcttttggccaaagttcagctcttattcagcatcgaaggattcatacaggagaaaaaccctttaaatgtaatacatgtggaaaaacttttagacaaagctcatcacgtattgcacatcagagaattcatactggagagaaaccctatgaatgtaatacatgtggggaaacttttcacaccataggtcatccctttactaatcattataaaattcatatcgaagaggacccctagaaagnagatttggatgtggtgaaaagccttaaaccaagctcatcgnaagaatacattccttganagagatgtaataaa

SEQ ID NO: 260538 - DNA, 756 bp, Homo Sapiens
  misc_feature (66)..(66): n is a, c, g, or t
  misc_feature (518)..(562): n is a, c, g, or t
  misc_feature (612)..(612): n is a, c, g, or t
  misc_feature (651)..(651): n is a, c, g, or t
  misc_feature (701)..(702): n is a, c, g, or t
  misc_feature (724)..(724): n is a, c, g, or t
gccaccaggagaaccagtgcaactgaagtttccactgcctgctgctctcctgtggcatccacatcntgaataggcaggagggtgcagcccacctggtgcacagggaggaggaggaacgtcccctctgagataccacaggtcagcagaccacctcttcccagaccagctggggagggcagggaggcggggtctggaggagctgcgggaatcatctagagctttccaaccaaagggataaagtaagcaggaatgtccttgcaaatactgccctggctgtacctggtctttaaaacacagcagcacctttgagaagtggctgggagatgggacgcctgcctgtacttttctccagctaagcatgcatagaaagcagtttcaaatattcctctttaaaaaacacaaactttcattttccaggcacacttcacaagtggatttctttaaccaaggacacagaatacttttcttacattcttgcaaaaacagttgaacccattttttttaaagtttcaatgccnnnnnnnnnnnnnnnnnnnnnnnnnnnnnnnnnnnnnnnnnnnnnagtccctcattccagaaacctattgatgtcatgtcccctgaaggacaatntttctcacttaagagagagaagccagatgaaaggccatnttcacatgacagtgagcaggtttcacaactgaccaaagacggacacaganntgcaaagcaacgtgattttccnttgaaaaccccccaaaaagcacacagtgaacg

SEQ ID NO: 260539 - DNA, 785 bp, Homo Sapiens
  misc_feature (288)..(298): n is a, c, g, or t
gggtgtgatgcagactaagggttttgtggtcaaatatccttaagaaacaaagttaagtcagtttcctttctgcaaggacttttcagccttcaatgtgtgctgtgcatggtgaatccccaaaaataatccttgagtctgtagcatttcctgaacttacatgaccaggatactctattttgcagatcaccccacagagctagggttccaccgagtatactttgcttaggttgacttagcatatctgaggtcttcaaggataaaaactgccaccccaacacccttccattnnnnnnnnnnntacaaaatagcaccacagtctccatctggtttatagcaacaaaggtactttatttaatgaagcaatggttctaatcctggatactgccatggactacaattccatccctcccagagggagtggaggaagtcttgggtggtgtggacagaaggaagagaggaccagggtgacgtggggtatagggcccagggtggctccctaatcctcaggctcaaaaggatgctcagtgggaacagatgatctcttgactgagtgcttcttcagtttcatagtttggaatcgttcactgtgtgcttataggcagggttttcactggccattcacgttgcttagcatttctgtgtccgtctttggtcagttgtgcaagcctgctcactgtcctgtgacgatggcctttcatctggcttctctctcttcagtgagaccgactgccttccggggacatgacatcactaggtttctggcactgcagggccccttcctccgc

SEQ ID NO: 260540 - DNA, 546 bp, Homo Sapiens
  misc_feature (91)..(100): n is a, c, g, or t
tccaccattttttagaggatcagattttagcgctggaaaatgagttcaaaaatttcagtgtaatgtcataaggatgttgggatacagagannnnnnnnnnccttggaaacaaatggactgggaagaaacacagcatggctttgctctgagtttcaatctgatgattatgaccatggaagatagtcttatgtaaaggttaaatggtgtttacaagtggatagataaggcggagatggtgagaagccgggttttctctatgctaaatgtgtctactaagagcagcacttcctactagctaagcacaatcatagccccaccgtgatgagctgctagtctgaataacattccctgacttagggaaaggcacacaaaaacatataaagaatatgtctattttcatatgtgtgatactgacagagccatggtattcctaaaatataggtttctcttttttcttgtattcttagcaaattgcatttattcactacattacaaaccatcactgatgtatccaaaatagcacacatagttcagtatgaaataagg

SEQ ID NO: 260541 - DNA, 542 bp, Homo Sapiens
  misc_feature (35)..(35): n is a, c, g, or t
tatggggtgggccatcgcagcgtggtttcctgggnatttgcggggggaagccctgctcccttccggccgagggcttccagagaggttgctttttcacctgttaaggctttcccagggtagggtggggggttaccgggggccacatcccccaacacttggggggagaggtttattccctctcgggtgggggatccagtcctggcaatgcgggggcatggggggccgtcaaacttggaggcctcaaagaaatcctcctggcctggggcctccccaaaggtgctagaattccaggccttgagcccaccgtgcccttgccgcaagctatttttagtcattaaaaaggagaaaaagaaaataaggcaggccggcttctcacattacatgcttttagaaaaaggtctcatccttgaagcagctttgttatatgcagagcacagtactggcttcaaaaaatatataaaggttctgtgcactggcactgtttacatgtgaagaattgccatcaacttctgtgaaaattagcaagctggcacagtggctca

SEQ ID NO: 260542 - DNA, 982 bp, Homo Sapiens
gggggacgacaaagatggcggcagggaccagcagttactgggaagatctcaggaaacaggctcgacagctggaaaatgaacttgacctgaaactagtttccttcagcaaactatgtacaagttacagtcatagcagtacccgagatggaagacgcgacaggtatagttctgatacaacaccccttttaaatggatcaagccaagacagaatgtttgagacaatggcgattgagattgaacaacttttggcaaggcttacaggggtaaatgataaaatggcagaatataccaacagtgcaggtgtcccctccttgaatgcagccctgatgcatacattacagcggcatagagacatattgcaggattatacacatgaattccataaaaccaaagcaaactttatggcaatacgggaaagggagaatcttatgggatcagtacgaaaagatattgagtcatataaaagtgggtctggagtaaacaacagaagaactgagctatttttgaaagaacatgaccaccttcgaaactcagatcgtctgatagaagagacaataagcattgctatggcaacaaaagaaaatatgacttcacagagaggaatgttgaagtcaattcacagcaaaatgaacactttggccaatcgttttcctgctgtaaacagcctgatccagaggatcaacctgaggaagcggcgggactcgctcatcctagggggtgttattgggatctgtaccatcctgttgctgctgtatgcgttccattgatgggacatcttcagggactcttgacagccaccgctttcacaccctggtctggaataaggaaacatcggagggagaagttgactgtcttgataattagcctgaccagcaggatgaatgcaagactgacagtgatggactctgtgacatggtcaggttgagctgaagccacagtttctctgtgctgtgttttctaacacatttttctgtttttaacc

SEQ ID NO: 260543 - DNA, 637 bp, Homo Sapiens
  misc_feature (460)..(482): n is a, c, g, or t
atgcacgtggacgacccggctgggcggccacatctgctgctggtagccggtggtgtgtgcgaccagcagcaggaacagcaggctgctgagggtgttgatggcggtgcgtgcgttcattgcggggcactccttgtgccggctgctggaaactgcaggggcggcattctagcggctgcgtgccggcagttgaaacgccactgtcatcgatgaccgtcaccctgcggtgctttccagccttggggtggttggccggccgtgaacagcgtgaggatctgggagaagagctatgcgctgcggcggcggctgctgcgcggcttcttcctgcgccgtggttctgccagcgaagatgccgaggatctggcgcaggaggtttatctgcggctgctgcgcagcaccggtgagcatgccgacgcggtcgagaacccggaagcctacctgttcaccgtggcggccaacctgnnnnnnnnnnnnnnnnnnnnnnnttcgtcgctgccgccgctggaggacgtcgacctcctggccgaagtgctgaagagcgaagaagacatcgaaggcgaattcgagcgcgcgcagcgctggaacgatatccgcaccaccatcgcacggctgccggccaccacgcggcgggtgatggagc

SEQ ID NO: 260544 - DNA, 850 bp, Homo Sapiens
ggggttatcaagaacatggtgaaaggactgatcaaccatttcaaacagaacttaataccagtatgatgtattactatgatgatggtacaggtgtacaggtgtatcctgtggaagaagcattgcttaaagagtatattaagcgtcaaattgaatattacttcagtgtagaaaatttggaacgagacttctttcttcggggaaagatggatgaacaaggtttcttgcctatttccctgattgctggttttcagcgtgttcaggctctcactacaaaccttaatctcatcttagaggcactgaaggatagcacagaagtagaaattgtggatgagaaaatgagaaaaaagatagaaccagaaaaatggccaattccaggccctcctccacgcagtgtgccaccaacagacttctctcaactgattgattgtccagagtttgtaccaggccaagccttttgctcacatacagagtctgccccaaattctccaagaattggaagcccattgagcccaaagaaaaacagtgaaacaagtattcttcaagcaatgtctagaggtttgtctaccagtttgcctgacttggactcagaaccttggatagaagttaaaaaaagacatcagccagccccagtgaaattgaggggatcagtgtctgtccctgaagggtcattaaatcagctaatggtcttccgaagaaccccgaaccagaaagaacttgattttttggttgatgcacgagattgaaccaataaggacgaaaaaacccctctaactggattgggcctgataatggattcccaattattgaaattggatgacccaagaacttttaaccaagaatatttgaattg

SEQ ID NO: 260545 - DNA, 1626 bp, Homo Sapiens
  misc_feature (56)..(56): n is a, c, g, or t
  misc_feature (87)..(109): n is a, c, g, or t
agcgggggtttataaacaggggggaagtttttcgccccaccccccacggtttcacncggcgttaccattagaatcattgggcaaaannnnnnnnnnnnnnnnnnnnnnncgcgccggctatttctgcgagttttgggcgagaggccttccggcctgtgtggggaacgcccccccgggtcgcaggcgtgcggatttttcccccgtgcgcaatatgagcgccgtgctaggaggactctccccccctctcggggagctgatctggcttccccaggaaaaacgggctttcggcgttttcgccccgcccccggcgagcacggttcctttatttcaaccggggggaagcggaaattttccacaggcgccccctttgctctccatggcgcccccggggtttttcccctcagggggaaaccacctctatggaccccggggttccagctttacggtatggggggcccaccgcgcccaagacgaaatggtgttaggaaaaacttcttcgaggggccggaggcggcccgacaagctatgcgtatggggggtttgccattctcgtcactcttaaatatggtttaatactcttctccatttctgtacatcacaacaccaagattttgctgcttagtatctctctgcagaggctatagagaatgcaaaggctacggttttcaccccctcttatatgtgtttgtatgtgtaagtgtaatacatatcaatatatattgatacacacatcaatatataatgcaatatatatcaccgaagagaacacattgattaaagaaatacaaaaatttggcatcatttccaaacttaaatagtaaaaataaaaactacaaaaggagctgcataccctaaatgtatcatgtgaaacaacaagcatattcaaaaatgtaaatttacatccaatttctctggtcttggtcatatcacatcagacccatttacaatggcaaaaccctaaggtactgctgtgaagagagcatgtttgctcgctcttgggtgttctgcaaacaaatagcagagcccaaagcaaaaaagcctgttccggtgaagtctcccacgttggtgaacaccaaataatggactcttctcacagggggggttgagacatcaggttacacattgacagacagtatttggacctcagagtacagtgtgagaaccagaaactttacatttaagacatactcccttcattcaagtgaaacaggattattggaacgataggcaggtctgtaacctgggaacaaggagctggttcagaccaataaagctacgagtgactgaatcaagtcagtaaagaacagcagtcaggcactaaagtgttaaaagtacccaatttgaaaaccaaatgcaccccactaccctagtcagtgtggaggtgataccaattgacttttaaaacctttggtccttcaaagtccatttggtatacttttttccatcgctaccactgggcacgtactatacactttgttcaactgtcaccaccctgggcacgccatgaccttgcatatcagctgggttcaagtctgacttacagcccagctgtgaagcatcagcttcagggtttcaggccaacttttggatccaacatggtcttaaatccatggtgccagaagctgt

SEQ ID NO: 260546 - DNA, 508 bp, Homo Sapiens
cgtagcaagacttaagctgccatgtggggcctaatacaaaaaggatttcatttatctggtaaggcagtcttagtaggggtgtagccaccatctctcgtgttttgttcaccccttacttccccacttgctaaacccaataaccccaccgtttacttaccagtaatgtggttactatttgaagcatctaaatctattggagatgacaatttagagagctggacaaaaatcatataatttcaagtataacaaacttaaatggcatattcaatggtaagaacattaaaagtatctgctccattatattaacttagtgttgctctttttttcttcttcatttttaaatttcaaaagaggccacattcctatgacacttggccaagaaatgtaagaaattaaaaagtccttattaaaatgtctcctgccagatggaaaggagacttgattcaattaggccttttgcatctttggaagtggggaggggatgaaataaagacacctttccgtcctg

SEQ ID NO: 260547 - DNA, 779 bp, Homo Sapiens
  misc_feature (364)..(394): n is a, c, g, or t
agcacatagaaaatgcagcaaactcaagtcaagacaatagagagatatgctgagaacttaatactcaagccttaatcaggcaccagatgccaagaaaccttcactctcaacaaacaacacaatccactaattatctgtagaattgttgtagttggtactcttcacattcacttactccttagcaaagattgctcttgaatggaaaggttgcagaaagagccaaagccaatttggaagaagtgagaaacttacaggtttgaggaatggtgaagtcagcgaaggatctagcctccttagatgatgaacaggcaaagtcagagaaggaaccacagtgagagaattggcagatgcccctaataaaatnnnnnnnnnnnnnnnnnnnnnnnnnnnnnnnaatattcatgcattatacccattcaagtaactggatatttaattcattctatgcaatgaacagtcaaatgctgggaaggccccatagttctttggccttcttgtaaagcaacatatgtcttttctgcaggaatgtctgagttgcacagtcaagatcgttgctgttcattgttctttttctcagctctttcagtaactgttacttgacaacactaagttaaacctttacagaggtgaccaagccaggcagaaataaaaatggatttggttgcaccttcagaaagttattcatgtgtgctccaagatcactacctagaatggttctcattgtaattaggacaaatttttaattcttcttacttccagcctcatgaatatattacaaa

SEQ ID NO: 260548 - DNA, 1082 bp, Homo Sapiens
  misc_feature (87)..(95): n is a, c, g, or t
  misc_feature (149)..(166): n is a, c, g, or t
aactgaaaaacaaacacccttgagtttttcagttcaccttttgttaaggagcagagcctgcatatatatgtaaatgtctcaatgatnnnnnnnnntgtaaacatggattggcattaatttgcaagcagaatcttaatagcctgatgggnnnnnnnnnnnnnnnnnncttctaaatgaagttaaacgttcgttttcaccttacgatgggaacaactgtagtgcaggcggctctgcctctatttgccactcttggccctcttgctattaagggaaaggctttgaagagcacagcactgacagggctgtaaagatggaaggagctggtatttttaccatgcgtagattcccaagagaacttgtactaaaaagcagaaagttacaaggaagcagaattaggccaacatttccagcaattaaaacaatgatgggaaactccaatccatgaggaggctggtcagtcacctcaaggatagtggcctaaagaagtctgaagtggctgatgtccataacttctgagtctgtttccaaaagaaagactcttgctaatgctgttaccagagagtagagatttgaccagcctctccctaaaatgtaagcttctcaacaacagtacaggaagaagtgcaagagtagactagaacctttaaggaatttggggctggaacggagctatgttgcatctgttgttatacaggtagattataagttctacatgcaccagccaaaacttaggacaggatgtccccaaattaagatactacagattaccaaataagaaataaccagctggatttaggccagctcacatttatttggaaattaccctccctgattaacaggcttctgagttgtacgtggaggactaatgagacttgtacaagacaccacggggcttggggtccaggtcccagttggatatcggaacagacacagataagtgtgtttcctcattaaggtggtgagagtgtgccttttggcattcagaaaagggtttagccaccctaagagttggaaataaagattcccaactggaaatgttgcagaatccctacaagtgtctcaataaaagccattttaaaaga

SEQ ID NO: 260549 - DNA, 680 bp, Homo Sapiens
atgagccactgcacccaactcctctttcgtctttctttaacacacactaggctctttgtgtattatgattcagtgctatttgtaactgtgtcccagtgaccaaattgcactcgacacgatcagctgttcatccatttcgtgttttttcctgtcaaacattaatccagcaaatatatgaggtatttaccaatttattttcttagtattacaaaataattcattagcataaagtacaatagtgaaatatttgagttgttcggaacctcaattaatcctgttttacatttcagacctaaagctggcaatcaggagaagaagcactttgttttaaatgtggagaagataacacttgattccatttcattgtcattagtgtattaaccagcaggagaggtgatgagccatttttcaaatgaaataccttttatttccatataatttttttattttagagttcaatagctgtttctatgattatcctcaatttccatatgttactaaatctgaaaaacatctttaaaaattcaaacagttccattttctctcttgtaagtgttaaatgtgataaaagtacatattttaaattgtttccagctcttggatatagcagcaataaaagcactaatttgtgggtatttacgaaaacccggaaaataaactcatactttaaaggaagcagc

SEQ ID NO: 260550 - DNA, 567 bp, Homo Sapiens
gtttccaaccctttgtaatcagtactacaaattaatcacatttatctgtgagatttttcctgaaaaaataccacagcttcctgaggatctgtttaaaagtctgatgtactccctagaattaggaatgacatcaatgagttcggaggtttgccagctttgcctggaggccttgacaccgttagctgaacagtgtgcaaaagcacaagaaacagactcaacactttttctagcaacacggcactttcttaagctggtttttgatatgctggttttgcaaaagcacaacacagagatgaccactgcggctggcgaagctttctacacgttggtgtgtttgcaccaggctgaatattctgaactggtcgaaacattactatcaagtcagcaagacccagttatttaccagagattagcagatgccttcaacaagctcactgcaagcagcactcctcctacgctggatcggaagcagaagatggccttcttaaagagtttagaagaatttatggcaaatgttggtggtctcctttgtgtaaaataaacaacagaactttatgcttaatttaa

SEQ ID NO: 260551 - DNA, 643 bp, Homo Sapiens
ccagtgttgaatcatgctatatttcccatcatcccagattgctaaatgttctttccaagaagtctgaatgaattattatatacatttgctatcatacatgacagttgtgtcattattagagatttcagtaattaaaatgggaaacagaagcctaagttatttaccttatcaaaaccacgttccttggaaccacattattatgatggtttttgtgctcttgtacgttggatgtcttaagctgagtacagtttaggggatcctttctaatgacaggaaggcactgctttcctcaacactgtgatctgacctgtgacaagtctgtactatccactatgtaaatggctcacaagtcaattgcaaacaaactgaatgtacaaatcttagtgctggtgctgaaatctcttcagaatagtcatcatgatttaaaagtttgtttaaaaatttgcaagcatcaagtgtcaatcaaaactgaagatgaaacactaatgaatgttgaattctcatggcttttaggtgtacttcctttttagaattttcagttttctgctatttttaccgtaactatttcgtttaaatttgtttcatttaagtttcctacatgctaacttcgtttgtgcgattgaaataaaattgcagtatatat

SEQ ID NO: 260552 - DNA, 958 bp, Homo Sapiens
agtcagtttcacaaatcccacatactgtacattcataggtgaggttaagcctgtcacccatttctttatttctataattacacaagccataataaatacatctgattttaaaggtcacttaaaatgagtcataatttacagtacagtacgtttcagttcaagtgcaaaaaataactatttgcggaattctattttctttcagttattttatttttaaggcggtgttttattgtgaagcggagacatccaagggtagaatttcttatcccaaaatgcagtattgggcagaactatggtgtcatggagaagccctcactttacaattgatcctgtctaatcagggtcagagggtaaggtgagttgctcatttcgactgttcttttctttcctctctctcctgtgctcatccacagctattataaattatataattcacctttattcagctaaaacagttttcccttttccacactccccccaggtttcctgttaacctctgctttgatttttagtggcaagctttacgtgcgatccacccagccattgttctggctgcagttgtaacgtttgcagttgcatacattacattgtccagtgtctgactgtgtcttcatgagaacgaatatactgagattttctttctttagtcattggaaagtatagttgctacttattgccatccttcccattcatggtttcctatttaccaccttttcctcaccaaaaacaaaacaaaactgacccaatatgtaatttctaaaaattgtatccttcccccaggcacttaaatcttatactgtgatttgtaactagtactgcttatttaaggaactcttaggaattcagtgatttttgtgtgtttcattccctcagctaattagagcctgaattactataagatagtaaatagcgagagaggctatttacagtatcaatatatttagtaaactcttgtccc

SEQ ID NO: 260553 - DNA, 1414 bp, Homo Sapiens
tgactacttttgacttcagccagtatatgaaattggatattgcagcagtcagagcccttaacctttttcagggttctgttgaagataccactggctctcagtctctggctgccttgctgaataagtgtaaaacccctcaaggacaaagacttgttaaccagtggattaagcagcctctcatggataagaacagaatagaggagagattgaatttagtggaagcttttgtagaagatgcagaattgaggcagactttacaagaagatttacttcgtcgattcccagatcttaaccgacttgccaagaagtttcaaagacaagcagcaaacttacaagattgttaccgactctatcagggtataaatcaactacctaatgttatacaggctctggaaaaacatgaaggaaaacaccagaaattattgttggcagtttttgtgactcctcttactgatcttcgttctgacttctccaagtttcaggaaatgatagaaacaactttagatatggatcaggtggaaaaccatgaattccttgtaaaaccttcatttgatcctaatctcagtgaattaagagaaataatgaatgacttggaaaagaagatgcagtcaacattaataagtgcagccagagatcttggcttggaccctggcaaacagattaaactggattccagtgcacagtttggatattactttcgtgtaacctgtaaggaagaaaaagtccttcgtaacaataaaaactttagtactgtagatatccagaagaatggtgttaaatttaccaacagcaaattgacttctttaaatgaagagtataccaaaaataaaacagaatatgaagaagcccaggatgccattgttaaagaaattgtcaatatttcttcaggctatgtagaaccaatgcagacactcaatgatgtgttagctcagctagatgctgttgtcagctttgctcacgtgtcaaatggagcacctgttccatatgtacgaccagccattttggagaaaggacaaggaagaattatattaaaagcatccaggcatgcttgtgttgaagttcaagatgaaattgcatgtattcctaatgacgtatactttgaaaaagataaacagatgttccacatcattactggccccaatatgggaggtgaatcaacatatattcgacaaactggggtgaaagtactcctggcccaaattgggtgttttgtgccctgtggagtcagcaaaagtgtcccatgtgggactgcatcttaaccccaatagggggctggtgaccattcaattggaaagggatcctcccccttcctggggctgaaataggttgggaaaactggccttctaatccctccaaggggttggcaaccccaaggaatttccctttaaataaatcccctaaaaatggaaattga

SEQ ID NO: 260554 - DNA, 533 bp, Homo Sapiens
ctgggtttcatgaatgcaagtggtgtttgctaggtgcattctaaatttgacaaacatgagtgttgtcttggcctgcagacttaaaatagccacctgattataaaagaagtacaggtcttaagtgtatgtccaaatatggaacttgaatgatatggcaaaattagaaatgcaattttagaagtaattacactgttgtgtaaatggccacctcttttgaagtctttgctacattgcttataaaacactgagttgaacatgagaaagccttttgtctgcagctgtacttttcaactggacatgaaccatgtacttttatggcacgtagatattcacatcaaatttctgatttgcagaccgattttatttttagttaacaaataagcttatcaaatgtggcttttgaactaaagcgcttttaattaaggagttataacagcatgttattttgagtagctgttactaaaatctgttgtgatggaacaatttggagtgagcatctgatatcagagataaagagagaagcatgcagtgag

SEQ ID NO: 260555 - DNA, 559 bp, Homo Sapiens
  misc_feature (512)..(512): n is a, c, g, or t
tgcatgcaacctttatcttcagaaactaggttttatatgtaaaatgtgacttgggaaatgattctgtttattaactggctgggatttttcatttctatgaaagtttcaaacatctccagtacttttttatatcccaacaattgctgtttttgggggctttggtccactcagcccacccagcccacttgcaactctgactaataactgactcccctctgggaagtttgggtagggtgaggctatcttcttcaagattattttctcatatgtctgtctgtcaccttgtaaaccatgagacccctgggtatttgcatgtaacttctttgaggaagttaccaccatctctgatatagacacactttttgagttgcagtttctgttaaaattttttggagactaacttgccaattctgtgaatgttattgaatatttaaaaagctgggtctgtaatgggaggcattttattagctgttgtgattgggtaacatgtccccttagatttcctgatttanaattatacaaaattactatttttgataaaataaaggaacacctacag

SEQ ID NO: 260556 - DNA, 452 bp, Homo Sapiens
  misc_feature (106)..(106): n is a, c, g, or t
gaatgtggtcctcactgtacaggagaatgtgtaatcttttgttaaaattcccagtgtgcatacattttctggttcctcggtccagttgctaaagttcttagtattntagcctaacatatttatcacccaacttttcctttaaaagtgtccccttttgtcacttagttactgattcccccgggtttgacataagtattcctatgagatgatatatatgctttttttgaaagcctgattctcatgaattcaagtagctgagttcctttatgtttcgtttattcactaaagtagctgacacaaaacacaccaaaacctagagcggtagttttatgtaaatgctcatgagtttgtatcaataatataattgttgatccacttataattcgtgcaatactgtatgtatgtagagattgagttgtcaattaaaaaaaatgtggcctctttgtgatcat

SEQ ID NO: 260557 - DNA, 381 bp, Homo Sapiens
  misc_feature (24)..(24): n is a, c, g, or t
  misc_feature (32)..(32): n is a, c, g, or t
  misc_feature (43)..(43): n is a, c, g, or t
  misc_feature (48)..(48): n is a, c, g, or t
  misc_feature (99)..(99): n is a, c, g, or t
  misc_feature (131)..(131): n is a, c, g, or t
ccccggggcccagtggcctaaagnccctaggnattttagcccnaacanatttatcacccaacttttcctttaaaaagtggcccttttggtcaccttagntacctgattttccctgggtttgacataagtantcctatgagatgatatatatgctttttttgaaagctgattctcatgaattcaagtagctgagttcctttatgtttcgtttattcactaaagtagctgacacaaaacacaccaaaacctagagcggtagttttatgtaaatgctcatgagtttgtatcaataatataattgttgatccacttataattcgtgcaatactgtatgtatgtagagattgagttgtcaattaaaaaaaatgtggcctctttgtg

SEQ ID NO: 260558 - DNA, 1107 bp, Homo Sapiens
ggggcagagagcattctggagccgccagccatggctgccccagagtcttcagctatggctgtcctggagtcttcggctgtgaccgtcctggagtcttcgactgtgactgtcctggagtcttcgactgtaactgtcctagagccttcggttgtgactgtcccggagcctcctgttgtggctgagccagactatgttaccattcctgtgccagttgtttctgcgctggagccttctgtgcctgttctggaaccagcggtgtcagtccttcaaccttctatgattgtttcagaaccatctgtttctgtccaggaatcgactgtgacagtttccgagcctgctgtcacagtctcagagcagactcaagtaataccaactgaggtggctatagagtccacaccaatgatactggaatctagtatcatgtcatcacatgttatgaaaggaattaatctatcctctggtgatcaaaatcttgctccagagattggcatgcaggagattgcattgcattcaggtgaagaaccacatgctgaggaacacctgaaaggtgacttttacgaaagtgaacatggtataaatatagaccttaatataaataatcatttaattgctaaagagatggaacataatacagtgtgtgctgctggtactagtcctgttggggaaattggtgaagagaaaattttgcccaccagtgagactaaacagtgcacagtattggatacctaccctggtgttagtgaagctgatgcaggagaaactctatcttctactggtccttttgctctggaacctgatgcaacaggaactagtaagggtattgaatttaccacagcatctactctcagtttagttaataaatatgaagttgatttatctttaactaccccagatactgaaccttgaatgggtaatttcccccagtccctaagggtgggaatggaacttgaacttgaaagggccctttgcctggctaaagaaatttcctcctggatttacccatccaaaaataaaaccctgggtaggtaagggatatcggaagaaaccctttacccgggaaaaagaaaattggccccgaaatttttaagggttttggcttaaccccct

SEQ ID NO: 260559 - DNA, 1012 bp, Homo Sapiens
  misc_feature (709)..(724): n is a, c, g, or t
  misc_feature (960)..(960): n is a, c, g, or t
  misc_feature (982)..(982): n is a, c, g, or t
ctgggtggcgtattcggcacgaggaaagggagatgggtagcatcattttgattaacatttggggcctgataggggaaatggtgaagcaatggaaaagaacagacaactaatgatttgcttctatgtccagaatattttacctttaaaaaaatgtcattggcaccataaataaggactgtgagagactgtttaaaagctgtgaaagtctgaaacctataagccaaggtgttccctgcctaaacttattgctgttcccacaaaggactaagcctgttcataagttaccaaagttgccattttggagatggaaattgacgaggagggaaggtcttttattggagagtatacagtacaagcagatcattctgccttagaggtgctaattcccgaaattagaagaccctttcttttccagtaacgaagttataaatatcagcttgttcatccaagccactggctgaggtgttaggaagaggaagagggtggtagaggaggtaagacagtagggaaagacaagggcccatgctcttagtggggaaaactcttggagccgtttactttgagctttgaacactgaaaccattgttggcagggttcagtcactgacagcacaagtttcactgaattgatccaagagtttagtgatttcaaaagccttggtctcaggagaagattaaactttcatattgggcagtggttcactttaaannnnnnnnnnnnnnnnccaaaacaattttttaagaaatcctaataagtaacatacccaaaatgctctgtcttgagtcatgagaaccatcagttcttgatattgtctagacttgcatctagagctacgttgtaaaattcttttaggcatgtgttagatttctgtgtaaactttgtttaaatgtaaacttcatactacattgtcagtttttgtcttaataaaactatagaatttatcaaaccaaaaccacgctnacccccagacccacacccaccnggcaatattagctcccgaaacctccccccc

SEQ ID NO: 260560 - DNA, 473 bp, Homo Sapiens
  misc_feature (327)..(327): n is a, c, g, or t
  misc_feature (426)..(426): n is a, c, g, or t
  misc_feature (432)..(432): n is a, c, g, or t
  misc_feature (442)..(442): n is a, c, g, or t
cattaaataaggactgtgagagactgtttaaaagctgtgaaagtctgaaacctataagccaaggtgttccctgcctaaacttattgctgttcccacaaaggactaagcctgttcataagttaccaaagttgccattttggagatggaaattgacgaggagggaaggtcttttattggagagtatacagtacaagcagatcattctgccttagaggtgctaattcccgaaattagaagaccctttcttttccagtaatgaagttataaatatcagcttgttcatccaagccactggctggaggtgttagggaaggagggaagagggtnggtaggagggaggttaaggacagttaggggaaaggacaaggggcccctggctctttagttggggggaaaactctttgggagcccttttacttttgaggnttttgnaaccacttgnaaaccctttttttgggcaggggttccagttc

SEQ ID NO: 260561 - DNA, 750 bp, Homo Sapiens
cttcggcactagacttggtctcctctctgctatatgaaatatgggagacgacagaccgtttgtgtgcaatgccccgggctgtggacagagatttacaaacgaggaccacctggcagttcataaacacaagcatgagatgacattgaaatttggcccagcccgaactgactcagtcatcattgcagatcaaacgcctactccaactagattcctgaagaactgtgaggaggtgggactcttcaatgaactagctagctcctttgaacatgaattcaagaaagctgcagatgaggatgagaaaaaggcaagaagcaggactgttgccaaaaaactggtggtattcagacctaggctatttttattgtgctttgggataattttcttaattggttaaaacacaaaatcatgggcttagtagagtaaaaccagtaaaaccagatagtagtcactaatcccagtcagccattcaggtctttaggagttccagatgatggatcagcacaagtctgtcgtcaccgaaaattagtcctcttgttcttacaggggagtattagtttaataatcggttttttaaaaaatatttatattataaatatgttgaagatgttaaaaggtgataaattactcagattttgttggataacatatttgttgccaaattccactcttttctgagctgatcagacttctcagctacactgtttttttgaatcagcaagtcaataaacatttatcaaatttccactctta

SEQ ID NO: 260562 - DNA, 626 bp, Homo Sapiens
  misc_feature (52)..(61): n is a, c, g, or t
  misc_feature (547)..(567): n is a, c, g, or t
gtcatgccactactgtgttctagtctgggcaacagagtgagaccttctctcnnnnnnnnnncccaaaattgtagaattacttctatagctatattttatgataaagaagtgattgtttctcaaaatcgcattttaaagacgttttatggtacttgttggaattgagacttaggagttctgattttgataagaaactgggataattttctgaactttttttcctctgtatcacatttatttactatttttaaaaactttgacatttaacacttgggacaacatttattataaatgataagaaaaatcttagaggtttgtctacccacagtgtcatggaatcttctctgaaaactaatccataaagttccctggagaaattggtcagaatgatctgtcagaaccatttgaaaacttgctcaagagcagttgcttatatatagtaggattttactttttcctgcttatgtactactatatgcttaaaaaacctggaggaatacttaccaaagaggagtaaccatctctgagggtgggattctgggggaannnnnnnnnnnnnnnnnnnnntataatgtgaaacttttgtagtatgtatttttctaattgaagagaataaagattaaaac

SEQ ID NO: 260563 - DNA, 1228 bp, Homo Sapiens
aggccatgtgactataaacaccttggttaaaaaagcaggcggtaccggccggaattcccgggatatcgtcgaccacgcgtcgctattgaacatatctcagtctcgcctgcaggagatttatgctgcacttctcactctgataataagataataattattcaccgaaaccttgaagcatccgcagtaattcaaggcctagtgaaagataggagtatcttcactggtttgatgatgatccaagaactaaagcttggttttgaatggaaaacctggccacctgcagttttattctctccagagtgataaacagttatacaatttagatattatacagcaagaatatattaatgattatggtctgatccaaattgaactaacaaaggctgcatttggctgctttggtaactggcttgcaacagtggaacagcggcaagaaaaggaaactgagcttgaattgcaaatgaaactgtggatgtataataagaaaacacaagggtttattcttaacactaaaattaacatgccacacgaagactgcattacagctctctgtttctgtaatgcagaaaaatctgaacagcccaccttggttacagctagcaaagatggttacttcaaagtatggatattaacagatgactctgacatatacaaaaaagctgttggctggacctgtgactttgttggtagttatcacaagtatcaagcaactaactgttgtttctccgaagatggttctttactagcagttagttttgaggaaatagtcacaatatgggattctgtaacatgggaacttaaatgtacattttgccaacgagctgggaaaataaggcacctttgctttgggagattgacgtgttcaaagtatctacttggtgctactgaaaatggcattctttgctgttggaatctgctgagctgtgcattggagtggaatgcaaaattaaatgttagagttatggaacccgatcctaattcagagaatattgctgcaatctctcagtcttcagtggggtcagacttgtttgtatttaaacctagtgagccaaggccattgtatattcaaaagggtatctccagagagaaaatccagtggggagtgtttgttccacgagatgtccctgaatccttcacctcagaaacttaccaggggctaaataaatcccagttttacttcctaccaaatcccagaggttatttgaccttcagtacaaaagcctccaga

SEQ ID NO: 260564 - DNA, 407 bp, Homo Sapiens
acacgtatctgtaaaaactatctttatctgtttcaattccttgctcatatcccatataatctagaactaaatatggtgtgtggccatatttaaacacctgagagtcaagcagttgagactttgatttgaagcacctcatccttctttcaatgcgaacactatcatatggcattcttactgaggattttgtctaaccatatgttgccatgaattaactctgccgcctttcttaaggatcaaaaccagtttgatttgggaatcttcccctttccaaatgaaatagagatgcagtacttaactttccttggtgtttgtagatattgccttgtgtattccacttaaaaccgtaatctagtttgtaaaagagatggtgacgcatgtaaataaagcatcagtgacactctaaa

SEQ ID NO: 260565 - DNA, 676 bp, Homo Sapiens
atcctgagcaacagagataatttgggtggtaatgatcatcttttgtatatgttcttgatgttaagaaatattttttgctgccattcagctttgtggaatttatgtttacttttcaatattttcatatttcttaaccagattttaaagaaatttgttgttagttacgtgaaatcaaaggtcaggtcagtaagcccattatcctcaaacttgaagtttcgttggatgttcaaaatgctaatttttgcagagatataaggataaattagttttagtttgtgttcttaagggtttgcaaaataatttggctcccaaactcttgttggggtgtagtgtttgctaggagcccaggatacctgccctggacttaaattgtgattgaagtggagaggtactctaggaatttaaaaagacacaaaattatttttttccagactagtgtgccatggatttctgataagaattaacattcttgaacaaaggtatcagaaagggtaactcgagttgaaggtttgtgaatagaaggggaaatgtgatagaagattattcagaacaaaataagtagacaaaataacaaaagacaggaaaataagtctctttgtatccttattaatcatttgaaattatgctataatattttttaaaactcacctgtttgggttcctggggtgaagcagtt

SEQ ID NO: 260566 - DNA, 445 bp, Homo Sapiens
  misc_feature (363)..(389): n is a, c, g, or t
atttgtttgggagattcccagctagtttcagacttggtctgtgaaggaggcacactattttgcttggtatttgacttggatttatctgtctcttgtagtattggcggcacttgggaagagctcttgtcagaatcactttttgataagattacagatggctcggtagaagtagcaggtggaagagtcttgataggctggctatttttgacgagtacttcggctggatcactagtgcttatggtcttcaaggaaaaagctttttcctgttttggacgggttttagaggtattcactggaaggtcttctctaatctctttttctaattcttctgtgtcctgtgcagtagagttatcttcaccttgnnnnnnnnnnnnnnnnnnnnnnnnnnnggatttcccagttggaagagctccctctctggtttcctatttgcagttacttgaat

SEQ ID NO: 260567 - DNA, 888 bp, Homo Sapiens
  misc_feature (769)..(777): n is a, c, g, or t
  misc_feature (838)..(846): n is a, c, g, or t
gggagaggcagttgagcatgggagccgtctgtatgttgaattagggctcgcactcttgcgcaacacgtcaccagtcggaaactgggggtttgcttctgtgatttatttcattattgtgctgctgatgaagagactagcagctcgctgctttgctggcttgttaattttatccccactaactgtgatttctgatagccggtctgctgatagtggtaaggccatcgaagacggcaatttggaggaaatggaagaggaagtacggcttaagaagccgaaaaagacgaagaaatgtggataaagatcctgcaaaagaagatgtggaaaaagctaacaagagaagaggccgccctcccgctgagaaactgtcaccaaactcccccccaaaatgacaaagcagatggaacgcgatcatcgatactgtggctaccctacccaggataggcggcaacgtgggagaacggggccccgaaagtctcaggctggaaataagaacggccccggcctcaggggccacagcttccgttgcaaggtttttcacccctcttccccctccctcggaaagaacttactcggaatgaccagcgcactttccttaccgcaatccaccggcgttttttccccaccactttaaggggagagggatttccgcaattccctgcccccgccctgaccccttatttgcccccctgggtagacagggggcgggcctgagcttcctcttggtcacccaaccgtttcaaaaacgttcgcccccccgcggatggggttnnnnnnnnnacgcggatgggaagaatccgcccgtcctccgcggcagcatgtcagcggcggttacgccagnnnnnnnnngggacataacaaaatcggtcttaacgccgtagtgccggccct

SEQ ID NO: 260568 - DNA, 1244 bp, Homo Sapiens
  misc_feature (65)..(112): n is a, c, g, or t
gggagggaacccccacccagcccgcgtccgagaaagaacccgaaatgcccggtcccagagaggannnnnnnnnnnnnnnnnnnnnnnnnnnnnnnnnnnnnnnnnnnnnnnnaaaagaatagagtctcatcgtggaaggcaagagggaaaagaaaaaagtagagaggttgacaatgcaagtctcttccttacagagagagccatttacaattgcacaaggaaaggggcagaaactttgtgaaattgagaggatacatttttttctaagtaagaagaaaaccgatgaacttagaaatctacacaaactgctttacaacaggccaggcactgtgtcctcattaaagaagaatgtgggtcagttcagtggctttccatttgaaaaaggaagtgtccaatataaaaagaaggaagaaatgttgaaaaaatttagaaatgccatgttaaagagcatctgtgaggttcttgatttggagagatcaggtgtaaatagtgaactagtgaagaggatcttgaatttcttaatgcatccaaagccttctggcaaaccattgccgaaatctaaaaaaacttgtagcaaaggcagtaaaaaggaacggaacagttctggaatggcaaggaaggctaagcgaaccaaatgtcctgaaattctgtcagatgaatctagtagtgatgaagatgaaaagaaaaacaaggaagagtcttcagatgatgaagataaagaaagtgaagaggagccaccaaaaaagacagccaaaagagaaaaacctaaacagaaagctacttctaaaagtaaaaaatctgtgaaaagtgccaatgttaagaaagcagatagcagcaccaccaagaagaatcaaaacagttccaaaaaagaaagtgagtctgaggatagttcagatgatgaacctttaattaaaaagttgaagaaaccccctacagatgaagagttaaaggaaacaataaagaaattactggccagtgctaacttggaagaagtcacaatgaaacagatttgcaaaaaggtctatgaaaattatcctacttatgatttaactgaaagaaaagatttcataaaaacaactgtaaaagagctaatttcttgagatagaggacagagaagatgactcgttcccatagatttgaagatctgatttataccattataccagcaaagagaatgtatttccttttctaaatccttgttaagcaacgttagtagaacttactgctgacctttttatcttgag

SEQ ID NO: 260569 - DNA, 495 bp, Homo Sapiens
cctgtaaaacagcaaacacctccatgagaagtcttggaaacttggaagtgacttcatctctcttcaatgtactgcatccataatttatcgccatgtgcaacagctttgcgttttctaaggcacaatttttaatgaaatgatgtgtagatttcaatctaataacagctcatccaaatgacaaatatggtcgaaatccctccagtggctgaggaaatttctgcacctatatggaacccacatgcaaagaacccatctagcatgtaataaataatcgctagccatactcaataaggacacggaaaaattattgcttacataacagaaaaacatctacttgacccccttttatgactacatcaatctattaggagtgtatccatagtctacattcacaaaatgtcatcttgacttatttgccattgatttaaggcagaataaatagtccccctttccccagtcttaacaacaaaaaccaaaaaatggtggagcggcggc

SEQ ID NO: 260570 - DNA, 662 bp, Homo Sapiens
attctggacataagtctaggtgtagaaatcctttcctttatcatagaggatatggtttacattaccgtttgttttcattgtgattgcccctatgtaacaatcatgaatattagattttttaaattgtagaatatcctaatatttatagccagcagctgttactttgtttgtaaaatttgcaaaaaaacaaaacctgaagttggtttattgaaagaattataaggatagcttctagggatattagtaatagattgccatgatcctgaagcctcttctcagaacactgtgaagataatactgacagtagaatcagtgaaaacagcctaacaaaacctctgacatcagtatatcaacttttaacagcccactcactggcttttctaaactaccaaaaaccacctgtaggatactgcattaagtcagcatctcagaaacagtggtgtgagtaactgagtcaaattgtcaagtactttggatatacatagtgtcgagctttagattggtatgaaattaaacagcaatgcaaatagatttaattcctatttactttaagaatgaaaaacaatgttcattttcctacctaaacagggtggttcaacataaaggctgatgttgtgtccgttttgtattttatcttttgttaaagatacataaatgacaac

SEQ ID NO: 260571 - DNA, 689 bp, Homo Sapiens
  misc_feature (47)..(47): n is a, c, g, or t
tttacaatgacttgaccttaatgttataaaagtagttactgtttttntttaattggaggcagacttgatatttcaaagttgcatagtaaaagcaatttgttaatttttggggactttcagataaactattacaataaaaaaaggagcagaatgtagtatttggaaaatgatttaaattcagcaacgcctaaaaatgtcttcctaagtatttttctcagccaagtcattctttaaaatatgaaaaggttcttagaagagaaaatggtgtaattgtattaaacagacaattataactcaagataatataactttgaaccttctaagaactgatttgtttggttttcctcccattccccattcctccttaaaagattgaatgaattaatgagcagaaagagaggattggtaacatgggaaatcgttttcattagatgtacatttcctggttctgacaggaaaggggctccggaaaatcataaaacaagcaggtgaacaagaccaggtgtgtcggcacctccctgctcagtgcccagcggaggtaaagaaccactcagcatggtttttgtcgagttcacctcttctgtcgttgtcagaggtttcctacctgtctgatataaactttctctgggttgataatataaattcagaaacatgtaaaatgaatcatgattatattactgttattttta

SEQ ID NO: 260572 - DNA, 1070 bp, Homo Sapiens
atcaatatagatatcccaggaaaaatctaagatgtcgtatgttagagagatttgttgaaagtaaagatggaactcaatgtggagaaacatctagccagattcaagatagtattgtgaccaagaacactcttcctggagtaggtccttgtgaaagcagtatgagaggagaaaaagtcatgggtcattcatcccttaattgttacatcagagttggtgctgggcacaaaccacatgagtatcatgaatgtggagagaagccagatacgcataaacaacgtgggaaagccttcagttaccacaactcatttcaaacacatgagaggcttcacactggaaagaaaccatatgattgtaaagaatgtgggaagtccttcagttctttgggaaaccttcaaagacacatggcagtgcagcgtggagatggaccttataaatgtaagttgtgtgggaaagcgtttttttggcccagtttattacatatgcatgaaagaacgcacactggagagaaaccatatgaatgtaagcagtgttctaaagccttttctttttacagttcctatctaagacatgaaagaacacatactggggagaaaccgtatgaatgtaaacagtgttctaaagcctttcctttttacagttcctatctaagacatgaaagaacacatactggggagaaaccatataaatgtaagcagtgttctaaagccttccctgattccagttcttgtctaatacatgaaagaactcacactggacagaaaccctatacatgtaaacaatgtgggaaagccttcagtgtttccggttcccttccaagacatgaaacccactccagtggagagaaaccctatgcctgtcagcaatgtgggaaagcgtttcatcctctgggaaagctttcaaagaaacatgacaaggcaccctgggaatggacctccataaagtgtacacatgggggaaaaggctttggattggccccatgtccctgggcaaggctctggaaaagaacctcccccgtggagagaaacccctatggaatgccaaggtaggggggcggaaacgccttattctct

SEQ ID NO: 260573 - DNA, 978 bp, Homo Sapiens
ggcctgggtggcgaattcggcacgaggctgggttctgtagctgagagacgacctggaagttctgaggcagcctttgtctggctggaacacgcattggcagcgggagctgtcggtaggacctgggacaccgcggaagtcgggaaatggcctcagtggctttagaggatgtggctgtgaacttcacccgagaagagtgggctttgctgggtccttgtcagaagaatctctacaaagatgtgatgcaggaaaccatcaggaacctggattgtgtagtaatgaaatggaaagaccagaacattgaagatcaatatagatatcccaggaaaaatctaagatgtcgtatgttagagagatttattgaaagtaaagatggaactcaatgtggagaaacatctagccagattcaagatagtattgtgaccaagaacactcttcctggagtaggtccttgtgaaagcagtatgagaggagaaaaagtcatgggtcattcatcccttaattgttacatcagagttggtgctgggcacaaaccacatgagtatcatgaatgtggagagaagccagatacgcataaacaacgtgggaaagccttcagttaccacaactcatttcaaacacatgagaggcttcacactggaaaaaaaccactatgattgtaaagaatgcgggaagcccttcagtttctttggggaaaccttcaaagacacatgggcaatgccgccgggggaaatggacccttataaatgtaagttggcgcggcgaaagcgtttttttggccccctttattacattttgtttgaaaagaaccccccctggcagagcaaaccctttggatggccccccctggttcctatagcccctttcctttttaacgttccccacccaaaaacctgtggaccacccctcccctgggcgctaaaccgtcatccaatgccacatgtggttttacacagcctttccctcttttaatagtcccca

SEQ ID NO: 260574 - DNA, 1497 bp, Homo Sapiens
  misc_feature (1412)..(1435): n is a, c, g, or t
aatatccaaaacaacataccaacacccaaccgcccgcccccgcgtggcgaattcggcacgagggtgtggtgcacgcattgctgtgctccaactccctcagggcctgtgttgccgcactctgctgctatgagcttcctcaaaagtttcccgccgcctgggccagcggaggggctcctgcggcagcagccagacactgaggctgtgctgaacgggaagggcctcggcactggtaccctttacatcgctgagagccgcctgtcttggttagatggctctggattaggattctcactggaataccccaccattagtttacatgcattatccagggaccgaagtgactgtctaggagagcatttgtatgttatggtgaatgccaaatttgaagaagaatcaaaagaacctgttgctgatgaagaagaggaagacagtgatgatgatgttgaacctattactgaatttagatttgtgcctagtgataaatcagcgttggaggcaatgttcactgcaatgtgcgaatgccaggccttgcatccagatcctgaggatgaggattcagatgactacgatggagaagaatatgatgtggaagcacatgaacaaggacagggggacatccctacattttacacctatgaagaaggattatcccatctaacagcagaaggccaagccacactggagagattagaaggaatgctttctcagtctgtgagcagccagtataatatggctggggtcaggacagaagattcaataagagattatgaagatgggatggaggtggataccacaccaacagttgctggacagtttgaggatgcagatgttgatcactgaaaatgatttatgcaagtttaagattctgctcctaagtgtaggagagaacttggtgcctcttccactctggagtgaagttaatgaaagtctttttccttttccaaaacccaacctgaaccagttctttcttgagacagactatactgagacaacaagttgtcaccagcagaagatagataatatgacctttattaacttgatgaattaacttaaccaagagggtatttgtagtttactatttaccctaaaactttctgtgtctgggtaccctctgagtaggcctataattcctaccttgactgtgtgcatcatttgtaagctagcagatctatgtgggtgaaaatgcacaggagcttggtagactgcgggggaaagagagagctcctttcgccatgttttaccagtctgctgttataacctcttaggttgtatcctttaatttccagccttttaggttagtttctgtaacagaacaagtgagtctgggatgaagtcctcaaagtacttcaaatggtaattgttttgtttttgtaatagcttaacaaataaacctagggtttctatatcaaaannnnnnnnnnnnnnnnnnnnnnnnaaaacatgtcgggccggcctccggccctcgagaaagctttctaaaaacatttccgttttggg

SEQ ID NO: 260575 - DNA, 751 bp, Homo Sapiens
gggttcagagaagtatgcaagaaactgtaaataagttacaccaaaaggaggaacagtttaacatgctgtcttctgacttggagaagctgagagaaaacttagcagatatggaggcaaaatttagagagaaagatgagagagaagagcagctgataaaggcaaaggaaaaactggaaaatgacattgcagaaataatgaagatgtcaggagataactcttctcagctgacaaaaatgaacgatgaattacgtctgaaagaaagagatgtagaagaattacagctaaaacttacaaaggctaatgaaaatgcaagttttctgcaaaaaagtattgaggacatgactgtcaaagctgaacagagccagcaagaagcagctaaaaagcatgaggaagaaaagaaagaattggagaggaaattgtcggacctggaaaagaaaatggaaacaagccacaaccagtgtcaggagctgaaagccaggtatgagagagccacttctgagacaaaaaccaagcatgaagaaatcctacagaacctccagaagacgctgctggacacagaggacaagctgaagggcgcacgggaggagaacagtggcttgctgcaggagctggaggagctgagaaaagcagccgacaaagccaaagctgctcaaacagccggaagatgccatgcagataatgggaacagatgacccaaagagaagactggaaactctgggcctcccttgggagggacaccaaagcaaaacaa

SEQ ID NO: 260576 - DNA, 701 bp, Homo Sapiens
  misc_feature (22)..(22): n is a, c, g, or t
  misc_feature (42)..(42): n is a, c, g, or t
  misc_feature (232)..(464): n is a, c, g, or t
  misc_feature (492)..(505): n is a, c, g, or t
  misc_feature (584)..(596): n is a, c, g, or t
taggaaatcatgaggaaaaggnattaaggcaccctaaattanttttaaaaaatctccctttccaaaatgccacagacccttgggaggcctcaaaccttaaacaccaaccagatatcatcttaaattcagttaccagcttcaaagaaacaggacttggggagaggaaggagagaggttggaaagaagccacagagagaagtgggaaagtttaggctgggcacagtagctcagnnnnnnnnnnnnnnnnnnnnnnnnnnnnnnnnnnnnnnnnnnnnnnnnnnnnnnnnnnnnnnnnnnnnnnnnnnnnnnnnnnnnnnnnnnnnnnnnnnnnnnnnnnnnnnnnnnnnnnnnnnnnnnnnnnnnnnnnnnnnnnnnnnnnnnnnnnnnnnnnnnnnnnnnnnnnnnnnnnnnnnnnnnnnnnnnnnnnnnnnnnnnnnnnnnnnnnnnnnnnnnnnnnnnnnnnnacaagcaacagaatgaggcccccctctnnnnnnnnnnnnnngtttcaagtataagttgctttagggactttatatattttgctaggaccaactttgatgttcttaggaggctctgctttnnnnnnnnnnnnntctcattttctaatgccccacaagcatgccttagggtgctaacccttgagatgcacgtaaaattatctacttggaatgatttggcataggggtagatttaggact

SEQ ID NO: 260577 - DNA, 1854 bp, Homo Sapiens
  misc_feature (1776)..(1786): n is a, c, g, or t
aagtgcaaagctaatgcataacagatgagcttgaaagctgcagagtttaagatagacttaatttttcatgattttcccaaagccagtcatgatatttatttaatttgtggtcttcagggtgcacctggaagaaacataagatacagaggcagagaccttaatgtaacttagtcagaaatacattttttaaaattggctttttaaatgtttgctgggggacagtacattacgataccatacctaaaagttataacctttaacctcctgggattcatgaatattttaaggttataccttatattaaggtaatctcacacaatttacaaggtactgtccaaattactactcaaccatgacttagaatgtggggtggcgataacatgagtcaagtattaatacctcactttccagaaggaggttctagaccgagaggttaaatggattctcaggtcacaatggattgctctgatgaagctgggataggaccatggtccttcagttcaggcttggccagacctactggctgaatgcatgagggtgagtctcaagctgagtgggcagcataccaggccacccaccagctgccaggatgaccaccagcatgccacaggctgggcatattcaacagggctgaagcaggacccagtcaccacaaacgtagtctgagaccactaagagaaacccaatatgcatacattgcaggcccaaaccttcctgctttcctgtagtggtgtacttttgacaggaggaaaaccacgtcaggcttagagatagcacacaaatagggaatgacaggaacagggccagaggtgacaaaccactggagatgagtcagaggccacgccgctggactggtctttgtggacttgggagcgcctactgatcaaaaaccccaaaacccacatgccacccgcttccccgcagccaggaacacaattgtttgtgactgtaatagcatttgtatccaataaatagtcttaaccataatggtggacttattttgcctcagagaccaaatgtgctgaattatggatgggagtgagcctcacctgcttccactcattgacacaaaaaattcggtaagagtcgttgccatatttaccaatcccatgaagctcaattggatacttccactgctttgtcaggtattcatctgagaacttgacaatggtttttgcccgaagatcgtagagaccaagaggtttaagaagttctgacacatctctccagtctgcggttcttgctacctcagctgaaggatacttctccagaaacttccaaagcacaggtattgccattttgcctgaggtccgattgagaaatatagtagcgatgagaagcttccatggatcatgaaaaagtgtttcttgaacgagattaaaaggtgaccgaggaggtgtccatttcttaaaggctttacgtcgtggggggctaagagcttctttgttatatttgctggaaaaatacaggcttgttttccttctttctatctgtgttcgtgggatggtatcttcttgaaatattttctcaccagtgaagtctttcctggttggtgagcagttgttgtccatttcagagccacgttttaaaatgtcagtatgcaaatgttctttcctttccacaacttctacttttgttccgatttcttcagattctaaaaaggtatcctcatacttctcgttgtgttctgagtctttggctgaacaaaatttgtttatgatgccagaagttttttgttcagaacaaaaatttgatcctgaactcaatgatctttcnnnnnnnnnnnacaaggctgttttcttcactggtcacactgagggtctcaccacatgctccaacatcagaatggtaaca

SEQ ID NO: 260578 - DNA, 1305 bp, Homo Sapiens
aataagaggaaagccaaaaacaaacaaacaaaaagcatatggggagctggtattttctctttagcttactgttgtgcctttttatttttctaatcacagcagtatgagttatgagtgccctaatttgtggttagtttctaatttaatgttgtttcatagagtttggagtgttttgatacagggtgaaaatgaacttctggtttcaaacctgcgttactggagacagcccaaagagtaattttctgttttgacaggttttactggaagtatatgtgatgagcagaagaggttatcagcattaaattgttttggttctaaatttggaacagtatatataattaaaagtaaggaacattagaggatttaattagaataaatacatgttttggaaatacagtgacctcttgcagtgtcacaaaagtgcaaagtgatattagctgtcatctgcaatacagaatctcattgcttttgcacatggagcatataggaaactccaaacagatcacaatgaggtttctaaatctgttgggttctgtcttctattgggttctgtgaagcaaaccactgtagctttagctggggttcagtcatatgactcgttggtggaatgcctaggtttttcatcttacatgcagtcttgggggtggatgaatacataatttcttatgtattcgtgtatccattagtgaatagttcaagtctgtttaagagtgtattgagatggcattctctgcatgttaaagatcttaatggcaaccagcacctcttaagtatggtttaaacatattcttagctaattttttccattagtttttgaaattggtggcagttgtctgatccacaagggcaagatcttctgagtactctggggtgtgagtatgtgtgcacacgtgtgtgttggagtgagtgagagaatgtgtctgtgcatgtggccatgctttcctagaatgtcaagtagatatttttacactttgagttttaaagcaattactatcagactgagatcttgtatgccaaactttaatctgcttttatgttttccaggctgaaggtgtgaaaatcctaagaggatttcatattgaatatgtgtacacaatcttaactatcgtggtggaaaacatactactataatttattattatatcttccagataatgttattcatttagaacaaataaggtatattttttagaatcaactttgtaagcactataaaatctttaataagttataaggtctatgatgtgtttactttaaaaattgctgttaaaagcaacacgtattaaatatgtaattatcatctgg

SEQ ID NO: 260579 - DNA, 431 bp, Homo Sapiens
attcggcacaggatgagcagaagaggttatcagcattaaattgttttggttctaaatttggaacagtatatataattaaaagtaaggaacattagaggatttaattagaataaatacatgttttggaaatacagtgacctcttgcagtgtcacaaaagtgcaaagtgatattagctgtcatctgcaatacagaatctcattgcttttgcacatgggagcatatagggaaactccaaacagatcacaatgagggtttctaaatctgttggggttctgtcttcttattggggttctgtgaaggcaaaccactgtaggctttagctggggttcagtcatatggacttcgttgggtggggatggcctagggttttttccatccttacctggcagtcttgggggggtgggatggaattaccataatttccttatgg

SEQ ID NO: 260580 - DNA, 743 bp, Homo Sapiens
  misc_feature (534)..(542): n is a, c, g, or t
ctccaagtgttaagagaaagcaagctatgaaatgctatatttgtaggcttaaaagtaaattagtgtgttttcttaaaaatctaaaccaagattaaaatgaatatagtcataggtatgaggggcatgtaattaatcttccgactggagatacctttgagagttaaaggaggagcaattaattgttattccaggacaacagatataaatcgagattatactaggtgaactgggacatatggtcatctttgtcatagcttaattcaggaaaaaaggagttagggaagtctgaaggtctaactcaaagtttgatgctttttaagcaagtttagggaacttgagatgacctgattgagacccctaaatctacagatgaggaaagcaagcctcaagcaaggggggcctgatcctttccctgttccctgtgtattccctgtctgtggcaaagcccattgccttgattctcttctctttactttcatgttgagaagtagtttctttctgcagtttatttaatttactggcaaaatgacgtannnnnnnnncagcaatgtttcagctagatatttgctttatgcatgtaatgtcaatgaagtactcataagttttcaagaaatgactgatataaatcatgtgttccactacatagtctaaatatttagtatttggtcatctattttaatatgttcaaattctgttaaacaagacatagtcactatgtgaagaataaaaatagacaaagttgc

SEQ ID NO: 260581 - DNA, 807 bp, Homo Sapiens
agttccttttattttttaaaagcagctagatagacacagacttgccacctcatacatctgctccttggcaacatcaaggggaacgactagccaacatgcctatggctaaaaactttcctttgcagactaaagcactgcttggtgcttcgtttttctacccttcacaacatgtgtgatttcatctaagagatatatacatgtacacatgccctttgtttccacctggatacaagatcactcatagctaattaggaccattgttttttgttcatctgtcttgttgcatgaagggacattagacccatttccattaaaataagttcttggtgataaactgtggcactgctacttctttttaaatccactttatgatttcaagatggacacttgtaagatgactcgacacaaggccattgccctggaagccccagagctttcctctgtttgtatggcccgttcatgtcccaggcattgcaacacaaactcaagatttcaccacaacatgacaagcattttcctaactgatattagcacaatttaactaataagccccttcgctctctagttggccaggcttaacctaatacacatctaacgtgtgtgccacacggccagtagaaagtttaacttcagcttcagggcaaagatacccactcacaccgtgtcaacgcaagcagtagttcctggcctccagagcagcttacttcccctgaaagaacgctttgttttcctttatgcccttttcctgttgaccacttttacacatttaaatgtaatttgttgtgagaataaatttagctgcatacc

SEQ ID NO: 260582 - DNA, 559 bp, Homo Sapiens
  misc_feature (17)..(17): n is a, c, g, or t
  misc_feature (39)..(39): n is a, c, g, or t
ggcaaaggcccttgtgnccgagtccacccttacaagtgncccaccctgaaaatccataaagtggaatttaaaaaagaaagtaaccagtgcccacagtttaatccacccaagaaccttatttttaaagggaaaaggggtcctaaatgtccccttccatgcaaacaaagacagatgaaacaaaaaaacaatggtccctaattagcctatgaagtgaatcttgtatcccaggtggaaacaaagggcatgtgtacatgtatatatctcttagatgaaatcacacatgttgtgaagggtagaaaaacgaagcaccaagcagtgctttagtctgcaaaggaaagtttttaaccataggcatgttggctagtcgttccccttgatgttgccaaggagcagatgtatgaggtggcaagtctgtgtctatctagctgcttttaaaaaataaaaggaactttaagcattttgccttttcttctacatatcccaatagaaatgtgactacaaatcattacaaaaccactttttaggcaatgtatagttcactgagattacctgtgccgaa

SEQ ID NO: 260583 - DNA, 1154 bp, Homo Sapiens
  misc_feature (203)..(203): n is a, c, g, or t
  misc_feature (310)..(318): n is a, c, g, or t
  misc_feature (401)..(469): n is a, c, g, or t
aattatgttgttttcaaggctttgactcagatttgtactttgatgtatgaaagtgaatatcaaacttgtttatagaaaagactatatagaaaaataagtctgtgttgtgtatagtgatacatgttttatgtttacccaatgcctgtactaaatcttgtgcttggctttgaattatatatgtgtttacctatgacttttttttngaaataaacagaacagtcatctaaaaacataaggttttggaaaggagatgctttttcaattcttaccatctgattaggtggaatgttttatagacttttggtgttgnnnnnnnnngtttgataacaatgcattttgcttggaatatcccccaatccagaaaagttggtgacttctctccattgtatatatgtacatannnnnnnnnnnnnnnnnnnnnnnnnnnnnnnnnnnnnnnnnnnnnnnnnnnnnnnnnnnnnnnnnnnnntaatgtaaagtgccttgcacagggtaggtgctcatgacgtgtagaatgagtgagtaacttcctgcctcatcaggatgaaatgtggttcacttcccctgtgttcaacactacaaagctactcctgccagaagagggcagagttctttcttgggtttgaactggcttttttgggttgaaccagatcatcccacatccttagcactacttaaccttcttttcctgaagattacatatcagtgtcctgcgtttttatctaatattagagctgaggttcctaggaaaattttgaagtggggaagattatggagaaaatgaaatggaaatttggggaagggtggtttgtcagtataaggccctgtggggtaatcatattttagttattacttgttaaaagggtaacagaacctctgtttctttaccaagtcgctggttggccatttctccaattgatgaactaccattggttttagctctttctcatttgggattcccctcaattgcttacatgattctggtacttagagtctaatagagttgctgtgaatatgtagtgctgtacataatggcagttttgtaaatgtgagataaccttgaatatgttgtggtttgtatacagagccattagtattgttattttggccacttttttattcaaaataaataacataattatttgtatagtgaa

SEQ ID NO: 260584 - DNA, 1356 bp, Homo Sapiens
gagaggtcctttacatgacaaatttgcatgaaataagcagattaaccaagtatttatttttcatcttgttataatgcagagcaaatgtagagaacagcaaatgattgatgcagttaaagctcaatatgcctttttttactggatactgtacatttggctaaaagcttttattgtttgatgttgtgtttcttgactgtttattcagaatcacagtgtatccaaatcttcagcttgaatttggaggcagattcttagagtgaaaaagcctcagtttccatattaaaaatgttttaaatattttgattgaattagtaccaatgtaaaatctagtttcttcctgaaggaggatccctggcgctgtcctgccatgtctcaaaggaatgtttgagaaacttcatctaatattagttataaggttgtggaatttatgcttggcccaccttccaagactggcactgcccaacagacaccgctgaaatcatgtgggtatccctaggatggccttcagagccctcaaacttacaagcacctggtagttgacatcatatggggaattttctattcaccgtacttatccaaaaatctcttttaaaaagtaaatttgtgcaacaacatttatttgaaagataatgtcttctcaaaatcagaaactgcagtggtaattaaattaatagaaaagagaacaaactgcaggtttagaaaaatggttttcatattcaccattcttccacctcattgaattgcatgctgtagttctagcttttctgctataatatgtaaatatgactgtagccttttaagcttcagtctcagcagagaatttcctaaatgcgtttgacctaatgaaactgatcatggcttcccacttaggtttttcttcttatagctttatagaactatataataatatggacttgctgtgtaatggaattaaagtgcttttgcacaataagttctgcaaaaccctctcattcatgaaaaggtgctccttgctagacagaaacttgctgatttacagtattgttatttttgtctaaagttctgtaaatacatgctttaatgttatctttgagaaatctatgtaaataatatagtctacaacatagagactgtataattctgtgttatatatgtgcctagtgctctgttggcactcaataaattttaagtaacaaaattgataatcatatagcgaaggcatatttttcttccaagctcaagtcaggattgtgactatatattaatgagactcagtaatccaacccacacctgagaactcgtctcattactttatagtcatgtcatgtatgtttttttaaccatgaaatgacaataaaatgatttttaaaatgagct

SEQ ID NO: 260585 - DNA, 1263 bp, Homo Sapiens
catctccaaaaaagtttattagcatgattaaaaacattttcttgaataataacagaaagaatttctaaacatgaaagaatatcagtggctataccttaaaaccagtatttggaattgaatggacagctttattgccagtcttcaaaaaacaatccattgattggttccatgaagtcgtgactattgctttgtctgggaatgagtccctactgcaattaagtataaaaaatatcttccatcataattggagtgtgacctgcattggagagtggctctgagtaaagagttgataaaaatccacaaagagttgggtttttgtcttttaaaaacattcctttacacactacaaagaaataattagtattttggctttttaaattcctacatgatatttagaatggcggtccccaagggtcctcccttcacgtaattgtgaacacagaccctcttccaagggcacatcccggagggtgcggactctgaagacttcgacctccacgtgtttatactggtttgagaacaaagacagcgtcatccagaacgtagtagtcattatacatgtcgccttcacacaggtatggtagtctggtgaaagcttcgataacaaaaccagcttttctgaaaacttcaggcagactattcacttgttcttcccagttctgtcctttgatttccaaaatttctgatggtttctcccacttgccaccgttttccacatagggatgaaaggggaggacaagggcaaggatgaccctgcctctagttggctccaagacacttctgatatcttttaacaaagtcaggggctgatcacagcggtccagcaagttcaggcagctgatgacatcatactggaaccccgtattctgccattcatttataccaaggactctgtatttctttttctgaagctgccatatcatagtttcagaaagctcagtggcatagatttcttcaaaatgagggctcatgatttttgtgacttctccatctccagcacctaaatcaagaagtctgtgggttttccagtctggattaattttaagcagtctctgaaactgatctggtgaaaacacaaacattgagcctcttcctagcaacccattgatagatgttctagacataaacaggctaaaaacagatgacacaaaagaatgatataattggataaatagccagcccgatttctcaatgctgttgtttaagaagatctgtgttccttgatcaaggtaactctgaacaaagacagcctggagtgattcc

SEQ ID NO: 260586 - DNA, 1224 bp, Homo Sapiens
aggctggtacggtcccggatgctgggatgcccgcggagcatcgcagccggcccgggcccccgccagcctccctcctcgcgtccctcggtgtcctccgcgggccggcgcgatgcggctgggcccgaggaccgcggcgttggggctgctgctgctgtgcgccgccgcggccggcgccggcaaggccgaggagctgcactacccgctgggcgagcgccgcagcgactacgaccgcgaggcgctgctgggcgtccaggaagatgtggatgaatatgttaaactcggccacgaagagcagcaaaaaagactgcaggcgatcataaagaaaatcgacttggactcagatggctttctcactgaaagtgaactcaggtcatggattcagatgtcttttaagcattatgctatgcaagaagcaaaacaacagtttgttgaatatgataaaaacagtgatgatactgtgacttgggatgaatataacattcagatgtatgatcgtgtgattgactttgatgagaacactgctctggatgatgcagaagaggagtcctttaggaagcttcacttaaaggacaagaagcgatttgaaaaagctaaccaggattcaggtcccggtttgagtcttgaagaatttattgcttttgagcatcctgaagaagttgattatatgacggaatttgtcattcaagaagctttagaagaacatgacaaaaatggtgatggatttgttagtttggaagaatttcttgggtgattacaggtgggaatccaactgccaaatgaagatccagcaatggatacttgttgagaaagacagattcgtgaatgattatgacaaagataacgatggcaggcttgatccccaagagctgttaccttgggtagtaccctaataatcaaggcattgcacaagaggaggcgcttcatctaattgatgaaatggatttgaatggtgacaaaaagctctctgaagaagagattctggaaaacccggacttggtttctcaccagtgaagccacagattatggccagacagctccatgatgactatttcctatcatgatgagctttaatctcccagcctgtcttattatagtactggctccttttataatttgttaccagctttacttttgtgataaaatattgatgttgtattttacactcttaagtcttaaccacagtcagaattatcttaatgtagattataattttggtcttttagg

SEQ ID NO: 260587 - DNA, 578 bp, Homo Sapiens
ggaatcactttattcatcagttatcaatgcgatagacagtagacgaatgcaggatacaaatgtatgtggtaaggaggattttggagatcatacttctctgaatgtccagttggaaagatgtagagttgttgcccattactctcacttcagtatacaaaccattaaggaagacctttgccactttagaacatttgtacaaaaagaacagtgtgacttctcaaattcattaaaatgtacagcagtagaaataagaaacattattgaaaaagtaaaatgttctctggaaataacactaaaagaaaaacatcaaaaagaactactgtctttaaaaaatgaatatgaaggtaaacttgacggactaataaaggaaactgaagagaatgaaaacaaaattaaaaaattgaagggagagttagtatgccttgaggaggttttacaaaataaagataatgaatttgctttggttaaacatgaaaaagaagctgtaatctgcctgcagaatgaaaaggatcagaagttgttagagatggaaaatataatgcactctcaaaattgtgaaattaaagaactgaagcagt

SEQ ID NO: 260588 - DNA, 1456 bp, Homo Sapiens
  misc_feature (800)..(811): n is a, c, g, or t
cttttcctcatcaacccatagagtggtcttttgaactggtatctaaacatacctggttatgaattctcaaaagagaaagcaggtctggggcggggtggtcaggagacagattctagggaaagtgctgaagagattttcttctgaagatgatctaggaaatgcatctttatacatgattgttagctgctgtagctttctgaagaagattgtagaaaagagactaagatatatgcaagggtcaccagtttagagatcagtcaaattggaaaaagtgccaagactggatgtgcagattgttctatgtattatcagtatttttttcctcttaagaaaaaaatttactctctctcctttgtgagtaaatgcctccttaatgccttttaagtaaggtggcaacttttaactgtcatcttgtgagaggcaacctcaaactctaagcagactccctctctccctttctggtgtcttaaatcaagaactagtttgaagccaaggcaaagcaaggtttgttcatcttcctttcctgtcatttaaggtaaaacaggcaatgaactcgctcttcaaataccatagttcaagagtagctgttggccctggttccagattaatatagcagcaggcagattgccccttcttggggccaccaccctccaaagctgtgccaccaatgagagcattgggttcaagtttgcatcaaacatggtattaccaacgctgagcctccagcagagcacttaaaagtcctagtgagagaatagatactatgcaagggaaaaaaaatttaaatgccaacgaatagnnnnnnnnnnnngaacctgatatactgtttgtttactctcaactctttgtacaaatattattgtcctaagggccttttcccctcctgcctagaaaataggttgtgtattggttttattcaacctgctgtctgctttaggattggagaaggtacctggatccttgtggactgccactgctggctgcctcctctccaactcatcagaagagcattttgacaaagacagaggacttggaccagggcatgccctgttggggatgtttctgtcagcaaggacatggcatggaatcaagtgggctgatgtgttgttatttaaacagtaccaaagtgcattcttcaatgtatgtttgcctgcttgaagcaaggcccaagttgagaatacagtaaaggaaactcatgaaagtggatgttctgtttatagtcagagtcttgtctctggtgaacaatctcagacaaaaacatgggttaagcttaggctgtgtgtggatttttggtgctgtatgtgctctgggagatgccccatgttggatgtcttgctttggcattcagaatggcagtagagattaggagcagggatggggtttccatggtgtacaactacgtcttttggcataagttatgtccagtttacagtttgctccaatttactgtcatgtt

SEQ ID NO: 260589 - DNA, 448 bp, Homo Sapiens
  misc_feature (364)..(364): n is a, c, g, or t
  misc_feature (428)..(428): n is a, c, g, or t
ctttaaaaattggaaactcattatggtcttaaattgtcctcaggcagccttttcctcatcaacccatagagtggtcttttgaactggtatctaaacatacctggttatgaattctcaaaagagaaagcaggtctggggcggggtggtcaggagacagattctagggaaagtgctgaagagattttcttctgaagatgatctaggaaatgcatctttatacatgattgttagctgctgtagctttctgaagaagattgtaggaaaagagactaaggatatatgcaagggtcacccagtttaggagatccagtccaaattgggaaaaagtgcccaagactgggatgtgccaggatttgttcttatngtatttatccagtattttttttccctctttaaggaaaaaaatttactctctctccctttgtggngtaaatgcctcccttaatgc

SEQ ID NO: 260590 - DNA, 1534 bp, Homo Sapiens
ggggggtccgggccgcaggcccgctgcggcggactgggcggcggaagttcgacggcgccgggcgagtggctgttgagcggcgccgcgggagttccgcaggtttcccgtgttcgcagcggagccggaggccagctgaacccggccgtgggatcccggataggaggaggaggggacccataggacgcgttaacatggacctggaaaacaaagtgaagaagatgggcttaggtcacgagcaaggatttggagccccttgtttaaaatgcaaagaaaaatgtgaaggattcgaactgcacttctggagaaaaatatgtcgtaactgcaagtgtggccaagaagagcatgatgtcctcttgagcaatgaagaggatcgaaaagtgggaaaactttttgaagacaccaagtataccactctgattgcaaaactaaagtcagatggaattcccatgtataaacgcaatgttatgatattgacgaatccagttgctgccaagaagaatgtctccatcaatacagttacctatgagtgggctcctcctgtccagaatcaagcattggccaggcagtacatgcagatgctacccaaggaaaagcagccagtagcaggctcagagggggcacagtaccggaagaagcagctggcaaagcagctccctgcacatgaccaggacccttcaaagtgccatgagttgtctcccagagaggtgaaggagatggagcagtttgtgaagaaatataagagcgaacctgtgagacgtaggagatgtcaaacttccctgtgagatggatgcccaaggccccaaacaaatgaacattcctggaggggatagaagcaccccagcagcagtgggggccatggaggacaaatctgctgagcacaaaagaactcaatattcctggctattgctgcaaactgagtatgaaagaaggtgacccagccatctatgccgaaagggctgggctatgataaactgtggcacccagcttgttttgtctgcagcacctgccatgaactcctggttgacatgatttatttttggaagaatgagaagctatactgtggcagacattactgtgacagcgagaaaccccgatgtgctggctgtgacgagctgatattcagcaatgagtatacccaggcagaaaaccagaattggcacctgaaacacttctgctgctttgactgtgatagcattctagctggggagatatacgtgatggtcaatgacaagcccgtgtgcaagccctgctatgtgaagaatcacgctgtggtgtgtcaaggatgccacaatgccatcgacccagaagtgcagcgcgtgacctataacaatttcagctggcatgcatccacagagtgctttctgtgctcttgctgcagcaaatgcctcattgggcagaagttcatgccagtagaagggatggttttctgttcagtggaatgtaagaagaggatgtcttaggaggagggcacccagaagtatcgagccatagctatccaaagtggtctgcatttctactgtaaaatgcgaatttg

SEQ ID NO: 260591 - DNA, 872 bp, Homo Sapiens
aaggtttgcaaaaaaacccaggaaatgttccctttttgccccaccattcatcttcattagatcaaattctgtgaaacttgtctggtctctcaaagggagcagcctctgtagtgttaaatggctaattaaaataggaagatctttatagccagaaacaacttagtcatcaaatagcaagtgaaaccaaaacgtcagagggattactgtacttggaagtatgttgtgtgtcccaaatgtgaacgaagtattgttagaatttattagatcagcttctttggagatcaaagattggaaatcctagtcatagatattcactggactggctttggactgaaatgctcctttgtaattcttttcctattgtcttttccttctagtgtcccaaaatattttctttaaagtcagcacagtactgtatatgaatctttaatgtggtatcatatatgtctacttttgtctgattcatcgatgtattatatctttataattgaatattttagctccgggtcctgttgccccttcaagcagtacatgccaaattataaataggtgctactggccttgagcatatcactgtgggacagttccccaattgtcaagtgtttagatatgtagactattgccatttgttcagttaggttttgctttgtgtctgaagctgaattgatttctttttttgaatgcgaaagttgaaatttcaaacgtagtcatttcttacagatggccagacagaacattggtggctaggttgactgagaactgtgtctcccatgtttacacaattaagcttttatattccactctctgtgcttaccctggtgaggcattttgggagacaggactctgaatcttctgtttcacttaagaagaac

SEQ ID NO: 260592 - DNA, 498 bp, Homo Sapiens
gctcagactggtgaaactgagagtcaggcttttacattttaaagaaaatacagttttcattctaattcaggtgtctacttattttatgtaagaataattttagatttcccccccaccatgaagtttcttcctatttttttatgctgtaacttacccccaatctttatctctggatttttactctttaaattttgaagttgactagcattttcaaacctttattttatacccttgtcttttatattaactttttcttattattctttaggtaagaatgattgatgttggctgatattggagtgctcattcacatgaagtggatagatacttctcaagacatcacacagcgtgagtcaatcaaggagggaagccacaagcagactgacaacgtttctagcaggatcaggtgagctgtgtccagaaaaccaacgagaaggagtggaaggaggaatgaacgtttcattctcgttaataaaggcattatcctaattatccttt

SEQ ID NO: 260593 - DNA, 682 bp, Homo Sapiens
gcagcttgcccagggccacacagctagcgagaagtggagccaggatctggtcccatccactgcaatccaaagtctgtgctatgagccgccgtcctgtcgtgtcctgtctgccttgtttgaaagtaggcgtccccttcacgggccaattgaccgtgcaactctttgggtgaggcatgggggaataaacagaataaaaggaatgcaaaggcaaaaagaaactttcacaagaaataaccattaataagagccaccgtgcccggcccaggacttttaaaacaagcatcccaggggattccggtgcccaccagaagtcgcaagctgcttggctctggagggcgcctaggagtcggtgtcgcctaagatgggataatggcttcaggcaactcctagccttccccatatctcctgcctcagcccccctggcccagtgctggggcgtcagctaaacctgagcttccaagaagtcaggttgccaaaggaagaagccttctgagaccctccccaacccacccaggttcccaaggccctgccgtaccctggggaatcaaccaaggagttcttgttctcgaagaaccccaggcctcatgatggtctacggtagaggtccaacaactacagcctgtgggccacatctggccacagcctgatttgtaaataaagttttattggaacacagcaaaaa

SEQ ID NO: 260594 - DNA, 1554 bp, Homo Sapiens
  misc_feature (880)..(898): n is a, c, g, or t
  misc_feature (912)..(953): n is a, c, g, or t
ggtggtactggccggaatttcgggatatcgtcgacccacgcgtccgaatcacataaccttaaaaaggactatattaatcaccttctttgtaatcccttcacagtcccaggtttagtgaaaaactgctgtaaacacaggggacacagcttaacaatgcaacttttaattactgttttcttttttcttaacctactaatagtttgttgatctgataagcaagagtgggcgggtgagaaaaaccgaattgggtttagtcaatcactgcactgcatgcaaacaagaaacgtgtcacacttgtgacgtcgggcattcatataggaagaacgcggtgtgtaacactgtgtacacctcaaataccaccccaacccactccctgtagtgaatcctctgtttagaacaccaaagataaggactagatactactttctctttttcgtataatcttgtagacacttacttgatgatttttaactttttatttctaaatgagacgaaatgctgatgtatcctttcattcagctaacaaactagaaaaggttatgttcatttttcaaaaagggaagtaagcaaacaaatattgccaactcttctatttatggatatcacacatatcagcaggagtaataaatttactcacagcacttgttttcaggacaacacttcattttcaggaaatctacttcctacagagccaaaatgccatttagcaataaataacacttgtcagcctcagagcatttaaggaaactagacaagtaaaattatcctctttgtaatttaatgaaaaggtacaacagaataatgcatgatgaactcacctaattatgaggtgggaggagcgaaatctaaatttcttttgctatagttatacatcaatttnnnnnnnnnnnnnnnnnnnggggggggcaatcnnnnnnnnnnnnnnnnnnnnnnnnnnnnnnnnnnnnnnnnnntttcattgtgcatcagtttccatgaaagacctgaataccaccttacctcaaattaagcatatgtgttacttcaaggaataccttttgacataagatggttgaccaacggtgcttttcttcggcttgagttcaccatctcttcattcaaactgcacttttagccagagatgcaatatatccccactactcaatactacctctgaatattacaatgaatttacagtctagtacttattacatgctgctatacacaagcaatgcaagaaaaaaacttactgggtaggtgattctaatcatctgcagttctttttgtacacttaattacagttaaagaagcaatctccttactgtgtttcagcatgactatgtatttttctatgtttttttaattaaaaatttttaaaatacttgtttcagcttctctgctagatttctacattaacttgaaaattttttaaccaagtcgctcctaggttcttaaggataattttcctcaatcacactacacatcacacaagatttgactgtaatatttaaatattaccctccaagtctgtacctcaaatgaattctttaaggagatggactaattgacttgcaa

SEQ ID NO: 260595 - DNA, 1008 bp, Homo Sapiens
  misc_feature (868)..(868): n is a, c, g, or t
agagcttcgactccatccccggcctggtgcgctgctacgtgggcaaccgccggcccatctcccagcagagtggcgccatcatcttccagcccatcaacaggacggtgcctctgcggtgcctggaggagcattatggcacctccccaggccaggcccgggagggcagcctcaccaagggaaggccggatgtggccaagaggctgagcctcaccatgggtggcgtccaggcccgagagcagaatttgcccaggggaaacctcctcagaaacaaagaaaagagtggtagccagcccgcctgcctggatcacatgcaggacagaagagccttgtccctcaaagcccaccagtcagagagctacctgccgattggctgcaagctgccacctcagtcctcgggtgtggacacaagcccctgcccaaactcacctgtgttcaggacgggaagcgagcctgccctgagcccagcagtggttcggagggtctcctcagacgccagggctggggaggcgctgagtgggatcagacagtcaactgtgccctaagcccccgcctaagccctgcaatggtgccgttcctcaaggttccctcgtctccctctgcctggctcaactcagaggccaactactgtgaactgaacccagcgtttgccacaggctgcggcaggggagcaaagctaccctcatgtgcccagggaagccacacagaactgctcacagccaagcagaatgaggcgccaggtccccgggaactctggcgtcaactacttgatcctttgatgatgatgacaggggaaagaccttgggaacctgcggcagctcagaatggagaaagggcagtggggacaaagggcgagtatggtgacgccccntcctggaagactggtcttcctccttcaggggccaacgagatttgaggtccaaggttccttaccccctgagaaataaggccctggaaacaggcactgttgaaaacggtggaacaagaacctgtgtcaccaacaaagaaccc

SEQ ID NO: 260596 - DNA, 841 bp, Homo Sapiens
gccgctccacatggcccaagggcaacagatgctcgcagggcagctgctgccgatgctcacgctcctgcccccctccttcccgctgccacaccccaccctgggcccccgcagacacgcatctctaactcagttgggcccagccttctggatggcttggggtaggccatgggcccacctggggccaggccagcccctggggcagctctggaagagcagtgtggaggagcacttgcttgcagcctggcttcagcctctggcactgctggagtggtccctgggagcttctgcactgtcggctttggggacgtctcacccacttgggttacagtaggccttccccacccagagagaagtgtttccaccccagagacattgtctgtcagcccctgaagtgctcgcctcccccagtgcccgtcaccagcccttcctatctgtggggtccaagtcaggcttcccctgcggccaccagccatagggagcagccatcagcccccgagtcagaactgcttctgtctgtccatacctccaggctctcccggagagggggacggatatttatttcctaaagtttgcacttaattgtgaggattctcaggattgttgggggctactgaaaagaggaatgtgttgaatgtcgcgtttgctgtccactcgtcctagaagtttagtgtttttgtcactgtcatgtgtttctgtgggcagagctggttctggagggtgggtcagtgcacccgaggctcagagcatccatccaccccactggccctccttccagataccctctctctaattgggttcttgcatgtaaaatactccacaataaataaattaatttggaaca

SEQ ID NO: 260597 - DNA, 583 bp, Homo Sapiens
  misc_feature (129)..(129): n is a, c, g, or t
  misc_feature (132)..(132): n is a, c, g, or t
agaatagaatgaaataactatttcacttgcccaaaattttaaatattttttcatctaaacttgtattgtttcccatagcagaatgtcaatattcacagtacatttctgtaaagagcaaaccaatataantgnttttgagtgttgaaaaaaattccagatttttgaagaattagacaactcttcatctaccttatttctagttcacacagttatctcaaattccactgaaactaatgggatactgtcttgtgtagatgccagttgagtttataatgtgacctagtaaagctgtcttttttgttgtgttgtatgagtgtcggatcatgcttttaggaatacttttattaaaatggtgtgcattcatgcaaaaggccaactggcttttgtgaacaatagatcttttctcccctttattttgttctcttgacacttttgtgaaaattacctagcctgataaaaacattttgtaaaaatttgtataatactgttataaaatatttataatcccagaaaatgttgtgttaaatcttgtgcaaaaacagtatattcagaataaaagtttatcatttaaagtcaaaaaaaa

SEQ ID NO: 260598 - DNA, 612 bp, Homo Sapiens
tcattatataccatggaataatgcatttgttgccataatatttttcagcaacctgctgtagcttcaggatacgctctgcttgaatctgaaaaagtgtcttacgggatggcaaaccaacatcatacatccccttaggatatgcaacgccgagtcttgtcccctgcccaccagctagaagaagaactgctactttattctgagaaatctggaaaagtccttcactttcccaggcctggagctgatcttgatcccttgtagcactgcctaatacctctcgaggcacaggttccattcgtgcatccacattcttttggtgagaagactggttaaaaccttcaatggccttttggaaaaagaagttcagctcctcaaagttcatggcctggagctctgcataaagttctacctgttgggcttcttcaagctcattccagaaacgtagtaggtgctcttgcccagctttggacaacgtgagtttgaggtcattaatgttcataatgctctaatagccaagctttgtagaaataggggtgtaatgtatgtacctgtaaacctttctcggcgcgaccgcagctacgaccgtctccagctccttccgcgcggccactcatc

SEQ ID NO: 260599 - DNA, 1037 bp, Homo Sapiens
gggccggagtcggcggaaagcacccgggcgcagccggagccggtgccgcagctgcgatggccgtggccgtggggagaccgtctaatgaagagcttcgaaacttgtctttgtctggccatgtgggatttgacagcctccctgaccagctggtcaacaagtctacttctcaaggattctgtttcaacatcctttgtgttggtgagacaggcattggcaaatccacgttaatggacactttgttcaacaccaaatttgaaagtgacccagctactcacaatgaaccaggtgttcggttaaaagccagaagttatgagcttcaggaaagcaatgtacggctgaagttaaccattgttgacaccgtgggatttggagaccagataaataaagatgacagctataagccgatagtagaatatattgatgcccagttcgaggcctacctgcaagaggaattgaagattaaacgttctctcttcaactaccatgacacgaggatccatgcctgcctctactttattgcccctactggacattcactaaagtccctggatctggtcaccatgaaaaagctggacagtaaggtgaacatcattccaataattgcaaaagctgacaccattgccaagaatgaactgcacaaattcaagagtaagatcatgagtgaactggtcagcaatggggtccagatatatcagtttcccactgatgaagaaacggtggcagagattaacgcaacaatgagtgtccattctcccatttgcagtggtttggcagcacccgaagaggtgaagattggcaacaagatggcaaaggccaggcagtacccctggggtgtggtgcaggttgacgaatgaccaatcattggcgatttagtgaaacttcgagagatgctgatcccgcgtggaacatggaggacttgcgagagcaagactcacaacccgccactatgaatttgtaccgacgctgtaagcttgaacgagatggggtccaaggacactgacccttgaccagaaaaaccttcagtcctccggagacct

SEQ ID NO: 260600 - DNA, 1361 bp, Homo Sapiens
  misc_feature (523)..(554): n is a, c, g, or t
  misc_feature (969)..(969): n is a, c, g, or t
  misc_feature (971)..(971): n is a, c, g, or t
ctcgtcaacccccccctaaattttttttgtagcgaggcctgggtggcgaattcggcacgaggctcattaaagatttggaaaaatgaaagtcaaaacaacaaaatcaccccgagtcccaaccttctgtaacataaccactcttggcattggcgtgttcctttctagtctctctgtagacggggtgtgtgagtgtgtgggtttaactttggttgtcctcatgctgcgtattcagttttgtattctggtcctttgttcatttaacatcttacaagtatttgtccatgttgtaacagtagtgtattagcttacactccttgcctgttcaaaatgtctttcaggcacagcactggcctttaagcctgtgtcgtagggatttccagagaatgctctgtgtattgaagcacagaaggtgtttctgtgtctcagtgtgtttctgtccctaggtttaaggcttcatgtcatggaggagattttatagatgtcaagctaatgaccttagagttttaaaaaatccgtgaccggnnnnnnnnnnnnnnnnnnnnnnnnnnnnnnnncagcccccgtcgcggcttgcagatgcggcgcatcacatggagggccagaggaggttcttagaaccctgctctgcgcccacacatggggccgaaaagctcgcgtacttctctgcgtctgaatacgaccgcagacaaacctggtactcccccgccctactggacttaggcccaccgcgcgggcgcctgggtaaatatcgcccccctacacctttacctttccagcttcataagcggaccctcctcgactgcgtctcccaacgccgaaaagaacacttcttcccctcatttcttgcgtaaaaaaatccccccctttcctgcgatcccataatagccgggcccctggccgggggcacacgcgggtatttcttatgtgccgatacagacatcagcgccgtgggcgccccgcgttgagagnancaaatctacggctcccccaacactattgcgcgccctaccctcttttgccccaagtccacaccacatggcggtggcgccacacatacccccttcttcaggagtttccgcgcataaacctcttgactagaagctgcgcccaacgaccctggcctcgtggtgttagtcttacaccccactacctactctttacacaactccccatctcgacgttcccgtgcccccgccttcgatgtccactgccacgcctcataaggcctttccccctagacacacacaacaacttgtgagacatcggagtgagacgtctcgcaataaggcagagtgaagtaggaatcactgtggcctctcaatctacccgctcaaccaattactgcgcctctctagctccca

SEQ ID NO: 260601 - DNA, 1074 bp, Homo Sapiens
  misc_feature (705)..(705): n is a, c, g, or t
  misc_feature (823)..(823): n is a, c, g, or t
ggctcttccgtcagtgtcttttgcttcgactcccggcggagcgcgcaacgtggagtgacgtgcaggggccaagtgcaacccaggcagccacggctgtttcggagctcaggactctaaaatggcagagcagctttctccaggaaaggcggtggatcaggtgtgcaccttccttttcaaaaagcctgggcggaaaggggctgctggacgcagaaagcgcccggcctgcgacccagagcccggagaaagcggcagcagtagcgacgaaggctgcactgtggttcgaccggaaaagaagcgggtgacccacaatccaatgatacacaagacccgtgacagtggtaaacagaaggcggcttaccgcgacttgagcagcgaacaggaagaaggaaaatgaccccgacgagtctcggcgtggtttattaatccaccccgttcggcgaacacccctggggaccagcaggaatatggggagcgaacagcctggtctaattgagcctgggacaccagaacgaagagaacgcgcggaatgacaccaacgcccaatcctttttgaagccgccaagccccaggacaggaatcccccaccggaagggaaacaccttggagggggcggccacaaggggaagggcaatggcaacccaaatggaattccctatttcccgcggcgggggagaatctctcaaacccaacatcttatttgcacgncacaatgtcacccacttgtgaaaggcccccccacaaagggaaataacccacttccttaattggggcagcacaaaaggggcccctctcctttctccgcggggaacatggggtgtgaganggaaaaggggggccccccccatttccggaagaccggtcccctaaaggcatctcctaacccgtggctccacaccggtggccaccttcgggccaattatccgcggctccccgaaacattcttgggtaagtgggaccttcccaatcgcagatccttgggctcttcctgtcgggcgttatctgggaaaaaccaagagtgacgaaatgttctcccccacgggaaccgcgtctctacaaataaagagaggacaggcg

SEQ ID NO: 260602 - DNA, 860 bp, Homo Sapiens
  misc_feature (532)..(532): n is a, c, g, or t
  misc_feature (712)..(712): n is a, c, g, or t
  misc_feature (724)..(724): n is a, c, g, or t
  misc_feature (781)..(781): n is a, c, g, or t
  misc_feature (794)..(794): n is a, c, g, or t
ttttggatcatctaaaccggaaaatagctgaactggaaaagaacattgttggtgaaaagaccaaggagaaggtaaagcttgatgctgaaagggaaaaactagagaggcttcaggagctttactccgagcagaagacccagctggacaattgtcctgagtccatgagggaacagttacaacaacaactgaagagggatgctgacctgttggatgttgaaagcaaacactttgaagacctggagttccagcagcttgaacatgagagccggctagatgaaggaaaaggagaacttgacctcaacagctcctgcgtgaagttgctgaatatcaacggaacatcgtttctagaaaggaaaaaatttctgcattgaaaaagcaagccaatcacattgttcagcaggctcagagagagcaagatcattttgtgaaagaaaagaataatttaataatgatgttgcaaagagaaaaggagaatctttgtaatttggaaaagaaatactccagcctctctggggggaaagggtttcccgtntaaccccaatactttaaaagagggctatatcagtgtaaatgagattaatgagccgtgtggcaattccacggaatctatccccttccactcagtttcctgctggatgctggatgctgttgccacttgagcctgccacagctgtgctggccggagcccccaaccaggagttaaagaggcacntttaggaagttntgggaaggaaagggaaaaaaaccaggccttaaaggaagggcctcttttcttgaggtngatatttttgccntcggaaagggaaaaccacctctttcccttcttcccccacattttcaggcagtgctacttttggggg

SEQ ID NO: 260603 - DNA, 255 bp, Homo Sapiens
  misc_feature (146)..(173): n is a, c, g, or t
ggactctgtgtgctgccttaggggttaggaatgtggtgctcttgttgggggaagtgagctccaagagtagctttttttcatctcttagtgatcttctgtttatcggttgaatgccacagattcccttttaaacttattttgctttnnnnnnnnnnnnnnnnnnnnnnnnnnnntttaacttaaaatattttagcattagttgcacaaaatgtttggataaaattctagtttttataagtctttttatatatttag

SEQ ID NO: 260604 - DNA, 747 bp, Homo Sapiens
  misc_feature (271)..(271): n is a, c, g, or t
agcatcatgatgactttcattcaccaccgcaccatgtttttcaaactccttctttaaatatgctttaacctcatctttagagagtttccagtcatcattaagatccatttcttggaatgattcatgggatcttggtccatttcgaatctccaggagatcaatattaaatatcagtgtactttctgggggaattttaccttttccttcttttccatagcccagagcaggaggaatgatgagctttctcttctctccctacacacattccttntcaagcccctggtccccaacctttgagagcctccaggatgcccagggtaaaccaaatgggctgaccattgttatgtttgtgagtggagtgaaataaggagccgtccttttctaagtagccttcatagtggaccaacatcaaatcccctcctttggtcttgcgatggcagatgaatggcttctggagaacttcaattttcacttctggttcagggatcaaagccccaatcaaagaagtgacgaacagagtcaagaccgcgttccacaagaaaagcctcatgttgctgaagcaaggaaagaagtccctacaaaagcagcgaaaggtccctcgacttcatagatttaagaacgtagttcaaggcttacggacaagggcttcagacaagttcaggactcccccttcttagaagacgtggcacatttaccaccaactcttttctcaagggtcacgaacctacctttaaagagttaagcccc

SEQ ID NO: 260605 - DNA, 1919 bp, Homo Sapiens
  misc_feature (1633)..(1633): n is a, c, g, or t
  misc_feature (1695)..(1695): n is a, c, g, or t
  misc_feature (1705)..(1705): n is a, c, g, or t
  misc_feature (1854)..(1854): n is a, c, g, or t
tcaaaggctcagggtggtgatggagtagtacctgatacagagctggaaggcaggatgcagcaggctgagcaggcccttcaggacattctgagagatgcccagatttcagaaggtgctagcagatcccttggtctccagttggccaaggtgaggagccaagagaacagctaccagagccgcctggatgacctcaagatgactgtggaaagagttcgggctctgggaagtcagtaccagaaccgagttcgggatactcacaggctcatcactcagatgcagctgagcctggcagaaactgaagcttccttgggaaacactaacattcctgcctcagaccactacgtggggccaaatggctttaaaagtctggctcaggaggccacaagattagcagaaagccacgttgagtcagccagtaacatggagcaactgacaagggaaactgaggactattccaaacaagccctctcactggtgcgcaaggccctgcatgaaggagtcggaagcggaagcggtagcccggacggtgctgtggtgcaagggcttgtggaaaaattggagaaaaccaagtccctggcccagcagttgacaagggaggccactcaagcggaaattgaagcagataggtcttatcagcacagtctccgcctcctggattcagtgtctcggcttcaaggagtcagtgatcagtcctttcaggtggaagaagcaagaggatcaaacaaaaagcggattcactctcaagcctggtaaccaggcatatggatgagttcaagcgtacacaaaagaatctgggaaactggaaagaagaagcacagcagctcttacagaatggaaaaagtgggagagagaaatcagatcagctgctttcccgtgccaatcttgctaaaagcagagcacaagaagcactgagtatgggcaatgccactttttatgaagttgagagcatccttaaaaacctcagagagtttgacctgcaggtggacaacagaaaagcagaagctgaagaagccatgaagagactctcctacatcagccagaaggtttcagatgccagtgacaagacccagcaagcagaaagagccctggggagcgctgctgctgatgcacagagggcaaagaatggggccggggaggccctggaaatctccagtgagattgaacaggagattgggagtctgaacttggaagccaatgtgacagcagatggagccttggccatggaaaagggactggcctctctgaagagtgagatgagggaagtggaaggagagctggaaaggaaggagctggagtttgacacgaatatggatgcagtacagatggtgattacagaagcccagaaggttgataccagagccaagaacgctggggttacaatccaagacacactcaacacattagacggcctcctgcatctgatggaccagcctctcagtgtagatgaagaggggctggtcttactggagcagaagctttccccgagccaagacccagatcaacagccaactgccggcccatgatgtcagagctggaagaagagggcacgtcagcagaggggccaccctccatttgctgggagacaagccatagatgggattctggctgatgtgaagaacttggagaacattanggacaacctgcccccaggctgctacaatacccaggctcttgagcaacagtgaagctgccatnaagatttctncactgaggttcttgggatacagatctcagggctcgggagccatgtcatgtgagtggggtggggatggggaacatttgaacatggtttaatgggtaatgctcagggtcaactgaccctgacccccattcccgggatcccatggggccagngtgggtttgtccttattggcaccaataactcctttggctttccctgaatgcctgggggcaaatgg

SEQ ID NO: 260606 - DNA, 697 bp, Homo Sapiens
tgtaaatgctaggttatgcaaaaataattttatttcaatttaattttaatgaatctcccccaactataatattaaaaacatcaaaagaacttaagttttaatggcaaaaagttcctattttcccccatctactaaaaaggttgttttcccttattaacatacaatgccctattgttaaggcacaactttttttagattaaaaatgaaaccatagattaggtttattttatacaacagttacaagacagaccttttgtaggcatataaatacatcttaaattcaatcaagatctaaaatgaaaaattattttttctttctaggatcaatcaacacatagccaataggtagttacagctagaataattccaacagttcctgttttaacctgtcagattgtctccaaaaggccatcttcaaagtgcgatctaagagaggaaagctgaatattttcctttctgcatcggcactccacctttctttacttatgctcagctatcagagatggctgtcaccttcaaagcctaagtgagatccaatttttgaattcaacatgaaacaaggacagatatcctgatcctggggtgaccagggtagatgtctgctttgcatcctccctgttacccttctcctgacctccctctagcttctttctgaccctcttcctagccaccacccctctccctctgacacagttca

SEQ ID NO: 260607 - DNA, 907 bp, Homo Sapiens
  misc_feature (738)..(803): n is a, c, g, or t
  misc_feature (833)..(833): n is a, c, g, or t
aggagtgcgccgcgtcccctcaccgcggcctcagatgaatgcggctgttaagacctgcaataatccagaatggctactctgatctatgttgataaggaaaatggagaaccaggcacccgtgtggttgctaaggatgggctgaagctggggtctggaccttcaatcaaagccttagatgggagatctcaagtttcaacaccacgttttggcaaaacgttcgatgccccaccagccttacctaaagctactagaaaggctttgggaactgtcaacagagctacagaaaagtctgtaaagaccaagggacccctcaaacaaaaacagccaagcttttctgccaaaaagatgactgagaagactgttaaagcaaaaagctctgttcctgcctcagatgatgcctatccagaaatagaaaaattctttcccttcaatcctctagactttgagagttttgacctgcctgaagagcaccagattgcgcacctccccttgagtggagtgcctctcatgatccttgacgaggagagagagcttgaaaagctgtttcagctgggccccccttcacctgtgaagatgccctctccaccatgggaatccaatctgttgcagtctccttcaagcattctgtcgaccctggatgttgaattgccacctgtttgctgtgacatagatatttaaatttcttagtgcttcagagtttgtgtgtatttgtattaataaagcattctttaacagacnnnnnnnnnnnnnnnnnnnnnnnnnnnnnnnnnnnnnnnnnnnnnnnnnnnnnnnnnnnnnnnnnntttctccctttcccaccattaccaatatanttttttgtgggcgccctccggcccctcaaaaaatttttttaaaccatttctttttgggcgccggggccaaattt

SEQ ID NO: 260608 - DNA, 827 bp, Homo Sapiens
  misc_feature (590)..(590): n is a, c, g, or t
  misc_feature (616)..(616): n is a, c, g, or t
actgcccggggcttagatggctccgagcccgtttgagcgtggtctcggactgctaactggaccaacggcaactgtctgatgagtgccagccccaaaccgcgcgctgctcgggaccttagagcctctgactcaggctggaagatttgagagctggattaagtacttgttggctcacgcccgtgactgttccgctgtttagctcttgtttttttgtgtggacactcctaggatagaaagtttggtatgttgctatacctttgcttctcccaccttccccaatatctaatatgtatttctcattcttagaataatccagaatggctactctgatctatgttgataaggaaaatggagaaccaggcacccgtgtggttgctaaggatgggctgaagctggggtctggaccttcaatcaaagccttagatggggagatctcaagtttcaacaccacgttttggcaaaacgttcgatgccccaccagccttacctaaagctactagaaaggctttggggaactgtcaacagagctacagaaaagtctgttaaagaccaagggacccctcaaacaaaaacagccaagcttttctgcncaaaagatgactgagaagactgttanagcaaaaagctctgttcctgcctcagatgatgcctatccagaaatagaaaaattctttcccttcaatcctctagaactttgagagttttgacctgcctgaagagcaccagattgcgcaccctccccttgagtggagtgcctctcatgatcccttgacccaggagagagaagcttgaaaaagctgttttcagctggggccccccctttcacc

SEQ ID NO: 260609 - DNA, 544 bp, Homo Sapiens
  misc_feature (65)..(65): n is a, c, g, or t
gcccccaccggccttcccctaaagctactggaaaggcttgggggaactgtcaaacggggcctacngaaaagtctgtaaaagccccaggggaccccctcaaaaaaaaaaacggcccaagcttttccggcccaaaaaagatggacctgaagaaggactgttaaaagcaaaaaagctctgttccctgccctcagatgatgccctatcccagaaatagaaaaattcctttccccttcaatccctcctagactttgagagttttgaccctgccctgaagagcacccagattgcgcacctccccttgagtggagtgcctctcatgatccttgacgaggagagagagcttgaaaagctgtttcagctgggccccccttcacctgtgaagatgccctctccaccatgggaatccaatctgttgcagtctccttcaagcattctgtcgaccttggatgttgaattgccacctgtttgctgtgacatagatatttaaatttcttagtgcttcagagtttgtgtgtatttgtattaataaagcattctttaacag

SEQ ID NO: 260610 - DNA, 966 bp, Homo Sapiens
caggatatgaagttgcaaagtatgatcttatatggatttgtgatagtggaataagagtaattccagatacgcttactgacatggtgaatcaaatgacagaaaaagtaggcttggttcacgggctgccttacgtagcagacagacagggctttgctgccaccttagagcaggtatattttggaacttcacatccaagatactatatctctgccaatgtaacgggttcaaaatgtgtgacaggaaatgtcttgtttaatgagaaaagatgtgttggatcaagcaggaggacttatagcttttgctcagtacattgccgaagattactttatggccaaagcgatagctgaccgaggttggaggtttgcaatgtccactcaagttgcaatgcaaaactctggctcatattcaatttctcagtttcaatccagaatgatcaggtggaccaaactacgaattaacatgcttcctgctacaataatttgtgagccaatttcagaatgctttgttgccagtttaattattggatgggcagcccaccatgtgttcagatgggatattatggtatttttcatgtgtcattgcctggcatggtttatatttgactacattcaactcaggggtgtccagggtggcacactgtgtttttcaaaacttgattatgcagtcgcctggttcatccgcgaatccatgacaatatacatttttttgtctgcattatggggacccaacctataagctggagaactggtcgctacagattaccgctgtggggggtacagcagaggaaatcctaaatgtataactacagctttgtgactgtatataaagggaaaaaaacagaagtattataaattatgtttatataaatgcttttaaaaatctaccttctgtagttttatcacatgtatgttttggtatctgttctttaatttatttttgcatggcacttgcatctgtgaaaaaaaa

SEQ ID NO: 260611 - DNA, 791 bp, Homo Sapiens
gggagaacattcatactgaggccagagtgccatcgaaggtaattatagagacagtaaaatccttttactctgggaaaaataaaatgctgggtgtctcacaaaatttcagaacctgatttcaaacggatcataacaaagaggagatcaaatttagcatggtggactgctcgacaggatatatttgtcaatggaatgtttccacatattataccaccaacatgagaaaaaaatgatcattgtttatttgaagcttgaaaaatgagcaggcggaattgttggatttgtaagatgtgcagagatgaatctaagaggcccccttcaaaccttactttggaggaagtattacagtgggcccagtcttttgaaaatttaatggctacaaaatatggtccagtagtctatgcagcatatttaaaaatggagcacagtgacgagaatattcaattctggatggcatgtgaaacctataagaaaattgcctcacggtggagcagaatttctagggcaaagaagctttataagatttacatccagccacagtcccctagagagattaacattgacagttcgacaagagagactatcatcaggaacattcaggaacccactgaaacatgttttgaagaagctcagaaaatagtctatatgcatatgggaaagggattcctaccccagatttctaaagtcagaaatgtaccaaaaacttttgaaaactatgcagtccaacaacagtttctgactacaactcaaaaggtttaaatagaaaaacagtaatattggaaaaggggggc

SEQ ID NO: 260612 - DNA, 505 bp, Homo Sapiens
gggagggttcgaattgcaacggcagctgccgggcgtatgtgttggtgctagaggcagctgcagggtctcgctgggggccgctcgggaccaattttgaagaggactgagagtggctttcacaatggaagggatcagtaatttcaagacaccaagcaaattatcagaaaaaaagaaatctgtattatgttcaactccaactataaatatcccggcctctccgtttatgcagaagcttggctttggtactggggtaaatgtgtacctaatgaaaagatctccaagaggtttgtctcattctccttgggctgtaaaaaagattaatcctatatgtaatgatcattatcgaagtgtgtatcaaaagagactaatggatgaagctaagattttgaaaagccttcatcatccaaacattgttggttatcgtgcttttactgaagccaatgatggcagtctgtgtcttgctatggaatatggaggtgaaaagtctctaaatgacttaatagaa

SEQ ID NO: 260613 - DNA, 694 bp, Homo Sapiens
gggggggccgaagctggcgcagcgcgcgactttttgaaagccaggagggttcgaattgcaacggcagctgccgggcgtatgtgttggtgctagaggcagctgcagggtctcgctgggggccgctcgggaccaattttgaagaggtacttggccacgacttattttcacctccgacctttccttccaggcggtgagactctggactgagagtggctttcacaatggaagggatcagtaatttcaagacaccaagcaaattatcagaaaaaaagaaatctgtattatgttcaactccaactataaatatcccggcctctccgtttatgcagaagcttggctttggtactggggtaaatgtgtacctaatgaaaagatctccaagaggtttgtctcattctccttgggctgtaaaaaagattaatcctatatgtaatgatcactatcgaagtgtgtatcaaaagagactaatggatgaagctaagattttgaaaagccttcatcatccaaacattgttggttatcgtgcttttactgaagccagtgatggcagcctgtgtcttgctatggaatatggaggtgaaaagtctctaaatgacttaatagaagaacgatataaagccagccaagatccttttccagcagccataattttaaaagttgctttgaatatggcaagagggttaaagtatctgca

SEQ ID NO: 260614 - DNA, 919 bp, Homo Sapiens
atccttccgcccttcttaggaggggctgcattgcagggggagagtgaactgacagactcagtcactgaagagggaaaaggagtgagaagacaaagccgtcaaagccccaacagctttgtatttctccagcccggcgcagaccccggagctcccgaggcactccctccatctttggaacacgccagtaattgattgataacaggaagctatgagggaccctgtgagtagccagtacagttcctttcttttctggaggatgcccatcccagaactggatctgtcggagctggaaggcctgggtctgtcagatacagccacctacaaggtcaaagacagcagcgttggcaaaatgatcgggcaagcaactgcagcagaccaggagaaaaaccctgaaggtgatggcctccttgagtacagcaccttcaacttctggagagctcccattgccagcatccactccttcgaactggacttgctctaaggccaagacttctctctcccatcaccttgccctcattgtcttccctctcaagccccttcctttccactcctttcccattttaatcttgttctctccctactgtgttggtggtgctgatgaatctgccagagttgagttctatgaatttatttatctatctggctactccatttctctcaaaagcccctcaagtcacaaagtaaatgggttcaagcaatggaagtactgggttcccaggggattccctcccttttccccccccaaataatttaacttccacaaaacctaaggccctggactggggggaaccaccctgtagaagataggtattagataatgtgcccacaaatggggaaaagaacggggaatttttttggaccccccacatttataagatccccggccctttcccgaaaaaaatttccctcttgaaaacat

SEQ ID NO: 260615 - DNA, 718 bp, Homo Sapiens
atttaccctctaatgcagtgtggatgaagaattcaaaactgaagagtttggaaatttgccaccctcaggagcggaacattttcaatcggatcttgggtggtttccttatgaggaaggcatatgaacttgcgtgggctactgcttgtagctttggtggttctcgaccgtttgtggtagcagtagatgacatcatgtttcagaaacctgttgaggttggctcattgctctttctttcttcacaggtatgctttactcagaataattatattcaagtcagagtacacagtgaagtggcctccctgcaggagaagcagcatacaaccaccaatgtctttcatttcacgttcatgtcggaaaaagaagtgccattggttttcccaaaaacatatggagagtccatgttgtacttagatgggcagcggcatttcaactccatgagtggcccagcgaccttgagaaaggactaccttgtggagccctaagaacaccacatttgttgaaaactagcactctacccacagtgacgtggtatctgatgaagacctgatcgagtgtattgattttagtattgcttcgtgtcctccacacaggaggaggatgtattcagcctttaggatgatcagaaaagcagaaagagagagtggccggatggggctgaggggagaaagaattattaaacaataaatactttcaagacaattttaattgtgaacctaaa

SEQ ID NO: 260616 - DNA, 510 bp, Homo Sapiens
attgtgtttgggaactggtttactaatccttaacaaataaacaattttttacttgccaaaaatgtcaagttacattcttctgcaaatttcttttatttaatactaacttaattgaatgcttataaaaatcaaggaacaagcaaaatggttagatgtaataaattcaaacaagcttgagcatatcaagttttcaaagcacagaaaaaggcatactgtgctgaaccacttacatgtgcttaaaatgcacaaaggaactcacctatgacaaaacggcaggaaatacaaattctcttctttttttctcattgccttttgagaaacaataaacttacagtagtccttgaatagcacagtcctctggctttgtaccttaacatgttacaaagttcagtcttgtgaaaggagtgtagataccatattggagctattctgagtctggtgcaatggtttctggaatttgccttgaatccacactcggtgcattttcacttgttttttcctattaacttg

SEQ ID NO: 260617 - DNA, 689 bp, Homo Sapiens
  misc_feature (642)..(642): n is a, c, g, or t
ctgaagttaaattgccagaggacagtagctgtacagaagatttaagttcatgcactagtgtgcctgagatgaatgaagacgggaacaggaaagaaagcaactgtgccaaagacctcagaagtcagccacctactagaataccaacactggttgacaaagagacaaacactgatgaagccgctaatgacaatatggcagttcgccccaaagagcgcagcagcctgagctctagacagcatccgtttgtgaggagcagtgtgatagtgcgctcacagaccttttctccaggagagcggaaccagtacatctgcaggttaaatcggagtgacagtgacagttcaaccctggctaaaaaatcactgtttgtgagaaactccaccgaacgccgcagtttgagggtcaaaaggacggtttgccagtcagtccttagaagaacaacacaggaatgcccagtgcggacatctctagacttagaactggaccttcaggcatctctgacccggcagagcccttcaatgatgagctgcaggcgctgagggacttgcggcagaagctggaggaactgaaagctcagggagagactgaccttccaccaaggcgtgctggaggatgagaggttccagaggcttctgaagcaagctngagaagcaggctgaacagtccaaagaagagcaagaagcaaaggtctg

SEQ ID NO: 260618 - DNA, 593 bp, Homo Sapiens
gcgggttgtcataacggtccccgccggagtgaggcgaggccgcgtcgctcagttctggccgtctagggcccctgtaaggatgagagcgcagaggacgcagggccgctggaggcgcaggtaacgaagctagggtgcggttgggaccgcggctgagctttttccgggacccgtggtgctgaatggagaggacggagacgaagccgagccgcggctcctagcggcggcgccgacgctcgagctgtagctgccagttccgaccgtgacaggccaaggcgacggccgccgcccgcccgccccttccgtgcagaagcagctgctcctttccgcgcccgcccgcctgcgctcccggccctggagaccatgaggttccgcatctacaaacggaaggtgctaatcctgacgctcgtggtggccgcctgcggcttcgtcctctggagcagcaatgggcgacaaaggaagaacgaggccctcgccccaccgttgctggacgccgaacccgcgcggggtgccggcggccgcggtggggaccacccctctgtggctgtgggcatccgcagggtctccaacgtgtcggcggcttccctggtcccggc

SEQ ID NO: 260619 - DNA, 475 bp, Homo Sapiens
  misc_feature (69)..(69): n is a, c, g, or t
  misc_feature (156)..(156): n is a, c, g, or t
gaagcacgtaatcctcatcccgaatacttaaggacaatgaaggtattaagtaaaacatggtacatatgnaggcctaagtggccaacaagaataggtaacctctattgaggtgatgtgcccagcccactgttttaatctgagacagtaactattttnaatgcttggaactatgctttagatagtggccctaatatatctgacctcataggtcaaatatatttggtcacataaaatatttccttttcatcattaaggacaataaaaagccattcgagcattttaagctaggggtgcaagtgcaggtaggtgggttgtcttgattaaaattgaacttcgaacaaaaaggagaattctgcttgcagtcgagtgaatacagggagggccagagtcgctgcaggaagaacagttaggagacaactgcagtcatgcaggcaaaaggtgctgatggtagcttagattagggtgtggtgagaag

SEQ ID NO: 260620 - DNA, 941 bp, Homo Sapiens
  misc_feature (890)..(898): n is a, c, g, or t
gttcgtgaacttcccggacgcgcaatgagctgcattaacctgcccactgtgctgcctggctcccccagcaagacccgggggcagatccaggtgattctcgggccgatgttctcagggaaaaagcacagagttgatgagacgcgtccgtcgcttccagattgctcagtacaagtgcctggtgatcaagtatgccaaagacactcgctacagcagcagcttctgcacacatgaccggaacaccatggaggcactgcccgcctgcctgctccgagacgtggcccaggaggccctgggcgtggctgtcataggcatcgacgaggggcagtttttccctgacatcgtggagttctgcgaggccatggccaacgccgggaagaccgtaattgtggctgcactggatgggaccttccagaggaagccatttggggccatcctgaacctggtgccgctggccgagagcgtggtgaagctgacggcggtgtgcatggagtgcttccgggaagccgcctataccaagaggctcggcacagagaaggaggtcgaggtgattgggggagcagacaagtaccactccgtgtgtcggctctgctacttcaagaaggcctcaggccagcctgccgggccggacaacaaagagaactgcccagtgccaggaaagccaggggaagccgtggctgccaggaagctctttgccccacagcagattctgcaatgcagcccctgccaactgaggggaccctgcgagggccgccccgctccccttcctgccactgccgccctactgagacgctgcccctgcattgcttgcccagccactccaaggaaggaagtcgggaaggccttgaaagggtgacccaccccctgggcctttctgggaacctctccctttnnnnnnnnntgcccccacctggccggcattggttccctcccttttctaaaca

SEQ ID NO: 260621 - DNA, 1439 bp, Homo Sapiens
tggaccggtccggatttccgggatgagagtactcgggttcgtgaacttcccggaggcgcaatgagctgcattaacctgcccactgtgctgcctggctcccccagcaagacccgggggcagatccaggtgattctcgggccgatgttctcaggaaaaagcacagagttgatgagacgcgtccgtcgcttccagattgctcagtacaagtgcctggtgatcaagtatgccaaagacactcgctacagcagcagcttctgcacacatgaccggaacaccatggaggcactgcccgcctgcctgctccgagacgtggcccaggaggccctgggcgtggctgtcataggcatcgacgaggggcagtttttccctgacatcgtggagttctgcgaggccatggccaacgccgggaagaccgtaattgtggctgcactggatgggaccttccagaggaagccatttggggccatcctgaacctggtgccgctggccgagagcgtggtgaagctgacggcggtgtgcatggagtgcttccgggaagccgcctataccaagaggctcggcacagagaaggaggtcgaggtgattgggggagcagacaagtaccactccgtgtgtcggctctgctacttcaagaaggcctcaggccagcctgccgggccggacaacaaagagaactgcccagtgccaggaaagccaggggaagccgtggctgccaggaagctctttgccccacagcagattctgcaatgcagccctgccaactgagggacctgcgagggccgcccgctcccttcctgccactgccgcctactggacgctgccctgcatgctgcccagccactccaggaggaagtcgggaggcgtggaggatgaccacaccttggccttctgggaactctcctttgtgtggctgccccacctgccgcatgctccctcctctcctacccactggtctgcttaaagcttccctctcagctgctgggacgatcgcccaggctggagctggccccgcttggtggcctgggatctggcacactccctctccttggggtgagggacagagccccacgctgttgacatcagcctgcttcttcccctctgcggctttcactgctgagtttctgttctccctgggaagcctgtgccagcacctttgagccttggcccacactgaggcttaggcctctctgcctgggatgggctcccaccctcccctgaggatggcctggattcacgccctcttgtttcctttttgggctcaaagcccttcctacctctggtgatggtttccacaggaacaacagcatctttcaccaagatgggtggcaccaaccttgctgggacttggatcccaggggcttatctcttcaagtgtggagagggcagggtccacgcctctgctgtagcttatgaaattaactaattgaaaagttcaagag

SEQ ID NO: 260622 - DNA, 781 bp, Homo Sapiens
  misc_feature (155)..(155): n is a, c, g, or t
  misc_feature (642)..(733): n is a, c, g, or t
atacagtggaatggaatacttcatatgacttcatgtgaaaaatacttcattatacaataaacaaccctcatgcatttcaacattgccacccagtaacactaaagactccccagttctatttcatatgtgatcatcactgcccttacacccccaanccccagctcctccaagcttcaacaggcatcagtatttttcgtagcccctggcttattccatcatgcagccaatgtgggaatctagagattgacttccttggaaacagaggctctagagactaattcttattggctcagctatagacacgttggcagccagacacgttggcacactagtctcatggtactataagcattttttagaggtataaactcaaacagcacactcaagtgtcatttatctttgagtgataatttaacagttggcatttggtggccccacatagctaatgctaatctgaaagtgtccaactgaagtccacaggttaattgcacacttagcaggatatggtgtgatgatcagagaattctttgagattcaccagtgtaaagaatttagcaaaaatgtggctgggcatggtggctctcgcctgtcattggatcccttgagtccaggagttcaaggccagactgggcaacatggtannnnnnnnnnnnnnnnnnnnnnnnnnnnnnnnnnnnnnnnnnnnnnnnnnnnnnnnnnnnnnnnnnnnnnnnnnnnnnnnnnnnnnnnnnnnttcttgagaatttcttgagcccatcaacaggttttgaatgttccagtc

SEQ ID NO: 260623 - DNA, 1108 bp, Homo Sapiens
  misc_feature (309)..(309): n is a, c, g, or t
ggtccccccggccctcctggacctcctggtccccctggtcctcccagcgctggtttcgacttcagcttcctgccccagccacctcaagagaaggctcacgatggtggccgctactaccgggctgatgatgccaatgtggttcgtgaccgtgacctcgaggtggacaccaccctcaagagcctgagccagcagatcgagaacatccggaacccagagggcagccgcaagaaccccgcccgcacctgccgtgacctcaagatgtgccactctgactggaagagtggagagtactggattgaccccaaccanaggctgcaacctggatgccatcaaagtcttctgcaacatggagactggtgagacctgcgtgtaccccactcagcccagtgtggcccagaagaactggtacatcagcaagaaccccaaggacaagaggcatgtctggttcggcgagacatggaccgatggattccagttcgagtatggcggccagggctccgaccctgccgatgtggccatccagctgaccttcctgcgcctgatgtccaccgaggcctcccagaacatcacctaccactgcaagaacagcgtggcctacatggaccagcagactggcaacctcaagaaggccctgctcctccagggctccaacgagatcgagatccgcgccgagggcaacagccgcttcacctacagcgtcactgtcgatggctgcacgagtcacaccggagcctggggcaagacagtgattgaatacaaaaccaccaagacctcccgcctgcccatcatcgatgtggcccccttggacgttggtgccccagacccaggaattcggcttcgacgttggccctgtctgcttcctgtaaactccctccatcccaacctggctccctcccacccaaccaactttccccccaacccggaaacagacaagcaacccaaactgaaccccctcaaaagccaaaaaatgggagacaatttcacatggactttggaaaatatttttttcctttgcattcatctctcaaacttagtttttatctttgaccaaccgaacatgaccaaaaaccaaaagtgcattcaaccttaccaaaaggaaagaagaaaa

SEQ ID NO: 260624 - DNA, 866 bp, Homo Sapiens
agccgtgcgcccgactggcctgcagttagggctcctgtcgctctccaggagcaacctctactccggacgcacaggcattccccgcgcccctccagccctcgccgccctcgccaccgctcccggccgccgcgctccggtacacacaggatccctgctgggcaccaacagctccaccatggggctggcctggggactaggcgtcctgttcctgatgcatgtgtgtggcaccaaccgcattccagagtctggcggagacaacagcgtgtttgacatctttgaactcaccggggccgcccgcaaggggtctgggcgccgactggtgaagggccccgacccttccagcccagctttccgcatcgaggatgccaacctgatcccccctgtgcctgatgacaagttccaagacctggtggatgctgtgcgggcagaaaagggtttcctccttctggcatccctgaggcagatgaagaagacccggggcacgctgctggccctggagcggaaagaccactctggccaggtcttcagcgtggtgtccaatggcaaggcgggcaccctggacctcagcctgaccgtccaaggaaagcagcacgtggtgtctgtgggaagaagctctcctggcaaccggccagtggaagagcatcaccctgtttgtgcaggaagacagggcccagctgtacatcgactgtgaaaagatggagaatgctgaagttggacgtccccatccaaagcgtcttcaccagagacctggccagcatcgccagactccgcatcgcaaagggggggcgtcaatgacaatttcccagggggtgctgcaaaaatgttaaggtttggtctttggggcccacaccagaaagacatccctc

SEQ ID NO: 260625 - DNA, 351 bp, Homo Sapiens
tattgtatttttatgagaaacttgttgtaatgagtctgtaccactttatttgacatttactaaagctgtataaaagccatgcacagtttatttacagtattgtacattaaatgataatgtttgaagatcacacaaagatttcacaaaactataactaatacagaaagatgtgtgaaaacattaggggctttcaaaattttaggtatggaattttgcaaagattattttggcttataagtgttaggcaatcactaacctgaaataagtgacaaaaacatgcagatgattaccatttcaacaaatgaaaacctataaatgtctagctaaaagctaaaatattgtgtagctgcc

SEQ ID NO: 260626 - DNA, 873 bp, Homo Sapiens
cagcccgcgtcgacaaggagctggccgccccgcgcaaggcgccccccggaggactatgcttccaaggccgggagaccaaagcccgaaaattttttcgtggacacccccccggtgcgcgacttctacgcccggattgcattctggaatcgcacgtcccgtcggagaacttctggcgacggagatgcctctaagactcacagtacaaagcatgtgaattcttccttataacgtacaaatcatcaatcattcagaaagactttcatcatgggcatgtaaaaaatacatgaatgaagcacttaaagctgtgtgggctctgttaatctaaattgcaatccatctcaaacctgagcaatcctgaacagttaccaggtcaccttttcccttcaatccttgggcttctgggatcttcagagcctgggtctgaaaggtgtttcctacatgtctcagggctggatgcaaacctggctggggacctgagcatcaactcccatttagaatcagacatctcccttccctgcaaatgtctacaactaccaaattgctccccaacagttagctcaatggattgaatttgcagaagccaactcctaaaatggggactgcctggccatacaactaagaaaaagaactcaatttatagatgcttataaggtgacaccttagtaaaaaatataagctacatacaatataaacctagagtgagttttgtgccctagaagaccctttatcccaagataacctcaacttacccgcatgacaactcacctagagccaaaagaagcttcccagctctcactgcttccaaggaccaaaacagcttcccaagaaaacatccgaaaattccttctgatgaaggggtaatgtctccaagct

SEQ ID NO: 260627 - DNA, 470 bp, Homo Sapiens
  misc_feature (172)..(172): n is a, c, g, or t
taataaataccaacgtaaaatcaaaaggctttctggaagatgtgccttctactgctcagcatagctgcccttcctgcaggccttacctggcttgggccgcgcttgtaccagatcttcctgccaggaagggccatggaactgaccacagagggggctcggggcagggtacacnaaactctgtggctgcaaaatccccagaggagctgctgaggatgaacaggcggggcgcgaagttaaaacttccaggatctttgaaagaaaagagaacaaagctgaagatatcatgtgcatcaaagtaaattccagatgaagaatgaatgtaaaatatgaaataattcaaagcactgtggaaacacaggtaggatttatctgagcttcaaggtggagaaagccttttcaagtgcaatagtaaaagaaccaatcaaaagggaaaataatgcattaattatataaaaatgaaaaacaatgca

SEQ ID NO: 260628 - DNA, 1064 bp, Homo Sapiens
  misc_feature (61)..(75): n is a, c, g, or t
  misc_feature (106)..(203): n is a, c, g, or t
tggtactggtccggaatccttgggatatcgtcgacccacgcgtccggcgagcgcccgcccnnnnnnnnnnnnnnncggtttcctggttggttttattttcgttggnnnnnnnnnnnnnnnnnnnnnnnnnnnnnnnnnnnnnnnnnnnnnnnnnnnnnnnnnnnnnnnnnnnnnnnnnnnnnnnnnnnnnnnnnnnnnnnnnngattaagggcttgagcctccacacccggacctattaattattcttaattaaaacatttaaaggacacagcattgggggtcagcgcagctatttggcagtgggctggctccagtcttcgggtccgcaggtcaccgcgggggcccggtgcctatctgggcccggccgccctggcgggtcagctctatggggattctctggaaaacccttgagcccgacctccttgggccccgcccaacctggggtccccaggcccagcctccgaggccccgctcccaagcgctgccgccagagctccaggctgggctcccccaggcaaaggcgccaccggcgttgtccagcgcagcctcctcctccaggcggcgcgtgtgagtcaagggaaatgaccgtggcgggcggagcagccacctaggacatcgcggaagcctcctgaggggacttccacgggtggtcccaggagcttctacaaacaggggcattgagagtcagttataatatttccgccagttttaccaggcgggcccaagcgttgattaaagtaccgctaaggtcgggggctacctgcaggggccaagttccgaacctgtagggaagagatccaccaagagaaaagggagaggaccgaaaacaacacagattgggacaggcacaataaggccccggacagacaggacgataccaaagaaaataccgaaccgggggaacacggtacatagagaaacgcagatacaccaagggacaacaggagaaaaaacaaacaaccaggaaggagaggaccgacacaaaagaaagagggagagaaaagaacacacatacaagacaaaggaaagaacgacaaaagcggagcgcggcgcggctagcaac

SEQ ID NO: 260629 - DNA, 722 bp, Homo Sapiens
gggggagggatggagccggaagaggggacgcccttgtggcggctgcagaagctgccggccgagctgggcccgcagcttcttcacaaaataattgatggcatttgtggtcgagcttatcctgtgaaccaagattatcacactgtttgggaatcagaagaatggatgcacgttttagaagatattgccaaatttttcaaagccatagttggtaaaaacttacctgatgaagagatatttcagcagttgaatcagttgaattcacttcatcaagaaactatcatgaaatgcgtgaaaagtaggaaagatgaaatcaaacaggctctgtcaagagaaatagttgctatttcctctgcacagctacaggattttgattggcaggtaaagcttgcactttccagtgacaagattgctgcattacgaatgccacttttaagcctgcatctagatgtaaaagaaaatggtgaagtaaaaccttattctattgaaatgagtagagaggagctgcagaatctaatacagtccttggaagcagcgaataaggtggtcctgcagttgaaataactggaaatgatgaataccagtcctatcagattttattgctccaacttatatggcagagtgaatactgcgtgttcagaaaccttgtgatgtcttgactgttgcaccaggctgagaaagcagcaatattgatattataaagataaaaattttatccacatttc

SEQ ID NO: 260630 - DNA, 1268 bp, Homo Sapiens
  misc_feature (125)..(133): n is a, c, g, or t
  misc_feature (137)..(137): n is a, c, g, or t
  misc_feature (222)..(249): n is a, c, g, or t
  misc_feature (377)..(405): n is a, c, g, or t
  misc_feature (465)..(478): n is a, c, g, or t
  misc_feature (895)..(895): n is a, c, g, or t
gggggggagcccaccccttttctttgcccgattttctctggggacaagggtggcccggtttgcccttcctttggggggccggcccccacaagagggttttaaaaatttttttggggggcgggggnnnnnnnnnacanctttgtggtggataatggtggataaaaaaggcgtagggatagaggcgcgctggagatggtagatgtatatgttgggcttggttgnnnnnnnnnnnnnnnnnnnnnnnnnnnngtaagacttctattataacattcttaaatccagttcatattgttccagagtcatgtaacatcaaggtggggacacaaaatatgatagtgaattttacctattttagaggccgaggcggccgacatggnnnnnnnnnnnnnnnnnnnnnnnnnnnnngacagtgctatggtgcctgtttaattgaaatcttgtaataaaagtttaaatacataaaannnnnnnnnnnnnnatcaaaagaacatcccccacttccctgaccagatacatccagaggggaggcaagtggagactggctgtctgtagggagtggagaaatggcaggtccagcttgggctggtgtcctcttcctcagaaagtgctgtgggtgaacccagagtctcagggagcagaagcccccctcgctggctttcttcacgcggggtcctcggcaagctgctctgcactgcggagaacgtgcgccttgtcctcagaagacgaggaagagcagggcctcatgccggggcagtacgatgttctccacagtgcgctccatggcgcgcacctgctccggggaggctgtcaggaacgccaggggcccgatgcgctgctccgcacaggagtggcagaggtagccccccttgttttccttcctgttgcctataggtgnatgggcagcttcttcatggtaaggacggtgtcaacagggatggcattgttgcactgtcccacgcagcagcgcaccacgcctgtttttaagacgttgcttgtcagctctgcttgcaagaagtactccccagccaaagtcaaaatgttttccaatgatttggtcatgatgagacgcttcttggctcgagttactgcaacatacagtaaattccattcatcctcagaaaatgactcaactctgaagtgcggaagctggggcaggttatgccgggcacaaggcactttcacaaaatcatccaaaacatgcacagtgtcaaactccagggctttggctttgtgcacagtgcccagaatgtactctgcaaagtccaaat

SEQ ID NO: 260631 - DNA, 812 bp, Homo Sapiens
gtcaatggcttcccccagattgtaggttggaaagttacctctaaggaagctctgcagagaatcagtgaatactctgaagccgcaattacaatcagaggaacctacttcccctcctggcaaagaacccaagaaaggcgagcggaagatttacttggcaattgaaagtgccaatgaactggctgtgcagaaagcaaaggcagaaatcaccaggctcataaaagaagagctgatccggctgcaaaattcataccaaccaacaaataaaggaagatacaaagtcttatagacatccggaaaaaagatttttacctgtgctggtctatgatgtatgtggcagttgctgtctgcagtttacaatgtattgtaaatgaagattttttaaattctatcttgctgattttttttaaatataagaaactggtacttggtaaagaaatctgtccgtaagtacccccacaatcagtcaaactatatttaaagccagcctgttttcagagtatgatgtcctttaatgtaaactcaaatatcaatattttaaatgtccggataatattctagaggtttaaaaaatggaaatatttgaactttctattgaagacaataaagtacacaagtcgttaaggggctattcactttatcctgtactttcaatgaaattgtgatcatttcctaagaaaaggtaaaattcactatcatattttgtgtccccaccttgatgttacatgactctggaacaatatgaactggatttaagaatgttataatagaagtcttacgaccatgaaaaaaatgagacacatactcgcacgtgt

SEQ ID NO: 260632 - DNA, 711 bp, Homo Sapiens
  misc_feature (62)..(62): n is a, c, g, or t
tttcctcagatttttatttttgcacattcttgtgacatttcccattgtagggaacaggagtntagcaaaatcagcttcttagatgatgtcattctaaatatacatcttaaacaaacaatatcaaaaccaccagtaggaaactgaaaaacactcagtgagtactgttttgtctcagtaacaataaatacaaaaagactggttgtgttccggccccatccaaccacgaagttgatttctcttgtgtgcagagtgactgattttaaaggacatggagcttgtcacaatgtcacaatgtcacagtgtgaagggcacactcactcccgcgtgattcacatttagcaaccaacaatagctcatgagtccatacttgtaaatacttttggcagaatacttcttgaaacttgcagatgataattaagatccaagatatttcccaaagtaaatagaagtgggtcataatattaattacctgttcacatcagcttccatttacaagtcatgagcccagacactgacatcaaactaagcccacttagactcctcaccaacagtctgtcctgtcatcagacaggaggctgtcaccttgaccaaattctcaccagtcaatcatctatccaaaaaccattacctgttacagctaaaacaaaatcagcacatctctgtctgtattagaaacgacaaaaccttacaaagcagtcacctccataccag

SEQ ID NO: 260633 - DNA, 1604 bp, Homo Sapiens
acatggcggccaacatgtaccgggtcggagattatgtctactttgagaattcctccagcaacccatacctaataagaaggatagaagaactcaacaagactgcaagtggcaacgtggaagcaaaagtagtatgcttttatagacgacgtgatatttccaacacacttataatgctcgcagataagcatgctaaagaaattgaggaagaatctgaaacaacagttgaggctgacttgaccgataagcagaaacatcagttgaaacatagggaactctttttgtcacgccagtatgaatctctgcccgcaacacatatcaggggaaagtgcagtgttgcccttctgaatgagacagaatcagtattgtcatatcttgataaggaggataccttcttctactcattggtctatgacccctcattgaaaacactattagctgacaaaggtgaaatcagagtgggacctagatatcaagcagacattccagaaatgctgttagaaggagaatcagatgagagggaacaatcaaaattggaagttaaagtttgggatccaaatagcccacttacggatcgacagattgaccagtttttagttgtagcacgtgctgttgggacattcgccagagccctggattgcagcaagtctgtgaggcagcctagtttgcatataagtgctgctgcaacttcccaagacatcaccttgtttcacgctatggatacattgtatagacacagctatgatttgagcagtgccattagtgtcttagtaccactcggaggacctgttttatgcagagatgaaatggcaggaatggtcagcctctgaagctagcttatttgaagaggcactggaaaaatatggcaaagacttcaaatgaccatacggcaagattttcttccttggaaatcattgactagcatcattgaatattattacactgtggaaaactaactgacagatatgtgcaacagaaacgtctaaaaagcagccagaagctgagaggtaaactgaaacaagtatatatcccaacctacagcaaaccaaatcccaaccaaatatccactagtaatgggaagcctgttgctgtgaatggagctgtggggaccacgttccagcctcagaatcctctcttagggagagcctgtgagagctgctatgctacacagtctcaccagtggtattcttggggcccacctaatatgcagtgtagattatgtgcaatttgttggctttattggaaaaaatatggaggcttgaaaatgcccacccagtcagaagaagagaagttatctcctagcccaactacagaggaccctcgtgttagaagtcacgtgtcccgccaggccatgcagggaatgccagtccgaaacactgggagtccaaagtctgcagtgaagacccgccaagctttcttccttcatactacatatttcacaaaatttgctcgtcaggtctgcaaaaataccctccggctgcggcaggcagcaagacggccgtttgttgctattaattatgctgccattagggcagaatgtaagatgcttttaaattcttaaccttatatgttgtgcttctgaccattttctcttttcctctctttcc

SEQ ID NO: 260634 - DNA, 715 bp, Homo Sapiens
  misc_feature (571)..(571): n is a, c, g, or t
  misc_feature (672)..(672): n is a, c, g, or t
  misc_feature (681)..(681): n is a, c, g, or t
  misc_feature (698)..(698): n is a, c, g, or t
accccatgccaccccaccatggtgagtgctctgtgcctcctgctcacctgtggtgagctgggcgagctgggcgagctgggcgagctgggctggggagagcctgtgaggaccgagaggagaaatgagaagaaggaacaaaaatattatttctatgtaatttatattttacttatgccaaattatttatgataatttgccattgctatactgtaccagtgtcaaatgctgcagcctgccaagctgtgattttgtgaggcttgtccctatgtaggatgcaccgcaggcccctggcacattgaaagagtgtgcagtggactgtgggtctcccatatgcggtgccgcccaaaggtggctttgcctcaagcaacctaccctgatgttttactcattggaatgtttttccccgattgtggatgacttcttttctgatggagagagtccaggagggatggaaaacgcctggatttaagctcagcatcccccacatgggcttttcgatcatcttcaggcctgaagctgcacgacctgaagttcgcctgcatttatcagccctctttgtgctggctccttngccaccttggggtttcctgctgggggaccatgtgtggttgtgggcatggtgtgaagcagaaggggaggatgtaggaaaaaagagaaggaaacccccgttantgacaagtntttttttgagttgccangttttgccatcattaaa

SEQ ID NO: 260635 - DNA, 897 bp, Homo Sapiens
  misc_feature (769)..(769): n is a, c, g, or t
  misc_feature (775)..(775): n is a, c, g, or t
  misc_feature (796)..(796): n is a, c, g, or t
  misc_feature (802)..(802): n is a, c, g, or t
  misc_feature (808)..(808): n is a, c, g, or t
  misc_feature (817)..(817): n is a, c, g, or t
  misc_feature (826)..(826): n is a, c, g, or t
  misc_feature (838)..(838): n is a, c, g, or t
  misc_feature (852)..(852): n is a, c, g, or t
  misc_feature (874)..(874): n is a, c, g, or t
gccgctccaggcccacttgggattgctgggatcactggagcacggggtcttgcaggaccaccaggcatgccaggtcctaggggaagccctggccctcagggtgtcaagggtgaaagtgggaaaccaggagctaacggtctcagtggagaacgtggtccccctggaccccagggtcttcctggtctggctggtacagctggtgaacctggaagagatggaaaccctggatcagatggtcttccaggccgagatggatctcctggtggcaagggtgatcgtggtgaaaatggctctcctggtgcccctggcgctcctggtcatccaggcccacctggtcctgtcggtccagctggaaagagtggtgacagaggagaaagtggccctgctggccctgctggtgctcccggtcctgctggttcccgaggtgctcctggtcctcaaggcccacgtggtgacaaaggtgaaacaggtgaacgtggagctgctggcatcaaaggacatcgaggattccctggtaatccaggtgccccaggttctccaggccctgctggtcagcagggtgcaatcggcagtccaggacctgcaggccccagaggacctgttggacccagtggacctcctggcaaagatggaaccagtggacatccaggtcccattggaccaccagggcctcgaggtaacagaggtgaaagaggatctgagggctccccaggccacccagggcaaccaggccctcctggacctcctggtgcccctggtccttgctgtngttgtnttggagccgctgccattgctnggattngaggtnaaaaagctngcggttttnccccgtattatngagatgaaccaatngatttcaaaatcaacaccgatnagattatgacttcactcaagtct

SEQ ID NO: 260636 - DNA, 1129 bp, Homo Sapiens
  misc_feature (427)..(427): n is a, c, g, or t
  misc_feature (501)..(501): n is a, c, g, or t
  misc_feature (729)..(823): n is a, c, g, or t
  misc_feature (831)..(839): n is a, c, g, or t
  misc_feature (868)..(915): n is a, c, g, or t
acctgccctgacctccgacagtgctgggattacaggcatagcacccgtgcctgaccagggctcttttagcaaggaaaacgtgaggaatgaatggctgttggtgtgcaacaaatcatacttgctacatgttgtgaaacctgaagttatttgttagtctgtatgaagaatgtaccccagagatgcaccctgtatctgccttatgtctcttacaatggaggttctctcctgttatattgctgaataaactatgtgaactgctaaattgactgaagactagttagtttatcactaactctttaatgaagaatttcactatcctacaactcctcctaaaaagtgaaaatttactttggagagagtgctttcgagaatagtattatgatcagtattattgcccctaaattttttaattattagagaatgcctnatgttacaaggacatatactaagaaacattctacaaatgtgaaaatttaaatatcagcaaaatagagaaaaggnttttgtttttgttttagtcaatatctccgattaaatagtaagatcagattaaaaggatttatatcattgatttctcaaatcaatacctaagtagtacctgtgagagcttgtttaaaaatggagatttcttggtctgctttagaaattttgattcctcaggttgcttgtagggcccaggaatctgcatattataaataacacctcatgccgggtgccatggcatgtacnnnnnnnnnnnnnnnnnnnnnnnnnnnnnnnnnnnnnnnnnnnnnnnnnnnnnnnnnnnnnnnnnnnnnnnnnnnnnnnnnnnnnnnnnnnnnnntttcaagnnnnnnnnncaacataaaagatataaatagtacctttnnnnnnnnnnnnnnnnnnnnnnnnnnnnnnnnnnnnnnnnnnnnnnnntagtaatatgtccatagtgtttacttatctggcttaaaaggatgggagcagaatactcatagtactgcaagatagtaccatttatttggtaatactggctatgtaaaaagagatttcatgtcagactgaagatcactgttaataatttaggtcataactcagccacatttttctcattaattaaactaatcaggaatgtttcagtcttcttcac

SEQ ID NO: 260637 - DNA, 1225 bp, Homo Sapiens
  misc_feature (79)..(79): n is a, c, g, or t
  misc_feature (212)..(222): n is a, c, g, or t
  misc_feature (331)..(342): n is a, c, g, or t
  misc_feature (390)..(414): n is a, c, g, or t
  misc_feature (592)..(612): n is a, c, g, or t
ccgggctgcctgcccccgggcacaattgttagagatagcacgtccataagggggtctcggagctagatactgggggcgnactcctaggtctggttggttgtagtgggcggagggtatattatacattatgtgcagggggccgaggaggttgtggggggcgcgaaacgacggcgtgggaccgcccgccagcacaaacaggcagatcttcatcnnnnnnnnnnncgcgtgttacttcccgacccgacgacgtgcggggggccgcggcgtacgctcaccgcactcggatcgggggcggataccagaagtcatgtacattggccgggccgccctnnnnnnnnnnnntgggggggggtgtccccgatctggcgccgggccacgtaacaaatcaannnnnnnnnnnnnnnnnnnnnnnnntacccccgcgacattcaaagcggcgactggggagaccggtggacgacccgtgattctactaatggagcacccctcccccgcgggcccctttgagtttagggagagggggtgctggctcggccccgcccggcctggcttcacagaggggtgtgcgggattgacactggttcttttcatnnnnnnnnnnnnnnnnnnnnngcagcatgtcacgtccgttgtgaccgaggcctggtcgtcgaaggggaggccccgcctggccaggctaccttcccactggagacaggcagggggacaggtgctaagggacctggcaggcagggctggcaggccccatggcgcctgttccagcagatgacaagcccaggtcagggtagagcgggcaggaggggggacgagggctcccacaacatgattttgtgtaaaatatggcagcgacacacgctcagggccgggaggtgggggttagggtggggacggcggcaacatcgtgtaaaaaagtgtcccagttcccatagcaaagagagctgtgaccgggtgttcgagcttctccagtacaagggggaaagccgcccggcgggggcggcgggcagggacatcatttggtttcctggtgctgtcagtccgcggggcgggcccctagctcccgtagtgcatggtgttggtcgggatggacatgggcgaacgccatggagaaggcggggccgcccatggtgaactggctgttgactgcatagtgggcactcgtgctgccaccaccactgccctgggcgccggaggaccctaaaggaatcaggttgttgggcccacgctg

SEQ ID NO: 260638 - DNA, 1196 bp, Homo Sapiens
taccggtccggaatttccgggactatcgtcgacccacgcgctcggccacacctctgcctgcctcatgccccttccccctggcctaccaaggacagcccacatgcccgcactgccggctcacttgggtccttcctcgatagctttgggcagagcccttgcttcctggctgcttcagggctcaggggctcccagccctccttcccaggctgatgctgggtcctctctctctttggggcttctccctcccgtttcaggggaaaggtctgagtctccacgtttcagaccagcttctgggggaaggcagtccggcagggagaccgggaggggtggccacacagtggggagctgggaggtggggggaatggtcccagactcctctcggggcccctatccacacagggcctggtgttctaccccatctggcccctggcccatctcttctgtgccttagtcacatatgaaagcgcccctccctggctccccatctgtcccacacgctccatggggctcttagttcagctgctggcactcgcaggatcctgcagtgctgggcccagagcccttggacaggcctcaggagtggtcaggaccaccaagcccctcctctccccctccacacctctagacctggggcctccggaacccccagcaggctgggcttatactagctcctgacttaggaagagcctcgtgtcacaacacgtgtccctacaggcaaagtgtcctggcatttaaaaccagatatcctgggttgggctgcagtcacctggaaagctggaccgtaacggcacaggaacttggcggatgtcacacggaggaccatccattagggccactccgggaatgaacagggtccctccgtgacactgtaccagacattagcgccaagcagggaatccagagcaacactaactcatacacagatgacaagacgccacgatgtaggtcacagagacagaatcacgcacacatgtgtgagcgggaacacagtgaccaacagccgcaaggcggagttgaacaacggatggacacacgtggctgaccagcctactctaccaggtgacaaagtaagtacttaccacgacagagtgagttatcatttgtacaaccacgatgttgatgagtgaaacactaatcggtgttgtgctctcttctcttactaattaatgtttttgcgtataaaaaaggaggacaaa

SEQ ID NO: 260639 - DNA, 780 bp, Homo Sapiens
cagcgtaagaggagagagacacattcagcagccaaaggactcggtggaaagagcagaacaccatagacaatatgtcgctcttgggacccaaggtgctgctgtttctagctgcattcatcatcacctctgactggatacccctgggggtcaatagtcaacgaggagacgatgtgactcaagcgactccagaaacattcacagaagatcctaatctggtgaatgatcccgctacagatgaaacagttttggctgttttggctgatattgcaccttccacagatgacttggcctccctcagtgaaaaaaataccactgcagagtgctgggatgagaaatttacctgcacaaggctctactctgtgcatcggccggttaaacaatgcattcatcagttatgcttcaccagtttacgacgtatgtacatcgtcaacaaggagatctgctctcgtcttgtctgtaaggaacacgaagctatgaaagatgagctttgccgtcagatggctggtctgccccctaggagactccgtcgctccaattacttccgacttcctccctgtgaaaatgtggatttgcagagacccaatggtctgtgatcattgaaaaagaggaaagaagaaaaaatgtatgggtgagaggaaggaggatctccttcttctccaaccattgacagctaacccttagacagtatttcttaaaccaatccttttgcaatgcccagcttttacccctactctctactttttcacccaaactgataacatttatctcattttctagcac

SEQ ID NO: 260640 - DNA, 499 bp, Homo Sapiens
atgtcgctcttgggacccaaggtgctgctgtttcttgctgcattcatcatcaccctctgactggatacccctgggggtcaatagtcaacgaggagacgatgtgactcaagcgactccagaaacattcacagaagatcctaatctggtgaatgatcccgctacagatgaaacagttttggctgttttggctgatattgcaccttccacagatgacttggagtgctgggatgagaaatttacctgcacaaggctctactctgtgcatcggccggttaaacaatgcattcatcagttatgcttcaccagtttacgacgtatgtacatcgtcaacaaggagatctgctctcgtcttgtctgtaaggaacacgaagctatgaaagatgagctttgccgtcagatggctggtctgccccctaggagactccgtcgctccaattacttccgacttcctccctgtgaaaatgtggatttgcagagacccaatggtctgtgatcattg

SEQ ID NO: 260641 - DNA, 881 bp, Homo Sapiens
  misc_feature (657)..(665): n is a, c, g, or t
ggctcagggcaagcggcctgattgggctgtctctggtcttcagaatcgaccacggaaatttgacacctccgggcttggaagcagctctctcctccttccccgctgcttataaacctcagccctgaggctccagctcactctaccccatctccttgccgggtcagccctgacaaaggtcagctagccccttgaggacatcagctttggcctcagggtcctaatggcagcagaaccactgacagagctagaggagtccattgagaccgtggtcaccaccttcttcacctttgcaaggcaggagggccggaaggatagcctcagcgtcaacgagttcaaagagctggttacccagcagttgccccatctgctcaaggatgtgggctctcttgatgagaagatgaagagcttggatgtgaatcaggactcggagctcaagttcaatgagtactggagattgattggggagctggccaaggaaatcaggaagaagaaagacctgaagatcaggaagaagtaaagccgcctggctgagatggggtgggcagggcagagctgatcagggccgagcagaaccgcactcttcccaaataaaaacttcctccttgggaaccacaccatgcatgaagaacacatgaccagggccacgatatagccgannnnnnnnntcgccaacgccgataccaaaaaactaaacccaatccaaccgatgcaagggaccccacgggtcctttgccactccaatctacccaatatccgtgaccactaccacggcgggaaaagtaatagagggaatccccggatcacagagcgctataggtggcgcggagctcgttttgccgcccgcgcagaaacaaaattcgctaacaaaaaaacccagcggt

SEQ ID NO: 260642 - DNA, 1003 bp, Homo Sapiens
  misc_feature (96)..(107): n is a, c, g, or t
  misc_feature (347)..(348): n is a, c, g, or t
  misc_feature (358)..(358): n is a, c, g, or t
  misc_feature (368)..(369): n is a, c, g, or t
  misc_feature (374)..(375): n is a, c, g, or t
gtgtctgtcgcaaacgccccgccacagaattttcttttgccacagaaaaaaaagagaggttctccccaagaaaggattctccttttgagatccccnnnnnnnnnnnngcccgcgcctcatttagggggggggttaaaatttccccggggtgaccgcaacgccggattccattaattgcaagggttaccccgggcgttatccgaaaattaattcggactcccctatagggaggcccgcaagatttccccctttgtacaagaaagctgggtcagggaaccagctatggccatgtgccattccattacctcttttttcgccccccgacatagatgcctcgagtttttttnnttctcttctnccctcctttnntcttnncaaggaggaagctttattggggaagagtgcggttctgctcggccctgatcagctctgccctgcccaccccatctcagccaggcggctttacttcttcctgatcttcaggtctttcttcttcctgatttccttggccagctccccaatcaatctccagtactcattgaacttgagctccgagtcctgattcacatccaagctcttcatcttctcatcaagagagcccacatccttgagcagatggggcaactgctgggtaaccagctctttgaactcgttgacgctgaggctatccttccggccctcctgccttgcaaaggtgaagaaggtggtgaccaccgtctcaatggactcctctagctctgtcagtggttctgctgccattaggaccctgaggccaaagctgatgtcctcaaggggctagctgacctttgtcagggctgacctctcctcagcggcagcagggcagagtgctgaacccaggaccccacagatcctccccgctcctgtctcccggtgacaagggtcctggaacggggcgtctctgactccctgctccaggacgggtttagtacaggcactcacaaccccctggggtgcggcctcgtgccgaattcgccacccaggc

SEQ ID NO: 260643 - DNA, 443 bp, Homo Sapiens
aggggatcgagttatgccagaggaaatagctcgctactataaacattatgtaaaagtcatgggtcttcagaagaatttcagagagaatacttacataacttccgtatcaagactctacagagatcaagatgatgatgatattcaagacagagatatttcaacaaagcatttacagatagagaagtcaaactttatcaagagaaactgggaaattaggggttatcagcgaatagctgatggttctcatgttcccttctgcctctttgctgagaatgtagcgctggcaactggaacgctggattctcctgcccatctggaaattgaaggggaagattttccttttgtgtttcattcaatgcctgaatttggagctgctataaacaaaggaaagttgcgtggcaaagtggatccagtgttaattgtaagttctgggcttactgccg

SEQ ID NO: 260644 - DNA, 963 bp, Homo Sapiens
  misc_feature (697)..(744): n is a, c, g, or t
  misc_feature (784)..(793): n is a, c, g, or t
  misc_feature (835)..(860): n is a, c, g, or t
gggacttacgcgtcgctcttcctcgtttgcccctcgtgttcatgggagctcgttttcttttcctctaggcagagaagaggcgatggcggcgatggcatctctcggcgccctggcgctgctcctgctgtccagcctctcccgctgctcagccgaggcctgcctggagccccagatcaccccttcctactacaccacttctgacgctgtcatttccactgagaccgtcttcattgtggagatctccctgacatgcaagaacagggtccagaacatggctctctatgctgacgtcggtggaaaacaattccctgtcactcgaggccaggatgtggggcgttatcaggtgtcctggagcctggaccacaagagcgcccacgcaggcacctatgaggttagattcttcgacgaggagtcctacagcctcctcaggaaggctcagaggaataacgaggacatttccatcatcccgcctctgtttacagtcagcgtggaccatcggggcacttggaacgggccctgggtgtccactgaggtgctggctgcggcgatcggccttgtgatctactacttggccttcagtgcgaagagccacatccaggcctgagggcggcaccccagccctgcccttgcttccttcaataaacatcacaggacctgggactgcacaggaacccacatccccatactacatctgccnnnnnnnnnnnnnnnnnnnnnnnnnnnnnnnnnnnnnnnnnnnnnnnntccacacagcctcatatccaccaccttccaattagctaannnnnnnnnnacattcaatatttgtggggccgcccccgccccccaaaaaaannnnnnnnnnnnnnnnnnnnnnnnnnggcgcccggggccccccccttgcggcagtgggaaaccgggcgcatataactcgtttccccaaaggaaacacccgcgggcctcataaattaagggcttgggcat

SEQ ID NO: 260645 - DNA, 1149 bp, Homo Sapiens
  misc_feature (153)..(196): n is a, c, g, or t
aacacccattagaccaattaattgcaaacacagcggcaacctggggagaagttgaaactccagttttgtggattacagttttgagttttatgattgacatttttaagtcccctatttaaggggtcaagattataacaatgtgtgtcttactannnnnnnnnnnnnnnnnnnnnnnnnnnnnnnnnnnnnnnnnnnnttgtttttttgaatgaacataagatagaaacaaaaacttctcatccagttaactagagtgaatgtagggagaattgttttgcttgtaacatggagagtttattttcaagtgaggaaagagaaaaaaattactcagacttgttcctggtgaagtgcattctctgtttgtatactttttgatggagaaattgatctatagaactgcttaattttttgaggcatttagacagcaatgaaaggtagttctccacaggacaccgaatcaaaaggagagaccagactctggcctcatacccagcctatttgaaacaagctatctagtttctcctgcagacaccttgtcaacaacatgcaacagtgtcaggtgccttgcaggaaaataatctgagtcccaagctagcctgtgctcatccacaatcacaatgaacatgtcaaggaagaatttgcagagactcaagggaagcacaatgggataaggtaatcactttcagtgaaaaactgttttcttgaaaacaggcttggacacaattgaaagctggcttcctgcaaacacaccaagagtctgtaatctagcctatccattatatgtcctttattattcatgatatcctattcttctaccttgttgcctggtaactttttctgaggactgagtttctgcagcgatgtggtgcactcttcctgtgatgaggaaacatctgggcccccttctgcaggctttggaagatgatgtgtcttgtcaaggggtaaagggcaaatggatttaatttctgcttaaaactatcatagacgttccaaatagaatatgtaaaatttctctgtattagaaaaagaaacgtgataccaattgtatattttcttttctttatttattctctgtaagtctgtcagatgataaattgtaaataacaatgattaaagagtcatgctactgatggatctccctttctgtat

SEQ ID NO: 260646 - DNA, 539 bp, Homo Sapiens
  misc_feature (447)..(447): n is a, c, g, or t
aacagcaatgaaaggtagttctccacaggacaccgaatcaaaaggagagaccagactctggcctcatacccagcctatttgaaacaagctatctagtttctcctgcagacaccttgtcaacaacatgcaacagtgtcaggtgccttgcaggaaaataatctgagtcccaagctagcctgtgctcatccacaatcacaatgaacatgtcaaggaagaatttgcagagactcaagggaagcacaatgggataaggtaaatcactttcaagtgaaaaactgttttcttgaaaaaaggcttggacacaattgaaagctggcttccctgcaaacacaccaagagtctgtaatctaagcctatccattatatggccctttattattccatggatatcctaattccttctaaccttggtcggccttgggtaacttttttccggagggactggangttttctgcaagcgaatgttgggtggaactccttcctggtgaatgagggaaaacattcgggggccccctttctggcagggctttggaaagaa

SEQ ID NO: 260647 - DNA, 589 bp, Homo Sapiens
cacacacacactctcacactcgcccagagacaaacttaaggtgaggagaaagagcgctagcttcacttgatctccagtttccaacttaagcagaacttgagagcatccgaactcctggatttcaggacaagtgaagaagattctttgggctataaagatgaagagtctacttcttctggtgctgatttcaatctgctgggctgatcatctttcagacaactatactctggatcatgacagagctattcacatccaagcagaaaatggcccccatctacttgtggaagcagagcaagccaacgtgttttcacacagaggtggcaatgttacactgccatgtaaattttatcgagaccctacagcatttggctcaggaatccataaaatccgaattaagtggaccaagctaacttcggattacctcaaggaagtggatgtttttgtttccatgggataccacaaaaaaacctatggaggctaccagggtagagtgtttctgaagggaggcagtgatagtgatgcttctctggtcatcacagacctcactctggaagattatgggagatataagtgtgaggtgattgaagga

SEQ ID NO: 260648 - DNA, 459 bp, Homo Sapiens
  misc_feature (350)..(378): n is a, c, g, or t
  misc_feature (393)..(393): n is a, c, g, or t
ttcagaatcagatatgtttaatatctgcatataacttaatatgcatttcttccattacaatttttaagtataatccaaggctttaaaaggtatcttttttttacagtaatttaaaattatagaagatgcctttcctataattgaagttattgatcaattgaaggtataaccagactgaaatatacagcaacttcttgaagaatggcaaaaataaagtgaaagttctaaattcttctctgaatttttcagctattgctaatggaaggtgctgccaatataataggcaacacaggttcgtctaacacaggtcggtctaacactggtccaagtaatcaatcatcatatcttannnnnnnnnnnnnnnnnnnnnnnnnnnnngagacggagccggcntctggtcgcccagggctgggagtgcagtgggcgtggatctcgggctcactggcaagctctgcctcc

SEQ ID NO: 260649 - DNA, 382 bp, Homo Sapiens
ggtgggggtaggaatgcagtagagaaacaaaaacactgcacaaagggtgcagtgttctactattcatctaaataatggagaactggcattttacaattaagatataaaaaatattcatactttcagaatttccaagtcagaggtggcttacaacagctttcattagaaaagggtgagacgcccaaataaaatgctccctggtggaacaaagtcccctttaaacctttaccaagctctttctcagaagctcacaaaacttaagacaatgtgaacatgatgagaaagcaaagctctccaacataaggctgaaaatgacaataaaagactgcaataaaagactagtgggatgaacatgaatgcttgtcagtgacaaacacattat

SEQ ID NO: 260650 - DNA, 904 bp, Homo Sapiens
gtcaatggtcctcttcaccagaaaggaatgtacgtagaaagagcctcttatccgcgcttccgtcgcatgcaccccgcttgttatcgccaggccgaggagggaaacaatggttctttctagggacacttcggcccaaagggtatcccaagaagctttccccctcaaaagtcctctgaatattaaagccattttgagtttttcagtgccattaaaagatttctggactcaggaaaaaggttcaaccccttattttcaaattcccggggtagtccactaagagaattccattatctgttgcggttcatccaaccaccgttgttccctttgtaagtcttcctttaacttgtcattctgtgactccgtaggggacagtaccatttcaagatcttgtctcagcttctggaactcttcttttcctaatgttatgagaacgtcttcagtcaagggaattgtttcaggtgttttttctgccattgactgagttcagcggttaaacattttacttgcataattaacaatgatagctgagcatttgaatcggtgagtgtttcagttccaataagtgataatttattctgacattcttccatatctttccacatttcttcacattctctaataagttcttcttcagtatttgtaacatctcccacatctgtagtactatccggatctagatcctcctgattcattgatatatgctttgtgaatttttagccttataagaaaaacgcttgaggatgcaagatgtaagctgtatgtaacctggaagagggtcatcaacagaaccagaaaatgatggcacccagaacttgaatctccagcctctagaccatcacagcgtcacaaactccaggtcgcctaggcgctgcgcaggaagcgcttgccagccccggacttctgc

SEQ ID NO: 260651 - DNA, 456 bp, Homo Sapiens
cctctccttaccacctctctggttggaactaattcctctgcgtggaagctgccccctctaaatgatgttttaattctttttgctctgagacgaaggctatgggcgcagatgacctcctttgaggattttcctcttagcacaatagggaatctctaggggggaattttctcaccctgccccaaggaaaaaaattggttatgtaaacggttcacgtaaatttccccacatcacagaagattaaaattcagaaaggagaaaacacagaccaaagagaagtatctaagaccaaagggatgtgttttattaatgtctaggatgaagaaatgcatagaacattgtagtacttgtaaataactagaaataacatgatttagtcataattgtgaaaaataataataatttttcttggatttatgttctgtatctgtgaaaaaataaatttcttataaaactcgg

SEQ ID NO: 260652 - DNA, 484 bp, Homo Sapiens
gcacttcctccgaatcatttccttcctctgctggcttcttgggcatgatcttcggggagattccctggagcctgccgaaagtcatctgaggacgttcaacctgattcccacggttagggtcattatccaaatcattcccctggaagtcttcggcccgtttattacacatgaaaggtgggaggctggccttgaaacctagtttagtcatagcctcatactttctcttcatatacacatagaagattttctccgaggctttcatcttttcccactcttccttagagaagtatttggcaatatcatcgaaggccttttggatcttctctggtatttgagcaccaaccgtgggtctccttgcaaaggcgtcgtctccgttcatggcaccgggagcagtctgactctgattttggaagaatccaaagagaaaatcagaccgtgcgtactctgagtatggaagaatcgaaaaaaatggtggagcggcggc

SEQ ID NO: 260653 - DNA, 1062 bp, Homo Sapiens
  misc_feature (32)..(32): n is a, c, g, or t
  misc_feature (59)..(59): n is a, c, g, or t
  misc_feature (64)..(64): n is a, c, g, or t
  misc_feature (85)..(85): n is a, c, g, or t
agtagggatgacaggtttccatccagttaatncttgagccagagagcctgaatacagtnagatnagttgtaggatatccttgagncagagtattcctcagaacagaacatggtaagtacaaaggccccaaggcaggaacaagcttggtgaatgtgagaaatatgcaagctggttaatgtggctgaagcacagtgaccaagggaaagtttaacagagatcacggagggtgcttgagggctggattatgtaggccattaaggagcatcacaggccactgcagagattttgtcttttaaatgagatagagtgctcttggagaatgtgactggagaggccgatggtagcagtggagatgcagagtagtagccgagatattttaaatgaaattgatttagtataggctgactgaaagagaaatcaaggattaattgtaggtttttacactgagcacttgaaaagagctgctatttgctgatatgagtaaggagtagtcttggaggaagaaaaccaagagtactgttttgaacaaaatgttgaagactcctggtaaatatcgaagtgtaaatatcaaataggaagtcagaaatatgagaatctggagtttaggaaagagaagggggttaggtttgtaagatctcatatcagtctgattcttatttttttgtagataatctaccctttctttctgtaaatgtttagaagcatgatgtctatgtgtgtatatatacacacacactcactcccccccgccaggactgcctcagttttcatctcagtatttgactaaaaccttctattcaacttcagtttcagccttagaataaccagatgtctaagtcaatgtcatttggggcatctctagacttgtgcaatcacaaaagtcaccattaccgctacatagtacgtattatgaccaatggatatcattcagagttctagtttacatatgctattatcaaacatatgtaagccttttaatgtaacttgggagtgaaattagtaaaattctatcaatttacataaattaattttactgtaaaaataaaatacattatgaaagtt

SEQ ID NO: 260654 - DNA, 901 bp, Homo Sapiens
  misc_feature (695)..(697): n is a, c, g, or t
ggaaacgtttatcatgaatcaacagggtttcagtccttatcaaagagagatgtggaaagagctaaagaaaccaccctttgttcccaactccactttacccatattttatgcaacacaaacactgtccttttgggtccctttcttacagatggacctcttgagaagaattatcgtattccacgtttttagccctcaggttaccaagataaatatatgtatatataacctttattattgctatatctttgtggataatacattcaggtggtgctgggtgatttattataatctgaacctaggtatatcctttggtcttccacagtcatgttgaggtgggctccctggtatggtaaaaagccaggtataatgtaacttcaccccagcctttgtactaagctcttgatagtggatatactcttttaagtttagccccaatatagggtaatggaaatttcctgccctctgggttccccatttttactattaagaagaccagtgataatttaataatgccaccaactctggcttagttaagtgagagtgtgaactgtgtggcaagagagcctcacacctcactaggtgcagagagcccaggccttatgttaaaatcatgcacttgaaaagcaaaccttaatctgcaaagacagcagcaagcattatacggtcatcttgaatgatccctttgaaattttttnnnagtttgtttgtttaaatcaagcctgaggctggtgaacagtagctacacacccatattgtgtgttctgtgaatgctagctctcttgaatttggatattggttattttttatagagtgtaaaccaagttttatattctgcaatgcgaacaggtacctatctgtttctaaataaaactgtttacattcaaaacccggaaaaaaccat

SEQ ID NO: 260655 - DNA, 1181 bp, Homo Sapiens
ggaagagtggtatcaacgcagagtgtccattacggccgggtggcgccccggttcccggtccgactgggcacctctcctggccaggggtggagcggccgcggggcggggggatggcacaaaagaaatatcttcaagcaaaattgacccagtttttaagggaagacaggattcaactttggaaacctccatatacagatgaaaataaaaaagttggtttggcattaaaggaccttgctaagcagtactctgacagactagaatgctgtgaaaatgaagtagaaaaggtaatagaagaaatacgttgcaaggcaattgagcgtggaacaggaaatgacaattatagaacaacgggaattgctacaatcgaggtgtttttaccaccaagactaaaaaaagataggaaaaacttgttggagacccgattgcacatcactggcagagaactgaggtccaaaatagctgaaacctttggacttcaagaaaattatatcaaaattgtcataaataagaagcaactacaactagggaaaacccttgaagaacaaggcgtggctcacaatgtgaaagcgatggtgcttgaactaaaacaatctgaagaggacgcgaggaaaaacttccagttagaggaagaggagcaaaatgaggccaaactcaaagaaaaacaaattcagaggaccaagagaggactagaaatactggcaaagagagcagcagagacagtggtggatccagaaatgacaccgtacttagacatagctaaccagacaggcagatcaatcagaattcccccatcagaaagaaaagcccttatgttagctatgggatatcatgagaagggcagagctttcctgaaaagaaaagaatatggaatagccttgccatgtctgttggacgctgacaaatatttctggtaggcgcttttgtacttggtgaacaccagctttaaggaagatggcccagactatacagaacacctgccatgcccttgagactgcagactttcatctacaacagtggttaatgtaaaagagtagttatggtgtaaactggtgaatttcttcttccctttgtatttctaattgacctttcctccctgtaaagaaaagaattttcagcaggtaggatatcctctcttcttctgtacatgtgctatgttgctagtcggaacttttccattataa

SEQ ID NO: 260656 - DNA, 1015 bp, Homo Sapiens
tcatttatttctttaattctaggaaacagtattttttttaatccagtgtattcgcttggtttttctagctttattactgctttgtttccaacatgctgttatatagtggtgacaaaacaaacaagatgctcaatctcatggaaattatgaggcagacagattagcaacagtggggatattttgcaggggagagggagacccatacattctaggtgaaatgtgagctaagacccaaattagcaagcagctatcatgcacgtatctgagtgaggaacacagctaaacgtcaattccaaacaataacgaattgatcaatgatgaatttaatctcagagttgctggatgcctctcttcaggtctgctcagacctcaattttccaatcttgtcccccaagaaaaagattaaacctgtcttgtgctgagtagtgtaatattccagtacggcttctcttgcgccctagtgctagtacgaagagaaatcaatgaaaaatgtagaaacaagtttgagtacaataggaacaggaaaaagcaaagcttcttgccacgccatgctcccaaatgtgcctgtgtctgattctcagcactaactactcatgtgagacatctcaacttgataaaacattaaaatggatttttgtctcataccattcaaataccccagacagaataattttagtgttcagtggcactcccaaatcctaactcaagtacagtaataaatggtagagacttaagagaggccaagatatacatgtaactgatctggtctcacgagggattctcttacgatgtatttcatctacagtaaaagaaatcatcttattaacattccccaaacttcattacttaacacacctatcatagtttttgctatgcagaattaatccatggtaatacggattatgaaagtgaatcaccctgagatggggttattaactaaaagggcaaagagaagctaatgaaatgctaatgtggatggtaaagtggtggatatatactgggcgcagtggctcat

SEQ ID NO: 260657 - DNA, 472 bp, Homo Sapiens
ttcattcagaagttcagactctaaaggatgatgttaatattcttcttgataaagcaagattggaaaatcaagaaggcattgatttcataaaggcaacaaaagtactaatggaaaaaaattcaatggatattatgaaaataagagagtatttccagaagtatggatatagtccacgtgtcaagaaaaattcagtacacgagcaagaagccattaactctgacccagagttgtctaattgtgaaaattttcagaagactgatgtgaaagatgatctgtctgatcctcctgttgcaagcagttgtatttctgagaagtctccacgtagtccacaactttcagattttggacttgagcggtacatcgtatcccaagttctaccaaaccctccacaggcagtgaacaactataaggaagagcccgtaattgtaaccccacctaccaaacaatcactagtaaaagtactaaaaactcc

SEQ ID NO: 260658 - DNA, 519 bp, Homo Sapiens
  misc_feature (450)..(450): n is a, c, g, or t
  misc_feature (473)..(473): n is a, c, g, or t
  misc_feature (476)..(476): n is a, c, g, or t
  misc_feature (484)..(484): n is a, c, g, or t
  misc_feature (487)..(487): n is a, c, g, or t
ccgcacagtcctgggagccgattcaaaaagcggtgaggtcgatgccacgtcagaccaggaagagtcagttgcttgggccttagcacctgcagtgcctcaaagccctttgaaaaatggaattaagaaggaaatacttgacccaagtgggatatactgctacaaggtgcagagtattttgagtgtgcaggtaacagagctggaagggatgtacgtgtgactccgctgccttcactggcctcacctgccgtgcctgcccccggatactgcagtcgtatctccggaaagagtcctggtgacccagcgaaaccagcttcatctcccagagaatgggatcctttgcatccttcctccacagacatggccttagtacctagaaatagttctggaatatttagaaagtcagtgtcacccagcaaaactctttcagtcccagataaagaagtgccaggncacggaaggaatcgttacgatgnaanttaaaagnagnaatttgacaagctttcattcaaaaagttattt

SEQ ID NO: 260659 - DNA, 1563 bp, Homo Sapiens
  misc_feature (12)..(12): n is a, c, g, or t
gaggcccggatnataagagcgggatgaacaaaacatattgcaaaggagcccagacgttctcagaggagctccaaggagaacttcataccctgctctgagcctgtgaaagggacaggggcattaagagattgcaagaacgtattagatgtttcttgccgtaagacaggtttaaaattggaaaaagcttttcttgaagtcaacagaccccaaatccataagttagatccaagttggaaggagcgcaaagtgacaccctcgaagtattcttccttgatttacttcgactccagtgcaacatataatcttgatgaggaaaatagatttaggacattaaaatggttaatttctcctgtaaaaatagtttccagaccaacaatacgacagggccatggagagaaccgtcagagggagattgaaatccgatttgatcagcttcatcgggaatattgcctgagtcccaggaaccagcctcgccggatgtgcctcccggactcctgggccatgaacatgtacagagggggtcctgcgagtcctggtggccttcagggcttagaaacccgcaggctgagtttaccttccagcaaagcaaaagcaaaaagtttaagtgaggcttttgaaaacctaggcaaaagatctctggaagcaggtaggtgcctgcccaagagcgattcatcttcatcacttccaaagaccaaccccacacacagcgcaactcgcccgcagcagacatctgaccttcacgttcagggaaatagttctggaatatttagaaagtcagtgtcacccagcaaaactctttcagtcccagataaagaagtgccaggccacggaaggaatcgttacgatgaaattaaagaagaatttgacaagcttcatcaaaagtattgcctcaaatctcctgggcagatgacagtgcctttatgtattggagtgtctacagataaagcaagtatggaagttcgatatcaaacagaaggcttcttaggaaaattaaatccagaccctcacttccagggtttccagaagttgccatcatcacccctggggtgcagaaaaagtctactgggctcaactgcaattgaggctccttcatctacatgtgttgctcgtgccatcacgagggatggcacgagggaccatcagttccctgcaaaaagacccaggctatcagaaccccagggctccggacgccagggcaattccctgggtgcctcagatggggtggacaacaccgtcagaccgggagaccagggcagctcttcacagcccaactcagaagagagaggagagaacacgtcttacaggatggaagagaaaagtgatttcatgctagaaaaattggaaactaaaagtgtgtagctaggttatttcggagtgttatttatcttcccacttgctctctgtttgtatttttgttttgtttttgattcttgagactgtgaggacttggttgacttctctgcccttaaagtaaatattagtgaaattggttccatcagagataacctcgagttcttggtgtagaaattatgtgaataaagttgctcaattagaattttaaaa

SEQ ID NO: 260660 - DNA, 1093 bp, Homo Sapiens
  misc_feature (366)..(389): n is a, c, g, or t
  misc_feature (772)..(772): n is a, c, g, or t
cgcctcccgcgcctccgccccgccgcccgctgccgcgactgccaaagtttctcggtcacgtgctggcccccggcggcccaaaggagaagatccccgaactacggcgacgaggcctgcctgtggctcgcgttgctgatgccatcccttactgctcctcagactgggcgcttctgagggaggaagaaaaggagaaatacgcagaaatggctcgagaatggagggccgctcagggaaaggaccctgggccctcagagaagcagaaacctgttttcacaccactgaggaggccaggcatgcttgtaccaaagcagaatgtttcacctccagatatgtcagctttgtctttaaaagctctccttggaggcnnnnnnnnnnnnnnnnnnnnnnnnagccatggcgagctacctcctcattgtgaacagcgcttcctcccttgtgaaattggctgtgttaagtattctctccaagaaggtattatggcagatttccacagttttataaatcctggtgaaattccacgaggatttcgatttcattgtcaggctgcaagtgattctagtcacaagattcctatttcaaattttgaacgtgggcataaccaagcaactgtgttacaaaacctttatagatttattcatcccaacccagggaactggccacctatctactgcaagtctgatgatagaaccagagtcaactggtgtttgaagcatatggcaaaggcatcagaaatcaggcaagatctacaacttctcactgtagaggaccttgntagtgggggatctaccaacaaaaatttctcaaggagccctctaagaacttggattcgaaggcctcctagatgtggccatgtgggattattctagcaacacaaggtattgctagcatttttgttttagagtcattttgacttattttctagactgagaaaatatggtaggactatttttgcctttttatgcaatattttcccatgaaagcttggaatcattgtatttccctgaatataaaatttcattgatagtaagatatattgttacttgtgtatcactaaaaacaaacctgccaaataaactgttctttcttatcactt

SEQ ID NO: 260661 - DNA, 167 bp, Homo Sapiens
ggcaatttcaataaataaataaaataagaagggggagtgaaacagagaaagaaaaggcaaaagactggtttgtttgcttaatttccttctgttaagaaaggatataaaaggatgttacaagtttgctaaaagaagagaggggaagaatttaatggactgtgaatttc

SEQ ID NO: 260662 - DNA, 1041 bp, Homo Sapiens
  misc_feature (18)..(18): n is a, c, g, or t
  misc_feature (113)..(113): n is a, c, g, or t
  misc_feature (115)..(116): n is a, c, g, or t
  misc_feature (118)..(119): n is a, c, g, or t
  misc_feature (122)..(123): n is a, c, g, or t
  misc_feature (127)..(162): n is a, c, g, or t
  misc_feature (172)..(174): n is a, c, g, or t
  misc_feature (224)..(224): n is a, c, g, or t
  misc_feature (388)..(388): n is a, c, g, or t
  misc_feature (730)..(730): n is a, c, g, or t
  misc_feature (870)..(870): n is a, c, g, or t
  misc_feature (873)..(873): n is a, c, g, or t
  misc_feature (880)..(915): n is a, c, g, or t
cccatcgaccagcaccancgcaaccagtgccagtactgccgcctcaaaaagtgcctcaaagtgggcatgagacgggaagcggtgcagaggggcaggatccgccgacccagccnanntnnttnngggnnnnnnnnnnnnnnnnnnnnnnnnnnnnnnnnnnnncccccccttnnnatatatttccctgctggtgcgcgcggacccctatcccacgtcacgcttcnggcagccaatgcatgcagcccaacaacatcatgggtatcgagaacatttgcgaactggccgcgaggatgctcttcagcgccgtcgagtgggcccggaacatccccttcttccccgacctgcagatcacggaccaggtggccctggcttcgcctcacctggaacngagctgtttgtgttgaatgcggcgcagtgctccatgcccctccacgtcgccccgctcctggccgccgccggcctgcatgcttcgcccatgtccgccgaccgggtggtcgcctttatggaccacatacggatcttccaagagcaagtggagaagctcaaggcgctgcacgttgactcagccgagtacagctgcctcaaggccatagtcctgttcaccttcagatgcctgtggtctctctgatgtagcccatgtggaaagcttgcaggaaaagtctcagtgtgctttggaagaatacgttaggagcccagtaccccaaccagccgacgagattcggaaagcttnttgcttcgcctcccttccctccgcaccgtctcctcctcagttcatagagcaattgtttttcgtccgtttggtaggtaaaacccccatcgaaaccctcatccgggatatgttactgtccgggcagcagttttaactggccntanaaggggnnnnnnnnnnnnnnnnnnnnnnnnnnnnnnnnnnnngggggcaaaaaaaaggcaaaagactggtttgtttgcttaatttccttctgttaagaaaggatataaaaggatgttacaagtttgctaaaagaagagaggggaagaatttaatggactgtgaatttc

SEQ ID NO: 260663 - DNA, 355 bp, Homo Sapiens
agactgcatagggctcggcgtgggatagggctccgcgcgcaacagcagggaaatatatccggacaggtacgagtggcagttgaggggatccccgttggtcagcgcgaactgcccgtgggtcggctgggtcggcggcatcctgcccctctgcaccgcttcccgtctcatgcccactttgaggcactttttgaggcggcagtactggcactggttgcgatggtgctggtcgatgggacagttccggttggcgcggcacgtgtagctcaggttcctccgcacactgcgcttgaagaagctcttgcagccctcgcacgtgaactggccgtagtgcttgccgctcgacttgtctccgcac

SEQ ID NO: 260664 - DNA, 1498 bp, Homo Sapiens
  misc_feature (11)..(11): n is a, c, g, or t
  misc_feature (35)..(35): n is a, c, g, or t
  misc_feature (50)..(50): n is a, c, g, or t
  misc_feature (83)..(83): n is a, c, g, or t
aaggtaacacnaacttttaataaattaacccactnaagttgaccttttanggaacaaaacttaaaattttaaaaatgggtgtnacccatatttttatgaagtggactgactcccaaggttgccttggctcccaagtctgggcatcgtgacattgccgtgatgccccagaagaaagttaatggcaatgatgtccagtcagagggcagacatgctacacatcacaatgatgagagctgcggattctgccctcttcaactccaagtagaaaattattattttcattcaaactaactggaagtgagccaaacagttaaaaagtcagaatgaagaataaaacaattttcttttcacatagaggagggacactccttcagccccgtctaaagtgaattctgtgctgagtccctgctccttcagaagggtaaactgaaggtcagttattgctaacaaagccagaagtggcccctttcccgccctgaagatgtttcacacgaaaaggccgtttgtttggcgtgaggccctctgaggaaggacgacagtggaagaggaggcatgccggcactgtaaggcctctctcgttagccacccccaggccctgtgctgtcaggggcagcttgggccactttgctgcccctgagagaacctgaggctcccgcgtacctgtggagcgaaggagaggttgtcatctgggcccctgtttcaccagtcaaaaccttatggagcagtcagaagcccgaagcatccaagcccagtgcccaggaagcttctgaaataaacggcactgggttgggaaggatgagaaagccaagacaggtgggccaggttctccgaacatggggcaacagtgaccctgggcaaaagcctggaactgagcggctgataaggcccacaattactgccaccacctctcagtatctacacgggggcagacgttaggcagtgggaactgaggactggagggcgtgtggcaaacacgggatggattttatcagaaaagagaggacacccaaacacgtgcctgccctatttatcttgcatgtcctgtgccaggtgaaggacgctggagcatgggtaaggttcctgagaacaactggtgggcagaaacgggctgggatgggcactgctccacaggcaacattaagcctctgagggggacactaatagtgctacatcttgtgggctgctgaaaagtaggtaacgaatggcctttattgcactttttcgttcttaggaaacaggggagtgccctgcagagtttctcttgatttgcagaaatcactgcagatcaatgataaggtgcaggcagaatcacgggtgacctctgactctcaagggaagaagtccagtgattggtctttccagtattttcaagtccgctgctttcccgcaaagctcggcctaacctggagctagttaggtccgcaggcgccaccgccggcgcactccggagaagaagctccttcttcacccgcccaggagagctcctcgagaaaaaccc

SEQ ID NO: 260665 - DNA, 953 bp, Homo Sapiens
  misc_feature (176)..(204): n is a, c, g, or t
  misc_feature (327)..(337): n is a, c, g, or t
  misc_feature (487)..(495): n is a, c, g, or t
gtcactctatataacagtcacagaaggcaaaatatagtagacatatgttgagatatatccagttgagtccccgttccttcttcgtttctagtaacctctctcgctgccagtagtataagattcagactcaaattatttttatactaataatttattatttaggttcaccttgcctnnnnnnnnnnnnnnnnnnnnnnnnnnnnngtcaacgcgcacaccccacccaccactcacatataccattgtctaccggcaagagtcacaagcaggcagtttccctttggccagtggtggtcgacacgcacagggggtccgggggggaaccannnnnnnnnnnacaggggaccacgcaaagaagccctttcttctgttgccattagcaaggccagaaaaaaaggacttattttctctaagaaaagtagccaggattggaaatatcgagatggggctccccagatcgcaatggataaacgaacagaactttcannnnnnnnnccaaaatcactgttggggtgggggatcccagtctcgggactgtgggtgcagctcagctggcctggtgctccctccccttctgtgagctccctgctggcagctctgcacgcgtggatggatacagagcggcttctacacggcgccatcaacattctctttatgaacgtgagtggattctccaggcaaactatgcactatttcatggtcggaaagaatcaaaggaagtttaaatgagggtggagttaaactgtgctaaattacagtagtgcttattagtaactagatttcaaaaggttacagaaaatttacattctctacacaaaaactgcatctcctgcacagacaacatcgacatcgacacaggaaggaaactgattgtccattctttgcccaggaagtctcggtactttatagattcgtctttacctcttttttgttgttgttcttccgaaaaagca

SEQ ID NO: 260666 - DNA, 466 bp, Homo Sapiens
  misc_feature (22)..(22): n is a, c, g, or t
  misc_feature (44)..(44): n is a, c, g, or t
  misc_feature (163)..(171): n is a, c, g, or t
aaatgttgatggcgccgtgtanaaaccgctctgtaacccatccnagccgtgcagagctgcccagcagggagcctcacagaaggggagggagcacccaggcccagctgagctgcaccccaaagtcccgagactgggatcccccacccccaacagtgattttggnnnnnnnnntgaaagttctgttcgtttatccattgcgatctggggagccccatctcgatatttccaatcctggctacttttcttagagaaaataagtcctttttttctggccttgctaatggcaacagaagaaagggcttctttgcgtggtcccctgctggtgggggtgggtccccaggggcccctgcgcctgggcccccctcccacggccagcttcctgctgatgaacatgctgtttgtattgttttaggaaaccaggctgttttgtgaataaaacgaatgcatgtttgtgtcacgaaaaaaa

SEQ ID NO: 260667 - DNA, 1700 bp, Homo Sapiens
  misc_feature (145)..(201): n is a, c, g, or t
  misc_feature (525)..(538): n is a, c, g, or t
  misc_feature (791)..(821): n is a, c, g, or t
  misc_feature (1549)..(1566): n is a, c, g, or t
atcgcgggttttggtggttctgtagcagccagggctgtgcagtaccccgccgtttccccgagttgtgccccgccgtctttttatttccctccttgggcctctttgacacaagggggtggcactattgtcccccggaattcttttnnnnnnnnnnnnnnnnnnnnnnnnnnnnnnnnnnnnnnnnnnnnnnnnnnnnnnnnngaaattgcaaaaagttttttaaatccaagggtttttcacaaagaaatttaaacagaaaacctaaccattctgggatccaatggaccagttccgaaattcttttgccttaaccacaattcctaggaaagaaactacagagtatcttaacccgaccataagttaccactgccagtctgtgcactagtaaaccaaaataaaattaactctcttgatcatatagatatctctatgaaaatcttttttttcaatctgtaccaaaggtctttcttcataaattaatttttttataatttaatgctgtctactatgtgaagtttaactgannnnnnnnnnnnnnatgtacagaggttatgtttcccaaatcttacccagacgagtatggcacttagttcagacatttctagcagcagatttcccctcccctctaaccgagctatcaaatttctgtcttaactaatgcaaaaatatcaagtagtgagagacccaggtttataactgtactaggtacacagagggtgctgcgttcagtctggactttcacaaagcagtaatattccagggagcatagaaccaataataccacaactttnnnnnnnnnnnnnnnnnnnnnnnnnnnnnnntttctcttatgactatgtaattttcactagaatctacacttctcagagcagcaaggacttttgaaactatgaaatgtcactgacatctatcatcaaatacaagcataaaatttaagaactaaaaaatacttgaaagaaataactgcttagccctagctcctgagctaggaggatttggtctgtggaaacagggagggccagcaacctgtcccagcacaaaagaaaatagactctgaggtagataactgatcatacacagctgaccagacaagtcacacagttttggaagacaacttaatttaccattgcttttaaaacatatgcaattgccttaataaaagagctttaataacagtgaattatcttatatgtactaaagtagaaataactgtgtatttatgaatcaggaatttcatagtttcaaaattggttttctttacacttgaacacttgtagtgatgatgtaaagtgtggcactgcttggatccaaatcttccttcatgcttttttgtttgtgtgtgtccatacatcaattaaaattataaaacctaaatgcaaaggtacaaaaaaggcacattctcctaaccgcaactggtccggcaaaaataaagagcacagaagatgtgatgctgagacaagttggagctactggttactggctcttcggtctttggtgaagttacctttaaaagtgccaagtcatttttatttttcaaatttacctaatnnnnnnnnnnnnnnnnnnctagtagccaatcgttttgcttctattcgttatctcagcttatgtttgaagataaatccttacttttagcttttgccactttgttgcaatagcaacatttttcggtttgccagatttcaggcataattctcatt

SEQ ID NO: 260668 - DNA, 1135 bp, Homo Sapiens
  misc_feature (1007)..(1033): n is a, c, g, or t
  misc_feature (1053)..(1053): n is a, c, g, or t
atttcccaggcagccgctgcagtcgccacacctttgcccctgctgcgatgaccctgtcgccacttctgctgttcctgccaccgctgctgctgctgctggacgtccccacggcggcggtgcaggcgtcccctctgcaagcgttagacttctttgggaatgggccaccagttaactacaagacaggcaatctatacctgcgggggcccctgaagaagtccaatgcaccgcttgtcaatgtgaccctctactatgaagcactgtgcggtggctgccgagccttcctgatccgggagctcttcccaacatggctgttggtcatggagatcctcaatgtcacgctggtgccctacggaaacgcacaggaacaaaatgtcagtggcaggtgggagttcaagtgccagcatggagaagaggagtgcaaattcaacaaggtggaggcctgcgtgttggatgaacttgacatggagctagccttcctgaccattgtctgcatggaagagtttgaggacatggagagaagtctgccactatgcctgcagctctacgccccagggctgtcgccagacactatcatggagtgtgcaatgggggaccgcggcatgcagctcatgcacgccaacgcccagcggacagatgctctccagccaccgcacgagtatgtgccctgggtcaccgtcaatgggaaacccttggaagatcagacccagctccttacccttgtctgccagttgtaccagggcaagaagccggatgtctgcccttcctcaaccagctccctcaggagtgtttgcttcaagtgatggccggtgagctgcggagagctcatggaaggcgagtgggaacccggctgcctgcctttttttctgatccagaccctcggcacctgctgcttaccaactggaaaattttatgcatcccatgaagcccagatacacaaaattccaccccatgatcaagaatcctgctccactaagaacggtgctaaagtaaaactagtttaataagcnnnnnnnnnnnnnnnnnnnnnnnnnnnacatgtccggccgcctcggnccctccaagaagcttttctaagaccaattcggtttgggcggcccggggccccagtaaggtaaagtggaacattggggccaaa

SEQ ID NO: 260669 - DNA, 522 bp, Homo Sapiens
  misc_feature (154)..(154): n is a, c, g, or t
agtgccagcatgaagagaggagtgcaattcacaaggtgaaggcctgcgtgttggatgaacttgacatggagctagccttcctgaccatggtctgcatgaaagagtttgagaacatgaagagaagtctgccactatgcctgcagctctacgcccncagggctgtcgccagacactatcatggagtgtgcaatgggggaccgcggcatgcagctcatgcacgccaacgcccagcggacagatgctctccagccaccgcacgagtatgtgccctgggtcaccgtcaatgggaaacccttggaagatcagacccagctccttacccttgtctgccagttgtaccagggcaagaagccggatgtctgcccttcctcaaccagctccctcaggagtgtttgcttcaagtgatggccggtgagctgcggagagctcatggaaggcgagtgggaacccggctgcctgcctttttttctgatccagaatcctgctccactaagaatggtgctaaagtaaaactagtttaat

SEQ ID NO: 260670 - DNA, 1745 bp, Homo Sapiens
  misc_feature (681)..(699): n is a, c, g, or t
  misc_feature (920)..(932): n is a, c, g, or t
ggcggtaccggtccggaattaccgggatatcgtcgacccacgcgtccgatctgaagtactatagaacattaagttgaagaatggaaattaagagtacgtattcatggtttatatttcttattctatggagttcgtgaacacatctaggtggaatgcatctgagactaagggctggtttttaatcctcataagaaaccagccttgaagaattaacaattctcttcattggtattctaaacctcctaagatatttaggcttctgtacataaaagtgtttttgctaaatttacagtatatatagatcctttcatattattttactaagaatgtttgaactttgcatatttgatatagttcctggtaggaatagcacagctcaaacattagtttttctacttacctcctctaacacgtggtttgtctggagagtttctaaaaattcagctataaccccagttcatgtatttactggtgattgttcttgctgaggtagtaacagcccaatcttgggctgttaaatcctaggaaatctcgaatcatagtgattaaaatagttggggtaaagttgtagcttatatgcaatactacttggaggaattcttctactaatttgtatttaatgtggaaattgtatagtttcattgatttaatcataaataatggaaatggtctccaagaagnnnnnnnnnnnnnnnnnnngcttatacactctgattcctataatacagtgctataagctatgcacagaaaataaaatgtttgaaatccaagaataatggttcttactgctaagagggagtaatagttattactaatgattttgattgggttgcatttttgttgcaatgtttattccacttgcagttagaatatgaatatgttttatcactagtgtggctaaataaccaaacatttgtgtnnnnnnnnnnnnngccaagatttcattgtttgttgaatatttcttaagcatctagcccctaaagagaccgcttcttaccaagcctgtaaactatgcatgatggaaattcttgtattttatttaggaatggctgttggtttactcaccacatctgtggaatcatggctataaatgtttgcttacaaactctttgtgacttgtaatttaacttaatctcatctaatgtaaatattagattatgatgttcagtaacatcttccataggtataaactgctgtcattattgatttcagagtaactctgagtaatcaaataggtaaaagcatgttttgagtaaaatagctagatttatactttacttgtatacagacttaacaacaaccggtattgactggattgacagctaaagtatcagaatgaaagcaaggtttttttgatgttacctgactgtcataaagatgaaaatgatttgtattggtatgaaatgcttatctttattctacttcgtaagggtaagttttatttatactctttggactcccatgaacttttgcacactgctttgtgtttttggtttaccctaaactaccatcctttttatctttgctttttttcttcctattcacgaaaagagcaaaatgtgaaaacgacacaagactctcacggtatacgaatgaactgagcaatttggagaatcgtatttggactttgtcctctcttattaccccctcctaagccctgcaagttgctaggtacttgtgaggcagtgtactggagaggggagagcatggatcctggggtcaaagggcctttgccccacccttat

SEQ ID NO: 260671 - DNA, 1415 bp, Homo Sapiens
  misc_feature (1400)..(1400): n is a, c, g, or t
ggggaatcgcggtcgcgagccatggaggaggaggcatcgtccccggggctgggctgcagcaagccgcacctggagaagctgaccctgggcatcacgcgcatcctagaatcttccccaggtgtgactgaggtgaccatcatagaaaagcctcctgctgaacgtcatatgatttcttcctgggaacaaaagaataactgtgtgatgcctgaagatgtgaagaacttttacctgatgaccaatggcttccacatgacatggagtgtgaagctggatgagcacatcattccactgggaagcatggcaattaacagcatctcaaaactgactcagctcacccagtcttccatgtattcacttcctaatgcacccactctggcagacctggaggacgatacacatgaagccagtgatgatcagccagagaagcctcactttgactctcgcagtgtgatatttgagctggattcatgcaatggcagtgggaaagtttgccttgtctacaaaagtgggaaaccagcattagcagaagacactgagatctggttcctggacagagcgttatactggcattttctcacagacacctttactgcctattaccgcctgctcatcacccacctgggcctgccccagtggcaatatgccttcaccagctatggcattagcccacaggccaagcaatggttcagcatgtataaacctatcacctacaacacaaacctgctcacagaagagaccgactcctttgtgaactaagctagatcccagcaaagtgttcaagagcaagaacaagatcgtaatcccaaaaaagaaaagggcctgtgcagcctgcaggtggccagaaagggccctcaggaccctccggtccctccacttcctccacttctaaatcctcctctggctctggaaaccccacccggaagtgagcacccctccctccaactccctatcagctccagagtggtggtttccatgcacagatggccctaggggtgacctccagttttgcgtgtggaccgtaggcctctttctagttgaatgaccaaaattgtaaggcttttagtcccaccgacattagccaggctcgtagtgaggcctccagagcaggttgtgctgtcccctgcctctggaagcaatggggaatttggaatcttgtgtaagtgcccaaataagtctgagtgctttcctcttcttcaacactcaaccctcaatcccttagcactgattgattagagaggtcccccaaagaaaccactggttttgacccatggaagcattagaaactgcattgttcattcagggagccactagttcacatatggactatttaaaattttaaagtaaaatggtatggaaaaatttcatttcttcaattggcattagccacattttgaggaatncatggtggctggtag

SEQ ID NO: 260672 - DNA, 401 bp, Homo Sapiens
atactggcattttctcacagacacctttactgcctattaccgcctgctcatcacccacctgggcctgccccagtggcaatatgccttcaccagctatggcattagcccacaggccaagataacttataatatcaaaatgaatagaagaaaatgtgttcactggaaactggctgttgagcccctccaatgggagctgaggagctgtgtctctgcaggcatggggactggccacaagcaaagagtcagcagcatgaagccccggagctgtagcgtgtgcagcaggcgccaatccaacagcatgggaacaacagtgtcgcaatcattcctcagttatggcaagaatgtgctatttttcactgttaggtgttgcttctgagaactacaaataaaactctccaacc

SEQ ID NO: 260673 - DNA, 461 bp, Homo Sapiens
tgatgatcagccagagaagcctcactttgactctcgcagtgtgatatttgagctggattcatgcaatggcagtggaaagtttgccttgtctacaaaagtgggaaaccagcattagcagaagacactgagatctggttcctggacagagcgttatactggcattttctcacagacacctttactgcctattaccgcctgctcatcacccacctgggcctgccccagtggcaatatgccttcaccagctatggcattagcccacaggccaaggcatggggactggccacaagcaaagagtcagcagcatgaagccccggagctgtagcgtgtgcagcaggcgacaatccaacagcatgggaacaacagtgtcgcaatcattcctcagttatggcaagaatgtgctatttttcactgttaggtgttgcttctgagaactacaaataaaactctccaaccaagtg

SEQ ID NO: 260674 - DNA, 509 bp, Homo Sapiens
  misc_feature (123)..(309): n is a, c, g, or t
agtgcccaaataagtctgagtgctttcctcttcttcaacactcaaccctcaatcccttagcactgattgattagagaggtcccccaaagaaaccactggttttgacccatgaagcattagaannnnnnnnnnnnnnnnnnnnnnnnnnnnnnnnnnnnnnnnnnnnnnnnnnnnnnnnnnnnnnnnnnnnnnnnnnnnnnnnnnnnnnnnnnnnnnnnnnnnnnnnnnnnnnnnnnnnnnnnnnnnnnnnnnnnnnnnnnnnnnnnnnnnnnnnnnnnnnnnnnnnnnnnnnnnnnnnnnnnnnnnnnncattagaatattttcatactgctcttcctcaattaatttttgttgttaatgttgatgtcttcattggatgggtcataatgttccatgaaacctctcaagtacacaattgtatgttctttgtatcccttaccacaaatatccgcgctctgctcatttcttttgcagcttcctataaagtttgtcttcctcatcaaaaaaac

SEQ ID NO: 260675 - DNA, 597 bp, Homo Sapiens
  misc_feature (441)..(441): n is a, c, g, or t
cgtggcgcccttactacaactacaaacccaaaaagaaatccagacagttgaaaaaaatgaggaaagtcaactggaggaaggagcacggaaacaggagcccgagccataaatgtaaatacccagcagaactggattgcgccgtggggaaggctcctcaggataaaccctttgaggaagaagaaactaaagagatgcccaagctgcagtgtgaactctgtgatggagacaaagcagtgggggctggaaaccaaggaaggccccaccgacatcttacttctcggccatatgcctgcgagctctgcgccaagcagttccagagcccttccacactcaaaatgcacatgagatgtcacaccggggagaagccataccagtgcaagacctgcggacggtgcttttcggtgcaaggaaacttacagaaacatgaacgcatccacctgngcttgaaggagttcgtctgtcagtattgcaacaaggcattcaccttgaatgagaccctcaaaatccatgaaagaatccatactggagaaaagcgttaccactgtcagttctgctttcagagatttttgtatctctccaccaaaaggaatcacgagc

SEQ ID NO: 260676 - DNA, 322 bp, Homo Sapiens
  misc_feature (129)..(179): n is a, c, g, or t
gggacaataatcctctgtagcttgagctacccctcccctgctgtaacttacgtgacctgtgctgtcactgggcataggacagcggcatcacggttgcattcccattggactcatgcacctcccggatgnnnnnnnnnnnnnnnnnnnnnnnnnnnnnnnnnnnnnnnnnnnnnnnnnnncagagtgtggaaagtctacagtgcagaaaggcttgaacctgccagctgatttgaaatactttcccctgcgcagggccgtatgcatcctgccaagctgcgttatattctgtactgtgtacaataaagaagtttgcttttcgttt

SEQ ID NO: 260677 - DNA, 430 bp, Homo Sapiens
gaaaattggtgcaaagcataggtaaatatttttctttattaagcttctcactgagaagccctctttattttggtaaatgtcactctgtttgttaggagatgtctgcttttccatgaaatgaaatagtggctaaagccctgaaagaggcaagactacaatgggctgaaacagttggtatagcaaccccagagaagtgcttcattttctttttatagtagaagcaggtccatgtcttttgtggtttcctgcacatctttggagtagttatgacttctcagtttttccccccttaaactgcattgcctattcttttttcctgacatgctatcaggtatcagtgtgttgaatacataatgcttgtgtatcagacttacgttactgtcatcaccattaaaagaattgcagccttgtgccccatgaccttcaaaaa

SEQ ID NO: 260678 - DNA, 604 bp, Homo Sapiens
  misc_feature (504)..(504): n is a, c, g, or t
  misc_feature (508)..(508): n is a, c, g, or t
gacaagggtacaaattggaactagaaattgacattgttattgacaaacatggctaaaaacaaaacatcaaatcctgcccccgtgaagagttccctgtcacctcaagtttgaggatagtcctctaagagtgacctaagcataagtgaaagacacctcccctcacccttctagccccctacaatgtgccaggttggggtaaagagttggagatgatggccaggagtggcctccaacacgctggtgagaggcctgattaggttttggggaagatctgagagctctggcctcttcgtgagtggaacataaagccgcctcttgttgggagatcctaccccagtgacagaggaatcccccaaactaggctgtgccctggctccgtggcggctccagacccgggtaagtgcctttgtcccctgaatactcactcacccggtccagagggccttcccactgcccagcctggagaaggcctcccctgacctgctctctcagtatcctggagangctncagaggccatcacaggcatcatcctcagagctcctcagacctgggactttgtttttgctggttcagtgcattttgtgtatttaagagcaaacactt

SEQ ID NO: 260679 - DNA, 807 bp, Homo Sapiens
ggggtacgcgggcaagatggaggcgactacggctggtgtgggccggctagaggaagaggcgttgcggcgaaaggaacggctgaaggccctacgggagaaaaccgggcgcaaggacaaggaagatggggagccaaagaccaagcatctcagagaagaggaggaagaaggcgagaagcacagggaacttaggctgcggaactatgtcccggaggatgaggacctgaagaagaggagggtgccccaggccaaaccggttgcagtggaggagaaggtgaaggagcagctggaggccgccaagcccgagcccgtcatcgaggaggtggacctggccaacctcgctcctcggaagcctgactgggacctcaagagagatgtggccaagaagctggagaaactaaaaaagcggactcagagggccattgccgagctgatccgtgaaaggctgaaaggccaggaagacagcctagcctctgcagtggatgctgccaccgaacaaaagacctgtgactccgactgaggcatgccctgccccaccactcgcccatcaggcctgtcctgcagaggatggtcttgggcagggatgggggctaggcttgccatcacctccagtttggcttctgagcagagactccctgcccatcaagtctgaaacccccatggatgaggtcagctccttgtctgctgggtggcccctgccattctgaatggaggcagaaccagcaacaactctgggcgtgcctgtgtctgcacatgtggatgtacatatgtctgtatatatgtatatatttttgaacttttcccaaaaac

SEQ ID NO: 260680 - DNA, 871 bp, Homo Sapiens
tctccacctcttgggggggaggaccccctaaggaatttcccccgggggttctccctaaaaagggattcgcgcccctttgggagaaaagacccccctctgggatcccccttatttgggccttaattaacccccttaaaagggggaccttttaggccctttggggaaggcaaagaatgggaactggccttccccttaggaaaccaccctgggttaaaggtatccccggataaagtgctggggccatcctcttttcccctgaaggaaaatcccccttatcttaggattcacctacttcagtttgggggacaagaatgtcaaggggctaaaagaatcccaagaaaaagtatgaagcattgactaggagggaacaaatgcttctagtagtgttcttagaattcttaggatctgaaatgtcagaatgagtcacacgctggtcatgctccatacaatgaaagcaatcctgcttgatactattcacacggtgcatgattacttcacgggggtggaacggaacagtctgtcgccatttgatagtatggttccagaatgaaaacaaaaccactgaataaatcagggtaagcagtgtgtaacactccttcctgtccatcggttttccacagggtgatttgcactgcctgagagaaaggaggcaagatacctatcccttctgatacacacaggcacgaccactaccgcctccaattgccaattcagaagctaacacacaagccctccagttcgtaccctgaatatggtaattaagactaggaatggagcagttcagtctaaaaaatatcacaggtaacagaatgcttatataaactagactgcttttgacatctgtaagaaaattgtatagatggcagttgga

SEQ ID NO: 260681 - DNA, 628 bp, Homo Sapiens
tagttattgataaacttcttaaagagatctgttattttcaggtagtgccataatctgcacttagcattggcttgcttcagttgtttctcttcccagccagtatgccacaggtgaactttcgaggttgtcattaagtaagttgtgaaatttctgtaataacaaaggcagtccgcattcttccctttcccccaaattcctagggcaaaacttttttatggtgctgttaacatgggagtcacacaagccgcctgactttttctcattgccattagtaatgactgatggaaaacccagccaccactgtgatgcgaaatgatcagtctgttgcctgaaacagcccagtcctcttaactgaaacagcattctacttcttgttccaagatgagcctctgcaatattctggcaatttaatataccccctacaaaagcactccacagcttttacactattttgactttgagttataactagtattattcatgttttcataaaaagaagttagtgacccagagctataatcatccatcaagtcttccacaataattcccaactcataaattgctttcctaacaactagcaaaagctattgttcataatggcatttctaaagcttttgggcactgtgta

SEQ ID NO: 260682 - DNA, 826 bp, Homo Sapiens
gggagctgagcctagagtccggctgttggctagagtgggcgcggatctggtgtggggaaggcggcgggactcaggcctgcctgcgaagcattgtcctacataatggtagaggacgaactggcacttttcgataaaagcataaatgaattttggaataaattcaaaagtacggacacctcctgtcagatggcgggactaagagatacctacaaggattccatcaaagcatttgcagaaaagctgtctgtgaaattaaaggaagaagaacgaatggttgagatgtttctggaatatcaaaatcagatcagcaggcaaaataagctcattcaagaaaaaaaggataacttgttaaaattgattgctgaagtaaaaggcaaaaagcaggaattggaagtactgactgcaaatatccaggatcttaaggaagaatattctaggaagaaggaaactatttctactgctaataaagcgaatgcagagaggttgaaaaggctgcagaaatctgcagacttgtataaagatcgacttggactagaaattcgaaaaatttatggtgagaaattgcagtttattttcactaatattgaccctaagaatcctgagagcccatttatgttttccttacatctcaatgaagcaagggactatgaagtgtcagatagtgcccctcatcttgagggcctagcagaatttcaagagaatgtaaggaagaccaacaatttttcagcttttcttgccaatgttcggaaagcttttactgccacggtttataattaacatacaaatagtgtatataaaaacggtttatttttcttctctattaaaa

SEQ ID NO: 260683 - DNA, 568 bp, Homo Sapiens
tgaggaaaaataagtagttcgaggaagtagtttttaaatgtgagcttatagatagaaacagaatatcaacttaattatgaaattgttagaacctgttctcttgtatctgaatctgattgcaattactattgtactgatagactccagccattgcaagtctcagatatcttagctgtgtagtgattcttgaaattctttttaagaaaaattgagtagaaagaaataaaccctttgtaaatgaggcttggcttttgtgaaagatcatccgcaggctatgttaaaaggattttagctcactaaaagtgtaataatggaaatgtggaaaatatcgtaggtaaaggaaactacctcatgctctgaaggttttgtagaagcacaattaaacatctaaaatggctttgttacaccagagccatctggtgtgaagaactctatatttgtatgttgagagggcatggaataattgtattttgctggcaatagacacattctttattatttgcagattcctcatcaaatctgtaattatgcacagtttctgttatcaataaaacaaaagaatcccaaa

SEQ ID NO: 260684 - DNA, 1169 bp, Homo Sapiens
  misc_feature (369)..(447): n is a, c, g, or t
  misc_feature (450)..(450): n is a, c, g, or t
  misc_feature (460)..(460): n is a, c, g, or t
  misc_feature (787)..(801): n is a, c, g, or t
  misc_feature (824)..(824): n is a, c, g, or t
ggagacagtaggaatttgtaaaaagtcatttgatttataatcaacactacaaatactatgtgttatttataaaatcataaagaacacttttgtcagactccaaaatttgtatatacttccaggccataagagttgatggtattatttatgactttgtagattaagttatttatgtatgaaacaaagcaggaaaatatattgagaagggatcgtgtttacagaggacttctttaaagtgtcacatttttaaaatgtaaacatatttttaatgcatacttaagtaatatttaagaaactaaacaaaataatgatacaattgcagtgttgtgcttggttgtcaatgacaaaaataaaaccattttggtggtnnnnnnnnnnnnnnnnnnnnnnnnnnnnnnnnnnnnnnnnnnnnnnnnnnnnnnnnnnnnnnnnnnnnnnnnnnnnnnntgnaaaagatganatcttgttggtcgcccctcgccccctgaaaaaccttttcataaaccttttcttttgggcggccgggccccgagaaggaaaaggagacactgggcccttaagctgtgttccctaagaagaaactccggggcacaggaactaaaggggtttgggattctccccacccaaaataaaaaaagccccccggggggggaaacccggaaagcggtttttgaaaacaaaattcccaaaaggagaaagttccgtggagggccgtttttactggggtaccttactacaaacggggagtgccccagaggggaaggtctccaaaatatcaaaattttannnnnnnnnnnnnnntgggcccattcaattttgaaaanaaatgtggggggaaaattttcctttaaaacccttttctcgggccccaacattgggaaaacccctttctcaacaaaagcggggtatttgaatgtgaaacccctgagaatctcccgccgagcgggggagattacagaacaccctttgtgggccgccccttgtggcggaaaatatataattttttcgcccccccgtgggaggaaaaaacaacggcggggggcgcgaaaaaacaaagaggtgtgtccacatattattgtgggcgccccgccggtttataattaacacgcgagaacagtgctggggtgtgggaacactcttccgcccacacagcgtggagatatgtgggc

SEQ ID NO: 260685 - DNA, 809 bp, Homo Sapiens
  misc_feature (55)..(212): n is a, c, g, or t
agaccgccgggcaacatgatgagaccctgtctctgccaaaaaattttttaaactnnnnnnnnnnnnnnnnnnnnnnnnnnnnnnnnnnnnnnnnnnnnnnnnnnnnnnnnnnnnnnnnnnnnnnnnnnnnnnnnnnnnnnnnnnnnnnnnnnnnnnnnnnnnnnnnnnnnnnnnnnnnnnnnnnnnnnnnnnnnnnnnnnnnnnnnnnnnnnaaaccctgggaaaagtgaagtatggctgtaagtctcatggttcagtcctagcaagaagcgagaattctgagatcctccagaaagtcgagcagcacccacctccaacctcgggccagtgtcttcaggctttactggggacctgcgagctggcctaatgtggtggcctgcaagccaggccatccctgggcgccacagacgagctccgagccaggtcaggcttcggaggccacaagctcagcctcaggcccaggcactgattgtggcagaggggccactacccaaggtctagctaggcccaagacctagttacccagacagtgagaagcccctggaaggcagaaaagttgggagcatggcagacagggaagggaaacattttcagggaaaagacatgtatcacatgtcttcagaagcaagtcaggtttcatgtaaccgagtgtcctcttgcgtgtccaaaagtagcccagggctgtagcacaggcttcacagtgattttgtgttcagccgtgagtcacactacatgcccccgtgaagctgggcattggtgacgtccaggttgtccttgagtaataaaaacgtatgttgcaaaaaagaaca

SEQ ID NO: 260686 - DNA, 539 bp, Homo Sapiens
caaggagataaaattattagcaacggcaaattacttaagactgagctaaattttaaaaacctatttttaaatggcagtatatatgatagacaatatgacttccacattatctaatatggttcagaatttttctcacatggtgagaaaaattgctccacaatttccacaatttttaaactaaagtcatcacgggttctctatatagtgggggtaaggattggtcaaatccagcacacttttatagtaactacatagaagaaaaatataaatccaactttaaaacaatgttttctttctattctaatcagatttaatactttttataaacatgtaatgttgcaagagaatccagtccatttatgaaaattagttgacaatcaagttcacccaagaaaatgttgcctaagttaaagaaatcacagataaaacattttacctaaaggataggtaacactcaaaagaatgctatcacaggaagctatgatcatataatatttctttaataataattctagttccataggttttcatgttatgcc

SEQ ID NO: 260687 - DNA, 589 bp, Homo Sapiens
agtgtgagccatcgcgcccggcctgcaaacttttttgtaggtatttctggtaaacaaatccttaggttatctttgctgtggttgtggtttggctttagtcatgatttcaaagtagaaatagctaggcattattttttgaaatatatgacctatatgtagtcaagaatccactgaacagagggaagcaaaccttttggaaactggcttttgggcagacagtaaacgtccagtttgatgctggaagcatgaacagcttcatcaggtaggtactcctcaactctgatgagtttgtcctttcagcctaagggggtggaagggagttgtttgagaatagcaaatacgcatgttgattgcgagtgtgtggagacaaaggcagttcccaccacagttaggtcctggccattgtttcctcgcctgcgatgctccttgtacatcctcaccctcctctcccgcctctgccttctgctgggtcaaaggtggccttttctctccagccttgaattgttccctgttgggttcccaagggcccatctgctgggtacagttccacaatttccaaagccaaggacccgagagggtttttcattgg

SEQ ID NO: 260688 - DNA, 581 bp, Homo Sapiens
cagacccccaaggaaggcagtccaaaggtagactcaagtctcgcagagtaaccaggcactaggaaagcatcatgggcagtagctccacgagaggggccagagcaccaggcactggccagagaccagctgcattcaccctgagcagtagggcctggtggccatgagcacagacctggaactcacagcctgggcccagactccagctccaccactagctgtgcgaccttgggcaagtgactctgggtctccattttgccatgtgtagaattgggaaaactttctaccctctagggctgatgaaaggatcagatgagtttagtcgtaaagcattaaaacagtgcattataaactattaagagctgttattacttggcccctgcagctgtgggtctgggaagaggtcttggtcatcagggatgggcagaaatgttggggtcaagtgtattcatcttccctctgtcaggaacaccctctgcctgtcacaattcagtttgggccattcctaatagaattaatttcccctttttctcaggattcctgcagcatagtgcttaaaactctgtccagccagagttttaaag

SEQ ID NO: 260689 - DNA, 570 bp, Homo Sapiens
  misc_feature (116)..(116): n is a, c, g, or t
  misc_feature (506)..(506): n is a, c, g, or t
gcccctccctgagccctcacaggtggataattgaggccctacaagagaggggagcctaggagcttggattgaccttctagtcaacccacctgaccttcagcacacccattacaatncgggagactaaacccaacaacccagaggatcctaaaatgtcacattcagattttcaggaagaaaatcttcattaacagtggagcacaaatgttccatacaagacatcattgaggagccatgctgtccccttctaacctgaaacacattctttcccatcctggttgggcttctgtacctccttattaatttatgaacctgaagttgcttgaagtgttttgggcttaataaatggggtgaaagtataggtagcagtaacacctacatgaaacaatacaccttggatcttttaatctaaattacttttcttttttaagtctacttttaaaataaatacttctgtaaatattctgactgtaacattgaggaatgaaaatagccttttaacctanatatgtcagttgatcattattgaactaatttagttaacaagtccaagatattctgacttaatct

SEQ ID NO: 260690 - DNA, 810 bp, Homo Sapiens
atcgctgaattggagcaaagcggacttggagcagaactgaaatgtgcccagaaccaaaataagacttagaactgtacaggttggcccttcacctagttgactcagccctcgatagtctagagcccaccccctcctcaggaactcaagagctcagcatttataatgagcagttggtaatgagttgccctatgtgcttgtcgcaagcagtcacagagatgagccctattacttgatattcaggaacaaaggtacctgaacattctgataattatctcagcatacttgaggtttccttttttaagtgttcgaggttataacaagagacagccaaggacctacaagacagttgacttgattttggcacagtgtaacagcgcagttgcattctggcccactttgaaccttatagctcccaaatgatgagtttgtcatctttatgaactcatgacaggataataagcttgaagacctgctgtagttagatatgggctttaatccttcccatgcaccagtcagctgaacaaaagcataagccaaacatcctgtttaaactgtagaataaccagatattcccatcaggttaaagacttcatctagatgatgccccccagagatgcctttagtgtaagtagctggcttggggtatcagcaaatttcaggtatagttagataaacaggtacagggcctgcatactattaaaccatagtttgtggcacccgcttttctaactccacctgttagaagctatgtgtttgaaggaatgaatcagtgcagtataaataaaattcttttgtaaggagaagattaaa

SEQ ID NO: 260691 - DNA, 993 bp, Homo Sapiens
  misc_feature (818)..(818): n is a, c, g, or t
cgccgctccaccacctccaccacctatgccattcagagctccaacgaagcctccagttggacccaaaacttctcccttgaaagataacccctcacctgaacctcagttggatgacatcaaaagagagctgagggctgaagttgacattattgaacaaatgagcagcagcagtgggagcagctcttcagactctgagagctcttcgggaagtgatgacgatagctccagcagtggaggcgaggacaatggcccagcctctcctccgcagccttcacaccagcagccctacaacagtaggcctgccgttgccaatggaaccagccggccacaaggaagcaaccagctcatgaacaccctcagaaatgacttgcagttgagtgagtctggcagtgacagtgatgactagtgctggatctttcgaaacctactttttggtgcacaaacatgccgcaagactgagctactttggcgtggagtccattgcaagaggaaaatgttatggatcagtgactgtagtaggagtttgaggctctggaactctcacatattcaagtctttaacttagtggtgatgggtgattttctcgtgtcatttttgaacaatctcatctttcaaagtttaagtagacctgtagaagagctaacagaattatatttctatttagttaaaattgttaatgaaaaacagataaatgtgccctggtctaagttactcaaaggccatatcttcaccaggccagagattcagttttaaacctcagcagccatcagtttggccaagtggttggtaccagtgggaatgaagtctttgatgggtangagagagagggaaaaccctcaactacatcatagaagtatgttaaaaccacttttaaattggtgacacaagggggtaaaggaaagttttgtctgactcaacctgacaagcctggatagaaatggaactccaaataacagatgggagtccttgagtggccgttggggaaggacatgc

SEQ ID NO: 260692 - DNA, 535 bp, Homo Sapiens
  misc_feature (193)..(193): n is a, c, g, or t
gacctgtccgtgtgggactacgcccaccagcacggcatccctgacgagacctgcaacaactaccaggccaatgaccaggagtgtgacaagtttaaccaatgtgggacatgcaatgaattcaaagagtgccacgccatccggaactacaccctctggagggtgggagactacggctccctctctgggagggagnaagatgatggcagaaatctacgcaaatggtcccatcagctgtggaataatggcaacagaaagactggctaactacaccggaggcatctatgccaaataccaggacaccacatatataaaccatgtcgtttctgtggctgggtggggcatcagtgatgggactgagtactggatttgtccggaattcatggggtgaaccatggggcgagagaggctggctgaggatcgtgaccagcacctataaggatgggaagggcgccagatacaaccttgccatcgaggagcactgtacatttggggaccccatcgtttaaggccatgtcactagaagcgcagtttaagg

SEQ ID NO: 260693 - DNA, 529 bp, Homo Sapiens
agtagagtcacggagaggtattaagaaatggagagaaaaataagcagaatccaccttgtttctgaacccagtataactcattttctacaagtatcttgggagaaaacactggaatctggttttgttattacacttactgatggtcattcagcatggactgggacagtttctgaatcagagatttcccaagaagctgatgacatggcaatggaaaaagggaaatatgttggtgaactgagaaaagcattgttgtcaggagcaggaccagctgatgtatacacgtttaatttttctaaagagtcttgttatttcttctttgagaaaaacctgaaagatgtctcattcagacttggttccttcaacctagagaaagttgaaaacccagctgaagtcattagagaacttatttgttattgcttggacaccattgcagaaaatcaagccaaaaatgagcacctgcagaaagaaaatgaaaggcttctgagagattggaatgatgttcaaggacgatttgaaaaatgtgtgagtg

SEQ ID NO: 260694 - DNA, 722 bp, Homo Sapiens
  misc_feature (641)..(641): n is a, c, g, or t
  misc_feature (689)..(689): n is a, c, g, or t
  misc_feature (696)..(696): n is a, c, g, or t
gagagctgctgtggcggcggcaacatggcggacgtgataaatgtcagtgtgaacctggaggccttttcccaggccattagtgccatccaggcgctgcgctccagcgtgagcagggtgttcgactgcctgaaggatgggatgcggaacaaggagacgctggagggccgggagaaggcctttattgcgcacttccaggacaacttacattcggtcaaccgggacctcaatgagctggaacgtctgagcaatctggtaggcaagccatctgagaaccatcctcttcataacagtgggctgttaagcctggatcctgtgcaggacaaaactcctctctatagtcaactccttcaagcatataagtggtcaaacaagttgcagtaccatgcaggactagcatctggccttttaaatcagcagtcattgaagcgttccgctaatcagatgggagtatctgccaaacgtagaccaaaggctcagcccacaactcttgtcctaccacctcaatatgttgatgatgtgatcagccgcattgacaggatgtttcctgaaatgtccatccacttatccagacccaatggaacatcagcaatgcttctggtgaccttgggaaaggtgttgaaagtgatcgtcgtcatgcgganctgtttcattgatcgaacaatagtaaagggatataacgagaatgtctncacaggnagttgggcaagcttggatatatgggt

SEQ ID NO: 260695 - DNA, 438 bp, Homo Sapiens
  misc_feature (12)..(12): n is a, c, g, or t
  misc_feature (72)..(72): n is a, c, g, or t
acgccccctaanacaaggaaacacgttcccggtccaaccaaaggccccacaatgtggggtaaaacgggccantgaactgtaaggtaataccgaaaattaaggggttggccacttggtgggaataacatttaacaactgggttcctgaagtctgtaacacaactgtcccttttgtggctccttttttgccgcaagacaagttcaagggttctccccggacagaataaacactgttctggtaaacactagtgatagttgacctttctaataattctccctgttgctttggtagtgaaagatcaagaggttctacttgtggctcttcttgtgcaccctcagctgtgtacaagtaaccctgtgtatttctggatgaggaaaggtttagaggtgatggggatggtgtactacttctggaaccattggtggttgatcccatctg

SEQ ID NO: 260696 - DNA, 751 bp, Homo Sapiens
  misc_feature (357)..(357): n is a, c, g, or t
catagagttaccatatgaccccgcaattccactcttaggtatatatccaagagaaatgagaacatatgttgacacgaaaacttgtacatgaatgtcaacaggagcattattcataatattcaaaaagctgaaacaacccaaccgatgaagggactttgaaaacatgttaagtgaaagaagccagtcacaaaagaccacacattgcatgattccatttatatgaaatgttcaagatagacaaatgcatacagacggaaagtggattactggttgcctagggctggggagaggagggagaagctggggcccaaagggtatggggtttctttttggggctgcgaaaatactctaaaatcngaatgtggtaaagcatgcataactctgtgaatatactaaaatcactgaattgtttataaagaaaaagattactgtggggaaggaagaaagatttcatggagttggtaggatttgaattcactgataaataagtgatataaaaagcaaagtgatgtgctatagtgaataaacaagcccttctgttgggcagatctggctttaaatccacttggtcaatttacacttcctaaatctgtaacctcatctaaagtgtaaatatattaatatacctactttgtaaaattattgtggtaagttatatatgggatttaaaatatttaatctaatgccaggcacatagcaaatattaataataaatattagttacttattataaatctgtttagtatggaac

SEQ ID NO: 260697 - DNA, 598 bp, Homo Sapiens
  misc_feature (372)..(372): n is a, c, g, or t
  misc_feature (399)..(399): n is a, c, g, or t
ctctaaggaagactttttcgtgccttggggactgctgctctgaagaagactctttcatgcttcctccttagcttctgatggctcctggcagtccttggcttgtggctgcatcacttcagtttctccctccgtcttcacatggccttctgtgtctgtgtctcgcatggccttcttccctgtgtctgtgtctttccatggcctacttataaggaccccagtaattggatttagggcctgccctaatccagtctgatttcatcttaactaactagatctgcaaagactctatttccaactaaagtcacattctgaggtttcaggtagacatgaagttttggggggacaccactcaacccattgcagaacccattnagcagtcaattcccgttcctcaacggnccccctaccccagggcaatcagtaatctaatttctgtctgtttgggatttgtctattctgaacatttcatataaatggaatcatagaatatgtgggtctttttgtgactggcttctttcaattaacatgttttcaagatttaggttgtagcatgaatcagtactttagtactagttatggaatagaaactagtgtatgg

SEQ ID NO: 260698 - DNA, 570 bp, Homo Sapiens
tctcaacatacatcaacgaactcacactggagagaaaccttatggatgcattgactgtggcaaggccttcagccagaagtcttgccttgtagcacatcagagatatcatacaggaaagactccctttgtatgtcctgaatgtgggcaaccctgttcacagaagtcaggactcattagacatcagaaaattcactcaggagagaaaccctataaatgcagtgactgtgggaaagccttcctttacaaagacaatgctcattgtacatcacagaactcacacgggagagagaccctatggctgtgatgagtgtgagaaagcttacttctataaggcctgccttggtaaacataagaaaatacccccaagggaaaaaacggggggattccgtggaaggtggaaaatccttccccaacaaagtaccagctttaaatcccaaggaaactttgccaggggaaaaaacccccggtaaaaaggggaacctggggggcatggggggccaaggcaaaaggtgaaattttgccccacattccgggatttatgggaaaaaaacggtttgccgggttgagaac

SEQ ID NO: 260699 - DNA, 289 bp, Homo Sapiens
ggggagacgaatcccttactagcagagctgtattgagggttaacggtggtaatgggtctccagggcttggtgcagtttgtactcaacaagtacgtaattctctcctttggttgcccctgaatacaagagtggtcttgtacttccctgcctgaaaagtccacagccaatggcactccagtccttgtcacatggttccactcttaggatgtaaattaaggaggtaccagcttgagaggcagaggcaaaggcaaggttaagatgcagctgtgaggctgggccacaagtgtca

SEQ ID NO: 260700 - DNA, 819 bp, Homo Sapiens
  misc_feature (65)..(65): n is a, c, g, or t
  misc_feature (656)..(664): n is a, c, g, or t
aggaaaaggcctccggttggttattcataaaggatcccttttccggaggcattatcttttaaatnaataaacctaaattggcttcaggactatttataaatagcccactaaaatatgatggagggcattccttcattttattaaaggggtagctatatactagagaatatgctcaactactgcctccaaattccaacactgtcattctaattggcaaataggaattatttaaattccaacttcaggacatgagatgagctgcctgccctattttgtcaattgtttccaaaagcattaacggattaagagactgtcttgaacatctcaaacatttgagaaattcaaggttttctttatgttttaagctgatcctatatatggagattttgagataaattggaacacttttagaagaccttcacaaagaatttttcaattctaaaatctattacagatttatataaagtccaagagaacatgtgaaatattttcataatgcagtgaaggattcatctttggcatttctccattcattctaaaataagatacttcaacaaacattttatacttttctatctacctactatacatattttctatacacaaaagtatttgattgaaatttgtgttttaacagcaatttcattgctaagaannnnnnnnnagatatgaaaaatattagtaacattcagctttttactatgagaagctgaagttttgatgttgttgaaatgaatttgctcagtttccttttttggtgaccagcatttcaacatcctatcgaattcagcaatggataaagcagagatactttacaat

SEQ ID NO: 260701 - DNA, 497 bp, Homo Sapiens
ccacaaatatacactgttattcactagaataatctctccaaacgtgctgtttccacataaccagtcttttctttgagggacagcactgttgggagacaacctcgttttcattattatgatagattttttaaaggccttcataattttgcttatagttttaaaaataacaacaccttctaattattgactagtgcaaccactgatttgagaagatacacactttgttcaagggtattcaaccatctccaattgttgaacaaatacacacatacgtatctacagcctatagtgctaaataatcctttgtgttaactttttccaaagcttttcaatcacactgtctgttctgactacacagtatggtacagcgcgtgatgtggagaatgcatgagactaagataaagaacttaagaaatcttacatcttagaatcctagaaatgggtcctcagctttctcttatcacccaaaatattcatcatcatttgcattatgttct

SEQ ID NO: 260702 - DNA, 744 bp, Homo Sapiens
ggggggaactgcaattggtggctttgaaggcgcggcgagcgggaacagctcttgaggagtgagactgcaggagatgtgggccgtgccaaagagatggatgagactgttgctgagttcatcaagaggaccatcttgaaaatccccatgaatgaactgacaacaatcctgaaggcctgggattttttgtctgaaaatcaactgcagactgtaaatttccgacagagaaaggaatctgtagttcagcacttgatccatctgtgtgaggaaaagcgtgcaagtatcagtgatgctgccctgttagacatcatttatatgcaatttcatcagcaccagaaagtttgggatgtttttcagatgagtaaaggaccaggtgaagatgttgacctttttgatatgaaacaatttaaaaattcgttcaagaaaattcttcagagagcattaaaaaatgtgacagtcagcttcagagaaactgaggagaatgcagtctggattcgaattgcctggggaacacagtacacaaagccaaaccagtacaaacctacctacgtggtgtactactcccagactccgtacgccttcacgtcctcctccatgctgaggcgcaatacaccgcttctgggtcaggaattagaagctactgggaaaatctacctccgacaagaggagatcattttagatattaccgaaatgaagaaagcttgcaattagtgaacatgaaaggaaaataaaaattcctcaccagtc

SEQ ID NO: 260703 - DNA, 614 bp, Homo Sapiens
  misc_feature (294)..(303): n is a, c, g, or t
  misc_feature (484)..(493): n is a, c, g, or t
ctgatgttggagcggccgccgctccaccatgaaaacatgtattgaagattggacctaacaatggaaagaatttttttgtgtgtcctcttgggaaggaaaaacaatgcaattttttccagtgggcagaaaatgggccaggaatataaattattcctggatgctaatatctgtagattctctggcatttagtctcttcaaactgtgtataatgtttggtcctcctctgtttcatagaaaagtcatagaatatctatgatacattgaaaagttactgcaatatttgagaactgttcnnnnnnnnnncttgtgtgtgccatctttccattgttggctacgtcttttcttttgccttgatggaacgttctatgtatttcatcggatatacagcatattccatttaggatgtgtatttaatgcatttagtaatgacgataaagtgtttttagtatgcttttagtctcttgtaactggggagaagcagtgnnnnnnnnnnaggaaaggattatgcgacacaataaaataagatattctgtctgtagtgaatacatttctcatgtactaacactatttataatatatgattaaagatatttcttgttttattaaataataaa

SEQ ID NO: 260704 - DNA, 270 bp, Homo Sapiens
gtcctgtggaaatcatatagacaaacatttgcaaagctgctactgccattgtaccagtgttaaactgtgttctacattgcatcttttactgatttttatgacagattttatattgtaaccattcgagaactctgtaagtgctatggcttccttaaactacgatttatcatatgctcccggtgtttactttgagactgaatggcaaccagagaatgtaaacaaccaaggtgcatctggttatgttttaaaataaagattaataaaacgttt

SEQ ID NO: 260705 - DNA, 1056 bp, Homo Sapiens
  misc_feature (848)..(848): n is a, c, g, or t
  misc_feature (1001)..(1001): n is a, c, g, or t
gcaggctggtaccggtccggaattacgggatatcgtcgacccacgcgtacgctttaattaaagggagcaaaggggcgttccacatggacaggaggcttggaccgaggcctggtcacagcagcgagcatccaggtttgcagggacgatgttacagactctgttttctgcctggcgtttcacttgtgtctgctcctagcctgtgctctgccagcagcacagacatctgctccatcagacctcttccattttgcacagggagtgcaggaggtgaatgttcactttctgttctccagtgtcactgttctgtttccacgggatggaaagcgcatgggcctgtgtccattgtagatttccttctagatttctgtgtacacacacttgattgttctggatgaatgtcttttttaatactccgaaaatttcatcatctaagaaaatgattccatacaaataactcagcacacaagtgacccaggacatatgcctgccaaagggatgtgttagaaggctgccttctcatgcgcatagtcacttggatcttgtggtgaggacggccccatctttcttgccacagattgaggccacttttgagcaagggagatcctggagttaagacaggtgttgggggcagcctgtattttaccctaggggcaggtctgcatggtgaccccacattgcactggtaaaccatttgagtcccactcttcatcctggaagtgggaactggagtcccacccacagtgcattcagaaagcatgctgtgtgggggctgcttctcaggaggccaggcccttctgagcggaaccgtcctggagagagcctgccctcgtttccaggctgcagccgtnaacgcactttctcccaggctgagggcgggtgttctggggtgtctgccctctgtcggccctgcttcctgccaggacgtggcctcttccgatccttttctctcagacactggaggtctcttcttgccatttgtgctggtcccatcccaagaattntagggacagagaccacaatgggttcggcggacaaaaagtccattccaggacccag

SEQ ID NO: 260706 - DNA, 738 bp, Homo Sapiens
  misc_feature (403)..(423): n is a, c, g, or t
  misc_feature (586)..(600): n is a, c, g, or t
tggtaccggtcccggaattacgggatatcgtcgaccacgcgtccgctggggacaaagagggaggagcccagggcttacctcacgtgagagtgctccccagcaggcatccactaccccaggccccccacatgtcatggcaaggttggtagtgaatgggcctggttgggagcagcccctggcccattgcccacccacccatctcactatgcaattcgagttccaagcaacatttgctcctgccctgggccagctctgccccagccctgagaggggtggtgaggcagccccctggaccccagaaccccagacaagggggcaggcgggggaccagggcctctcctgtgggatctttgttttgtgtttaaccataatggttgtgtactgaaccacttcatatttgtannnnnnnnnnnnnnnnnnnnngatctccttaagactcagcctcctggtttacccccccggcctgggcatctgacctcccccaccccagtgtgatttaacatccaggaactgaggcctgaaccattttgcatttccccctcctccagcctctgtagggccatggctgtatgtactgtcgctgtgnnnnnnnnnnnnnnnagaactgggtttgggggctgatttttatttctttgggggctttttttcttggcaaatactaaaaatctcgtcaatgtaatttctgtggtttctattcagcttgggtttcatgttttaaaataaattttaaaaagcaaa

SEQ ID NO: 260707 - DNA, 537 bp, Homo Sapiens
agaactgagaaatctccagagaaacgtccagagaaatctgtgaagtccacaagtgtggaagggaaagggaagtgtgattaggctgggatacagaaggctaacagtacactttatatgagaagagcttagaggtcaggagagcacaatgctgaggggtttgtttggttttatttttcccctctggaaacttggagaaaggaggacaggataagatgataagagggcaccattgtttggttttaaaggtccctccccaaccccccacaacaagaaagctcattttaatgagatgagagaaggggagaaagctccctccgttctgatgcttttgagcttatcagggacaccctgcagcagaaattccagctgatccttcagccttcagagttgatgaggtggggctcacacacatctggatttgaagaagaatcgtgggtttcaagaactctgtggtctcttaagcattggtattccacagctacacttccctgatactttgcactcagtaatgacaaaataaatatttgtagaatcgaa

SEQ ID NO: 260708 - DNA, 949 bp, Homo Sapiens
  misc_feature (658)..(688): n is a, c, g, or t
  misc_feature (881)..(881): n is a, c, g, or t
ggtcacggtgatggctgaccagggctccctgacctatacaggcctctgctatgggggtgatggccagtcctggtgtctgagtgattcccagggcccagcaaagggaccaagtttccagagccctgaagacaaggggtaacaccccaaaatatggactcattttccactccaccttcattggccgagcagctgccaagaacaaaggccgcatctcccgatacctggcaaacaaatgcagtattgcctcacgaatcgattgcttctctgaggtgcccacgagtgtattcggggagaagcttcgagaacaagttgaagagcgactgtccttctatgagactggagagataccacgaaagaatctggatgtcatgaaggaagcaatggttcaggcagaggaagcggctgctgagattactaggaagctggagaaacaggagaagaaacgcttaaagaaggaaaagaaacggctggctgcacttgccctcgcgtcttcagaaaacagcagtagtactccagaggagtgtgaggaaggagataggggctgaacttgctcaagagcccagagagctggttgtagctcacaccccgttccctgggaatgtgtgttctgtcctcggctgcctcccaagaagcctcaaactggggtagtgagacgagnnnnnnnnnnnnnnnnnnnnnnnnnnnnnnnccccaggaggttcctcaggagaatggaatggaagacccatctatctctttctccaacccaagaaaaagaaatctttttccaaggaggagttgatgagtagcgatcttgaagagaccgctggcagcaccagtattcccaagaggaagaagtctacacccaaggaagaaacagttaatgacccctgagggagcanggccacagaaagtggctcccaagaaaaagaagaaaattctcccaaagaaggagccgggtcagcaagtg

SEQ ID NO: 260709 - DNA, 889 bp, Homo Sapiens
  misc_feature (332)..(360): n is a, c, g, or t
  misc_feature (683)..(683): n is a, c, g, or t
  misc_feature (746)..(746): n is a, c, g, or t
ggcatctcccgatacctggcaaacaaatgcagtattgcctcacgaatcgattgcttctctgaggtgcccacgagtgtattcggggagaagcttcgagaacaagttgaagagcgactgtccttctatgagactggagagataccacgaaagaatctggatgtcatgaaggaagcaatggttcaggcagaggaagcggctgctgagattactaggaagctggagaaacaggagaagaaacgcttaaagaaggaaaagaaacggctggctgcacttgccctcgcgtcttcagaaaacagcagtagtactccagaggagtgtgaggagatgagtgnnnnnnnnnnnnnnnnnnnnnnnnnnnnnccccaggaggttcctcaggagaatggaatggaagacccatctatctctttctccaaacccaagaaaaagaaatctttttccaaggaggagttgatgagtagcgatcttgaagagaccgctggcagcaccagtattcccaagaggaagaagtctacacccaaggaggaaacagttaatgaccctgaggaggcaggccacagaagtggctccaagaaaaagaggaaattctccaaagaggagccggtcagcagtgggccctgaagaggcgggttggcaagagcagctccaagaagaagaaaaaagttccataaagcatcccaggnaagattagaatgcaaatgggacatcctcctggggaggtgggggcataaccatagcccaaaggntgacattttcccacccctggggcccgtggttcccccaaattaaaaaccaaatttcccccccgaattcaatcaaacattaccacggagaattcggtcggtcctcctttgtttctggggccgcccccttcggggcccccctccgt

SEQ ID NO: 260710 - DNA, 929 bp, Homo Sapiens
  misc_feature (473)..(483): n is a, c, g, or t
gagatgagtgaaaaacccaaaaagaagaaaaagcaaaagccccaggaggttcctcaggagaatggaatggaagacccatctatctctttctccaaacccaagaaaaagaaatctttttccaaggaggagttgatgagtagcgatcttgaagagaccgctggcagcaccagtattcccaagaggaagaagtctacacccaaggaggaaacagttaatgaccctgaggaggcaggccacagaagtggctccaagaaaaagaggaaattctccaaagaggagccggtcagcagtgggcctgaagaggcggttggcaagagcagctccaagaagaagaaaaagttccataaagcatcccaggaagattagaatgcaaatggacattctctgggaggtggggcataccatagcccaaggtgacatttcccaccccctgtgccgtgttccccaataaaaacaaattccccagaaggggnnnnnnnnnnntgttgaatgcggcgccgcacaaccctccgccgtgtcccgcgtccagatgagcgggggcctgtgcccgcccctgggtggacttcctcgacccctgggttagggcgttcaacaccttcttcctgaggggccgcgcctcgatacgaacatggtgtggcggcccccgctcttttgtagtgggtccccgaagacgaaaacctgacccagccccgcgcagagtaggtcggccgccacggaccgcatcgtgccagcccgcgggcggcggagggatgcatgtgctaacatcataacccaaaccgcgccctaggcccagcccagaagattgtttcgtcttttggtgccccgccctcgcgccgtatgacacggattcgttatcgtgcggggctgtacgggagtcggatgcctgtcaccactgacattctccagagagacgggtggccctcccatat

SEQ ID NO: 260711 - DNA, 462 bp, Homo Sapiens
cagaacgtgctgtgtggatgcggcgaaacgctgaggcgcggccttcgctgtgtggtggggactcacaagaccgacgtcaagatgatgctttcaagggccaaacctgctgtaggcagaggcgtacagcacactgacaaaagaaagaagaaaggtaggaagattccaaaactagaggagctactttcaaaaagagatttcactggagctattaccctgttggagttcaaacgtcatgttggggaagaagaagaggatactaatttgtggattggatattgtgcctttcacctgggtgactacaagagagctctggaggaatacgaaaatgctacaaaagaggaaaattgtaattctgaagtctgggtgaacctagcttgcacctacttctttcttgggatgtataaaccagctgaagcagctggatttaaagcttcaaaaagccgactcccaaaaccgcctcct

SEQ ID NO: 260712 - DNA, 281 bp, Homo Sapiens
tgaactgagaaggtaagaaaagcaatttaaagtcagcgagcaggttctcattgataacaagctccatactgctgagatacagggaaatggaggggggaaagctggagtattgatcccgcccccctccttgacgcgtcagctccctgtcctgtgtgtgggcggaacatagtccagctgctctatagcaagtctcaggtgtttgcagtaagaagctgctggcatgcacgggaacagtgaatgccaaacacttaaagcaattcgatgtttaagtatgtaagttc

SEQ ID NO: 260713 - DNA, 866 bp, Homo Sapiens
  misc_feature (508)..(521): n is a, c, g, or t
  misc_feature (738)..(738): n is a, c, g, or t
gtgacaccactcagccacccagagtacgtgtttacaggctttccagatcaccttcctgtggggtgaacgtaatgaggcggggctggtccttggaatttcccctggaaaatggtaacagactccatccttgacccggggatgagcatgaaggcattgtcccaaaggcagaggccaccgtggtaggaattccaccaaggccagaagggaaaaaggaagaacccaccgtgtctggctgtgcgggccctggggagggtcgtgagtgcagcccctctctacttctgtgcctttgtaaaacgtgtagataaccgcagtggttggctgagccaagtaactcttcctaaatcagtggctttctccccaccccttgcttgggagtcatttttaaaaaaatctgtgggatataaaattggcctcctgctgcttcagcctacctctccctctgctgacttaatgtcgtgattctgtttcttcagatatttaaggctgttaggttgtgtgagccttgaannnnnnnnnnnnnncccagcgactgtccactgtccaggagatgcatgtctttgtattggagatatttctgtaactcattctcttggtgctcacgattgccatggccatagggccacagtgccgtatctgctgcagacatgattgtttcttgttctagaggttttcttgttttcgaatcttgcctgatgaatccagccagaccaaggggcctagatttgacctctgtcctgngctcctgggccaggtgcaggaacatctgaggccactctgctggccacctccagtgggtgctgaccacaggatgggctttgtttacactcattttcaccctgattcttgcccccactttcataaaagaa

SEQ ID NO: 260714 - DNA, 393 bp, Homo Sapiens
aaaattcatgtttattcatatttttcaaaatatatgtacattaaaaaaggaagatttacaacaggaaagattgccttacatgcaacacaaattccaatgaattcatgatgggatcacacatgattatgatctaattcaagccaatcttctcaagtccatttcccagccatactttaggctacagaagggatcccaggagacaaaagtggtttgaataagaaacaaacatcttttgcctctggcagtactcaaggggccagaagatgtacttcaaaaactttaagacaattaaaatgtcaagtgccacagggaagagaaatgataaccagaaatttgtatttctagctagtactatttaacacaacttcacaatactaaaacaaaatacaaata

SEQ ID NO: 260715 - DNA, 579 bp, Homo Sapiens
  misc_feature (569)..(569): n is a, c, g, or t
cggcacgaggagaaactacaaatggttatactgattagtgtctagcctagagtggtaaccatgctttactaattcagttatgaaatacattatttataatgcattagctgtattagctgttgcttttttgatgttcaggataactatgttatctcatttctgcatttaattaatagctcgagtattaaaagcccactcccttcaagaaaagctttgattttccccagtcatgaaagcccttgtttcaaattctttaatctctgaacctagtatcataagaatttcctcttttgataacatctgtactttcatattctgctcactatcaaatgtattgttaacacttagtaagtttgaaaatgaaggggttttatctgcatttgacattgaaccttgaagtactttaagtactccaaggggaaaattaaagtggaagtttcttcggatcttgtttagaaaaaactataaataaaaaattgatgctaccaaattgtgccttcctaaataacatttttgaggggcattttaacagcagtttacaaatatggtaaataatagggttaaaaccnaatcttggat

SEQ ID NO: 260716 - DNA, 1078 bp, Homo Sapiens
atcttatcagcagaaaagttttattccttttgaggacaaacaattaaaccacatccaaggtcttaacttacagacagaaaccaaagtagccatttaaagcgttagatatcggatacaagacatacactggggagaatgcttcaccatctgaagctcacaccacaatggcccagtggacagctgtgcactctgcttgtgcttaagtgcctgggtgtggctgaggggaaggcgtgtctgcagaacagaagaacagctgtgtttcacaagtactgaagcattttagactgcatgggggggtatatattttcatgttgaagggaagaggggaaatcagcaaagtccctcccacagagcattaggctgccttgcagagagccacggcagagaagcggacttctccttgctcacgctcggtgaattctctgcagaccttggcagcgtccttcagcagggtgtcctctgaactggcgccatggttcaccggaaaaggcattcgtccatcaagttcatagaggtggccatccacgttgttaaacagaataaaatggaaattcaccttgtcatctacccgacattggccttcctgtgccacggcatcatgggctgcctgtatggcctcattcttttcaaagcattttgctctgtcttcaggggacattttctctgtttcagaaagaaactgtttcagaactgatccatcctcaaatcccagtttgtcttgattattggccactgcgtgaataagtccgattgtgccacaggaattcccaatggtctgcttcatgaagtacactttaggactaacttcttgtcccttcagctcttcaatctgctttttcctgaagttctcatgctgggccgtgaggggaaacagcagcagcagcgcgcaggcaggcgctggcaccgagcccagagactcctcttccagccccagcacgtccacgaagcgccactggccggcgacccccagccgggacagcactttgttcagcatctcggggttgatctccatcggcttgagctgcatcttcgcggagcgcccggcagaaatagcctagggaagacgaaaaacagcccc

SEQ ID NO: 260717 - DNA, 462 bp, Homo Sapiens
aagattctgataaggaagaaaggggcttggtaggtggccatccctactctagtctgaagtccatctttctgccccatccttccaccccagtggaactaacaaagcccagcctggcaggtaccaaaaactcttggcccactcccttgtgtggtacaaacatggttttcttctgctcacactcaagctgaactagctggagatgatgacctctctacagattgactctgcccctgaagggcaacctgctaccagcccagaaccttctggctgggtcctttgggtccagaggctctaccatccctcctcccagaggcccggctgtgcaaggcaggagccctgtcttgggcttggccagcctgcctaagatcgtgccctcttcctctctctgcaggctgggctggtcctggttttgcccgcactgcaggattactctcttacagtgcccaaattagaaataatcca

SEQ ID NO: 260718 - DNA, 1197 bp, Homo Sapiens
  misc_feature (743)..(743): n is a, c, g, or t
  misc_feature (866)..(866): n is a, c, g, or t
  misc_feature (869)..(869): n is a, c, g, or t
  misc_feature (911)..(911): n is a, c, g, or t
  misc_feature (939)..(939): n is a, c, g, or t
  misc_feature (953)..(953): n is a, c, g, or t
cctgacgtcggcggagggaagccggcccaggctcggtgaggaggcaaggttctgaggggacaggctgacctggaggaccagaggcccccggaggagcactgaaggagaagatctgccagtgggtctccattgcccagctcctgcccacactcccgcctgttgccctgaccagagtcatcatgcctcttgagcagaggagtcagcactgcaagcctgaagaaggccttgaggcccgaggagaggccctgggcctggtgggtgcgcaggctcctgctactgaggagcaggaggctgcctcctcctcttctactctagttgaagtcaccctgggggaggtgcctgctgccgagtcaccagatcctccccagagtcctcagggagcctccagcctccccactaccatgaactaccctctctggagccaatcctatgaggactccagcaaccaagaagaggaggggccaagcaccttccctgacctggagaccgagttccaagcagcactcagtaggaaggtggccgagttggttcattttctgctcctcaagtatcgagccagggagccggtcacaaaggcagaaatgctggggagtgtcgtcggaaattggcagtacttctttcctgtgatcttcagcaaagcttccaattccttgcagctggtctttggcatcgagctgatggaagtggaccccatcggccacgtgtacatctttgccacctgcctgggcctctcctacgatggncctgctgggtgacaatcagatcatgcccaagacaggcctccctgataatcatcctggccataatcgcaaaagagggcgactgtgcccctgaggagaaaatctgggaagagctgagtgtgttanaangtgttttgaggggaggggagacagtatcctggggggatcccnagaagctgctcacccaacatttcgtgcnaggaaactacctgnagtaccggcaggtccccggcagtgatcctgcatgtatgaaattcccgggggggtccaagggccctcgtttgaaacacgcttatgtgaaggcctgcaccctatgggaaaaaatccctgggagaaccctccatttcctaccacccctggaataaaggggggtttttaaaaaaagggggaaaaatggattctaaaccccaaatttccaccacggcccccatgggggaaaggggttcttgggcccaat

SEQ ID NO: 260719 - DNA, 845 bp, Homo Sapiens; identical to SEQ ID NO: 169553
  misc_feature (753)..(756): n is a, c, g, or t
  misc_feature (764)..(764): n is a, c, g, or t
  misc_feature (768)..(768): n is a, c, g, or t
  misc_feature (772)..(775): n is a, c, g, or t

SEQ ID NO: 260720 - DNA, 1653 bp, Homo Sapiens
ggtctcccatggccgcgtatttcgccgtatgggcctcggtcccgagtcccgcatccatctgttgcggaacttgctcacagggctggtgcggcacgaacgcatcgaggcaccatgggcgcgtgtggacgaaatgaggggctacgcggagaagctcatcgactatgggaagctgggagacactaacgaacgagccatgcgcatggctgacttctggctcacagagaaggatttgatcccaaagctgtttcaagtactggcccctcggtacaaagatcaaactgggggctacacaagaatgctgcagatcccaaatcggagtttggatcgggccaagatggcagtgatcgagtataaagggaattgcctcccacccctgcctctgcctcgcagagacagccaccttacactcctaaaccagctgctgcagggtttgcggcaggacctcaggcaaagccaggaagcaagcaaccacagctcccacacagctcaaacaccagggatttaactggatctgaagagtctgcagcccttaatcagtacccatgatcacaggcctttggagcacttttactctctgagaagaactggagctagagatgtaaaatggacagtcttgatggggttgagaaccttctggggagccagatgaccctctctttgcacaatagataaaagtctttatatgaatatatataaattaatttattttttccttcctgtgggatttctggagaatgagaattatccaaatgctcagtctacctgagatagtaaattcatggcttatgcttctggtccttaaatttgggttattttggttagtgcaatttgtttttcttaatgccagtttacatgggaatgcatcctataattccaaatgttgccagaggtggcttgtgtttcgacatctggtctcctagagatgagtgcttgggatcttctctagagaaagattacttcctgacagggcgtagggcagtgacaactctgcaagtgaaacttccttaaacaatctagtaccctgcgaaccttccaaggggatactgcaatcagtcctctgtctcgagcgcaggatcacacattaccttaactgtgtccccttcaaaccccctgaatgggccctggcgacggagaggacccaagacaccccagcatgtccaaccaagttcggcacaaaaacgaggcgtgcaaccacaaccccagccagagagatgctagggcctcccaaggatcacagcctccatttccctccttcgcgctgagccgccacaacgcggcgctaaacaccaacacagacagggcacctcaaatgccgacgccaccaacagcgactcccacgcgcccaacaactctcaacagaccctcccttaagaggaacttcatcccctcaggcggaaggctttcacacccattcccggtcaccgtccccacccatccttgggcccttacctccttggggcaggaaacaccccgcgagccaaacacaagggcgcaaacgcatccccaggggcttctcccaaggcaaccacttgctgcgacgaacagccttgggaccagaagcaccccacccattcccttttgcagcgcacacacaggcacccaaggcgactatcggccgcttccccaccctttggggcagctctcccagacagg

SEQ ID NO: 260721 - DNA, 523 bp, Homo Sapiens
ataagaacaacagcaacaaaaggctccaaaacacacatgcctctttgttttgatgcttctaaagcaagccatgtctcagtcactttgcagttgccaaaagtcactatcacatggactgtaaatgcatatgcatgatttcctaaactgttttagaactctccttaacaatctcaactaccctatttttccctgttccctggtccacaggctgacaactgcagtctccagtttagaataaatattccatagtggtgacatgtcagctgcccactgatactcctttggaaaatggtgcgctgtggatcaagacactttggtatgatgcatatacaagttggaagactaaagaggtgcagtgtgatctgagcctccatcattgtcctccacaaacatattttcatattctttatgtggaagaatagattttaaagtacaagccaaatgattttcattggtggaactgacacaaaaaaagtaacttaaaaacaagaaacttggttattgaataaacagataagtttta

SEQ ID NO: 260722 - DNA, 542 bp, Homo Sapiens
gatggatgcctccattgggcaggcttgtgaagcccaggctaaggcttttaaagataaagtagatgtagcctcagtaatagtgacaaaacttgatggccatgcaaaaggaggtggtgcactcagtgcagtcgctgccacaaaaagtccgattattttcattggtacaggggaacatatagatgactttgaacctttcaaaacacagccttttattagcaaacttcttggtatgggcgacattgaaggactgatagataaagtcaacgagttgaagttggatgacaatgaagcacttatagagaagttgaaacatggtcagtttacgttgcgagacatgtatgagcaatttcaaaatatcatgaaaatgggccccttcagtcagatcttggggatgatccctggttttgggacagattttatgagcaaaggaaatgaacaggagtcaatggcaaggctaaagaaattaatgacaataatggatagtatgaatgatcaagaactagacagtacggatggtgccaaagttttagtaaacaaccagg

SEQ ID NO: 260723 - DNA, 1301 bp, Homo Sapiens
  misc_feature (1152)..(1152): n is a, c, g, or t
  misc_feature (1172)..(1172): n is a, c, g, or t
tcagctgttaaccaaggggaaatacatcagatctgcaacacagaaatgctctgcctgaaatttccaccatgcctaggactcaccccatttatccaggtctttctggatctgtttaatcaataagccctataatcacttgctaaacactgggcttcatcacccagggataaaaacagagatcattgtcttggacctcctgcatcagcctattcaaaattatctctctctctagctttccacaaatcctaaaattcctgtcccaagccacccaaattctcagatcttttctggaacaaggcagaatataaaataaatatacatttagtggcttgggctatggtctccaaagatccttcaaaaatacatcaagccagcttcattcactcactttacttagaacagagatataagggcctgggatgcatttattttatcaataccaatttttgtggccatggcagacattgctaatcaatcacagcactatttcctattaagcccactgatttcttcacaatccttctcaaattacaattccaaagagccgccactcaacagtcagatgaacccaacagtcagatgagagaaatgaaccctacttgctatctctatcttagaaagcaaaaacaaacaggagtttccagggagaatgggaaagccagggggcataaaaggtacagtcaggggaaaatagatctaggcagagtgccttagtcagggaccacgggcgctgaatctgcagtgccaacaccaaactgacacatctccaggtgtacctccaaccctagccttctcccacagctgcctacaacagagtctcccagccttcttcagagagctaaaaccagaaatttccagattcattgaaagcaaccccccagcctcttccccaaccctgccgcattgtcttaatttttaggaacattagggttcttctttcatgtagttcctcattaaggcaggggccagaatatctcagccacctgcagtgacattgctggacccctgaaaaccattccataggagaatgggttccccaggctcacagtgtagagacattgagcccatcacaactgttttgactgctggcagtctaaaacagtccacccaccccatggcactgccgcgtgattcccgcggccattcagaagntcaagccgagatgctgacgntgctgagcaacgagatggtgagcatcagtgcaaatgcaccattcagcacatcagtcatatgccccattgcagttacaagatgttgtttcggcaaagcattttgatggaatagggaactgcaaatgtatg

SEQ ID NO: 260724 - DNA, 621 bp, Homo Sapiens
  misc_feature (69)..(78): n is a, c, g, or t
tcatttctccatgtcatcaagaggttggataacttatttctaagctcaaggtcaaaaatcatgtcaccnnnnnnnnnncccccaacacagacctcagaaaaattgcgattgaggaagtagcatgatcctaaatgtgtttttgaaatcaggcagcccgagcctctggtctctccagagagcccgtcttcacatttctctattcctcagcactcacccgaaactgaacagatggggagtggtcttgattgtcaagataaaactggtgaagaaagctaaatgctgagaaactgagcatctattgtcgtgtttaagcttagctgggtcctttctagtttgtttttacagcttactaggtgaagtagtttgcactatttttgcaataaattcatggaaaacctaacagttacttgttttgtttcttactgtgtgtatataaactaatactaaaagtttggcatagtgttttttcacctccttacataacccctaacatgcacagaatgctgtaaatctgataaaatatgatgtgaatgatattttataaagttattttgtatggtgtcaattttgttttgcctcatagtatgtcagcaaaaaattaaataaaagtcctcctattta

SEQ ID NO: 260725 - DNA, 1648 bp, Homo Sapiens
accgttgaaaggcatagaattgactctgttcctaacaatgcagtattctcaattgtgttactgaaaatgcaacattagcaaagaggtgggttctgttttccaggtgaaacttttagctccatgacagaccagcctgtagttatctgtgtacacagtttacagctacaaaaacctactttggtatttattacagaaaagtgctcagttaaatgtaagtgttattccttcagcaaaatattcactgacccaaaactctttatggcattttacaatgcacacagcctcatgcaagtttagacaagtggatttatactgtcttatgagtgcccgcccctgatatattacctcattatgcaaaaataacatatctttcatgactattttgacaaaagtttaaaacacatatgaagttcaaatttcaggaaccaaggactgccagaaaatattagcctctacattacgcatgcatttagaagcttacctgaaatctgccttttataaaggaatagtatggataagtggaattgtacattttttaaacttgattgccattaaagcagaaattataaggttgcaacaatatttgtttctaatcactggctttctcaagagtatgggattgacatattgtgttatgaatgcacatctctcagatgtgttgaagcatccattgcatccattttttattattttcttagttttgttcttggacaaatttaaacttttaaaagattattcaagatgaatttaaaagtcaacccttcacacagtttccctactgtatgtagaatccagggtgctgaaaccaagtgtttcttttcccatgctctttgttaaaccccaattatagataatttttccagtcttaagctctgtccaccttcaagtcaattcataaccaaggttttgaacgctgctatgaattgcactgtgaaaagcactcttccctctcagttttcttttcatcccagccatgtttatcagatccttaagaacattgtatttcagtcttttacatcagtctgaattttggaaaagaatgcaatagttgtactccacagtcagtggaactgttccctgagtccgaggctcatgtgtcattctggcactacatttgcttaaattgctattttggcaacagcacagaaaactaatatttttaagcagagaatcttggcaatgagtgagagatgttaatttcacagaagcacaactcccaacccaacccttaggaaaagccctcttccatcgttacagtgctcagtgaatattaatttagttctgcttaagtggttgctatacaaactttgaatagccacctaataaataaaccttgcatgacaaacctgcaaaatattttatcagctgttattggaaagtgattttaagcaattgcttcctcagtgtcagggcacatgtgaatttccacaccaaacagagcatgaggaaccagttgacatgctgggttgtgactggcagctttagcagcctcggtactgaagccacaccagtgtccggatggaagtctgcatctgaggttgctcagtgtcccggtcattcatttacacattttaacttgcattaaagagctgttcttttctgtggcctagactcttttcactgatctcaaaataaactggtttttttc

SEQ ID NO: 260726 - DNA, 1888 bp, Homo Sapiens
  misc_feature (35)..(36): n is a, c, g, or t
  misc_feature (39)..(39): n is a, c, g, or t
  misc_feature (137)..(137): n is a, c, g, or t
  misc_feature (1157)..(1157): n is a, c, g, or t
agcctgtccccgtcctggggtgctcccttacaganncgnaatggggacagaggtgggcaaaatgaagtcgaagggtttgccaccacacgtcacaaatgatgccaaaggacattcccacttcccgaaggggccgctgnccaaggcccaggcaggacaggtggtaggcttggtgcagaacttgcggtcacacagcaccagctgcccgccatcaccgcagcggaagcactcgtcctctgactgcctcttcccttccccttttgctctgcgccgcctcgttttcttcttggtctttttgcccttttcctctgatgaaagggtcgtcgaggtctttggtctatccccgaggaatccactgcaattggaggctccacaccggcagaccgttttttcattgcccagacaatcgaggttgtagttaaaagtcagctccgtccctgcaggaatgtcacagacggcaaacaggcccacacgagtgtccccattcactgtccacttgagggtctcacagttgggctggcagctgtgattcataaatcgagagtagtttcctttggggccagcgtctattatacggtccttgtctatagtgagcatgtagaagtgggtgatgtcgttctcgtgtgcgtgcttgattctcgccatgcactcctcctcgtcgatcagctccccaacgtactcgttaacaaattctccctttctgatgtccctcttggcgaccaggccccaccctttgccatctgtcttgatgatcttggtctctgggtactggcgcttggtgaagcactggttctggcagaactcgcccgcgggacacacctgcgggtggcactcaaacatcagcatcctgttcagacactccgaatcaaagccacaaggattctcatctgtgggcttgcagttgcacttagggatttctgaaatatccgctgtgtagatctggaaaaaacagtaaggcttattcaccttgatgtgcttgtatggtgggggcttgcgctcgctctccctgtgtttctcgggctttccctctgaagcttaatttcacgaaaacgagcttcagcttcttgcagtgcgtttttgaagactcttcccgatcccctctgacccccctggtaggcggctgccccggtccccctccatgtacgggaacactcgcgccntgatgcgtccagtaataatctttagacccaaagaaaaacacagggaattctccaatctcgtgcttcattttctgaatatttgggggaacatttttgggatggcaaacttctgccggccaccatctgtagttcccaagtttcacccaaatgatatcctggaagtgcagcttcttcccagccctgcagtcattgcagaaccagctgccgtcaggcatctcgatgttcaggcagtcagggtggaaggccgctgggcaggactcacagcacagaaggctcccccctttggagcacacgaagcaccagctcacgttgacgtgggcgtggtgtcgcttccccttccgagcagtgaagtgggcagtgcagatgatgctgttggaggcgatcactgagcatcctgctgccagacaagcatccccgctgtgataggcaacggggcagcggacacaccgcatcattttaccttttgacggccttgggtttgaagggttggaagcatggcagctcacacagctgtggagggggcagcggaaacctcggctctcaaatacagtcagagggtattttttcacacaagcctcatggtaaaattttccacactgagttaccacacagcgcttaacatctgtcttgctctctttacacacgaaacatgagtgaatcccttgctcactagtccaagcattctccagcaaaaagatccagccatcaaggattaccttgctgcgatctga

SEQ ID NO: 260727 - DNA, 652 bp, Homo Sapiens
actataaagccaccacattgtatggcatttgtttagaagtaagcaaatagaccaccggaatagaatagatggcctagaaatagatcaagacattctggtccgccatattagaaatttaaaccctcttcacaccctgtttgcatttctgcaggtctgtgtgagtccactttcttttttgttccctgctaggtagcacacagctgtgaggagcccaggactgctgcctgccgcagcccacctgtgcgctcagattcctaccagcttgatgagttagctgatgggccatttgtgcataccaactacccacagacatttctattacccaccctctggatgccagtgcattaatgattctagaattaggagaaaccaaagatcccttctctctccctcccacaaccagtgtcgtcgtgttcctagaaataagagtagaaacccctctatctgggttaaaacagcaaacctgccttctgtaactgtgcatgaagttcctctgtctcccacttacttcggattaacaccttcctctttccccttccctgtttgaagggtagcatttctaggtttaaggcaatatgcaaaaagacccaaagttaggccctggctcaaacactgtgggtagcagatttgaaataaatttaaattgcatgtt

SEQ ID NO: 260728 - DNA, 746 bp, Homo Sapiens
cggcacgagggcggcaaggtcttcagttactactcatgcctagcacgtcatcggaaaattcataccggagagaaaccttataaatgtaatgattgtggcaaagcctatactcagcgttcaagcctcactaaacatctggtaattcatactggagagaacccttaccactgtaatgaatttggtgaggcttttatccaaagttcaaaacttgcaagatatcacagaaatcctactggggagaaaccacacaaatgtagtgaatgtggtagaacttttagtcataaaacaagtctggtgtaccatcagagaagacatactggagagatgccatacaaatgtattgaatgtgggaaagtctttaactccactacaaccctggcaaggcatcggagaattcatactggagagaaaccttacaaatgtaatgaatgtggcaaggtcttccgttatcgctcaggcctcgcacgtcattggagtattcatactggagagaaaccttacaaatgtaatgagtgtggcaaagcctttagagtacgttcaattctgcttaatcatcaaatgatgcatactggagagaaaccttataaatgtaatgaatgtggtaaagcttttatcgaaaggtcaaacttggtttaccatcagagaaaccatactggagagaagccatacaaatgtatggaatgtggcaaggcgtttgggcggcggtcttgcctcactaaacaccaacgaattcatttctagtgaaa

SEQ ID NO: 260729 - DNA, 3278 bp, Homo Sapiens
  misc_feature (2657)..(2720): n is a, c, g, or t
  misc_feature (2881)..(2881): n is a, c, g, or t
  misc_feature (2984)..(2984): n is a, c, g, or t
  misc_feature (3065)..(3065): n is a, c, g, or t
  misc_feature (3080)..(3080): n is a, c, g, or t
gtttaaccgagtggctcgaggcatgctgcatcaggaccacattacctttgccatgctgctggcaagaatcaaactgaagggcaccgtgggggagcccacctacgatgcagaattccagcacttcttgagaggaaatgagattgtcctgagtgctggctccacccccaggatccagggcctgactgtggagcaggcggaggcggtggtgaggctgagctgccttcccgcgtataaggacttgattgcaaaggttcaggcagacgagcaatttggcatctggctggacagcagctccccggagcagactggtgccctacctctggagtgaagaaacacctgcaacacccattggccaggccatccaccgcctgctcctgatccaggctttccggcccgatcgcctgttggccatggcccacatgtttgtttcaacaaaccttggggagtctttcatgtccatcatggagcagccgctcgacctgacccacattgtgggcacagaggtgaagcccaacactcctgtcttaatgtgctctgtgcctggttatgatgccagtggacatgtcgaggaccttgcagccgagcagaacacgcagatcacttcaattgcaatcggctctgcagaaggctataaccaagcagataaggcaattaaacaccgctgtaaagtcgggcaggtgggtgatgctgaagaatgtgcatctggccccagggtggctgatgcagctggagaagaagttgcattccctgcagccgcatgcctgcttccgactcttcctcaccatggagatcaaccccaaggtgcctgtgaatctgctccgtgcgggccgcatctttgtgttcgagccaccgccaggggtgaaggccaacatgctgaggacgttcagcagcattcccgtctcacggatatgcaagtctcccaacgagcgtgcccgcttgtacttcctgctggcctggtttcatgcgatcatccaagaacgcttacgatacgcaccactggggtggtcaaagaagtatgaatttggagagtctgacctgcggtcagcttgcgatacggtggacacgtggctggatgacacggccaagggcaggcagaacatctcaccggataagatcccgtggtctgcactaaagaccttaatggcccagtccatttatggcgggcgcgtggacaacgagtttgaccagcgtctgctcaacaccttcctggagcgcctgttcacaaccaggagtttcgacagtgagtttaagctggcatgcaaggtcgacggacataaagacattcaaatgccagatggcatcaggcgaagaggagtttgtgcagtggggtggagttgctccccgacacccagacgccctcctggctgggcctgcccaacaacgccgagagagtcctccttaccacacagggtgtggacatgatcagtaaaatgctgaagatgcagatgttggaggatgaggacgacctggcctacgcagagaccgagaagaagacgaggacagactccacgtccgacgggcgccctgcctggatgcggacactgcacaccaccgcgtccaactggctgcacctcatcccccagacgctgagccacctcaagcgcaccgtggagaatatcaaggatcctttgttcaggttctttgagagagaagtgaagatgggcgcaaagctgcttcaggacgttcgccaggaccttgcagatgtcgtccaggtgtgcgaaggaaagaagaagcagaccaactacttgcgcacgctgatcaacgagctagtgaaagggatcttgcctcggagctggtcccactacacggtgcctgccggcatgaccgtcatccagtgggtgtccgacttcagcgagaggatcaaacagctgcagaacatctcactggcagctgcatctggtggcgccaaggagctaaagaacatccacgtgtgcctgggtggcctgttcgtgcctgaggcgtacatcactgccaccaggcagtatgtggcccaggccaacagctggtccctggaggagctctgcctggaagtcaacgtcaccacctcacagggcgccacccttgacgcttgcagcttcggagtcacgggtttgaaacttcaaggggccacgtgcaacaacaacaagctgtcactgtccaatgccatctcaaccgcccttcccctgacgcagctgcgctgggtcaagcagacaaacaccgagaagaaggccagtgtggtaaccttacctgtctacctgaacttcacccgtgcagacctcatcttcaccgtggacttcgaaattgctacaaaggaggatcctcgcagcttctacgagcggggtgtcgcagtcttgtgcacagagtaaacttttctagctgcccctttctgtaatagtgaaagttggtatttaacatttattcatttttaaaatatttggaaggtctgagcttgtgaaaagaaagtggttggtctgaggttggaggaagctgaatggaatctgacggttgggagtggtggaaattggaaggataccaggaggtatttgggaaggccaatggcgtggctcctttgaggaaataaaacactaagcatgaaaaccccccgcctatcgcggcgtcgccaatatatcacccccccgtgcgtagctgacccgggcgcggcacaattaagcattgcnnnnnnnnnnnnnnnnnnnnnnnnnnnnnnnnnnnnnnnnnnnnnnnnnnnnnnnnnnnnnnnnccgttgcggttgatactcggcgtcgcacgcgagtaccccgcaccagccaggaaagtatgcgcgattgtgggttggtcgccgcgcagattactcccgcccgccccagagaacatgtttttgaattatactccccctcttatgcgcggcacgcgcccggtgcntcgacagaagaatataacagccgccagtcgcggacaccacgtttcgccatcccgccgctttctgttatgctgacggattgcgggcgcgccgccgacaaaaagnagagtgttgtttgttaacgcccccctcgtctactatatgaagatgtgctcgtgagtgccgccgcgccagccgcggagcagntagaactataagaanttacaaaccgcggaaacgtgatccatcgcagcaaagcttatattttttgagcagctttaccattatatcagatcttccgccccgccgccgctctgagacgcgacgaatatgtatgatccacatcagatcggcccgccgccctctcgttcccgccagcggcggcgcgaaaagatacgcccattgttaccactcacccct

SEQ ID NO: 260730 - DNA, 1330 bp, Homo Sapiens
  misc_feature (838)..(961): n is a, c, g, or t
  misc_feature (984)..(1008): n is a, c, g, or t
  misc_feature (1021)..(1102): n is a, c, g, or t
  misc_feature (1109)..(1168): n is a, c, g, or t
  misc_feature (1203)..(1212): n is a, c, g, or t
aggactatggctgcatgtcctctgcttgccctgctgcagagcagagatgtgcagccctctggtcagctggtccaggctggtccccgccggtccccttccagtccagccaccaagagtccacttgtcccgggcttccacctggctgacaggaagaatttctgagagctggatgtgcatgccctgtggacgaaggtacagctcgcctgcctgccccaatcccagccccgacaatcacatgcagctgactcggacactggccttgggaacaatgttcgagagaacacttgccccttgactgtaggagccagaaggggacccaggttgtgcatagctctctgtagacatttttacccaaacctgttggtaaagtgcccatctggtgctcaagagagcctgggggtctaacagggagcccggctgcctcacctggccacagcctccacaccagatctccacattgtcttgatccagaccagctctgtgatcagaaggaaattgggtcccagtgtaggagagagctggtcctgggcctggcaggcaagagtgtgggcatcctttcctggcctttctccactctccctcaagcctgtgctcaggttgccttgaatgtggactctggaagagccaggggcccagaatgccgggggaggcttctgagtggcactcatggaacaccgtccctctgccagccataggccctgcctccagtgtcagggaatggaggctgggctgcgagagtgttgctgccccctgtgtcattcttctaatccaatgtagaaattgtacgtaatgtatttaaatcaacgcaaatgtatgaataacaaatacagttctgacnnnnnnnnnnnnnnnnnnnnnnnnnnnnnnnnnnnnnnnnnnnnnnnnnnnnnnnnnnnnnnnnnnnnnnnnnnnnnnnnnnnnnnnnnnnnnnnnnnnnnnnnnnnnnnnnnnnnnnnnnnnnttttgcggccccccccgcccccnnnnnnnnnnnnnnnnnnnnnnnnnggggccggggccnnnnnnnnnnnnnnnnnnnnnnnnnnnnnnnnnnnnnnnnnnnnnnnnnnnnnnnnnnnnnnnnnnnnnnnnnnnnnnnnnncccccgnnnnnnnnnnnnnnnnnnnnnnnnnnnnnnnnnnnnnnnnnnnnnnnnnnnnnnnnnnnncaaaggggatccaaggggattccaaattaaattannnnnnnnnntggccttttttgggaaagggggggaatttattaagacttcgggcgaagtggaaacccctccaaacgggtgtgaaaaacctgaatacccccggggattacaacccctgggccgccttgg

SEQ ID NO: 260731 - DNA, 479 bp, Homo Sapiens
  misc_feature (385)..(385): n is a, c, g, or t
  misc_feature (433)..(433): n is a, c, g, or t
actatcttgaaggtttgaaaaacaaccaaagaaagggagtgaggactatggctgcatgtcctctgcttgcccggctgcagagcagacgatgtgcagccctctggtcagctggtccaggctggtccccgccggtccccttccagtccagccaccaagagtccacttgtcccgggcttccacctggctgacaggaagaatttctgagagctggatgtgcatgccctgtggacgaaggtacagctcgcctgcctgccccaatcccagccccgacaatcacatgcagctgactcggacactggccttgggaacaatgttcgagagaacacttgccccttgactgtaggagccagaaggggacccaggttgtggcataagctcttctgtnagacattttttacccaaacctgtttggtaaaagttgcccatctgggtngttcaaagagagctggggggttttaacaggggagcccggtttgctt

SEQ ID NO: 260732 - DNA, 1400 bp, Homo Sapiens
tttgtttcatttggtagttcatctgccttttaacccattcaccaaaatttaccttgttaacaagcatcaccaatgaacatttcagagcaatctgcatatttaacagacctaaaataaatcctattaggcaagtcagttgaaaatgctcgtgctgctaatggaattagagtgcgttcattttacaggctagtattttaaaaatagaaatcaaaatctggcaccgaagcatgctaattgtttactgtaccttgtgaggttttcactcataaatttaaaccagtgtatttttttagaactggtttgtgtatatatatagtgattatggatactaattcaatgtaatttataattttctatgtcaatacaaaaatacatcacagccttctcaaacagctcaagcaatatattgtatattgccatatcgtctggtgaaagggttaaattacttcacctcttgcacttttagatgcaaatcagtttttcatttctgtaatagaaaattattcacgtatttttacatcatttgtttttcctgaccagtatttaaaaccaaaaggatattctgaaaaatggccaacaatttttttagaagtagcatcccaagcagcgtgcctaaacattacattgcatatggaaataaaagaatcaaacgtctaatgccttatttctgatttcctttttcattttaagtggtgtggagattccagcactcccaggacagtggagtcagcagtaagccctgggacaggtggcaagggtgggtcccttgacctttgcacgccttctcaggaaccccctttcccgggtgagcccctctctgaagagactgtccttgggcctcctctggaagcagcacccccagaggacagggctcctcctgcttgcctcagggctgcctgacttgaatggcgttggacctcggggattactggtagataatatgctctggtctcgcctggtggtgagttttgccagccatggcccagggtttggctccactggtggcacacgtggcctccgtggtatggacctggtggcttctccatccccactgtggcctctgtggtatggaccctggtggcttctcccatcctacccaaggtaacagtgtcttgcttcatcccactgactgctgggagagagcctctgggacttttctttggggcatcattttgttttgtcttttgtagcagggaaaggatatgacaatggggaggacagttcttttggaggttggaggggccaagccaaggacaggagcaagtgtgccctcattttgtttctacttttaatttctgtgtgttggccatactgaattatgagactaacagatgtctacaatacaatacctgtattcaaaataacaaaaataaagcctgattctttgtttctagaaaaaa

SEQ ID NO: 260733 - DNA, 378 bp, Homo Sapiens
aaagaatcaccctcattgttgaaagtaaatgtactcttagggtgcgaatattagtgttccaataagcatgtgattatattaaggtggtggtagcgggaagataattctgattccattgggaatcttaggttttcgtaaatttattgggaaaatagtttttcctgtactgctgaagtttctttttggtaaacagtatctttctaaaagaaaaaagcatgaaggagaaattgaggtgtgtatacatttcctcaaatgaccagcattgtattcgtgaatactgtgtatcttgcagtgaacagtgtggaagctgttcatttttcaatctgaagtaaaatactttccacgcaacccccggccaacttaacctaaatcttgtcc

SEQ ID NO: 260734 - DNA, 530 bp, Homo Sapiens
gattcactttccaagcatacaacttcatataaagtgtcagtattattctgtctctccctttgctttatctgttttagtttcaaaaagaaattttcagtagtactacgtttgctgaagggccagaataatctttcattaggtgagcaaacgcggacttttgtctccaggagaaatcgaacaggctcctgtacttctgttattaccaaatctacagctgtggtcataaacaggactttatctttaggagtttcttcatttacaacttgaaaatgtggggattttggattccagctccccgtaataacatacgactttccatctgaacttttgcccatagattccaaatctaataagtgcatgtcactatttcgtacatcttttcctggactaaggaaaagaccaaaacacctttcaatggcaagttctttattagttgtttgctgcacatagatgacaatcttcttatcaattccttggcgtagtttaaagcactgtctgtccttatctttgggaactgcactaaaataacc

SEQ ID NO: 260735 - DNA, 1260 bp, Homo Sapiens
  misc_feature (1182)..(1182): n is a, c, g, or t
ggcttcggcgccaggccaggcgctagtcggtctggtaaggatttacaaaaggtgcaggtatgagcaggtctgaagactaacattttgtgaagttgtaaaacagaaaacctgttagaaatgtggtggtttcagcaaggcctcagtttccttccttcagcccttgtaatttggacatctgctgctttcatattttcatacattactgcagtaacactccaccatatagacccggctttaccttatatcagtgacactggtacagtagctccagaaaaatgcttatttggggcaatgctaaatattgcgggcagttttatgcattgctaccatttatgttcgttataaggcaagttcatgctctgagtcctgaagagaacgctatcatcaaattaaacaaggctggccttgtacttggaatactgagttgtttaggactttctattgtggcaaacttccagaaaacaaccctttttgctgcacatgtaagtggagctgtgcttacctttggtatgggctcattatatatgtttgttcagaccatcctttcctaccaaatgcagcccaaaatccatggcaaacaagtcttctggatcagactgttgttggttatctggtgtggagtaagtgcacttagcatgctgacttgctcatcagttttgcacagtggcaattttgggactgatttagaacagaaactccattggaacccccgaggacaaaggttatgtgcttcacatgatcactactgcagcagaatggtctatgtcattttcctttctttgggtttttcctgacttacattcgtgattttcagaaaatttctttacgggtggaagccaatttacatggattaaccctctatgacactgcaccttgcccctattaacaatgaacgaacacggctactttccagagatatttgatgaaaggataaaatatttctgtaatgattatgattctcagggattggggaaaggttcacagaagttgcttattcttctctgaaattttcaaccacttaatcaaggctgacagtaacactgatgaatgctgataatcaggaaacatgaaagaagccatttgatagattattctaaaggatatcatcaagaagactattaaaaacacctatgcctatacttttttatctcagaaaataaagtgcaaaagactatggatatncatagttttttattaccttatttaaggaggaaacaacctgacgtggcaccattcagttctggcacatccccaaccctt

SEQ ID NO: 260736 - DNA, 516 bp, Homo Sapiens
  misc_feature (29)..(29): n is a, c, g, or t
  misc_feature (31)..(31): n is a, c, g, or t
  misc_feature (371)..(371): n is a, c, g, or t
  misc_feature (390)..(390): n is a, c, g, or t
  misc_feature (395)..(395): n is a, c, g, or t
  misc_feature (408)..(408): n is a, c, g, or t
  misc_feature (427)..(427): n is a, c, g, or t
  misc_feature (458)..(458): n is a, c, g, or t
  misc_feature (463)..(463): n is a, c, g, or t
  misc_feature (469)..(469): n is a, c, g, or t
  misc_feature (489)..(489): n is a, c, g, or t
taagtcggtctggtaaggcaaagggggangnatcctcaaacggcctagtgcttcgcgcttccggagaaaatcagcggtctaattaattcctctggtttgttgaagcagttaccaagaatcttcaaccctttcccacaaaagctaattgagtacacgttcctgttgagtacacgttcctgttgatttacaaaaggtgcaggtatgagtcaggtctgaagactaacattttgtgaagttgtaaaacagaaaacctgttagaaatgtggtggtttcagcaaggcctcagtttccttccttcagcccttgtaatttgggacatctggctggcttttcatatttttcatacatttacttgcagtaacactccaccntataggatccgggttttancttanattcggtggacanggggtacagtaggcttccnggaaaaatggtttatttggggggcatggctnaaatntttgcnggccgtttttatggcttggntaccctttatggtttcgttttttaggc

SEQ ID NO: 260737 - DNA, 901 bp, Homo Sapiens
  misc_feature (413)..(489): n is a, c, g, or t
  misc_feature (493)..(494): n is a, c, g, or t
  misc_feature (497)..(497): n is a, c, g, or t
  misc_feature (627)..(646): n is a, c, g, or t
  misc_feature (744)..(753): n is a, c, g, or t
agaaataaggttagtcatattgatgtgatcacagcagagatggccaaagactttgtagaagatgataccacacatggttaattggaaaatactacctactggtttgggagatgtatatagtaatatgattctcatacccaggaactgtaaatttaaacctaaatatttggccaatagttttcagacttaaagcatcatagtccttttatatttgtctttgtattttataagatactctgtaatgtcatgtttgtactgatagtttaagaatttaatttcctgtacaactttttgtaaaatgttctgctcctattttaaatgtattgaaacatgctaaatattctttcctaattattttatcacttatactaccttttttatagcttcaattaaataatcggttttatgactannnnnnnnnnnnnnnnnnnnnnnnnnnnnnnnnnnnnnnnnnnnnnnnnnnnnnnnnnnnnnnnnnnnnnnnnnnnntggnnggncccttgggcgcccccatagccttttaaaaaatttttttaaacttttctttcgggcgggggcccgaaaaggaaaaaaactgtttccaaggtgtttccgaagaaaaccggggcttgaattcgccctggaatnnnnnnnnnnnnnnnnnnnngggggtcaccaaaatttctgaaaaaatccgaagggggttccgggggtcttccgggggtttccaagggggttccaaagggaatttaattcccaattttnnnnnnnnnnggggaaatgtttggaaattagtggagaaattcttaaaaactttccgcccaagggaaaaccccttcaaaaaaggttgaaattacacctgaaattccccgccggttatcaccctctctggtacaccctttggcaacaataatttttcccc

SEQ ID NO: 260738 - DNA, 648 bp, Homo Sapiens
gcttctattgtcaagtgaaactttcctcagatggactccaggtagccaggtcacctaaacctagtggtcctgtgcgatgctctttctgccagtccctgaatctctgcagcttctcttacctgtcttacctgtatttttcacaattgcagtggcgtcgcattcagaagaagggaaggtcagcagaggctatgcatgttgtgtgatgatgagtgtttacagccaccttctcctaaaacgaaatttataccggggtggatagtattccattaggtagacttatcgactttgctaagtgctttttagacagcctaaaaaaatttccaagattttaaaagatgtataaggttaagtttgcaaatataatggaaatgctgtatatccttttgaagtgatgaaatccaacgttggaattttaaagaaaatatgttgtaataatgctgttgtaagtaatattttaatgtctctttgcctgttttctatttcagcacattcattgtggtgaatgttcatagcattataactgcttagccattgaatgataacatttgttagtggaaattggaaaatttatttgtgaaattctgcagaattcatttttctatttccaatatttgctgaggttaaataaaaattttcaagccaaaaaac

SEQ ID NO: 260739 - DNA, 620 bp, Homo Sapiens
actacataaggtagcaaactgttgaatgagtttgaaggtatcacttattttttatgcatgtggttttagctttagaaagaaatgcgttatagaaacaagtaatagcaagaaaattgatgtatattttaatgatacattaaaattcccttttaatcataatagttaactctacttactgttttaacatacatttgatttaacaaattgttcagcataacacttctaattaagtttatcaagttgtactgtattagataatcagcagtgtatctggagtaagtttaaagagaacagttcgcaatacaaaaagttacatggagctttacatcttaactttctttgtcaatttaaatgcaatgtataaaaagtttattttgctattgtgaaaaactaaatgtaaaggaaatcacctactttcatgcaggtgtataatcttgaaaaggaaaaatgcttccatgttgaagccagattttctgtagtaaaacttttaaatattattttaaaagaaatatgtatataaatatctctatattctttggaatgatactaaagtctctggtctaggaccataccttatataaaggtataagagaccatgacaatgtctgaaaatggaatag

SEQ ID NO: 260740 - DNA, 1226 bp, Homo Sapiens
atatcttttgaatctaaaaatttgatgtacagcatgtgatttttgaagtttacatgtaaagtcacagtataggtgaaataacgtttgtcatattttgagacgtatcctgcagccatgtttttacgtgagtgttttagtcaaagtacatggtagacagtctttcacaataaaaggaaaaggatttttttcctccaaatgtacatttatcaacctaatgattgatttttttaaaaagagatttcgccccagtctggtttatgaaagttcattgccctaaactgtgctgattgtttttaatcaagttataaatttccaacctagatcatgtatctaccaactctcctgcattttccaaaaggcattgagcttaaatattagtcttgcttagagtaggttatccacttacatgctgcgctaaagccatgcctttgaaactccttgtttaaaacatgatatgatttttgtgggcagtttcagaaaagaaaacaaacaaacaaaaatcgaccctttaattattacttgcaactcaacagatctccctgccgtactgccttttccaggaactttacttcagggctgtccagattgcagctgtgccccgtgtatgtggatctagttcacagagtctttggaagccagcagtcgtgccctccgtatactgtccactcattttatgtagatttggtatcctcagcagccagtgttaacaccactgtcacgtagtgtacagattcatcttttatgtatttaaagtaatccatactatgatttggtttttccctgcaccattaattctggcatcagatcagtttttgtgttgtgaagttcctactgtggtttgacccaagaccacaacccatgagaccctgaagtaaagataaggtacacatacattatttgagtaactgtttccttgggggccaatctgtgtatgcttttagaagtttacagaatgcttttatttttgtctataacaaacagtctgtcatttatttctgttgataaaccatttggacagagtgaggacgtttgccctgttatctcctagtgctaacaatacactccagtcatgagccgggctttacaaataaagcacttttgatgactcacaagatgaatccttttttcctctgtcccaattgtgtgtctctgttccaaacacattttaaatactcggtcctgacagtgtctttagctaatccttgaagaaataaaagtggaattga

SEQ ID NO: 260741 - DNA, 1036 bp, Homo Sapiens
  misc_feature (976)..(976): n is a, c, g, or t
attagagttgaaagatgtgagacagtattcagaataatgaagataataatgatgattattataataatgatgatgattccaaggaaaaaacctacagcgaatgttccatttctaccccgcacgcagacactctccctaacactgataacctgagaccccagcactggacggaagaatgctggcgtctccgtgtgtactggttcagggttctggccccagccttgtcaggaccccctgggtgtccagaggcccccacccctcccgcaacaagcagctgatgccccagtgattctctatacatttttcacctcggccaatatgtccaggaaaactgcttacttctcttttcttgcctggagcttcattgttcacccttacgttgcaatataggaattaatgctacaaaataaaagtaaagcttacctgaaaagtgcatagtttggggcaatggtatctacatctcccactgtgggaaaaccagcaaagcatcaaaactctcaattctcctgttaccgaatgcagatctgaattataagatgtttatgtttgaccattgtttcaacaatgggattttgttacgaattatccctttaactgaaaccctcagttttactgtttacattattaggaaaacagggatatcttttgaatctaaaaatttgatgtacagcatgtgatttttgaagtttacatgtaaagtcacagtataggtgaaataacgtttgtcatattttgagacgtatcctgcagccatgtttttacgtgagtgttttagtcaaagtacatggtagacagtctttcacaataaaaggaaaaggattttttttcctccaaatgtacatttatcaacctaatgattgatttttttaaaaagagatttcgccccagtctggtttatgaaagttcattgccctaaactgtggctgattgttttttaatccaagtttattaaattcccaacctaggatccatgtantctacccaactcttcctggcatttttccaaaagggcatttgaggcttaaaattattagtc

SEQ ID NO: 260742 - DNA, 1153 bp, Homo Sapiens
  misc_feature (1066)..(1076): n is a, c, g, or t
agcaatgcagtccgggcccttggaaatttgcttcattttctgcaaccctctcatatagaaaaacccacatttgcagaaatcattgaggagtctatccaggccctaatttctactgttctaacagaagctgccatgaaagtccgatggaatgcttgttatgcaatgggaaatgtatttaaaaatcctgcccttcctttagggacagccccatggacctcccaggcctacaatgccctgacatcggtcgtgacatcatgcaagaacttcaaagtgcgcatcagatctgcagctgccctttccgtcccggggaagagagagcagtacgggtctgttgaccagtatgctcggatctggaatgcattggtcaccgctttacagaagagtgaagacaccatagactttttggaattcaagtactgtgtcaagcctacggacccaaatctgccaaggcactgattcacctcttgagcttggccagtgcctcggacctcccttgtatgaaagaaacccttgaactgagtgggaatatggtccagtcctatattctacagtttttaaaatcaggagcagagggagatgacactggagcaccccacagcccacaggaaagagaccagatggtcagaatggcccttaaacacatgggcagcatccaggcaccaactggagacacagccagaagggccatcatgggctttttagaagagatcctggccgtttgttttgactcatctggatcacaaggggcactcccagggttaacaaaatcagtgaagatcccaccatactttctagatgtccgaaggcggcagtaggaagacctgagcttgagcataagatctgtgggatttcatcttaggggcagaaacaatccgttcactatttatttagaatgactttagcagccatttaaattttcacagagggctcaaccacctttggagtgactccatagcactggccatggtcagggttgttggaacatctgacctgtgcatccaggagccgaggagtcaggttgtaatacaggccaagcagacgggctttgagggcatttagtctcagnnnnnnnnnnntgtagaaggatttcggaattagaattttgtgtattgtatctgtagttttgtaataaactaacgaaaaatagtgtgtc

SEQ ID NO: 260743 - DNA, 678 bp, Homo Sapiens
  misc_feature (580)..(592): n is a, c, g, or t
actactcatgtggtgaatcttggaagcaaccagtaccttttctctgtcatagtggatcctaaaaaaatgccctgcttctgtttgcgccatgatgttgatgccctactctggcaaccacactccagcaaacaagatgatatgtgggagcacatcgcaactttcaatgctttaggctatgtccaagcatcaaagagagacaaaaaattttttgcctgtgctccaaattactcgtatgcagccctttgtgagtgccttcgtcgagtattcatctatcgtcagcctgctcccatgtccactgtactttacaacagaaaggaaggcaggcaagtaggacaggttgctaagcagcaagtagcaagcctagaaaccaatgatcctattttaggatttcaggcaacaaatgagagattatttgttcttactaccaaaaacctctttttaataaaagtaaatacagagaattaattattctaacatattggcctctttgtactggaaaagtattcagtggtacctggaggtctggacagttatactgtaacctcttaagttttaatgtgctaaatatatcttgtatgannnnnnnnnnnnnaataacattggaaatatattcaagagattatgattctgtaaagctgtggaatgaagctgaaaatttcgccaacattggcttctgaa

SEQ ID NO: 260744 - DNA, 957 bp, Homo Sapiens
gatggacatgttgaattattttataattttcttttacagttctgtgagttaagctgtatatagcatatgggtgtatcattctttagtaaattacatctacttgtgaactaaacattgatttcattttgactttgtgccattgtctaactttgcaaaaaatcaaaatcaaggaatcaaggtgcttcacaaaaggaacatctatttttttaaaaaaatccattctggtcttggtgttcagtgaactttttttcaccaagctaaagcaaaaacaaacaaaacccccaaataccagacatagaaatggagacctcccttcttcctcaggctagattcctgttagattccaaagaaaattgtgctggaactcagaattttcctggcggctctgcatctccttgctatgcatagtatttctcatatgatttgaagaaagcactgtggttgtacgtttcttgagtgccttatcagaattatccttccaaaaagctcaagaaagacaagcagaaaatcccccagagaatgtctaagtgacagtgctccatctgaatatccttacaaattgctacaatgcaggtttacctggggtgcaagcacagcaaacacgtgcttgtagtccatttgattttttctccgatacatttagaaagaagtgcttaggccgagagccataaaataaaaacatacaataagtccaagtcttttctgtatatgctgtgatttgataatcatattgataaaacatgtgtaaaggcctttattggaaggcatgattctgatccattttgcattcttccaattttcatttttgctattatacctaattgtttatctataacctagagcattccagcaaaagcggcccttttaaagctagagggaaaaaggccacactggttttcttaaagtaacttccaagtattttcactataaatgagagagaaaagtttccaaattgaa

SEQ ID NO: 260745 - DNA, 644 bp, Homo Sapiens
ggaatccgaattctctcaattgatggtggaggaacaaggggcgtggttgctctccagaccctacgaaaattagttgaacttactcagaagccagttcatcagctctttgattacatttgtggtgtaagcacaggtgccatattagctttcatgttggggttgtttcatatgcccttggatgaatgtgaggaactttatcgaaaattaggatcagatgtattttcacaaaatgtcattgttggaacagtaaaaatgagttggagccatgcattttatgacagtcaaacatgggaaaacattcttaaggataggatgggatctgcactgatgattgaaacagcaagaaaccccacatgtcctaaggtagctgctgtaagtaccatagtaaatagagggataacacccaaagcttttgtgttcagaaactatggtcattttcctggaatcaactctcattatttgggaggctgtcagtataaaatgtggcaggccattagagcctcatctgctgctccaggctactttgcagaatatgcattgggaaatgatcttcatcaagatggaggtttgcttctgaataacccttcggcattagctatgcatgagtgtaaatgtctttggccagatgtgccgttagagtgcat

SEQ ID NO: 260746 - DNA, 851 bp, Homo Sapiens
  misc_feature (562)..(581): n is a, c, g, or t
tcacttcttcatgagctagcgcctgctcaggggtcacatcatagggcagtttgcttgcctctcctgtctgagactccatctgattaaccccaagatttgtaaatatccacagggtcagttttgatgttgagagattggtcatccataattcccttcacgactggggccaagatctgtctcagggcattctggccacgggcaccacggttgaaacttacaaccattttaataaccgtaggatttcctgtcacaatctcttgaatctgatctaccttcgacttgatttcctcttggagtgctgtcttaaagagccgcaggagcaggtactcctctcgctggttggacgcgtagttgtagagtgtgaagattacagagtccatgaacttggtggacttgttctggggcatctgaaaaatgagcttggccagataggtgggattggtttgcaataaataaaacaggtgctggtaagcttccaacttctctctcttctccttgctcaaagccttgagacctcccttctgtttatttatcatcatcatatcagacaactgttccttannnnnnnnnnnnnnnnnnnnactgtgggaaaccacatcctgcaacgtaatcttatttttcactagcagtccaattttgatatccatgagattgaggtcattctccagctgctggttagaacgaatgagggtgataacctcttcccgcatcttcataaggtcaagctcctcctgaaaatcctggtcactttggtccagcaggtggacaaattttcggaccacaaccataggaggatcctcagcattgatgagagtcttgtagtcatcccgagctttgtttgcccgaatacc

SEQ ID NO: 260747 - DNA, 430 bp, Homo Sapiens
  misc_feature (350)..(350): n is a, c, g, or t
  misc_feature (407)..(407): n is a, c, g, or t
agaacccccgatattaggcggggaaacatgattatgtgtcatgtgttttcagatagataggaaaaggaaccccaacattccaaaacctcggcgaatcttgcgctcggcctggggcagcaacccttacttccgcggctcctattcatacacgcaggtgggctccagcggggcggcatgtggagaagctggccaagcccctgccgtacacggagagctcaaagacagcgcccatgcaggtgctgttttccggtgaggccacccaccgcaagtactattccaccacccacggtgctctgctgttccggccagcgtggaggctggcccgccttcattggagatgttaccggagnaccttctttccagcagggggacctggagggggctgttccttcgcttgctggagaagnagccactaaacttcgtggaactt

SEQ ID NO: 260748 - DNA, 683 bp, Homo Sapiens
agaacccccgatattaggcggggaaacatgattatgtgtcatgtgttttcagatagataggaaaaggaaccccaacattccaaaacctcggcgaatcttgcgctcggcctggggcagcaacccttacttccgcggctcctattcatacacgcaggtgggctccagcggggcggatgtggagaagctggccaagcccctgccgtacacggagagctcaaagacagcgcccatgcaggtgctgttttccggtgaggccacccaccgcaagtactattccaccacccacggtgctctgctgtccggccagcgtgaggctgcccgcctcattgagatgtaccgagacctcttccagcaggggacctgagggctgtcctcgctgctgagaagagccactaactcgtgacctccagcctgccccttgctgccgtgtgctcctgccttcctgatcctctgtagaaaggatttttatcttctgtagagctagccgccctgactgccttcagacctggccctgtagcttttctttttctccaggctgggccgtgagcaggtgggccgttgagttacctctgtgctggatcccgtgcccccacttgcctaccctctgtcctgccttgttattgtaagtgccttcaatactttgcattttgggataataaaaaaggctccctcccctgccaaaa

SEQ ID NO: 260749 - DNA, 1754 bp, Homo Sapiens
ggaagttgcagggccaacagaaatgtgtgaccagaggcagctgggcctgtacttcatgatgccatccagatcccccggcagctaggtgaagtagcagcttttggaggcagtaatattgagcctagtgttcgcagctgcttccaacagaataacaataaaccagaaataagtgtgaaagagtttatagattggatgcatttggaaccacagtccatggtttggctcccagttttacatcgagtggcagcagcggagactgcaaaacatcaggccaaatgcaacatctgtaaagaatgtccaattgtcgggttcaggtatagaagccttaagcattttaactatgatgtctgccagagttgtttcttttcgggtcgaacagcaaaaggtcacaaattacattacccaatggtggaatattgtatacctacaacatctggggaagatgtacgagacttcacaaaggtacttaagaacaagttcaggtcgaagaagtactttgccaaacaccctcgacttggttacctgcctgtccagacagttcttgaaggtgacaacttagagaccccctcacaatctcctcaactgtttcatgatgacacccattcaagaatagaacaatatgccacacgactggcccagatggaaaggactaatgggtcttttctcactgatagcagctccaccacaggaagtgtggaagacgagcacgccctcatccagcagtattgccaaacactcggaggagagtccccagtgagccagccgcagagcccagctcagatcctgaagtcagtagagagggaagaacgtggagaactggagaggatcattgctgacctggaggaagaacaaagaaatctacaggtggagtatgagcagctgaaggaccagcacctccgaagggggctccctgtcggttcaccgccagagtcgattatatctccccatcacacgtctgaggattcagaacttatagcagaagcaaaactcctcaggcagcacaaaggtcggctggaggctaggatgcagattttagaagatcacaataaacagctggagtctcagctccaccgcctccgacagctgctggagcagcctgaatctgattcccgaatcaatggtgtttccccatgggcttctcctcagcattctgcactgagctactcgcttgatccagatgcctccggcccacagttccaccaggcagcgggagaggacctgctggccccaccgcacgacaccagcacggatctcacggaggtcatggagcagattcacagcacgtttccatcttgctgcccaaatgttcccagcaggccacaggcaatgtgaagtattcatccggccaaccaatgtttcctgacgtacagtgttgcccttttcagcaaatgccaattccaagttccattaaatcagaagctccatggctccttggcccacgatgttgagtgctgactgtgtgttctactgaaagagtaaaacactgactatccaaagagaaatggatattttgtttttataataaccatatattattgttttcttcttccctttctatgcaagtgtaaattaatgaacagagaggtatttggaaatggtaatacatttgtcacggatttgtataatgtatacagcattgggaaagtgggtgggggctttctaatatgataccgtctttttaataactatgacaaagcttacataagaattagaagaccactttacatttttacattccttctgctggtcatatt

SEQ ID NO: 260750 - DNA, 1171 bp, Homo Sapiens
acaggaattgacataggggatagcttaactattccagatgaattcacggaagacgaaaaaaaatccggacaatggtggaggcagcttttggcaggaggcattgctggtgctgtctctcgaacaagcactgcccctttggaccgtctgaaaatcatgatgcaggttcacggttcaaaatcagacaaaatgaacatatttggtggctttcgacagatggtaaaagaaggaggtatccgctcgctttggaggggaaatggtacaaacgtcatcaaaattgctcctgagacagctgttaaattctgggcatatgaacagtacaagaagttacttactgaagaaggacaaaaaataggaacatttgagagatttatttctggttccatggctggagcaactgcacagacttttatatatccaatggaggttatgaaaaccaggctggctgtaggcaaaactgggcagtactctggaatatatgattgtgccaagaagattttgaaacatgaaggcttgggagctttttacaaaggctatgttcccaatttattaggtatcataccttatgcaggcatagatcttgctgtgtatgagctcttgaagtcctattggctggaaaattttgcaaaagattctgtaaaccctggagtcatggtgttgctgggatgcggtgccttatcccagcacctgtgggtcagctggccagctacccattggctttggtgagaactcgcatgcaggctcaagccatgttagaaggttccccacagctgaatatggttggcctctttcgacgaattatttccaaagaaggaataccaggactttacagaggcatcaccccaaacttcatgaaggtgctccctgctgtaggcatcagttatgtggtttatgaacaatatgaagcaaactttaggagtaacccagaaatgatgttgcattttttgctttagcctgataattgaaactttcaacaatctctggagtgactttttctcctcgaattgaaacaagtctatggcaaaaagaagctgcatttttttccacaaaagggaagatggtaacaatggtcacttcaaacttttggggctaaattatatgttcccagaatgttccaatcatagtttaagtgtttgaaaaggcccacaatattacttatcttcttaatatcctg

SEQ ID NO: 260751 - DNA, 499 bp, Homo Sapiens
  misc_feature (442)..(456): n is a, c, g, or t
aagagatgaaaacatttacaccttttaattaaattacactgtcaccacataaaagtgtgaggttcaacatttgttttcttaaaaacagagcactaaacagtttaacacaggacctaacttacggctaagatgtttctaaaatgtatgcagaacccttaagactatactgcatcaagtagttcttttgaattatgtatactcaaatgatggtgttataatttacattgaaatgccacaacaaaatcttgataaaacaagatataggagaaataaaaattaatttctgaaccaaatgtgtactaccttaccctagagtaaatcactgggaaatacaggcagaaaacagacatcctgcctgtgaaaacaattgcatattcaaactggagagagtcatagcacgtatgcttttaaaagtaagtttccgaaaaactgttttatcagnnnnnnnnnnnnnnnggagcatgtctttttctaaataattctcacttatcattccagg

SEQ ID NO: 260752 - DNA, 1374 bp, Homo Sapiens
gtgcgtcccaacccgtccctctccagctgagcctgtcagagaccagcccagctctgaaatcaagccgttgagaaaagggaattcggccctccgccgcctcttcagtttaaaatcgtttcccgactcgctctgcggccccacgcaggaagcctccttggcgcctcgccgattccgtatcagtgaagcaactaaaattgccattttaactgagggcaaggccgagccacttaaccactatcgtcaacctttccaatcgtgctcggttgctcctcagttttcctaccggtgcgaagctttctctcaaatttccgcccgtagtaggcatggcggcggcacctcaccactgattcgttgaattccttcccggtaatcttgggcactagcgggcggagttgaagggcgcttggaccccagcggcgatctgtgtttgggttcgcgctctgggagaattttggctttgctcgccttcctctttcagaagactcgaaatcggccagcaggtctgcgagatttgaaacgcgactgttactccttgttttccggttctggccgcgggagcctctcgagaagcgtggaaagaggagaagggcgtataccttgtgaccgcctctggttgtcttgggctcgcgcctggcgccgctacgtggagtcgctctctcgtcgtcactttggctgccgacttgttgagtagaagtgcagactgatgctttaagactcagggagaggtctttcccttatctccaccccagcaagcaccccagagaccttggagatttgtctgtttctagacacgtgtactccaatgttgtgcggaggaggccttaaatattcgagaagagagtgggaactcctggaattttaagggatttctgtgtatttccaaaactgacttttaactaccggcagcgtgggatttcgtgatgtttttcgccatcgtgtggctccaacatgtacttcccttcttggttaagtcagctgtacaggggttatccagaccatcagaaggaccacccaacgatctgggtctctctacagaagtctgttggagagttcacagaggagaatccagaagtcagtagcttgtggtcggaccacaacatgtggagagtgggttcggccactaggcaagaagccccttgtggtgatggcttcagaccgagggaaacacatctgggcctaagagattcgagggtgtcagtatcactcccgggataggcgaggcctggacgaagttgtggaagcccgggactgggggacgttggaacattccgctgcggacagaaccaagcgcagggagagcagcaaagaggctgaacgaacgcgataaacggaaagccgggcgctaaggcaaaaagggggagagaaccgggggca

SEQ ID NO: 260753 - DNA, 608 bp, Homo Sapiens
taaagaacaacaatctttaggtcatgcagacctccctgatggcatccagaagtttcaccgaggggtgcagacagtgttgatcattggggatgtcacctcccggatacccacctcactcatgaaagcccccagttatgtgagagttcaagtcagtcggttgtgagagttcaggtctcccgccttcttgctttggccaaattgaatgtatctttctctgctcctaagcgctgatgtgtcaatgtttgccttactgtgaatcgggtacacggacctaaatactggggttctacaatgctgagacctgccgccacctgcttcttaaagcaggttgatccagcactgtattagggggttatggcaacattattgaattttttatgtacataaagccatatgtttaggggtggtttctgtcttgttttttgacttatataacactgtgaacttctaaagagagagaataaaagaagcatgaatgaaaagaatggcacttcaaaaaagatggttcagtgaaaaactatagctaaaatatgtaaacctttctaagtaaaccgcttgccttcatcttgagttggaatatatttaaataaattgtgttatctcttggc

SEQ ID NO: 260754 - DNA, 571 bp, Homo Sapiens
  misc_feature (506)..(514): n is a, c, g, or t
tacaacagaaggcactgttatccgcataaatccattgattctgcatggcaaaaacctgagacgtgcaagtctatccaatcctctaaaacaaccttgggcattcagcctttggaacatatggtttgtccttttccgtccaatgattgtttttctttcatttcatacttacagtagctgtttaaaatataaatttcagggtgacaaaggtcaaagggggaaagagtaggataaaagtgctgccctaatgccagatgggaactgggcacagcaggagggcccctaaaagcagcccctcatttcatccccttgacccctcacactcctcttgtgaaaataaaatgccagcgatgacatttggtcagctgatgttctttccttcagttgttgctgggcacagtcccaaaattaaatgcggagaggactcctttgttttcaaaggtgaagcctccctgttgttcaatcttcttctttgcctctagcatttttcaaaagaaaaggggagaagnnnnnnnnngaatgcttaaggtgacaaagttggagatgactcaaaggagccagattctttatatgc

SEQ ID NO: 260755 - DNA, 1003 bp, Homo Sapiens
  misc_feature (960)..(960): n is a, c, g, or t
atatttctccccccccttcgctaatataatccccaccccgggtttcctcctccccccctcaaagtaaggttcccctctctccccaatattaccttccccatcctacttaagtccgcccaaattcggtcccaaaattaccaaccaccctcaacctgaatttctcagccaaccatccaaaactctgaatgaacctaggctcttgtaattttgcaaacgtttaaaggttgatacctatctcctgcttagacatatatcacacatattcacacagcacagccagccaagaatccatgagaaaagagaccaatcatcctgaaagcccggtgcactgtaagtgccacatctctggtggtccaggaaggcttcacgtccattgacacatctatgttttctgtggtctttatcaactctgaacgatcagcagcctggaatctccggcttttttccacaaatactttgcctacaggctggctaatgccagtgggtgcagtgaatacagactgctgttccacagtagtttgctcatcagtgattatgtcttcatcttctactcctagctcattggcatactgtaattctgctggctgggttttctttgtcttcctccgaggtttttgaataactgcctcctcagctggctccgcatcaataccattttcatttcgtaataaagatgaactagatgacttcttttgggtggaggaagtctccaattcaagaggtagccttgtctttttctgtcttctttgaacaggagcctctgggtgctctttgagttctttagttgatggctcattgccctcagagggccttcgaccagcagtctgagcaaggccttccaaagaagcacttgctggtgtgttttttgttctgggcttctttttcttaggacgactaagtggaatatcatcttgaccttggcacaggtggaagagctcgtggaggacgcacaggattcgnacgcgtgggtcgacgatatcccaggattccggaccgtaccagc

SEQ ID NO: 260756 - DNA, 532 bp, Homo Sapiens
aagcagacggcacagtactgaatttgaaaccagaaatactgggtttttatataaatgcttcatagatttgttttatgataaagggcacataactctcttaaacctcacaccacctcttgaataggtataataagcccacatccaatgctgatgcccttaggctattattaaacccttacagtatgatgtaaagtgaaagtacaatgtaagatcattccctaggccaactttgaccagttttatacagaaacatgtgccaacttttctgtttgcaaggataatatcaaagcaaacaccagaaagttatatctttgatgcatttttttcaaaatcatacacataatacacaaaccaaagacaaatgatgaatattacgtcagaaaatataaagtcttcccctttcttcttttgccaagaaagtccaatattttcaccatttttatgcacacaatcaactttatttaagctggaagttaatgtctcattgttttcattgttctaaataaacaccttttcccttgagtattgctct

SEQ ID NO: 260757 - DNA, 877 bp, Homo Sapiens
gggatgccctgcgatagaaacacagttacctctcccctttcacgtagttttcatttgtggtgagattctctcccaggccacaagacatttcctgctcggaaccttgtttactaatttccactgcttttaaggccctgcactgaaaatgcaagctcaggcgccggtggtcgttgtgacccaacctggagtcggtcccggtccggccccccagaactccaactggcagacaggcatgtgtgactgtttcagcgactgcggagtctgtctctgtggcacattttgtttcccgtgccttgggtgtcaagttgcagctgatatgaatgaatgctgtctgtgtggaacaagcgtcgcaatgaggactctctacaggacccgatatggcatccctggatctatttgtgatgactatatggcaactctttgctgtcctcattgtactctttgccaaatcaagagagatatcaacagaaggagagccatgcgtactttctaaaaactgatggtgaaaagctcttaccgaagcaacaaaattcagcagacacctcttcagcttgagttcttcaccatcttttgcaactgaaatatgatggatatgcttaagtacaactgatggcatgaaaaaaatcaaatttttgatttattataaatgaatgttgtccctgaacttagctaaatggtgcaacttagtttctccttgctttcatattatcgaatttcctggcttataaactttttaaattacatttgaaatataaaccaaatgaaatattttactgataagattcttcatgcttctttgctctccttaaaatgtctttttcactagttagttccaagggtcagtctcataattttggttcttatactttggatttcc

SEQ ID NO: 260758 - DNA, 1620 bp, Homo Sapiens
ggactcatatctgcaaagaacagaccgttcagtatatactaactatggtggatgatatgctgcaggaaaatcatcagcgtgttagcattttctttgactatgcaagatgtagcaagaacactgcgtggccctactttctgccaatgttgaatcgccaggatcccttcactgttcatatggcagcaagaattattgccaagttagcagcttggggaaaagaactgatggaaggcagtgacttaaattactatttcaattggataaaaactcagctgagttcacagaaactgcgtggtagcggtgttgctgttgaaacaggaacagtctcttcaagtgatagttcgcagtatgtgcagtgcgtggccgggtgtttgcagctgatgctccgggtcaatgagtaccgctttgcttgggtggaagcagatggggtaaattgcataatgggagtgttgagtaacaagtgtggctttcagctcccagtatcaaatgattttttcaatatggctcctggcattcagtcctcaaatgtgtgaacacctgcggcgctataatatcattccagttctgtctgatatccttcaggagtctgtcaaagagaaagtaacaagaatcattcttgcagcatttcgtaactttttagaaaaatcaactgaaagagaaactcgccaagaatatgccctggctatgattcagtgcaaagttctgaaacagttggagaacttggaacagcagaagtacgatgatgaagatatcagcgaagatatcaaatttcttttggaaaaacttggagagagtgtccaggaccttagttcatttgatgaatacagttcagaacttaaatctggaaggttggaatggagtcctgtgcacaaatctgagaaattttggagagagaatgctgtgaggttaaatgagaagaattatgaactcttgaaaatcttgacaaaacttttggaagtgtcagatgatccccaactcttagctgttgctgctcacgatgttggagaatatgtgcggcattatccacgaggcaaacgggtcatcgagcagctcggtgggaagcagctggtcatgaaccacatgcatcatgaagaccagcaggtccgctataatgctctgctggccgtgcagaagctcatggtgcacaactgggaataccttggcaagcagctccagtccgagcagccccagaccactgccgcccgaagctaagcctgcctctggccttcccctccgcctcaatgcagaaccagtagtgggagcactgtgtttagagttaagagtgaacactgtttgattttacttggaatttcctctgttatatagcttttcccaatgctaatttccaaacaacaacaacaaaataacatgtttgcctgttaagttgtataaaagtaggtgattctgtatttaaagaaaatattactgttacatatactgcttgcaatttctgtatttattgttctctggaaataaatatagttattaaaggattctcactccaaacatggcctctctctttacttggactttgaacaaaagtcaactgttgtctcttttcaaaccaaattgggagaattgttgcaaagtagtgaatggcaaataaatgttttaaaatct

SEQ ID NO: 260759 - DNA, 422 bp, Homo Sapiens
  misc_feature (116)..(116): n is a, c, g, or t
agcccagcgggtccgcctataaatgccctgcctggcccgtgcagaagcctcatggtgccacaactgggaatacccttggcaagcagctcccagtcccgagcagcccccagtacccntgtccgcccgaagctaagccctcctctggccttcccctccgccctcaatgcagaacccagtagtgggagcactgtgtttagagttaagagtgaacactgtttgattttacttggaatttcctctgttatatagcttttcccaatgctaatttccaaacaacaacaacaaaataacatgtttgcctgttaagttgtataaaagtaggtgattctgtatttaaagaaaatattactgttacatatactgcttgcaatttctgtatttattgttctctggaaataaatatagttattaaaggattctca

SEQ ID NO: 260760 - DNA, 1016 bp, Homo Sapiens
  misc_feature (614)..(622): n is a, c, g, or t
  misc_feature (924)..(932): n is a, c, g, or t
gggagagtgtctaatcctgcagtcatggcgcaggaagaggaagatgttagagattacaatttgactgaagaacagaaggcgatcaaagccaagtatccgccagtcaataggaagtacgagtgtgaatttggatcatacagcagatgtccatggattgtattacacagagcatgaatatacttctttaggttacacgcatggggagatactctggaggaagcattcgagcaatgtgcaatggccatgtttggttacatgacagatactgggacagtggagcccctccaaacagtagaagtacaaacccccggagatgacttaccgtctcttctgtctcactttttgcatgaatggctctataagctccgtgctgatgaaattcttcataccccggggaagtgaagtacttcaggactggctcccacacatttcccatttacgatccgactggcgcgcggggaccaagcacttttcccttggtcccaacccaccccctccaggtggaaccccgaaattttttaaaagcccacttcacacctgctctctggtcacaatggcccgaggctccctcacttcctcggcaaatccaactacacccccccgtgataaaaggnnnnnnnnnctaatgaggtaaataggaatttcgggcccactttcgtgaaaaccaccccccccgactgagtcagtggtaccccttggactcttccccgtgaccgtgaacaggcaaaccgctcgcaccacaaaaccagcgcgcgcccctgtcttggtgccctcgaggtagccccccttcagacacgcccggagcaggagtggccgaaaacaccggtgccacgaatataagacacctttgcctgccaaaccccacccccctgactacaccaccccacacgctccgcgatagcgcgtacagtaaccgcgggcagnnnnnnnnngccctctatggtcccctcaacccagcgcgcctcccttaccctggcttgtgcgcgtaacgccctccataataaccgcgcggtgcc

SEQ ID NO: 260761 - DNA, 799 bp, Homo Sapiens
  misc_feature (513)..(704): n is a, c, g, or t
  misc_feature (706)..(708): n is a, c, g, or t
  misc_feature (710)..(715): n is a, c, g, or t
  misc_feature (717)..(737): n is a, c, g, or t
gggggaagtagagtgtctaatcctgcagtcatggcgcaggaagaggaagatgttagagattacaatttgactgaagaacagaaggcgatcaaggccaagtatccgccagtcaataggaagtacgagtatttggatcatacagcagatgtccagttacacgcatggggagatactctggaggaagcatttgagcaatgtgcaatggccatgtttggttacatgacagatactgggacagtggagcccctccaaacagtagaagtagaaacccaaggagatgacttacagtctcttctgtttcactttttggatgaatggctttataagttcagtgctgatgaattcttcataccccgggtggggagaagaattttcattgtccaagcaccctcagggaacagaagtcaaagcaataacatattcagcaatgcaggtctataatgaagagaacccggaagtttttgtgatcattgacatttaagacaccaaaaaataaaagactcctacgaagannnnnnnnnnnnnnnnnnnnnnnnnnnnnnnnnnnnnnnnnnnnnnnnnnnnnnnnnnnnnnnnnnnnnnnnnnnnnnnnnnnnnnnnnnnnnnnnnnnnnnnnnnnnnnnnnnnnnnnnnnnnnnnnnnnnnnnnnnnnnnnnnnnnnnnnnnnnnnnnnnnnnnnnnnnnnnnnnnnnnnnnnnnnnnnnannntnnnnnncnnnnnnnnnnnnnnnnnnnnnaaaaaaatttttaacaaacttttctctttgcggcgcgggcggggccacccctacgaaaaaaa

SEQ ID NO: 260762 - DNA, 768 bp, Homo Sapiens
  misc_feature (131)..(141): n is a, c, g, or t
  misc_feature (652)..(652): n is a, c, g, or t
  misc_feature (662)..(662): n is a, c, g, or t
ggggacctatttgttttaacattgtaaaattttgagtcagattttaatattgtaatcttgggtcaaataattcaaagccttaatgcagatgcactaaaacaaagaaatggtaaatgaattgtttgcatttnnnnnnnnnnnctcttaagaaaactgtactaaatctgaatcatgttttgagcttgtttgcagtacttttaaacattattcactactgtttttgaagtgagaaagtatcagccatttagcatttaagttggggtatttagagcctgtaatctaaatgctggctcaaatttattccccagctacttcttataccactattcttttaatgtttgcataatcataagcacctcaacacttgaatacataatctaaaaattatatagtaaagctggtagccttgaaaatgtcagtgtgatatctattatgtagataaatatatatagtggcctttcaggactgtcacagtaacactttatttacagagctaatgtttgtcctaaattttcaggaccctagaggagagctttatacaattaccgatgtgaatttctctatagtgtatatttttgtgtccagttatattatttaaaaaagtgttactttgtaaaaattgtatataaagaactgtatagtttacactggntttcatcttngtgtgtggttattgcttaatgctttttaaacttggaacactcactatggttaaataaggtcttaaaagaaatgtaaatattctgttaataaagttaaatatttttt

SEQ ID NO: 260763 - DNA, 544 bp, Homo Sapiens
gggggcttcctgtttgtacaaggggccatttggcatacctttcacagcttttatcaggccaagttaaaggctgactacattttttcatcatgaggaaagcagttgaaatgaggcatgagttactgtgcattgggattttagaacaattttcttgtgacagctctttttgtgaagttaggttcttaaaagtgcccatgatggtcacttaaaatgtgcagtaatagcactgccaggatcaagcatgaaaggcttttaaattagatcatcccacagacaatacgtttgataatagttttttcttttaacctctttaagtattgattctgcttgagaatattgaagtacttgccagaagttgtggatttcagttttaacaaatgctattaaagtggagaagcacactctggtcttggaattccatttgaggatttagaagtgtcatgtttataactattcagttgtgtttgttgctggcttgttgtaaagcaataaaatttttttggtctttttgtaagtgagtgtgctgctgtaagaaatcctcgtg

SEQ ID NO: 260764 - DNA, 673 bp, Homo Sapiens
  misc_feature (438)..(463): n is a, c, g, or t
accagttggtcaacatatagacactactagagtctgtcagtcagcacacagacactaaagtctgtctgtcagtcagtcagcacagagatccaactagagacagtctcctggacagtatgggtctaaattaaatccctggacacaattctgacatctgtgtcaccttcagggaaagtcgattctaccccaccagtgctgcaacccgactcagttgttacatattttcaataagtcaaaatacatagaaaagctgggtaaatctatcaaatttcttaacaatgaacacaacatggcttctgggcttggcaaagacaatggaatgtgcataagattacataacccagatacaattcttctgattactggatactttttcccgtgcccattggccactccaaccaccaatgagtttctgtcaattaagatctcctgctcatnnnnnnnnnnnnnnnnnnnnnnnnnngtaacatagatgaatttatttccaaacagctatatcatatgtttcttcaaaatgccagtgtctctgaagaccaaatgtgggttgcaaagaggattacccagatcctcatatggaatactcacccattcagtctaggggtacaaatatattgtgtccttaactccaacttctttggaaacaaacaaacaataacaacatcagaatggtaac

SEQ ID NO: 260765 - DNA, 1003 bp, Homo Sapiens
ggggtctgggtggcgaattcggcacgagggtagaagtgaaattatctgacacaacttcccaaagcaacagcacagccaaagaactggattctctacagacagaagccgaaagcctagacaacactgtgaaagaacttgctgaacaactggaatttatcaaaaactcagatattcggggtgccttggatagcattaccaagtatttccagatgtctcttgaggcagaggagagggtgaatgcctccaccacagaacccaacagcactgtggagcagtcagccctcatgagagacagagtagaagacgtgatgatggagcgagaatcccagttcaaggaaaaacaagaggagcaggctcgcctccttgatgaactggcaggcaagctacaaagcctagacctttcagccgctgccgaaatgacctgtggaacacccccaggggcctcctgttccgagactgaatgtggcgggccaaactgcagaactgacgaaggagagaggaagtgtggggggcctggctgtggtggtctggttactgttgcacacaacgcctggcagaaagccatggacttggaccaagatgtcctgagtgccctggctgaagtgggaacagctctccaagatggtctctgaagccaaaaactggagggcagatgaggcaaaacaaagtgctgaaaaacattctggttgaagaccaaatgcctacccgaaggaaaaaaatgggacaagaagccaatggagggagcctgaaaaaatcctaattcccagcaaaatcaagaaagacttttttgaacccaccgaacaggggcctgaacttggggacagccatttgaaagccacgttgccttatggaaagcgagttgcaaaatggaaagatgcccttatccccccccacggcaagtttcccgaaaactttgacccgaaaaataaatacccccggaaccgaatctgtaaaaacccctttttctccacggtaacaggggctattctccgtgccaccaccc

SEQ ID NO: 260766 - DNA, 709 bp, Homo Sapiens
aaagaaggcatgcggatgagagactgtcagcataaggaatgtgggaaaacctaaaggtgtccctgttctctctgaagacatgaaaactcactggggagaaaccctatgaatgtaaaaatgtggaagcaactttgtatctcaggtcttaatgaacacatatgaattcacagtggagaagaccctgcatcagggaatgtggaaatgactttgctgaattctcaagccttaccaaacacatcagaaatctcactggagagaaaccgtatgaatgtagagaatctgggaatacctttctgaatcccacaaaccttaatgtgtgtatgtgaactcacattggagagaaaccctgcaatttaaatggtatggtctggatgatgccccactccatatttgtaagccctaagtcctagttccttacactataactgtatttggacatagggttttcaaacaggtgagtaacttcaaatgaggttgttgggttcgatccctaatctgacatcactggtgtccctataagggaaactgaagaaaggatacacatggagaagactgtgtggatccaccagaagatggccatctacaagccaaggacagagacctggaacagatgctttcattatggcctccagaggaaaccaaccctgtctccaccttgatattgcacttccaggctccagaactgtgaggcaataaatttctcttggtt

SEQ ID NO: 260767 - DNA, 1026 bp, Homo Sapiens
aggtggcgactggggtataatggaggcaggacaattgggaggggaaatgtggggctagcgcaaggaaggagcatcgccagggggggcacggggaggccaagagaaaggggtgggcaggaacacgaataaggggggaaataggaaaccgggggagaggcaacgcgggcggtatacgggacataaccttggatagacacgcctgaaggaccaccaagggggtttggggtaatgacacggatggggtggtttccctgagggccttcttggaaaattgtgttccaagaaaaataaaacggcgtgggttaagggtagctaatcttctttaccaactttaccaggtgctaattcaaagtaccacttaaagtcagcgtcttgttgaagcataggtcccacgggacttaagtttcatatcaaatgagttgtagatcgacttaacgtatgacttctccgttcaaagaaagaaggaaggctgacaagggagggagaaggaatacctgctaaggatgatgtgctagaaagacgactcacaacaagcttaccactgctcgaaggactccttccctccactgagccatgggatgatcataagagccatccgaagagctctcttgggagttttggaaaaagagaatgcccttgtaaccttttttgaagtcttctttattgctctagatgctctactcaatgtactgtccatatcttttgtatttacttcaaaggattctggatcagcagtataaataagattctcagcatctgctttacaaatggtgttagctacatgtcgacacagcatcttcagccagctctcctttggaagctcatctgacgtcatctggaaactgagtagcacatttgcctgctctgttggtggcctcacaagcaaggcaaaagcattatggcaatcttctgtctctcttatgtccaataccttcttaatctgagaaagaggcattaggtgaatatgcttaagagaagctgggggtcgggtttggccatgaggactcctaaaagtgccaataacct

SEQ ID NO: 260768 - DNA, 597 bp, Homo Sapiens
  misc_feature (17)..(17): n is a, c, g, or t
  misc_feature (42)..(42): n is a, c, g, or t
  misc_feature (110)..(110): n is a, c, g, or t
  misc_feature (120)..(120): n is a, c, g, or t
aaatttgccaaaaatanaatatttaacatcaaacaaaaacantctaagatttttaaaaaaatttcgtttaaattaacacaaagttcacttcttccccaaccaacacaggncttctcaaanaaaagaaggaattaattccccacggtaaggcccaatggttgcctcccctgggttttggaaatcatttctgcggagctttccaaggccagaaccctgggcttagggtcgagacttcatagcagtgacagccagacccagcaagatggctgcgaccgtgaaaccctgggcggcgatccgggtgcgcatcatgagctgagagcgcctggctgttgccccggtggaaggagtagaggccgtaggtgaagggcggccgccgtggccaggcaacctatgggtaccaccgggttctcgcgggtcttgcgaacgaacttttccttgaaactctctggattcctgtaaacaagtggctcagcccctcaatgactggaggcttcgatggttcaaaggggactccggaatcacagggccgggagtcgccatgtccgggccacagcagcaggagaaaatcgggactccgacctcagcctcccggtgaag

SEQ ID NO: 260769 - DNA, 501 bp, Homo Sapiens
  misc_feature (29)..(29): n is a, c, g, or t
  misc_feature (58)..(58): n is a, c, g, or t
  misc_feature (141)..(141): n is a, c, g, or t
  misc_feature (155)..(155): n is a, c, g, or t
agaaaaaagttcgttcggaaaaaacccgngaaaaaccgggtgggtacccaataggttncccctggcccagggggcggcccctaaacctagggcccctaatcccttcccaccggggcaaacaggccagcgctcctaagctcnatgatgcgcaaccngggatcgccgcccccagggtttccacgggtcgcagcccatcttgctggggtctggctgtcactgctatgaagtctcgaccctaagccccagggtctggccttgaaaaagccgcagaaatgattccaaaacccagggagcaaccactggccctaccgtgggacttactccctcctctcctttgagaggcccatgtgtcgctggggaggaagtgaccctttgtgtaactgtaaccgaaagttttttcaaaaatcctagatgctgttgtttgaatgttacatacttctatttgtgccacatctcccctccactcccctgcttaataaactctaaaaatccacttgtatt

SEQ ID NO: 260770 - DNA, 551 bp, Homo Sapiens
  misc_feature (23)..(23): n is a, c, g, or t
  misc_feature (40)..(40): n is a, c, g, or t
  misc_feature (130)..(130): n is a, c, g, or t
aacccttgaaagcccccaatcanttgggggtgagccccanttttacgggaatccagggatttcagggaaaagttcgtttcgcaaaacccggggagaacccggtggtacccataggttgcctggccaaggnggcggcccttcactacggcctctactccttccaccggggcaacagccagcgctctcagctcatgatgcgcacccggatcgccgcccaagggtttcacggtcgcagccatcttgctgggtctggctgtcactgctatgaagtctcgaccctaagcccagggtctggccttgaaaagtccgcagaaatgattccaaaacccagggagcaaccactggccctaccgtgggacttactccctcctctcctttgagaggcccatgtgtcgctggggaggaagtgaccctttgtgtaactgtaaccgaaagttttttcaaaaatcctagatgctgttgtttgaatgttacatacttctatttgtgccacatctcccctccactcccctgcttaataaactctaaaaatccacttgtatttaaaaaaa

SEQ ID NO: 260771 - DNA, 778 bp, Homo Sapiens
  misc_feature (765)..(765): n is a, c, g, or t
caggtttgcttctctggcggtcttcagaatcaacatccacacttccgtgattatctgcgtgcattttggacaaagcttccaaccaggatacgggaagaagaaatggctggtgatctttcagcaggtttcttcatggaggaacttaatacataccgtcagaagcagggagtagtacttaaatatcaagaactgcctaattcaggacctccacatgataggaggtttacatttcaagttataatagatggaagagaatttccagaaggtgaaggtagatcaaagaaggaagcaaaaaatgccgcagccaaattagctgttgagatacttaataaggaaaagaaggcagttagtcctttattattgacaacaacgaattcttcagaaggattatccatggggaattacataggccttatcaatagaattgcccagaagaaaagactaactgtaaattatgaacagtgtgcatcgggggtgcatgggccagaaggatttcattataaatgcaaaatgggacagaaagaatatagtattggtacaggttctactaaacaggaagcaaaacaattggccgctaaacttgcatatcttcagatattatcagaagaaacctcagtgaaatctgactacctgtcctctggttcttttgctactacgtgtgagtcccaaagcaactctttagtgaccagcacactcgcttctgaatcatcatctgaaggtgacttctcagcagatacatcagagataaattctaacagtgacagntttaaacagttct

SEQ ID NO: 260772 - DNA, 858 bp, Homo Sapiens
ctccctagttgcattagctccccatcacccttccaccccattcccacccaatcccacccttctccatgaccaaaaatatcaaatcagcaaggaaggtgtgggcttcttgcctggccaagcctcttttgcatatttcttcttcttgggttcatttacagcttcagggttatagactgcagggtttggtgcagggttcatgttcactgctgacggcacaacaggagtcaagtccacatcaggggcaaggtttgggtatggcatgggcaagccaccgatgagtgctgtcccatggatgccatgtggctgggagcctgcttcactgtgtgtggggggcaggcccccgtagagtcctccgctgaaggcaaagttctgcatgcgcctgctccctgattcctccaggcccagggagccagggccctccacacgcttcttctgaactgggaccactgcagtttgcaccatgttcctgaatcgaccaactgagggatccacatcctcttgggttgatgatctcatcatcctcactgaatgtcacccgtgaagtcttcctcttcctctttggtctttgaatgtccagatttccctcctcaatggtaagggtagaaatccgcttgttgtgggcagtgttgaactctgtcaggttatcaagctcagtttcctcctctggaagccccagtaagcccttgagttcatcatcctctccacccatcttctcatctcctttcacagccgatggcaatgtctgaggcttctcgcgcagagtgtatgcccttgtggatgcgccaaatgagaccgtggaatcgatgggaatttgctgaggcttgtgaggttccaaccgaatgtgacccaagaaagtgc

SEQ ID NO: 260773 - DNA, 200 bp, Homo Sapiens
ctcttctaaaactatttgaggcaacataacggcgtgatcaacagaaatgtacaagtttaacttagttcctatatttatactacagtagttataactctcggagtctttttccagaggatctttacatggacagaattgtctcagtcagcccatgatttcacatttgtgttcttgttgcattggtcctctgttgcttgatg

SEQ ID NO: 260774 - DNA, 1086 bp, Homo Sapiens
  misc_feature (42)..(84): n is a, c, g, or t
acacctcaaagtgtaacagcaaagcagccaccagagattgannnnnnnnnnnnnnnnnnnnnnnnnnnnnnnnnnnnnnnnnnntcagatgctaaagcagtgcaaaacagttcacgccatgatggaaaggaagttgatgaaggagcctgggaaactaaaattagtcacagagagaaacgacagcagcgtaaacgtgataaggtgctgactgattctggttcattggattcaactatccctgggatagaaaataccatcacagttaccaccgagcaacttacaaccgcatcatttcctgttggttccaagaagaataaaggtgattctcatctaaatgttcaagttagcaactttaaatctggaaaaggagattctacacttcaggtttcttcaggattgaatgaaaacctcactgtcaatggaggaggctggaatgaaaagtctgtaaaactctcctcacagatcagtgcaggtgaggagaagtggaactccgtttcacctgcttctgcaggaaagaggaaaactgagccatctgcctggagtcaagacactggagatgctaatacaaatggaaaagactggggaaggagttggagtgaccgttcaatattttctggcattgagtctactgctgagccagtttctcagactaccacttctgattatcagagagatgttagccgtaatcaaccctatatcgatgatgaatggtctgggttaaatggtctgtcttctgctgatcccaactctgattggaatgcaccagcagaagagtggagcaattgcgtagacgaagaaagagcttcacttctaaagtcccaggaaccaattcctgatgatcaaaaggtctcagatgatgataaagaaaagggagagggagctcttccaactgggaaatccctggggaaaccaaaggtttctgaaaaaatacccttggcgggcccccttcggcccttccgagaatcctttcctaaaccatttcctttggcgccgcggggtcccaataaggaacagcgacccttggcccataagctgggtttccctagggagaaacccggggtaaagaactaaggggcctggggattt

SEQ ID NO: 260775 - DNA, 674 bp, Homo Sapiens
gttcactatggttgtgagaagcccagttatttaaaaggccattaagattgaaaatagattaagaggtgtaggtacagactgggaaggggcatgaaggaaatttcaggggtgctggaaatgtcctaaacatggtggtgacatgggtgttaacatacataaaaattaattaagctgtacatttaaaattagtcccctttatgcattttactctacatgtgttatccttgcaaagaaaaagactgacatctttgagagcaagagtttttgtcttattcacctctgtataatttccaacatcgtgctttgcacattggacattcaaaaaatgttatacaagattgactgcatcaatactggagtgttgtgtgagggttaggtgctgaggctgagaagtgtatgagggagacctgagattaaacctgccacataaagtggagagaagtagcaaggtcagggctatgaaataatcccaaaaactttagaatttctacataatacagttgacactactattctcaatagagctgctttcagtataaaagggctgtggtatgtgtgcgtgtgtgtgtggtaaaaaagggaagcagcaggtcaaggaagagaagtgttatttcacaagacttaagtaatcttgtcattgctgcttttcctgccagaaaatcattacctttccc

SEQ ID NO: 260776 - DNA, 581 bp, Homo Sapiens
  misc_feature (30)..(30): n is a, c, g, or t
  misc_feature (77)..(77): n is a, c, g, or t
gaaattaatccaggacttgctctgcagccnactcagtagtcttcggtggtcacagaagtaaaccattgttggccttngtattgatctctccagtcattttggaacacatccaatagaaaccattggccagcatggtcttccaaaacaaaaagcagtaacatgcatgtttaattgcataccattctcttcacagtagcaggcttaccaatttccatagtctcatgaggccgaaatgaattacaatgtaaagtgttccaggaaccaaattggattttctttcttttgtcattggacacggtttgcaaagttggacatcacttgagttccttcttaaacttttcggcaacttctcttggatcctgttatcacagttttttactgtgatgaaatcttgttaaccaccactagggaatctccagatgaactattaatgcactgtcttatgcctctcattggtgatgtttggaaaatagaagacatctctaatggaatcatgggggaaacgggttggaatttgtagccatggaatatatattagatgtaaagaattttctgcaataaaagaaactagacttgttaaa

SEQ ID NO: 260777 - DNA, 932 bp, Homo Sapiens
gggaaaattgaagtgatacgtgaaattgagatgagtgtggatgatgatgatatcaatagttcgaaagtaattaatgacctcttcagtgatgtcctagaggaaggtgaactagatatggagaagagccaagaggagatggatcaagcattagcagaaagcagcgaagaacaggaagatgcactgaatatctcctcaatgtctttacttgcaccattggcacaaacagttggtgtggtaagtccagagagtttagtgtccacacctagactggaattgaaagacaccagcagaagtgatgaaagtccaaaaccaggaaaattccaaagaactcgtgtccctcgagctgaatctggtgatagccttggttctgaagatcgtgatcttctttacagcattgatgcatatagatctcaaagattcaaagaaacagaacgtccatcaataaagcaggtgattgttcggaaggaagatgttacttcaaaactggatgaaaaaaataatgcctttccttgtcaagttaatatcaaacagaaaatgcaggaactcaataacgaaataaatatgcaacagacagtgatctatcaagctagccaggctcttaactgctgtgttgatgaagaacatggaaaagggtccctagaagaagctgaagcagaaagacttcttctaattgcaactgggaagagaacacttttgattgatgaattgaataaattgaagaacgaaggacctcagaggaagaataaggctagtccccaaagtgaatttatgccatccaaaggatcagttactttgtcagaaatccgcttgcctctaaaagcagattttgtctgcagtacggttcagaaaccagatgcagcaaattactattacttaattatactaaaagcaggagctgaaaatatggtagccacaccattagcaagtacttc

SEQ ID NO: 260778 - DNA, 1146 bp, Homo Sapiens
gctgggtggcgaattcggcacgaggcgaaaggtggccagaagtatctcctgcggcccttctagcaggtggtcgaccagcatttgcactgaagaaccagcgttgtctgaggttgggccacccgacttagcaagcacaaaggtacccccagatggagaaagcatggaggaagagacgcctggttcctctgtggaatctttggatgcaagcgtccaggctagccctccacaacagaaagatgaggagactgagagaagtgcaaaggaacttggaaagtgtgactgttgttcagatgatcaggctccgcagcatgggtgtaatcacaagctggaattagctcttagcatgattaaaggtcttgattataagcccatccagagcccccgagggagcaggcttccgattccagtgaaatccagcctacctggagccaagcctggccctagcatgacagatggagttagttccggtttccttaacaggtctttgaaacccctttacaagacacctgtgagttatcccttggagctttcagacctgcaggagctgtgggatgatctctgtgaagattatttgccgctccgggtccagcccatgactgaagagttgctgaaacaacaaaagctgaattcacatgagaccactataactcagcagtctgtatctgattcccacttggcagaactccaggaaaaaatccagcaaacagaggccaccaacaagattcttcaagagaaacttaatgaaatgagctatgaactaaagtgtgctcaggagtcgtctcaaaagcaagatgggacaattcagaacctcaaggaaactctgaaaagcaggaaacgtgagactgagggagtggtaccaggaaattgaaggtcaaaatgacacaatggcaaaaccttccagaaatgctgcaccaaaagccagcttggacaacttcacagctcagagggtacttctccagctcagcaacaggtagctctgcttgatcttcagagtgctttattctgcagccaacttgaaatacagaagctccagagggtggtacgacagaaagagcgccaactggctgatgccaaacaatgtgtgcaatttgtagaggctgcagcacacgagagtgaacagcagaaagaggcttcttggaaacataa

SEQ ID NO: 260779 - DNA, 639 bp, Homo Sapiens
  misc_feature (43)..(43): n is a, c, g, or t
caagacataatagcgcattacaggaagaacccaactacattcnattagagataaaagtatggatataacaacaacaacaataacaacaaaaaaagaaacagcctatcattgaaaatacattaatacagaaaacatgagatatccattatgagattttaaaaggtaaaattcctaacaatttgaataactgatttgggtatagtgatgtacaaggaggtagtattaacacacgaagactccttttagccctgtaatggtaaaatatattcagtctgttcaatataccatcaagactggggttaagccgtgagttctcagtctttaatatctaaataatcactgtaagagttttatttgccttccaaatccagagggtcgtactacctagcatcttagcaagttaggatgctttgaaaagcatgatttccaaaaattaacaaatctttgatttataaataagtttatttataatgatatttacataataaaaacaaaacacatggaactcacaagttatacaaagaaactgatgtataataaaaacagcaatatagactgacaggcagaaatttaaagaaagatttaataaagagttaaatatcaaatagacaacttcacttctaaatttccctcgtgccg

SEQ ID NO: 260780 - DNA, 503 bp, Homo Sapiens
  misc_feature (81)..(104): n is a, c, g, or t
  misc_feature (483)..(483): n is a, c, g, or t
  misc_feature (490)..(490): n is a, c, g, or t
agcagttaaacccgtggattttgtagttaggaacctgggttcaaaccctcttccactaattggctatgtctctggacaagnnnnnnnnnnnnnnnnnnnnnnnnaaaccctttctgaactttcactttctatgtctacctcaaagaattgttgtgaggcttgagataatgcatttgtaaagggtctgccagataggaagatgctagttatggatttacaaggttgttaaggctgtaagagtctaaaacctacagtgaatcacaatgcatttacccccactgacttggacataagtgaaaactagccagaagtctctttttcaaattacttacaggttattcaatataaaatttttgtaatgggataatcttatttatctaaactaaagcttcctgtttatacacactcctgttattctggggataaggataaatggaccacaggtaccttaatttctgggtgggggtgcctggtggatgggtncattgtngggtaaggggcca

SEQ ID NO: 260781 - DNA, 384 bp, Homo Sapiens
aggaaataagattcatttctttcggcagtagatgtagattgatcttttaacgtttcttcaaatttgtttctgtcaggctttgtgttattttaaatggttttttaaaattttcttctatgttttcaattacctaaagacataggataatagttttttttaagttagaattttacctcataaaattttttgaggtttgatgtatgtctctgtcttatcaataatgaggcttaaaaaatactggatttgaatggctgccgttttttcaaagcaatatgaatttgatgagtttgttttatgccattaggtggcgccagaggtcagaacatgtctattttgaattggatcgttacaaatgagcatatttgatgcggaaatttctgggag

SEQ ID NO: 260782 - DNA, 795 bp, Homo Sapiens
gggagacggctctcagatccgggggctgcggataaatccccgtaggccgcgggcagggagatgttgcgttccggtgtgggtgtgggtgtgcctccgacggcgtctcggtgccagtgtcgaggttctttctgcttagctacccggagccgactacggaggaggacacctgagtttacgtctcttccatctgctgctcacctcagctgcctgggtccccgacgagagccaggtgacacttaactccgccatctgcgttttgagcactgttctcataatggagtttcctgatttggggaagcattgttcagaaaagacttgcaagcagctagattttcttccagtaaaatgtgatgcatgtaaacaagatttctgtaaagatcattttccatacgctgcacataagtgtccgtttgcattccagaaggatgttcacgtcccagtatgcccactctgtaatacccccatcccagtaaaaaagggccagataccagacgtggtggttggtgatcacattgacagagactgtgactctcaccctgggaagaagaaagagaagatttttacataccgttgctcaaaagagggctgcaagaagaaagagatgctgcagatggtatgtgcccaatgtcacggccaacttctgtatccagcacagaaacccctttggaccacagctgcagacacgggaagtcgccccaccatcaaagctgggtggagaagagactccgcctgcgatggctcggagcaccccagtagcatgcgtgggagccagcttaccctctattgggaagtggg

SEQ ID NO: 260783 - DNA, 345 bp, Homo Sapiens
actttgccaagggagagacatgaagacagaggagaaatgaatgcataaaataactgataatatgaatctatacatagaacttaggaagtctcatcttgcctgaaaatgacctgtgtggatcccacccaaatccaacttcatcctggtttgctgcacactggttcatcaaaagaaggttaccgaggggaaggaactaaaggtgtttgcacttcatgttactttttgagtttataaacataaaaacagaatttacttctgttacagacctagttactgggaattcattacttgccatggactacctttgctaagaaaagtctgaatgagaagatggcaggacgtctg

SEQ ID NO: 260784 - DNA, 1187 bp, Homo Sapiens
actgtgcaaagaagattgttaaagatgtacttgaaggatataatggaacaatatttgcatatggacaaacatcctctgggaagacacacacaatggagggtaaacttcatgatccagaaggcatgggaattattccaagaatagtgcaagatatttttaattatatttactccatggatgaaaatttggaatttcatattaaggtttcatattttgaaatatatttggataagataagggacctgttagatgtttcaaagaccaacctttcagttcatgaagacaaaaaccgagttccctatgtaaaggggtgcacagagcgttttgtatgtagtccagatgaagttatggataccatagatgaaggaaaatccaacagacatgtagcagttacaaatatgaatgaacatagctctaggagtcacagtatatttcttattaatgtcaaacaagagaacacacaaacggaacaaaagctgagtggaaaactttatctggttgatttagctggtagtgaaaaggttagtaaaactggagctgaaggtgctgtgctggatgaagctaaaaacatcaacaagtcactttctgctcttggaaatgttatttctgctttggctgagggtagtacatatgttccatatcgagatagtaaaatgacaagaatccttcaagattcattaggtggcaactgtagaaccactattgtaatttgctgctctccatcatcatacgatgagtctgaaacaaaatctacactcttatttggccaaagggccaaaacaattaagaacacagtttgtggcaaatgtggagttaactgcagaacagtacccaccagaaaaccaggctaccccccgaaaaaaatgtcgggcccccctcggcccctcaacacccctttccaaaacattcggtttgggcgcgcgggcccccagtagggaaaggggaacagggccctaccctgttctccctagggaaaccccggggccggggttaaggggtcggggttttgcgaaaaaaccaaaaacccccaccggggggaacccgaagatgtttgggccaaattcccccccggtaattttttgggcgccctgtaccggggcccctttttaaaatggaaggtccccgaggcacgattcatgaccgccggagtggcaggccccccgccctgttgtcccagcccccccaga

SEQ ID NO: 260785 - DNA, 669 bp, Homo Sapiens
  misc_feature (600)..(600): n is a, c, g, or t
ggaaccttctcagaagtgagtctggcccaggacccaaagcggcagcaaaggaaacctaaaggcaataaaagctccatttcaggaaccgaacaggaaatattccaagtagaattaaatcttcaaaatccttccctgaatcatcaatggattgataaaatatatgactgccaaggtttactgccacctccagagaagctcactgccgaggtcttaggaatcatttgcattgtcctgatggccactgtgttaaaaacaatagttcttattcctttcctggagcagaacaattcttccccgaatacaagaacgcagaaagcacgtcattgtggccattgtcctgaggagtggattacatattccaacaggttgttactacattggtaaggaaagaagaacttgggaaaagagtttgcaggcctgtacttcaaagaactcttctagtctgctttctatagataatgaagaagaaatgaaatttctggccagcattttaccttcctcatggattggtgtgtttcgtaacagcagtcatcatccatgggtgacaataaatggtttggctttcaaacatgagataaaagactcagatcatgctgaacngtaactgtgcaatgctacatgtacgtggacttatatcagaccagtgtggatcttcaagaatcattagac

SEQ ID NO: 260786 - DNA, 947 bp, Homo Sapiens
  misc_feature (615)..(615): n is a, c, g, or t
  misc_feature (652)..(763): n is a, c, g, or t
  misc_feature (820)..(820): n is a, c, g, or t
gggagcaaaggaaacctaaaggcaataaaagctccatttcaggaaccgaacaggaaatattccaagtagaattaaaccttcaaaatgcttctctgaatcatcaagggattgacaaaatatatgactgccaaggtttactgccacctccagagaagctcactgccgaggtcctaggaatcatttgcattgtcctgatggccactgtgttaaaaacaatagttcttattcctttcctggagcagaacaattcttccccgaatacaagaacgcagaaagatagtaattcatatgtttattagcacgtccttgtggccattgtcctgaggagtggattacatattccaacagttgttactacattggtaaggaaagaagaacttgggaagagagtttgcaggcctgtgcttcaaagaactcttctagtctgctttctatagataatgaagaagaaatgaaatttctggccagcattttaccttcctcatggattggtgtgtttcgtaacagcagtcatcatccatgggtgacaataaatgggttggctttccaacatgagataaaagactcagatcatgctgaacgtaactgtgcaatgctacatgttacgtggacttnattatccagacccagtgtggatcttcaagaatcattnnnnnnnnnnnnnnnnnnnnnnnnnnnnnnnnnnnnnnnnnnnnnnnnnnnnnnnnnnnnnnnnnnnnnnnnnnnnnnnnnnnnnnnnnnnnnnnnnnnnnnnnnnnnnnnnagtgctcatgtacccatttagcttgtgttttaaaaatctactttttctgccctcccnatttttaactagatgatgttttaaaaattacttttccctctctatatagtttgatttaagcattagtcatttacaacaaatattaatattaaaatgcagaccgttatgattggaaaataaatcaatg

SEQ ID NO: 260787 - DNA, 116 bp, Homo Sapiens
ttttgttttgcttctgagaaagcatttgcctttcttcctctcccaacataacaatcgtggtaacagaatgcgactgctgatttaccgatgtatttaatgtaagtaaaaaaaggaaa

SEQ ID NO: 260788 - DNA, 636 bp, Homo Sapiens
gggacctgtgattagactgggcggctggggagaaacagttcagtgcattgttgttgttgctgtttttggtgttttgcttttcagtgccaactcagcacattgtatatgattcggtttatacatattaccttgttataatgaaaaaactcattctgagaacactgaaatgttatactcagtgttgatttcttcggtcactacacaacgtaaaatcatttgtttcttttgactcaaattgtattgcttctgttcagatgatctttcattcaatgtgttcctgttgggcgttactagaaactatggaaaactggaaaataactttgaaaaaattggataaagtataggagggttacttggggccagtaaatcagtagactgaacattcaatataataaaagaacatggggattttgtataaccagggataataaaaagaaaacagaagttgatttttaattgatgtttttgaaacttagtagaacaaatattcagaagtaacttgataagaaatgaatgtttctaaagaagtttctaaagattcggaaaatgctccttgtcacattagtgtgcatcctacaaaaagtgatctcttaatgtaaattaagaatattttcataattggaatatacttttctt

SEQ ID NO: 260789 - DNA, 842 bp, Homo Sapiens
  misc_feature (33)..(33): n is a, c, g, or t
  misc_feature (35)..(35): n is a, c, g, or t
acagggttgtttggtttgtttgttttttggggngnggcttctttttatttccactgccttggagcagggtttatcacgttagagcattaattctttccccttctagggcactgcatcagagcatgggggacagaacaaagaaccagccaagaagaaaaggaaaaaataaatgaaatgcctgagttaatgtgaactttggggcttctgcttcatttttacccaacaagcaacaatgccccttgtcctgtagtccacaccgatgttggcatcttggttctgaacccactgaattcaactgcaccttcagttagaaggaatcttcttggcaggtcctgctactgaaaaatggctggccttaggcaagcccttttgcaaaaagcacagctgaaagcctgagtttgggagcctgcaccaccccgatgaagctccacgggagcaaatacagagcctccaggcagtgctatggtccaggctggcttcgtttttccaaggagcctttggtgagttcaattatctggtaaatatccagcgcttcacctgaaagatagtgcaaattggttaggatgccacctcaagaactgtaactgagagctcagaagtgagcaaagtagcttaatgctaaggtcaaaaggagagtgaaaggttgagaacaattgccacgaacggtaatgttacatgttaggagggtcggttttctttttatataagtgtgtcttagatatattttaaatagaaaataagctttctgatttacttgtttggtatttaaagcacagtttgtttttctgtcaccttatagatgcaagaatgcactctatagaataaattatctttaaacattt

SEQ ID NO: 260790 - DNA, 2013 bp, Homo Sapiens
cttgagagcattgctacgtctgacataccacgtaccccggtgctgggctgctgaatcagccgagccctggagccctcggctgttccaggaagagtttatgaccagccgtgtgaattgggtggtacagagctctgctgttgactacttacacctcatgcttgtggccatgaagtggctgtttgaagagtttgccatagatgggcgcttctgcatcagcatccatgacgaggttcgctacctggtgcgggaggaggaccgctaccgcgctgccctggccttgcagatcaccaacctcttgaccaggtgcatgtttgcctacaagctgggtctgaatgacttgccccagtcagtcgcctttttcagtgcagtcgatattgaccggtgcctcaggaaggaagtgaccatggattgtaaaaccccttccaacccaactgggatggaaaggagatacgggattccccagggtgaagcgctggatatttaccagataattgaactcaccaaaggctccttggaaaaacgaagccagcctggaccatagcactgcctgaaggctctgtatttgctcccgtggagcttcatcggggtggtgcaggctcccaaactcaggctttcagctgtgctttttgcaaaagggcttgcctaaggccagccatttttcagtagcaggacctgccaagaagattccttctaactgaaggtgcagttgaattcagtgggttcagaaccaagatgccaacatcggtgtggactacaggacaaggggcattgttgcttgttgggtaaaaatgaagcagaagccccaaagttcacattaactcaggcatttcatttattttttccttttcttcttggctggttctttgttctgtcccccatgctctgatgcagtgccctcttcattttcatcttcaccatcctctcgaagaaccatgtctaggatgtttcctttgatcttgaagtctcgtgaggtgctgagcttcatgtgctgcatcaggttcaccttggacttcttagaaaggtggatgagaaatttttcatactgttctatggcaaagatgaggttagggattggcttggtttcccgaagaactctggccatggctgtggcaacggcagcaggtttctcctttttctctcccgtatagttcaggctcttactcttattctgtacgtaagaaatgaaagaataacacaggggggtcagatgagaaccagacagcttcaccagcttttccatattttttggaattcctccggagctctgacacacctggagataatatctgacaagaggctgtaagtgtggtgtacattttgcacaagtcctttaaacaaggtgtccacacagctgcctgatggcagagctgtctgcaccagctcgtggaaaaatgtaagcagagttcccagttgcatgatgatagctttctcaacaggctgatttggtagggttgcctgagaagaggcctcttctgataaggtttcttggctcacttgtcccttaagcttggtgattagccagtccacttcttctagaaccttctcggcctgactcagaacaagtaaacagacagtgggggcagccgttctcaaattcactattgcaaagtggtttgttttctccacctctacatcctggtctatatctcccagatgcccgtggatatcctgggacaagtcacgcagcagaatgacaggactcttatacgaaacatgcaggctgaagagcaagttcatcaagctcttgcaaacaaggcatcctcccggctgttttccttgcaaatctttgatgtccaggataacatctgcacaaactgaggagaggagggctccagtaacttggacaaactggtaagaaccgtgactagcaggagggcttctttgctattaaaatcttcctcttgactgctaagtaaattcaacaaggacctctgaaattgccggatctggaatgctgttctctgagtgacactgacatctgcatcttctctctcttctccttccttatctgtg

SEQ ID NO: 260791 - DNA, 430 bp, Homo Sapiens
ccgtggagcctccatcggggtggtgcaaggctcccccaaacctcaggcctttcaacctgtgcccttttgccaaaaaagggcctttcccctaaaggcccagcccatttttccagtaagcagggaccctgcccaagaagattcccttcctaactgaaggtgcagttgaattcagtgggttcagaacccaagatgcccaacatcggtgtggacctacaggacaaggggcattgttgcttgttgggtaaaaatgaagcagaagccccaaagttcacattaactcaggcatttcatttattttttccttttcttcttggctggttctttgttctgtcccccatgctctgatgcagtgccctagaaggggaaagaattaatgctctaacgtgataaacctgctccaaggcagtggaaataaaaagaaggaaaaacc

SEQ ID NO: 260792 - DNA, 1051 bp, Homo Sapiens
acacgcctgggtggcgaattcggcacgaggcagcacccatgtggcgctgcagccgaatcatgcacatgcagcgagagctccaccccacccttctgtcttccctggaaggcatcgtcgatcagatggtctggttcagagaaaattggcatgaagaggttctcaggcagctccaacagggcctggcgaaatgttactccgtggcgtttgagaaaagtggagcggtgtccgatgctaaaatcaccccccacactctcaattttgtgaagaagttggtgagcacgtttggggtgggcctggagaatgtgtccaacgtctcgaccatgttctccagcgcagcctctgagtctctggcccggcgggcgcaggccactgcacaagaccctgtctttcagaagctgaaaggccagttcacgacggattttgacttcagcgttccaggatccatgaagcttcataatcttatttctaagttgaaaaagtggatcaaaatcttggaggccaagaccaagcaactccccaaattcttcctcatagaggaaaagtgccggttcttgagcaatttctcggcacagacagctgaagtggaaattcctggggagtttctgatgccaaagccaacgcattattacatcaagattgcacggttcatgccccgggtagagattgtgcagaagcacaacaccgcagcccggcggctgtacatccggggacacaatggcaagatctacccatacctcgtcatgaacgacgcctgcctcacagagtcacggcgagaggagcgtgtgttgcagctgctgcgtctgctgaacccctgtttgggagaagagaaaggagaccaccaagaggcacttgtttttcacagtggccccgggttggggccagtttcccccccagatgccccctcgtggaaggacaacccctcttccctttccccttggggagatctaacagcagcgctgcgccaagaaagggcatccagcatgaaaaacccatcttccctttactatgcaccggctgggctaacggggcagggccgcggggaaacccagcc

SEQ ID NO: 260793 - DNA, 1030 bp, Homo Sapiens
aaggagcgaggcctgggtggcgaattcggcacgaggcagcacccatgtggcgctgcagccgaatcatgcacatgcagcgagagctccaccccacccttctgtcttccctggaaggcatcgtcgatcagatggtctggttcagagaaaattggcatgaagaggttctcaggcagctccaacagggcctggcgaaatgttactccgtggcgtttgagaaaagtggagcggtgtccgatgctaaaatcaccccccacactctcaattttgtgaagaagttggtgagcacgtttggggtgggcctggagaatgtgtccaacgtctcgaccatgttctccagcgcagcctctgagtctctggcccggcgggcgcaggccactgcacaagaccctgtctttcagaagctgaaaggccagttcacgacggattttgacttcagcgttccaggatccatgaagcttcataatcttatttctaagttgaaaaagtggatcaaaatcttggaggccaagaccaagcaactccccaaattcttcctcatagaggaaaagtgccggttcttgagcaatttctcggcacagacagctgaagtggaaattcctggggagtttctgatgccaaagccaacgcattattacatcaagcattgcaccggttcatgcccccgggtagaaattgtgcagaagcacaacacccgcagccccggcggctgtacatccggggacacaatggcaagatctacccatacctcgtcatgaacgacgcctgcctcacaaagtcacggcgagaggagcgtgtgttgcacctgctgcgtctgctgaacccctgttttggagaagaagaaagagaccaccaagaggcacttggtttttcacattgccccgcggttgggggcagtttcccccaccgatgccgccctcggggaaggacaaccccttctttcaccttcccccttgggggaaatctaacaaaccagcgccttgcgccaaggaaggggcatccagacatggaaaacccccttctccccgttact

SEQ ID NO: 260794 - DNA, 508 bp, Homo Sapiens
  misc_feature (19)..(19): n is a, c, g, or t
  misc_feature (34)..(34): n is a, c, g, or t
  misc_feature (53)..(53): n is a, c, g, or t
  misc_feature (61)..(61): n is a, c, g, or t
  misc_feature (81)..(81): n is a, c, g, or t
  misc_feature (191)..(191): n is a, c, g, or t
ccaccgccctgtggaccgnggatctgacctgacnagataggctgaaggcacanggtccccnccaaaaacccactattgatncccaccacaaaaacaagccagcaaaaagatactgtagagaggtgggcttgctcccctctctccctaactgcatggtgaaaaataagccggttattggatcttaaacatcnggtcagatgagtcatacattgggttattttttatatacatgtatacacaaaatatttcaaattgaaagcaacatcttaatggattcaaaactattacaagctgttgtctaaaacaggtgagaaaaaaatttataactgtaaaaacaaatgcacatattgatatttaaaatgcgtaattaagaaaacccattgttgttgtgtttttcttgtataccaataattaagccactactgttggcactgtttggttttctgttttaacactgaaggagtgaaagtatttcctatatttatgaatttactactaaaatcttggc

SEQ ID NO: 260795 - DNA, 961 bp, Homo Sapiens
caataatttacaggacgtcaaagggctgtttcctgtgctctgtcccctccaaacaaagccttcaacttagaggacaaaggagaaaaaagtgaaacagctgcaaattgttagaagcaaatattaacatagcaaaatgtggggaggacacaattgttttataaaaatatccctacttcctgtaaacctatggagttaggcttgccagtctgataataaataccgtcccagaaaagcgagccccagtgaaaacaactaaacaggctgaggcttgagtatgtgttgtattcctccttcatcttaacatctggcacatgagaagaaagaggttaggtcactgaggcagttaaatataggtgatccctttagacataagcagcagaagaccttggtgccaggggtggaggcgcggcagaaggggtggtatgtaccttagctgtgaggggggctgctgaaggcatggaggacagtaatgacggctgtgcctccttggatggtggagacctcagaaatggtctgcaacacaggcactaggtcagtttcccgcccttagctgaatgcagatggatgctgggagatggatatggtgagatggtgtggggaggatgttagaaagctggaggtgtttatcacttctcaaggagctctgaatatagggggaaaaaaacaacaaaaagacaagcccagggagaaagcaccattaaggatatacctatgccagcttctatagctgcacctgctttattggcaggtcacttgccacaattgcatctgccctctaaactttttaattttcacactgtatcctagacatgaatgcataaaatacagtgtctggcgggataatgcagagaggtaccatcttgattttccccagttacattcacctggtctggtctctgtaagcttagaagagtagaatcactttattttttaaagacttccggccaggcacggtggttca

SEQ ID NO: 260796 - DNA, 982 bp, Homo Sapiens
  misc_feature (593)..(593): n is a, c, g, or t
  misc_feature (875)..(883): n is a, c, g, or t
gtgcgcactggcgtgcgagactcggcgggcgctgttgagggagtcgggccgcgactgtggtcgtttttataccttcccgcgcggacgccggcgctgccaacggaagggcgggtagggcggctctgctgccatgaaggtgaagattaagtgctggaacggcgtggccacttggctctgggtggccaacgatgagaactgtggcatctgcaggatggcatttaacggatgctgccctgactgcaaggtgcccggcgacgactgcccgctggtgtggggccagtgctcccactgcttccacatgcattgcatcctcaagtggctgcacgcacagcaggtgcagcagcactgccccatgtgccgccaggaatggaagttcaaggagtgaggcccgacctggctctcgctggaggggcatcctgagactccttcctcatgctggcgccgatggctgctggggacagcggcccctgagctgcaacaaggggggaaacaagggcctggcagctggcgtctggttttgcccatcacccaatggttgacccctttcttacccccataaagccgaaataactccattctaaacctaactcccncgaacggaacgtccggcgcgtttcgccctaaccgcatatccccctttttgtccggggccccgtcccttcggggctccctccgaaggaaagcctttttccggaggacaccaatttcctgttggggggtggcggcgggggccccgtactacagggcgacggcgcgaagcgtgggggctactcacaccgtgggtttccctccagcgggaggacaccccggcggacccatggcaccacgagcggcccttggggaattttcgcgcccgctgatgtgaacgacatcannnnnnnnngggaggggtcgaacccctgatatcggagttcctccgaccaacacacctccaaagaggtgggaggtcttcctgccaggtggcttcgcctccccggcgtta

SEQ ID NO: 260797 - DNA, 961 bp, Homo Sapiens; identical to SEQ ID NO: 169246

SEQ ID NO: 260798 - DNA, 986 bp, Homo Sapiens; identical to SEQ ID NO: 169247

SEQ ID NO: 260799 - DNA, 961 bp, Homo Sapiens
gggaacgttaggcgccggaagtggccgttgctggggcttgcgtgggaggaaggtgactgtgaggaaggtgtgtgtccaccgagcacttggattcagcttcttcatttccaacatggaagaaacttacaccgactccctggaccctgagaagctattgcaatgcccctatgacaaaaaccatcaaatcagggcttgcaggtttccttatcatcttatcaagtgcagaaagaatcatcctgatgttgcaagcaaattggctacttgtcccttcaatgctcgccaccaggttcctcgagctgaaattagtcatcatatctcaagctgtgatgacagaagttgtattgagcaagatgttgtcaaccaaaccaggagccttagacaagagactctggctgagagcacttggcagtgccctccttgcgatgaagactgggataaagatttgtgggagcagaccagcaccccatttgtctggggcacaactcactactctgacaacaacagccctgcgagcaacatagttacagaacataagaataacctggcttcaggcatgcgagttcccaaatctctgccgtatgttctgccatggaaaaacaatggaaatgcacagtaactgaatacctatctcatcaaatggccagaccctagaaagactgttgcttcttcttctaccagtgagttctcatttttcctcccaatctaattatagaaatggtaaactccctgtgactttccaaactgacaagcacacttttttcctccccccttgaatcctcatttaatgcaagaaccctcatactcagaagcttccaaataaacctttgatacagattgcttaatagtttggtcaagtacctgcagccccaagatcagagatcatgtccaattccacattaatgaaccataatgatttaaagttttcttaaaggatctaactgaaatagacaggaaacttggg

SEQ ID NO: 260800 - DNA, 359 bp, Homo Sapiens
  misc_feature (247)..(247): n is a, c, g, or t
  misc_feature (254)..(254): n is a, c, g, or t
  misc_feature (279)..(279): n is a, c, g, or t
  misc_feature (348)..(348): n is a, c, g, or t
gcccagaccccctagaaagactgttgccttccttccttcctacccagtgggttcctcattttccctcccctaatcctaattatagaatgggtaaactcccctgtgactttcccaaactgacaagcacacttttttcctccccccttgaatcctcatttaatgcaagaaccctcatactcagaagcttccaaataaacctttgatacagattgcttaatagtttggtcaagtacctgcagccccaagntcagagntcatgtccaattccacattaatganccataatgatttaaagttttcttaaaggttctaactgaaatagacaggaaacttgggttagaaaatttnaaagggaaaaa

SEQ ID NO: 260801 - DNA, 394 bp, Homo Sapiens
aagaaagatagtaaaagcgagactcctttagggctttgaactgtacctacagaaaatcagagtgcagtgaacataatgttcagtcctacagtcaggatgcagttgctccttcccatgtccacaagatactgcacctttccatcaagtgtcacccgacgtgccaaaactcggtatttttcgccacatgctattctacctgcagcaccaaaataactggtaatggagttctttagatgattgagttgtaactcctgatctgctaagttattcagaatctctgtgttgagttcatcaaactgataatcttctttgccttcatcatcttttacaatttctgagttctgagtctggagtgctcttcttggaagacgacctcttcttctccgcaaatgtg

SEQ ID NO: 260802 - DNA, 1543 bp, Homo Sapiens
  misc_feature (111)..(111): n is a, c, g, or t
  misc_feature (255)..(255): n is a, c, g, or t
  misc_feature (346)..(399): n is a, c, g, or t
gttttcctgcttgaatctgttcgtggtcaaaggtttgggggaatttgtgaccctggaacatccccagagtgaaagatggagctgggccacatcagaataaggccttggccncatcctctcacagcctaggtgctctgcaggcatgctgactgtcctgattgcgatccagcccgaaattccctcctctgctttcaaaagtcaaatcccccattcttaggccacactggtgtcacaagctcctgtcagggagctggnggtttgggaatgtgctttgtgaactctgctttaaagtgaggggccgaggaaaacttagaaacaggcagagttggaagcagccaaatcacannnnnnnnnnnnnnnnnnnnnnnnnnnnnnnnnnnnnnnnnnnnnnnnnnnnnnaaagcaggtggaccattccactttttagctcctattgatgcaccaaaccaagtgcctcatttctgtgccaaatgtttgccttggtcgttgtggacctccttctctaacttgcggtggcatgactgtcaggaggtgctggcattttcagcagatcctcatgtgttgaccctgatgtctttagcagaggcctctagcatctcggtttttcatccactgcaagaatgtggccacagggagcagaggtttgtactttccccaagaggtcctcatcctgagacggtctctacccatgtttaacccaaagagtgcaggccaggttccttatccttctgatgaaggatgagagagctcatttagaagtcagagcaaactagggtctcagtattgagaaacgcagcctgccagggaatcacagagacatcggggtgcccgcgatggccctcatgaagccatgcctcgacggcattcaggaagccctgcaaacgtgctttttgaactcattggccaggtgtgatttttacacaaggtaaacgtggtcaagggcatcggggaatttgctccaagcagatagctccctctgaggaaccaaaggaagcaagtttccacgatttctgaagagctggtataggaagtttctttcttccttttgtgttacatgtgcattaaacagaacaagctgtgtgtcatcacagattgtactgtgggctcagaaaccgtgagagagcccccaccgtggacaccggctctagggccacaggaaaaggaacgtttccaggcattttgtctccagggctcccgctggacaggcacgtactgccctggggagtaaatgcggagagttcacgaactgtgcccaacgcatgttatagcccagggtcctactaactactcagtaaaagaacgtattgttgtattcctccagtgttaagctatagccatgttaaaagtcactgtgcatttattctcagcatcaaataccttgtaacgtcttctctgccttgttagtgcatatttttacttttctgatactgtaaagaatatatccagtatgtaaatgaatgttctataaatcttttgtatagtcattttctctgctccttaaatatcatctctattcagagtataataaaattatgaacttggt

SEQ ID NO: 260803 - DNA, 397 bp, Homo Sapiens
  misc_feature (18)..(18): n is a, c, g, or t
agggaacgtttcccaggncattttggtctcccagggctcccggctgggaacaggcacgtactgcccccggggagtaaatgcggagagttccacgaactgtgccccaacgcatgttatagcccgggtcctactaactactcagtaaaagaacgtattgttgtaatcctccagtgttaagctatagccatgttaaaagtcactgtgcatttattctcagcatcaaataccttgtaacgtcttctctgccttgttagtgcatatttttacttttctgatactgtaaagaatatatccagtatgtaaatgaatgttctataaatcttttgtatagtcattttctctgctccttaaatatcatctctattcagagtataataaaattatgaacttggtaaaa

SEQ ID NO: 260804 - DNA, 655 bp, Homo Sapiens
  misc_feature (68)..(101): n is a, c, g, or t
  misc_feature (400)..(400): n is a, c, g, or t
  misc_feature (628)..(628): n is a, c, g, or t
cttggtagagacagggtctccctctgttgcccaggatggtttggaactcctgggctcaagcaatcctnnnnnnnnnnnnnnnnnnnnnnnnnnnnnnnnnngcatgagccactatgcccaacctgagcaggatgacttaaacctgatcaattctactccaaaacagcaactatcattaagtcaggggtgtcaaggaggactctgtgaaggcaaagactagactgggatgtgtgcgagagtgggataagaaggcccatccctagcagactgcaggagtgactctggcatagaattcatggccagccctaactagtgtgatgggtggccagggaaggaggcatctgcctcagtgttccaaaacaaaacccttaacaagttctggggctggacctctgtgtcnactcctgaatccccaatgtatccgttacctttacaagaaactggtgtggttcttgtctgctaagggcaagacctgttttctgaatttactttctgataataaagtaacaccatggaaaagaagaacctcagaaaaatatggggtcaccacatgggctttcccagtgctagctgcctgttttggaaagctgcaatgtaggctacagagggcagtctgaaaagagtcctntcctctttcgcttcctggagcttaaga

SEQ ID NO: 260805 - DNA, 887 bp, Homo Sapiens
  misc_feature (784)..(784): n is a, c, g, or t
  misc_feature (805)..(805): n is a, c, g, or t
  misc_feature (822)..(822): n is a, c, g, or t
  misc_feature (838)..(838): n is a, c, g, or t
  misc_feature (843)..(843): n is a, c, g, or t
  misc_feature (849)..(849): n is a, c, g, or t
  misc_feature (874)..(874): n is a, c, g, or t
attggcttcataacatttgacagtacaatccatttctacggtcttcaggaaagtctctctcaacctcagatgctaatagtttcagatattgaagatgtttttatacctatgccagagaacttattagtaaacttaaatgaaagtaaagagctcgtgcaagatttactgaaaactttgccacaaatgtttaccaagactctggagacccagagtgccttgggtcctgcactgcaggctgcctttaagctgatgtctccaactggtggtcgaatgtctgtctttcaaacacaactcccaactcttggagtgggagccctgaaaccacgagaggaaccaaaccacaggtcatctgctaaggatatacacatgacaccatccactgacttctataagaaattagccttggactgttctggtcagcaagttgctgttgacttattccttctcagtggacagtattctgatttggcttctctgggttgtatttctcggtattcagcaggtagtgtctattactatccctcttaccatcatcagcacaactaagtccaagtacagaaattacagaaggaactacagagataccttactcggaagattggctttgaggcagtcatgaggattcggtgcaccaaaggtctttccattcatactttccatgggaaacttctttgttagggtcaaccgacttactgtctttgcctaacgtcaacccagacggtggggtatggcagtacaggtgttcagtggggaggagagttcttaactggacactcagttgggnttcctttttcagttcaggcantcttgtattaccatccngccaaaggccgaaagnagganttccgngtttccaaacttgtggttttgcccngtagggtttccga

SEQ ID NO: 260806 - DNA, 810 bp, Homo Sapiens
tctgatgaagctaatttagaagccaaaatcgaaaagagaaaattagaactggaaagaaatcggaagcgactagagactctgcagagtgtcaggccatgttttatggatgagtatgagaagactgaggaagaattacaaaagcagtatgacacttatctggagaaatttcaaaatctgacttatctggaacaacagcttgaagaccatcataggatggagcaagaaaggtttgaggaagctaaaaacactctctgcctgatacagaacaagctcaaggaggaagagaagcgcctgctcaagagtggaagtaacgatgactcggacatagacatccaggaggacgatgaatccgacagtgagttggaagaaaggcggctgcccaagccacagacagccatggagatgctcatgcaaggaagacctggcaaacgcattgtgggcacgatgcaaggtggagactccgatgacaatgaggactcggaggagagtgaaattgacatggaagatgatgatgacgaggatgacgatttggaagacgagagcatttctctctcaccaaccaagcccaatcgaagggtccggaaatctgaacccctggatgagagtgacaatgacttctgacccttttgccaagggaccctggcagattaaaaccctcagacttgtaggtaaatgggaacttagaaggttaggaaggtaacccctgttttgtttactaagctggctggactcatgatcactgaagcaatacttatttctgctttagcctcctatgtttgcattccatgaagcttaaataagaattgaagc

SEQ ID NO: 260807 - DNA, 650 bp, Homo Sapiens
  misc_feature (569)..(569): n is a, c, g, or t
  misc_feature (573)..(573): n is a, c, g, or t
ggggtagaatgttgttggtactgcagtgagaggcatgcttccttagaccaggcaacatttcatttgttgcatttccagtttccaataccaactcacctacaaagattttaccaaaaaccttaggaccaataaatgtgaatgttggaccccaaatgattataagcacaccacagagactaaccagttcaggaagtgttctgattgggagtccatatacccctgcaccagcaatggttactcagacacacatagcagaagctactggctgggtccctggtgatagaaaacgggctagaaaatttatagactctgatttttcagaaagtaaacgaagcaaaaaaggagataaaaatgggaaaggcttgagacacttttcaatgaaagtgtgtgagaaagttcaacgaaaaggtacaacatcgtacaatgaagtcgctgatgagctggtgtcagagttcaccaattcaaataaccatttggctgctgattcggcttatgatcagaagaacattaggcgaagagtttatgatgctttaaatgtgctaatggcaatgaacataatttcaaagganaaanaagaaatcaagtggattggcctgcctaccaattctgctcaggaatgtcagaatctggagatagagaagcagaggcgg

SEQ ID NO: 260808 - DNA, 1563 bp, Homo Sapiens
  misc_feature (1025)..(1040): n is a, c, g, or t
  misc_feature (1089)..(1089): n is a, c, g, or t
  misc_feature (1113)..(1113): n is a, c, g, or t
  misc_feature (1268)..(1277): n is a, c, g, or t
  misc_feature (1380)..(1380): n is a, c, g, or t
gtgctttctgccgtacatcccttcccatgaggatgagatgacccatctgttgcatcccggctgctgataaaacaagaccctcggagccaagaaacaacactgagttccagatttcggaaggttcacgagtgttgccgacacgccctcccaactgcagacatcctccctggaggacctgctgtgctcacatgcccccctgtccagcgaggacgacacctccccgggctgtgcagccccctcccaggcacccttcaaggccttcctcagtcccccagagccacatagccaccgaggcaccgacaggaagctgtccccgctcctgagccccttgcaagactcactggtggacaagaccctgctggagcccagggagatggtccggcctaagaaggtgtgtttctcggagagcagcctgcccaccggggacaggaccaggaggagctactacctcaatgagatccagagcttcgcgggcgccgagaaggacgcgcgcgtggtgggcgagatcgccttccagctggaccgccgcatcctggcctacgtgttcccgggcgtgacgcggctctacggcttcacggtggccaacatccccgagaagatcgagcagacctccaccaagtctctggacggctccgtggacgagaggaagctgcgcgagctgacgcaccgctacctggccctgagcgcgcgcctggagaacttgggctacagcccgcgacgtggccccggggggttaagtgaagttcccccttacaacacctaacggaaatccttgaagagcagcggggccccgaatctgggggcggccaaacccccccctggcaaaagggaataccccggcgccgggatcctggcgccacagccctggggttcaaatcggagcggcggggctgggccgcaccccacacaagatgtagcccccggcgggggaggacaccctagaccacgggctcgggactcagccccaccacaaccctggcgccgcaagtgatgggcgacgaaaagacctctctctcctccgcccnnnnnnnnnnnnnnnnacgatgagccgtatcaagggaatcccccctccccactcgtctgtcgcancacacgatgggggtgacggggganatgcatgtagatgcaccccgacgcggcgacgccccacgcaaatgcccaggcgacgctatgtgagcccccgcggcgcgcgctggacaacaacacgcgtcgcgctattttcgggtgaatattcgcgccgcccacccgggggagcgcgccccatctannnnnnnnnnccccccccttcccgtgagcttcggcggctcccctaacccaacgcggggacgagggtggggacacaatggggggagcgacccagacgagtacccccacctatangccggcggcgggccgaaggagcgtaaaacagagactagcgaggcaggagcccggtgatatgtccactccccgcgcgaggattgttgtgaaactcccactcgtatcggggcatgctggtttcgcccgcacgatgttgtccccttttagcggctgtggctcgcgtgagacgcgccgccgtccccg

SEQ ID NO: 260809 - DNA, 780 bp, Homo Sapiens
  misc_feature (306)..(315): n is a, c, g, or t
  misc_feature (705)..(721): n is a, c, g, or t
ttgagtgtcgcaaatttattcaaccaaccaaacaatataaaaatcaaaatggcacagcatatattgtaaataaatcaaaactgtatgtgtaacagaaagacaaagcagtggcatattaaaccaaagctagctggatacaaaacaatgaatgtctattgcatagtaaataaactgacaacggtttccaagtgagacaagatggtgggggaggtcaccaagaaggtaatgactcagcttcctgctgacctctgactgtgatgctgggaaggtgtggaagaggggacgagttgataagctgggcggttnnnnnnnnnntccactgtcacttgagatttgccacgtctggtactggagcagttaatgattattcactcaagtgtttagatgtaggctttgcacacaaattgcttcaactacataactaactgtttcaacttcttgagaaattagaagcttaagctgaaatgtggttgagtatttatatgcactatgatgctagtttttcacattcttttaaagttaaggggtgggggaggcagaggttattgaaacagtaaaaggatacactacaccagttatctggtatgatataaagacatgtgattaaatttgggtgatttaaaacattgttttctagaatgaaaatcacaaagattcacttttgtgaaaacatttgctaggtatcctattatattcaattaattnnnnnnnnnnnnnnnnntcaaatgaatgcatcccccttctccaaataaaacaaagctctaattttgtctgtaaact

SEQ ID NO: 260810 - DNA, 483 bp, Homo Sapiens
  misc_feature (110)..(118): n is a, c, g, or t
accgagtgatttccatctctggtaaagttacacttttatttcctgtatgttgtacaatcaaaacacactactacctcttaagtcccagtatacctcatttttcatactgnnnnnnnnngcttgtggccaatggaacagtaagaacatcataaaatttttatatatatagtttatttttgtgggagataaattttataggactgttctttgctgttgttggtcgcagctaaataagactggacatttaacttttctaccatttctgcaagttaggtatgtttgcaggagaaaagtatcaagacgtttaactgcagttgactttctccctgttcctttgagtgtcttctaactttattctttgttctttatgtagaattgctgtctatgattgtactttgaatcgcttgcttgttgaaaatatttcttctagtgtattatcactgtctgttctgcacaataaacataacagcctctgtgatcccc

SEQ ID NO: 260811 - DNA, 652 bp, Homo Sapiens
tgaggtcagttaacagcagtagtcatcatcaaaggaacccctaaatgacactgctggtattttctgcctgcaaaacaggcttgaaggaatagcatttggctctttagaagtcataaccaaatggtaacagatcactgggactccttggtttctcaaagaggcaagctccttccaccctgcccggctggtgaccttaagcccgacatgcagagaagtccacgctgagaaataatttactcactgggattgttccaccctggccccttctctaaaaagactgacaattgccctgaattatggatgtactttttgtgatatgtattacagttcagaagaaaggtgttgagaccatcgtaccgtttcacctcccattagaggctggtcttgaacaataatcccagaagatgaaactgatgctgaactatgaccctcaatttacaaatcatttttcaaaagaataaaaaaaagtttaaacatatttttggcattatctgaatgggaggaatctttcatgcttgttttctaagaataagtgaaaacagcatgcagtgcactttcttagtttggggaaagagagaacatgaggttttcagattatattttattttaatcctgggcgtttgaattttatttttacatagctgcatttagt

SEQ ID NO: 260812 - DNA, 690 bp, Homo Sapiens
ggcgcgccgaaattcaaaggaataaatagttccggcgcgggtgttgagagcggtgtggcaggtgttgtagccgctatggtgaagttcgctttgtagcggccccggctagagagttgttctgttccctgcctttgtgacccggaggagcttttggggtggttattggtggtagaaataaatatttaatcaatggagtcaatgccaacaacaccagagtacaggatctcttctgttctgttggccttaatgttaacaaccctcactttctcatcatgcagggccgaattacaaaagtattgaatatgaaacctccagagattttatccatgatagaagaagcagctggaaccaggatgtatgaatacaaaagaatagctgcacagaaaactatagaaaaaaaggaggctaagctgaaagaaattaagacgatacttgaagaagagattactccaaccattcaaaaattaaaagaggaaagatcgtcctacttggagtaccaaaaagtaatgagagaaatagaacatttgagtcgtttatatattgcttatcagtttttgctggctgaagataccaaagtacgctcagctgaggaattaaaagaaatgcaagataaagttataaagcttcaggaagaattgtctgacaatgataaaaaaataaaagcacttaatcatgaaatagaagaattgg

SEQ ID NO: 260813 - DNA, 709 bp, Homo Sapiens
  misc_feature (39)..(39): n is a, c, g, or t
  misc_feature (73)..(73): n is a, c, g, or t
  misc_feature (113)..(113): n is a, c, g, or t
  misc_feature (133)..(133): n is a, c, g, or t
  misc_feature (152)..(152): n is a, c, g, or t
  misc_feature (210)..(210): n is a, c, g, or t
  misc_feature (229)..(229): n is a, c, g, or t
ccaataaatagttccggcgccggtgttgagagcggtgtncgtaggtgttgtagccgccctggtgaagttcgcnttgccgcggccccggctagagacctggcctgttccctgcntccgtgacccggagagcttncggggtgcgtcaagccccncgcctgaggcaggcggtgacccgtaactggtttgtggcctgtttgattcctgtcagangtttgctgacccaagacantatcgaaaatgcatattaagtcaattattctagagggattcaagtcctatgctcagaggaccgaagtcaatggttttgaccccctcttcaatgctatcactggcttaaatggtagtgggaaatccaacatattggactccatctgctttttgctgggcatctccaacctgtctcaggtggttattggtggtagaaataaatatttaatcaatggagtcaatgccaacaacaccagagtacaggatctcttctgttctgttggccttaatgttaacaaccctcactttctcatcatgcagggccgaattacaaaagtattgaatatgaaacctccagagattttatccatgatagaagaagcagctggaaccaggatgtatgaatacaaaaaaatagctgcacagaaaactatagaaaaaaaggaggctaagctgaaagaaattaagacgatacttgaagaagagattactccaaccattc

SEQ ID NO: 260814 - DNA, 479 bp, Homo Sapiens
ttgaatggttggagtaatctcttcttcaagtatcgtcttaatttctttcagcttagcctcctttttttctatagttttctgtgcagctatttttttgtattcatacatcctggttccagctgcttcttctatcatggataaaatctctggaggtttcatattcaatacttttgtaattcggccctgcatgatgagaaagtgagggttgttaacattaaggccaacagaacagaagagatcctgtactctggtgttgttggcattgactccattgattaaatatttatttctaccaccaataaccacctgccttgttactgtgatttcatcatgaacctcaaatcctaaagggactttgctttttggtcagaattatcaaaagtgattgacacagaggctttggtaatatcagcctgcccatttttgtaaactaaatcttgtagattagacgcccgaacctgagacaggttggagatgcc

SEQ ID NO: 260815 - DNA, 1106 bp, Homo Sapiens
tatctcctccgggccgccgccacccccgggacgaggcctgggtggcgaattcggcacgagggcagaccaggcaagccatcatgaagctgaatggccaccagttggagaaccatgccctgaaggtctcctacatccccgatgagcagatagcacagggacctgagaatgggcgccgagggggctttggctctcggggtcagccccgccagggctcacctgtggcagcgggggccccagccaagcagcagcaagtggacatcccccttcggctcctggtgcccacccagtatgtgggtgccattattggcaaggagggggccaccatccgcaacatcacaaaacagacccagtccaagatagacgtgcataggaaggagaacgcaggtgcagctgaaaaagccatcagtgtgcactccacccctgagggctgctcctccgcttgtaagatgatcttggagattatgcataaagaggctaaggacaccaaaacggctgacgaggttcccctgaagatcctggcccataataactttgtagggcgtctcattggcaaggaaggacggaacctgaagaaggtagagcaagataccgagacaaaaatcaccatctcctcgttgcaagaccttaccctttacaaccctgagaggaccatcactgtgaagggggccatcgagaattgttgcagggccgagcaggaaataatgaagaaagttcgggaggcctatgagaatgatgtggctgccatgagcctgcagtctcacctgatccctggcctgaacctggctgctgtaggtcttttcccagcttcatccagcgcagtcccgccgcctcccagcagcgttaactggggctgctcccctatagctcctttatgcaggctcccgagcaggagatggtgcaggtgtttatcccccgcccaggcagtgggcgccatcatcggcaagaaggggcagcacatcaaacagctctccccggttgccagcgcctccatcaagattgcaccacccgaaacacctgactccaaaagttcgtatgggttatcatcccttggaccggcagaagcccaatttcaagggcttcagggaaagaaaaccatgggcaaaaca

SEQ ID NO: 260816 - DNA, 1421 bp, Homo Sapiens
  misc_feature (1150)..(1150): n is a, c, g, or t
ggagcgaggcctgggtggcgaattcggcacgagggttcttggtcaatccggctacgccttcgtggactgcccggacgagcactgggcgatgaaggccatcgaaactttctccgggaaagtagaattacaaggaaaacgcttagagattgaacattcggtgcccaaaaaacaaaggagccggaaaattcaaatccgaaatattccaccccagctccgatgggaagtactggacagcctgctggctcagtatggtacagtagagaactgtgagcaagtgaacaccgagagtgagacggcagtggtgaatgtcacctattccaaccgggagcagaccaggcaagccatcatgaagctgaatggccaccagttggagaaccatgccctgaaggtctcctacatccccgatgagcagatagcacagggacctgagaatgggcgccgagggggctttggctctcggggtcagccccgccagggctcacctgtggcagcgggggccccagccaagcagcagcaagtggacatcccccttcggctcctggtgcccacccagtatgtgggtgccattattggcaaggagggggccaccatccgcaacatcacaaaacagacccagtccaagatagacgtgcataggaaggagaacgcaggtgcagctgaaaaagccatcagtgtgcactccacccctgagggctgctcctccgcttgtaagatgatcttggagattatgcataaagaggctaaggacaccaaaaccggctgacgaagttcccctgaagatcctggcccataataacttttgtagggcgtctcattggcaaggaaagacggaaacctgaagaaggtagagccagataaccgagacaaaaatcaccatctcctcgttgcaagaaccttaccctttacaaccctggagaggaacatccactgtgaaagggggccaatcgaaaattgttgcaaggccgagcaggaaataatgaagaaagttcgggaggcctatgagaatgatgtggctgccatgagcctgcagtctcacctgatccctggcctgaacctggctgctgtaggtcttttcccagcttcatccagcgcagtcccgccgcctcccagcagcgttactggggctgctccctatagctcctttatgcangctcccgagcaggagatggtgcaggtgtttatccccgcccaggcagtgggcgccatcatcggcaagaaggggcagcacatcaaacagctctcccggtttgcccaggccttcctcaagattgcacacccgaaacacccggactccaaagttcgaatggttatccatacctggaacgcccaaaggcccaattccaggctcaggggaaaatctatgggcaattcagggaggaaaactcctttggccccagggaggaatgaaccctgggaaaccc

SEQ ID NO: 260817 - DNA, 965 bp, Homo Sapiens
  misc_feature (948)..(948): n is a, c, g, or t
aatccaccgctgagctgggagaaagatggcggcagccgtgcgacaggatttggcccagctcatgaattcgagcggctctcataaagatctggctggcaagtatcgtcagatcctggaaaaagccattcagttatctggagcagaacaactagaagctttgaaagcttttgtggaagcaatggtaaatgagaatgtcagtctcgtgatctcgcggcagttgctgactgatttttgcacacatcttcctaacttgcctgatagcacagccaaagaaatctatcacttcaccttggaaaagatccagcctagagtcatttcatttgaggagcaggttgcttccataagacagcatcttgcatctatatatgagaaagaagaagattggagaaatgcagcccaagtgttggtgggaattcctttggaaacaggacaaaaacagtacaatgtagattataaactggagacttacttgaagattgctaggctatatctggaggatgatgatccagtccaggcagaggcttacataaatcgagcatcgttgcttcagaatgaatcaaccaatgaacaattacagatacattataaggtatgctatgcacgtgttcttgattatagaagaaaattcattgaagctgcacaaaggtacaatgagctctcttacaagacaatagtccacgaaagtgaaagactagaggccttaaaacatgctttgcactgtacgatcttagcatcagcagggcagcagcgttctcggatgctagctactcctttttaaggatgaaaggtgccagcaacttgctgcctatgggatcctagagaaaatgtatctagataggatcatcagagggaaatcaactttcaaggaatttgctgccatgctggatgccttcaccaaaaagcaactacagctgatgggttccagcatcttgggacaggagctgtttnttggaacacattttgtt

SEQ ID NO: 260818 - DNA, 953 bp, Homo Sapiens
tttacaatgttaaaacaaataggtccacaaccatactacctactgtgtctcactgagtcagcatagagttaaagctcaacaccttaaggaaatggtagcagagacatttgctaatatctaagaagttacatatatagtttttaattaaaggatgtataataaaacaaatagcttagtggcaagaaattggtgctaataaacaaaaggtttttcaaaagaaattgtaacatctttggaaaactgtctggttctaagttcccacttcctttagttcccacggagttcatgcagatacatttcttaagacaatcttaaagtacactgtggatggaaatggaatgtacatccagaactagaggtgaaaactaagacctgggtgctgatagaaaaatcttcctgatttcagtcgtcacacatttgtgtcctggagtaaaggttctttggcctctcctggcgcttgtgtattatgaggatggctgtgactgccacagtgctttctccaactgctggaccttaagcttaaattggtatgttccggaataaacaaggcaacaagcagagccagcagtactgaacaggctccaaataggaagggagggccagggatgatggaattctgttcaaagtggtgctgagggcttgtgtttgttcccaagtctgttcctgttattggcagttctttaagttccacatggaatatgtagaaaatgaatccatagagggccggtcccagaccattgcataatcctcgaattcctgttatcattccttgaacgacaccctgttgatcagcatcagcagttcgtgaaacaagtgcactgacagcaggaaaggtgatgctagacatggctgctactgccccagcagcccacatcatccaaggttctgaaccaaagccataccatgccaactgtaatatttgaaatcctagacccagtaaaatggtggagcgg

SEQ ID NO: 260819 - DNA, 341 bp, Homo Sapiens
gggtgctgttttctgcacagcctccttgagaccttccagaaccttcttttttcctacttcatatcacttaaccagtagctatctgggatggttccagaggctgaagtttgcagttgaataacattttaaatagtgttaagcgacttgggatctctggccctttgcgtttcagtatttgtcctttttatgcctgatgtttaacctgccacatgtttgtactgcaacatgaatcttggaaattttaatgttatgcatttcaaatgtttttggttatctgtaaactaaatgtgcccttattggctcacttgtcaataaagatgtttgtatatgtattgcccacc

SEQ ID NO: 260820 - DNA, 374 bp, Homo Sapiens
  misc_feature (176)..(184): n is a, c, g, or t
ctttcccattcacttctctagaaagctgccaagacagaggcagaaagaaatggatgatagttctgtcaagcacacttctgttctcttagaacttagaagtgtttctaagagaacagaagtaataagagaaacagttacgtgtggaattcaacatctttggttggaacgcattggcnnnnnnnnncttgttttgatagaaatggaattaagcaaaagtagtttttgtcttttctgttgtcttcaaataaaaagccttttatttttaatttaatcccgttcaattatttaattgttatacattgacattaactgctgtattttgactttgttcaataattttgttctttcagggctagaaataaactttttaaaaa

SEQ ID NO: 260821 - DNA, 502 bp, Homo Sapiens
gtgtgagccaccgtgcccagccaaagactgctattaaagcacctttttgacagtgaacatggtctaaaaaagggaagatattgtagaagatttcacacacacacgcgtgtgtgggagacaactaaaggtattgaaggtactaattaattagatttccaaaattttctacagagagttaattatcaccaaaatgtgaatggtacatacaaaacctggcattttcttgtgataagtttacatttttaggagagtggagctttcaatctgcccttttctcctttgtttttgtagttttcaccaaagatgatcaactagaaatgttaagtggctatgcaagcaaaagcatagataggttaaaaaaaaggatcagctggctgggcagggtggctcatgtctataatctcagcattctaggacagtgatgtgggaggattatttgaggcaaggagttccagttcgaaaccagcttcgtaaacatagcaagacccagtctctaccaaaa

SEQ ID NO: 260822 - DNA, 927 bp, Homo Sapiens
  misc_feature (15)..(15): n is a, c, g, or t
  misc_feature (33)..(33): n is a, c, g, or t
  misc_feature (746)..(755): n is a, c, g, or t
agacgccggcggggncgggcggcggccccgganggattgctgctgagccccggcactgcctggctgcgagcacatgatggcgatacgggagctcaaagtgtgccttctcggggacactggggttgggaaatcaagcatcgtgtgtcgatttgtccaggatcactttgaccacaacatcagccctactattggggcatcttttatgaccaaaactgtgccttgtggaaatgaacttcacaagttcctcatctgggacactgctggtcaggaacggtttcattcattggctcccatgtactatcgaggctcagctgcagctgttatcgtgtatgatattaccaagcaggattcattttataccttgaagaaatgggtcaaggagctgaaagaacatggtccagaaaacattgtaatggccatcgctggaaacaagtgcgacctctcagatattagggaggttcccctgaaggatgctaaggaatacgctgaatccataggtgccatcgtggttgagacaagtgcaaaaaatgctattaatatcgaagagctctttcaaggaatcagccgccagatcccacccttggacccccatgaaaatggaaacaatgaaacaatcaaagttgagaagccaaccatgcaagccagccgccggtgctgttgacccaagggccgtggtccacggtacttgaagaagccagagcccacatcctgtgcactgctgaagaaccccacccccggggggttgnnnnnnnnnntcatttggagaagagtgagcacactggctttgcatcctggaagacctgcagggggcggggcaggaaatgtacctgaaaaggattttagaaaaccctgggaaaacccaccacaccaccacaaaatggcctttagtgtatgaaatgcacatggaggggatgtagttgcattttt

SEQ ID NO: 260823 - DNA, 1058 bp, Homo Sapiens
  misc_feature (54)..(54): n is a, c, g, or t
  misc_feature (58)..(66): n is a, c, g, or t
gaagcggccgcataacttcgtatagcatacattatacggaagtgaaaaattttntggnnnnnnnnntatgcccgggaattcggccattacggccgagggcacgtgcatgccccctggttaagagttgcaggtagcggtagcgatggacactctggatcgagtagtaaagcccaaaacgaaaagagccaagagattccttgagaagagagaaccgaaactcaatgaaaatattaaaaatgccatgctgattaaagggggaaatgcaaatgcaacagtgacaaaagtacttaaagatgtgtatgcactgaaaaaaccatacggtgtactatataaaaagaaaaatattacaagaccttttgaggatcagacatcactggaattcttttcaaagaagtcagattgttctttattcatgtttggctcccataataagaagcggccaaataatctagtaataggtcgtatgtatgactaccatgtgctggatatgattgaattaggtattgagaattttgtctctctaaaagacattaagaacagtaaatgtcctgagggaacaaaacccatgctgatatttgctggcgatgatttcgatgtaacagaagattatagaagactaaaaagtcttcttattgatttcttcagaggccccaccagtatcaaatatccgcctggctggattagagtatgttctgcacttcactgcactgaatgggaagatttactttcgaagctataagttgctgttgaagaaatctggttgcagaacaccacggattgaattggaagagatgggaccctcattggatctggttctgaggaagacacacctggcatcggatgacctttataattatctatgaaaatgccaaaagctctcaagccaaagaaaaagaaaaatatttcccatgatacttttggtacaacttatggaaggattcatatgcagaaagcaagacctaagcaaactacaaaccaggaaaaatgtaaggggttgaagaagcgacctgcagaaaggataacagaaggaccacgaggaaaaaagtcaaaaagaattt

SEQ ID NO: 260824 - DNA, 720 bp, Homo Sapiens
  misc_feature (30)..(30): n is a, c, g, or t
  misc_feature (46)..(46): n is a, c, g, or t
  misc_feature (70)..(70): n is a, c, g, or t
  misc_feature (79)..(79): n is a, c, g, or t
  misc_feature (289)..(301): n is a, c, g, or t
ccaaactataacttaaccatcatcaactcngcttcagccccggggncagccaacagccacctcagccacngcaacccanattctccagaaggctctgctatagggccccgggtgttcctcttggtggcagatacctgctaaatgcccactggacaatgttatggggattcattactatcttaagatgtgtttatcctcagcttataggaatctctccaggtcaacaggttcaaatattcaagaaggtagaactctcctccaatttacactgactttttagaggttcttnnnnnnnnnnnnntgcagaggaatgaaacgtacttacaacatttaattcctttcataatatgaaagaattgatacaaggctatttgtctcgtaaacctggtctgcagaaagtcaaacttacaaaaactgttgtgacaaatgttatgtacatatattgatatgtaactgcattagtggccattttgaatcacagtggtgatcgtgtgaatatatttaacactgtgttaaattaatttacgttgctattttattttaatcataaacaactaccatgtttcttaatgttttgtgtaaatttaaggtaattatactatccttttaaacttcaagaaaacaaagttgttagcgtatttacatgaaggcgcattatgttgtcgtgtgtttcagtttcacattaaactgaaccttttactaattgtgagctaaagagag

SEQ ID NO: 260825 - DNA, 506 bp, Homo Sapiens
gttagccacagtaccaggatccttggctacaagagctgggcttgcttttgcttgttctgcagcctgagagccaatagctgggaacgtaactccttgttccttaaggttcttaatcattgctgatattagactaagctgtggatcattcttaaattcatctgtccattcaaccataagagcctttaatttttcacatactttaggatgacccttatttaatacgttgcttacttcactagcaaaatctcttgaacatacttctaaatgaaaaattttgccacagtttgatacacatgctcctagaagagtcaaagcctgcatagcaacgtgaggatctttgtggttcactcttctcataatagaccgaagacaatccttaggtccagtgcgagactgaccaactttatcacagatatccaaaattgaggccccagtcctcagcaggtaatcatctcgctggttgctttctcaacatcctgatcgaagggattggtggcaaaaagagg

SEQ ID NO: 260826 - DNA, 550 bp, Homo Sapiens
ggacttctactcttcataaatgtgcccaagtaaatatgtgtttttaatattcaaccctggaaaattagtaattcagatgataaaagctcatgttttggtgtctttgtactcagattgtgaacaggcatatttcactgatttagacttagtatacttgatgagaatgctcaggttgaagagatagttctgtcagcaatccaacatctatagcaatgtggaaaaagtaatcaactcatatttcacgaatttgatgtatgttgtgatttagagggcatgagataaagtttatatttgaactgtgtggggtagggggaagaagaggttgcttaagcaaatagtggggtgattgtggaacaagatgtctctaagatgagaagttattttcttgcatcatagaagcactctttttacccgtgagtgattgtgttaactataaatcatttatatctgtacattaaagcagattccctcaattaggcaaatttggttagccaagcccaagttattgtttgtacttgaaagtaataaagctgcatttccttaaaaatat

SEQ ID NO: 260827 - DNA, 971 bp, Homo Sapiens
  misc_feature (357)..(377): n is a, c, g, or t
cagtgtacgcccttcactcagaacacgagcttgtgttcctctgaccctaaaaagcggagatgagcagtgtgtgccttgcctaagctactgaactataaacctagatgactttactaggcgcagtcatagtttctaattattttaacttgtatatgcatataaacacgaaaatatttatgcctatgttatagtagtattaatagctgttatatcatttccacaaaattacacgtggttataactgtagggaaggttttaaaaccctaaggcagttttttaaaaaataccattgtttttaatatttattatggacatctttctgaaaaaccttaagtctagctatgtatattaacattnnnnnnnnnnnnnnnnnnnnntacattatattgtagcaaaatagctccattttaaagccatataagtgaaaaaattgagttttcaataatagactagaccttctaaaggtatttttaacaattttgaactaatattaaatgtattttcttttttgactatgccaagtatattcacactgctcttggtactttatgtcagaagtatttttatgtgaaacactaggttgtttcatttgtctgtttttacttgctctataatgaaaagtttactctaaatctaaataagtttgctcccaaatatctccccaaggagaagggggacagcataaccaaaaacacaacaaaaacctaatgatatataggatatccagtgcatgcgacttcatattttctaatagtgggtaggaaaggtaactttcaaggtattcccggtaatccaactggacttacagagtaggcgatctcataaaatgaacattctagaggaagaaagtcctttgagaaacttgttctttccagaaaacctttgccaaaattcccataggaaacaaaaccatccattcacaaaagaccagagggtacttggtccccagtactgacctgaaagtgcacgca

SEQ ID NO: 260828 - DNA, 572 bp, Homo Sapiens
  misc_feature (69)..(77): n is a, c, g, or t
acttacatatttttgagtattttttaaagttttaatagtttatctctgatcaaggatggagaaaggacnnnnnnnnntactgtcctgaattgattctcacagggcctgctccctcacagaacacagtgtcattatatatgccttatttatatataaaacaaccaaagaattttcattcttcttagtaagtatttaaaatacattctaggcgtgcattaggagtaaatgttaatttgtgatgaccttaaaagactttcaacctgtaagaaacaatttctgggaagataaaaatattgaattttacatattgcagagtcttgagaaacttaaagtgcagtattttcatgtatcagcgaaataataattgtgtcatataagctcatcttgaaagaggatgtaaatacttccaaatttttatgaatgctacattacagagggcagagtgtagctattttaaggtttgattgtccagatttttttattagactgcaaggaggaaaaataagcaccaaagtaaaatatgctttattagggggaaaaacagtgttttcatgaaaagaaaatagaaaaca

SEQ ID NO: 260829 - DNA, 1303 bp, Homo Sapiens
  misc_feature (114)..(114): n is a, c, g, or t
  misc_feature (317)..(328): n is a, c, g, or t
aaagggttatatatatgtcttttagatcagtgtaacatgactgtgatcatcttacaaacaaaactcaaaaaatcaattcagagagcagcgtggccttggagaccacccacaccncaacacaattgtacgtactgggctttgctgtcaaggagtgagcaaatgagttcgttatcaaaggtcatatgttttcacagtcattcaaattatatcccaaaaacttttcttgtattctctatcttttgacttttttttcaaagaactgattgcacagtatacagaaatcctgttatactttactacttaaggtggagtctaannnnnnnnnnnnaatttatcagtgcttaaaaatcttcaaaatagcttagtgaggctcatgacagtgctggccccatggaaatgtagccttttgttgcgtttaaacactgtcacaccatctatgactgtcccattggtctgaagtgtagtggcaaactaagcatcctataagacaagctaaagcttgctttttgccagtcagttgaaagtcttgcatctcttcactgatgcactttctttaggtattgatagtcagaagcacaaagcatttattatgcattcaatcatgtagctaaacaaaaaactgaagtctcctgaagccatttaaaccagccgttccaaaatctcctgcgaccactttgttagtaccgtcaaaaactttcccaactataaatgaaagaataaatggtagtgctgctctccagatactaggcactgctccgtatttttgaacatttgatttaactaataactgtgtcaaaagcctcaaaaaaccctgaaattaattttccagctttactgtcaccagccagaagtaaaaatcttaatttgcctgttagctgattgctgttaaattttaaatttattttttaaaaaacggttggacttctatcattataaagtatataaaattttcaaaaaaaaggaacaattttgcttttcattgtattactgaatacctgaggtagttgagtaaaaatgcacgtttaatacccctgccaacaccattcagcacttcccttaggttactcatgttagtgttaggtaaaaataaaactgagaacagtttttctatgctaatggcttaacatttaagttcctgtgataattattctgatccaattttaacaattggatttaggagcaatctatttgatgaatttagtgaaagcatcattaagccaatttctggcattatgggggaatattaagaagaattagaatatctgttatactgtgagactacaacaaagggaagtgcagagct

SEQ ID NO: 260830 - DNA, 1351 bp, Homo Sapiens
  misc_feature (484)..(571): n is a, c, g, or t
  misc_feature (920)..(920): n is a, c, g, or t
gcgaggctgggtggcgaattcggcacgaggctcctactccgagacgcccctggaagactgcgtcccccagaaggttgtcagatgttacatcctgtccactgcagacaacgtattgactttgtcgctgcgatcatccagaacaaacccggagacgaaaagcaaagtagaagatccagagattaactccatccaggacattaaggaagggcagcttctgaggggctatgtagggtccatccagccacacggtgtgttctttcgccttggcccctccgttgtgggtttggctcggtactcccatgtctcccagcacagcccgtccaagaaagccctttataacaaacacctccctgaagggaagctgctcacagccagggtcctacgccttaaccaccagaagaacctggtagagctgtctttcctccccggagacactgggaagccagacgtgctttctgcttccttggaagggcaacttacaaannnnnnnnnnnnnnnnnnnnnnnnnnnnnnnnnnnnnnnnnnnnnnnnnnnnnnnnnnnnnnnnnnnnnnnnnnnnnnnnnnnnnnnngggcaggaggaggtggagatgcccagcaaggagaagcaacagccccagaagccacaggcgcagaagctggggcgggcgggagtgccgggagtctgggagtgagcaggataagagtgagcaagaagccaaagaaagccggcctgtcagaggaggacgacagccttgtggacgtgtactatcgggagggaaaagaggaggcagaagagacgaatgtgctgcccaaggagaagcaaaccaagccagcagaagcgccccgggctgcagctgtcttcaggcttcgccttggaatgtggggactagactctctgaacccggccttgccacctctagcagagagctcaaacagcgnaggaggatgagaaacccacaccaagccacgcatacaagaaaagcaagaaagaaagggagttggagaagcagacaggcagagaaggaactgtcccgcattgaggaggcgctgatggatcctgggcggcagccagagtccgcggatgattttgaccgactggtgctgagctcccccaacagctccattctgtggctgcagtacattggttttccaaccttgcaggccacgggagatcgagaaaggccgtgccgtggctgagaggggcccttaagaccatttccttcagagaggagcaggaagaggctgaaccgtgtgggtgggctcttgctaaacctggagaaaattgttccggtctagagggagtccatgacaacggtctatgagccgatgccgttaaggaacaagaagcctttcaaagtctacatccacct

SEQ ID NO: 260831 - DNA, 1401 bp, Homo Sapiens
  misc_feature (1338)..(1338): n is a, c, g, or t
aaatgcaggtggtacggtccggaatctgggatatcgtcgacccacgcgtcgtcgaaccatcccggagctgagtgttcggccaagtgagctggaggatggccacactgctcttaacactcactctgttagccccatggagaagattaaacagtaccaggccggccagactgttacttgcttcttaaagaaatacaatgtggtgaagaaatggcttgaggtggagattgccccagacatccgggggagaattcccttattgctcacttctctgagcttcaaggttctgaagcatccagataagaagttccgggttggccaggccctgagggccaccgttgttggcccagattcctccaagaccctcttatgtctgtccctcacaggtcctcacaagcttgaggaaggggaagtggccatgggccgagtggtgaaggtgactcccaacgaggggctgaccgtctccttcccctttgggaagataggaacagtcagtatatttcacatgagtgactcctactccgagacgcccctggaagacttcgtcccccagaaggttgtcagatgttacatcctgtccactgcagacaacgtattgactttgtcgctgcgatcatccagaacaaacccggagacgaaaagcaaagtagaagatccagagattaactccatccaggacattaaggaagggcagcttctgaggggctatgtagggtccatccagccacacggtgtgttctttcgccttggcccctccgttgtgggtttggctcggtactcccatgtctcccagcacagcccgtccaagaaagccctttataacaaacacctccctgaagggaagctgctcacagccagggtcctacgccttaaccaccagaagaacctggtagagctgtctttcctccccggagacacctgggaagccagacgtgctttctgcttccttggaagggcaacttacaaagcaagaggagaggaaaacagaggctgaggagagagaccaaaaaggggaaaagaaaaatcagaaaaggaacgagaagaagaaccagaaggggcaggaggaggtggagatgcccagcaaggagaagcaacagccccagaagccacaggcgcaaaagcggggcgggcgggagtgccgggagtctggggagtgagcaggaaagagtgagcaagaagccaaagaaagccggcctgtcagaggaggacgacagcctttgtggacgtgtactatcgggagggaaaagaggaggcagaagagacgaatgtgcttgcccagggagaagcaaccaagccagcagaagcgccccggctgcagctgtctccaggtttcgcctgggnatgtggggactagactctctggacccggccttgccccctcctagcagagagctcagaacgcgt

SEQ ID NO: 260832 - DNA, 401 bp, Homo Sapiens
atagagtaaggacttcagtgtcagatttctcagggtatacaaatatgatgtctgatgtaagtgagccatgtagtacaagagtaaagacacccaccagccagagttacaggtaaggtcccaaaagtggccaggctggaggtcttctaatgtaattttgttttattttgagaacactgccattggaatgtttctacacgatcctattaagaataatgtgatgccctttcaatgcaacttttcatatttagtttattttgttagcgtgattttagctctgtttgtattatgatttttaatcaaaatcaatagattaaaaatagtttgacattcaaagtgacaatgtttagcaatcaaatttacatgtatagatcgtcagggaatagcccaaatgttttaaacgc

SEQ ID NO: 260833 - DNA, 1182 bp, Homo Sapiens
  misc_feature (357)..(357): n is a, c, g, or t
  misc_feature (646)..(771): n is a, c, g, or t
  misc_feature (904)..(913): n is a, c, g, or t
  misc_feature (1015)..(1025): n is a, c, g, or t
  misc_feature (1084)..(1092): n is a, c, g, or t
ccggtatacgacgccctggccggggagttcatcagggcctctggtgtggaggcccgccaggccctcttgaagcaggggcaagataacctctcaagtgtgaaggagactcagaagaagtgggccgagcaatacctgaagatcatggggaagatcttagaccaaggggaggacttcccagcatcagagatgacacggatcgccaggctgattgagaagaacaagatgagtgacgggaagaaggaggagctccagaagagcttaaacatcctgactgccttccagaagaagggggccgagaaagaggagctgtaaaaaggctgtctgtgattttccagggtttggtgggggtagggaggnggagagttaacctgctggctgtgagtcccttgtggaatataagggggtagtggcgaaaagtggtactaacccacgattctgagccctgagtatgcctggacattgatgctaacatgaccatgcttgggatgtctctagctggtctggggatagctggagcacttactcagctggctggtgaaatgacacctcagaaggaatgagtgctatagagaggagagaggagtgtactgcccaggtctttgacagatgtaattctcattcaattaaagtttcagtgttttggttnnnnnnnnnnnnnnnnnnnnnnnnnnnnnnnnnnnnnnnnnnnnnnnnnnnnnnnnnnnnnnnnnnnnnnnnnnnnnnnnnnnnnnnnnnnnnnnnnnnnnnnnnnnnnnnnnnnnnnnnnnnnnncttggggggccgcttcgccccccgaaaagttttcaaacccttttttttggccccgggcccccttggggacgggaaccgggccataatgtttcccaggaaaacccgggcccgaaaaagggctgggatccccccnnnnnnnnnncccccgggggaaaaagagggttgggaacaatccccaggggggtccgagggccattgggggttcttcccccggggggtcacccgagcttgaaattcaaattgnnnnnnnnnnntggcatttttcccaggaggggggagaattctcaaaaagatttttgccccaatagggaannnnnnnnnaacgggggattgacgaaccccggaatgtcccggggggagatttaaaaacctctggggcgcctttgggcaaaatatatttcccccccgggg

SEQ ID NO: 260834 - DNA, 902 bp, Homo Sapiens
cctacctccctctgcaggaacccggcgatatggctgccgctgtgccccgcgccgcatttctctccccgctgcttccccttctcctgggcttcctgctcctctccgctccgcatggcggcagcggcctgcacaccaagggcgcccttcccctggatacggtcactttctacaaggtcattcccaaaagcaagttcgtcttggtgaagttcgacacccagtacccctacggtgagaagcaggatgagttcaagcgtcttgctgaaaactcggcttccagcgatgatctcttggtggcagaggtggggatctcagattatggtgacaagctgaacatggagctgagtgagaaatacaagctggacaaagagagctacccagtcttctacctcttccgggatggggactttgagaacccagtcccatacactggggcagttaaggttggagccatccagcgctggctgaaggggcaaggggtctacctaggtatgcctggttgcctgcctgtatacgacgccctggccggggagttcatcagggcctctgggtgtggaggcccgccaggccctcttgaagcaggggcaagataacctctcaagtgtgaaggagactcagaagaagtgggccgagcaatacctgaagatcatggggaagatcttagaccaaggggaggacttcccagcatcagagatgacacggatcgccaggctgattgagaagaacaagatgagtgacgggaagaaggaggagctccagaagagcttaaacatcctgactgccttccagaaaaagggggccgagaaaagaggagctgtaaaaaggctgtctgtgattttcccagggtttggtggggggtaagggaaggggaaaaaattaaccctgccgggctgggagagtcccct

SEQ ID NO: 260835 - DNA, 985 bp, Homo Sapiens
  misc_feature (905)..(905): n is a, c, g, or t
  misc_feature (936)..(936): n is a, c, g, or t
  misc_feature (974)..(974): n is a, c, g, or t
ctaagtcactgacccatattatgtacagcatttctgatctttactttgcaagattagtgatactatcccaatacactgctggagaaatcagaatttggagaaataagttgtccaaggcaagaagatagtaaattataagtacaagtgtaatatggacagtatctaacttgaaaagatttcaggcgaaaagaatctggggtttgccagtcagttgctcaaaaggtcaatgaaaaccaaatagtgaagctatcagagaagctaataaattatagactgcttgaacagttgtgtccagattaagggagataatagctttcccaccctactttgtgcaggtcatacctccccaaagtgtttacctaatcagtaggttcacaaactcttggtcattatagtatatgcctaaaatgtatgcacttaggaatgctaaaaatttaaatatggtctaaagcaaataaaagcaaagaggaaaaactttggacatcgtaaagactagaatagtcttttaaaaagaaagccagtatattggtttgaaatatagagatgtgtcccaatttcaagtattttaattgcaccttaatgaaattatctattttctatagattttagtactattgaatgtattactttactgttacctgaatttattataaagtgtttttgaataaataattctaaaagcatatactaagactcattcactttattcaaatatttgtgtgttctgtgtgccaggcatgggactcgttctaaggagaaagcagtgagcaaggcaggcatagtctgcctatataaagctcccaatctgaggaggataggcaactgaccacgcagttggaaccggggagcctattgcacaaccagtctggattaatggctggcatcttcagtcttaaattattccntaggtaggtgttttctttaggtccgcctccntgaccggaaaaagggccaaatttgggaatgtttctttnctttgggggcc

SEQ ID NO: 260836 - DNA, 1078 bp, Homo Sapiens
  misc_feature (774)..(774): n is a, c, g, or t
  misc_feature (777)..(777): n is a, c, g, or t
  misc_feature (779)..(780): n is a, c, g, or t
  misc_feature (924)..(932): n is a, c, g, or t
  misc_feature (936)..(947): n is a, c, g, or t
  misc_feature (997)..(1032): n is a, c, g, or t
ggctgacccaatggaagatgtgatcatcaggaataaaaagcaccagaagctcaagcaccagaaagaggctgaggaggaggagctggagataccccctcagtaccaagctggaggctctggcattcatcgccctgtggccaagaaggctatgcctggggctgaatacaaggccaagaaagtttttgtgatgtgaagaagaaaggccggccggatccctatgcctacatccccctcaacagaaccaagctcaaccgcaggaagaagatgaagctgcagggacagttcaaaggcctggtgaaggctgcccggcgaggttcccaggtgggacacaaaaaccgcagaaaggatcgtcgaccctgaggcccagggcccctgggctgccctgtggtccagtctgaggccctttcagcccccaggctgccttgccaccagctccaggtgctcaagattctggcagagcctggactcaggatgacttggaactagggcttggctctcagaagtcctggattttggaaactccaaatggaatcacccttcagagacatccctggtgcctggagatgggaatgtggcctcagtgcctctgagtaggtgccatgaggcacctttgctttctgcccagagtggccatgagcaccagaacagatgatctccatttccgccagctgcctgtagccacgtggcatcctgcctgtggtctgggtgagatttactgtgaccagatgtagaataaatgtgtctcatcctgccgacgaccggctcaacaagganatnanngcttgtcggccggctccgcccttcaaaaacttttcaaaaccattccgttggggccccgggcccccaaaagggaaaggggaaaatggggcaaaactttgtttcccaaagaaaaacccggggcaaagaaaaaaggggcgggggttnnnnnnnnncacnnnnnnnnnnnncccccgggggggaaaccccaaagggttttttggagaaaaattcccccaannnnnnnnnnnnnnnnnnnnnnnnnnnnnnnnnnnncgcccctccaaaaagggaggaggtcccccccgcgcgcctccaaaat

SEQ ID NO: 260837 - DNA, 982 bp, Homo Sapiens
tggtaccggtcgcggaattcctcgggatatcgtcgacccacgcggtcgcttgtgcttgtgaaagctaaccatgctaaccaccaaggcaaagcagcacagtgtgaatagaacagagcgggatcaagaatttcacagaagacaggtcagctgaggggcctgcacacacagggtgttgaggaaccacagatgggcgccgagaggcctgccttttgcctggcccaggctcacccccaccttgggcctcacctcctccaggaagccttcccagctacccgaagctcaggtggccttcttgcaggtccccgtagcaccctgagcctgtaccttgggtggcacttgttatgctatcctgtgctagccgtttgtgcctcgtctcgctgttagattgtgagttcccatgggcagagacccactgtcgttccccgtgtgtccccagcccggtccctgtcacatttgttaaatgaaagaacaatgaagcccagtgtaacgtcagtccacagaaatagccacagcttccagtggtggccgtagacttggctcggaacttagtggcaccagagtaactctagtcagttacagtaaaatccactgtgtgtggaaggcagaagctagcggttgtatcccaagcatcttttgtatttgtctttatactttgctgaattctctgaaatacctattactgtatgttgcttttctaaataaatgtattgtgaaaccaaaaataaaacaaggggggccgtctagagtatccctcgaggggcccaagttaaccgtaccagtttcttgtccagtgtggcctatagggagccgattataagtaaggactgagccgcgttttacacgtcgtgacctgggaacacgtgtattgcgacttgtgaaggaccttattctggggggcccattggcaaatcctcagagataagccacggaattaaatcaggtatagtggtaaacagatttcgtgaaaatgtacgattttatt

SEQ ID NO: 260838 - DNA, 1017 bp, Homo Sapiens
gtaaaaggatgtccaccacctgaatctgcctgggaagtgggggtggaccaccatggaattccagttttatccatgaacaactccccactggctgcttgttaattcagggataatggtggcattcttacaaactgctcgggaaatagaatgacgggaacacttttagggagcccaggaagttaccagggacattggtgtcgccggcccaggcaacagcagcgtacgcttttcaaagatcattgagttgtcttagaatttgaagctgtgtaatgacaatgtcacctggagttcgtctccatttcttaactttttgttgcacaagtatttggacagaagtcgaactgtgaatgagatactgaaatgcactaaattgtattacattaaactggagttacttgatacaatgaagaaatgcatctgatctacttgtatttattgtctcagaattgtacgttgtgacaatcaaatgttacttgcctaaatgccaggaaattcaactggccttttaatcagcaagatcgccagcaagtactgtaactgtaaaggaaaatctctctctctggagaacccacacaaaccattgacctgagtgcgcatgacagccactggcttctttttctatgattgaaaatctgccatcgctgactgttggccagtttcaaagggacccattgtatacagggtgcaaatgtattatacggatgtttccttttgtacacttcatttttacaagttttgctactcacaagctttatgtagtggaggatagaggtatttttggtctttagaagcttgtcggggtgagggctgctaacttacacttcagaggcctgtgtcccaaaggcctggctgcgtttgccgtgctgtgcgaggacctgtgtacacaggcaggtgtgcgcctgcccgagcgcgagtagctcttgtgtagtggtgaaatgctgcaggcatctgtttattaaaattgctgctgtgaaagacagggataaaatatccacaatataagagaaagcgactccg

SEQ ID NO: 260839 - DNA, 1111 bp, Homo Sapiens
  misc_feature (952)..(981): n is a, c, g, or t
cagctgctcttaactatataaaccctgcaaaactgaagtttgaactgcttaaataaaaggattgtttggtttaagacagagtgataaataggctaccagattcttgaagtcagcacttagtagaagagaaccccagttcttgctctttgctgtcaggagcaacctgtttgtggtatttgcccagagtccctccagcaccacccctccaattgagatcagctcctctcgtctgaccaagttgacccgccgaaccaccgacaggaagagtgagttcctgaaaactctgaaggatgaccggaatggagacttctcagagaatagagactgtgacaagctggaagatttggaggacaacagcacacctgaaccaaaggaaaatggggaggaaggctgtcatcaaaatggtcttgccctccctgtagtggaagaaggggaggttctctcacactctctagaagcagagcacaggttattgaaagctatgggttggcaggaatatcctgaaaatgatgagaattgccttcccctcacagaggatgagctcaaagagttccacatgaagacagagcagctgagaagaaatggctttggaaagaatggcttcttgcagagccgcagttccagtctgttctccccttggagaagcacttgcaaagcagagtttgaggactcagacaccgaaaccagtagcagtgaaacatcagatgacgatgcctggaagtaggcatataaatgctcacagttaaatctgacccagtaaactctgtgtgtttagggagtatacaaaagaaatcgttcttttccttttcttatgttgttgaatacttcattcacaagggaaataatcatatcccaaagagagagcaattggcttgttttgcttttgttattgttcttccctgttatctgctttatagagagaagtttgtgtggtggggacagattttttaannnnnnnnnnnnnnnnnnnnnnnnnnnnnnccagtatatatggggcgatgcacaggtaggagctggcagtgcagggaagaggagacactggtctgcagcaacagcttctactaccagcccttggggcactcacccctgtgatcaagcaatcattgtcaat

SEQ ID NO: 260840 - DNA, 1291 bp, Homo Sapiens
ctaaatggcgccgtttgtgatcccatatgtggcccaggggttttttctctgtggggaaaacccaacccttttggcccccagggttccccccttcccttaatgggggccgcgccggcccccaaaacgaaatggtcgtagaaaattttcttcgggggccgagggcgggccgaccatgttcggcaggtatttaggtgggaaacttggttggggcctccatttttattttaagttcatcaggaattaccaaattccaccataaaacaattgccttgtttatgagcacaccacttccatagaaacagaatgggtactttccatgctatgcaactggaattgtacttataaaatatcccataagatagttctaacatatccttattctccctttcagcttcatgttatacatccagaacacgtgcattatgtagatgaaagagtacataatagcacttaaaagttaaaattatcactgttagcctacacaacaacttaggtataaaaatccagacctctgctaattcactacaaattgtacatcttgccttattaaaaactccttttttaagattccagtcgttctcacagggagacaaacaagatgtactataaaattcttggaaggatttgcttgattctactggaagaatgacattagccttctttgtagatgcatctgaagtaaggccactggtgataaagaatccacccctggctgtttctgattactgggaaatgaagctgactgggagatccaagaatcaggactatgatgagttgcaaattctccattctgaaaaaagtctcctgccacattcattctaccaggattaaaaggtcctactccagtcttggtcttacttcttgaaaaactggaagtggagaaatccacatcattggttctgtttttagtctcaggaggtcttcgttcaataaaattggaggaatttttctcttgcccttgatttgtttccatgtcctcttcatcatcaatgacaattgtctcacttacacttcccttctgagatgccaactcttttgaggaaggagtaattttggaatcatttccttgtagttcttcattttttgatgatgtaaatgttatggttctttgatcagctaccactggtacagaaggtgggggaggttgtacaggttcgataaaaacaacatcatcatcatcttccactgacgagttctgaaacttattagatctagacactaaaggattagctggaccactaaatgagtttcctacattcgtgagactagttgccatggccgcctcgtgccg

SEQ ID NO: 260841 - DNA, 1181 bp, Homo Sapiens
  misc_feature (354)..(366): n is a, c, g, or t
  misc_feature (382)..(442): n is a, c, g, or t
  misc_feature (499)..(629): n is a, c, g, or t
actaaccccaaagccaggagctgatctatttgtttcaaaaacagctactacttcacactctggccttcttagctcagtcctggaaataacctaattttttagttctttgaactagtgatgtcaggtcagagtaccagaaataggtacaaagcctcctgattcacccttatttataacccccaggcaaaatcttgcaccagactgggccgtgggtaagtctaaaggtacctcgtaaagcaagagaactatttgcctcaccttagataagcatatgtgctcttaaactactatgaatcttaaattgatgcaataattttgagactgccatttaatagttacaagtttaagtaacgnnnnnnnnnnnnnctttagatggagcctnnnnnnnnnnnnnnnnnnnnnnnnnnnnnnnnnnnnnnnnnnnnnnnnnnnnnnnnnnnnngagactcaaaggatcctcccacctcagcctctcaagtagctgggactacagatgcannnnnnnnnnnnnnnnnnnnnnnnnnnnnnnnnnnnnnnnnnnnnnnnnnnnnnnnnnnnnnnnnnnnnnnnnnnnnnnnnnnnnnnnnnnnnnnnnnnnnnnnnnnnnnnnnnnnnnnnnnnnnnnnnnnatgagccaccacacccagcccgtaatatctttacacagaaattagtcttttatgagaaattctcggttgaatgcaattacaaattaagggaaacttctataaacgtctacattaaatatggagcaaaatttaagcctgtttcccataattctctgtatactgtccttttaaaacgtatgatttaagttaaagctggcactagaaagtatttcactttggcatgactgaactttgtatcatttctggctttcaaaaacaatttaggctgtatttcccttacacagcaactttttatcattcattttcaatgcctgggtaatttgaaagccaaacagtttcttgcacagggaatgcattgtcataagctgggttttatttcaaactcaattatacaatgtagcaatagtaaatattaaaatgtaatgctaactcaaaacttgtagaatgccttcactgaattttggtataaagagtaaacaaaacttattctgcaaaaggattaggaacctttttatgcaaaaatgagtattttattttgtcagcactaaaaaa

SEQ ID NO: 260842 - DNA, 639 bp, Homo Sapiens
  misc_feature (89)..(89): n is a, c, g, or t
  misc_feature (331)..(374): n is a, c, g, or t
ctctattataaattattcattcagatgaaccatcatatgcatctgttaatttctgaggtcattaaaaaaattaaatcataaagttaaanattatcaaaaagaactcttagatactccaaaacatatctgtggaatctggcttagaaacactatgcagatcaagagaacgaagttatcatggtatctctggatttaaaccaaggtatttggtaaggtccctcctgagttttcccgtgccatcatgtagtgatacatccttttggccactgggttcaaaatttcatctcaaaacccaataagcccctcaaaacttgcccctaaaatttacaannnnnnnnnnnnnnnnnnnnnnnnnnnnnnnnnnnnnnnnnnnnaaaaaagtcttatgactctttaaaagattatgtctcttcatacagcatgtataaaacaatcagctaaatgaaacttcttcccaattatgtcgtacttaaaattgcattcattttagctttcccatgaattttttttccctcatgcacttttatcgtaagccatttgtattatttgtaaaaacttaacaggtttgtgaaggagcaattttttagaggttttagaggtataggcaagagagggattttagtaagtccaagttgtaac

SEQ ID NO: 260843 - DNA, 868 bp, Homo Sapiens
ctggtgactaaaataaggtttactctgaaagaggaggaattttattcaaagcattcaaacattttattcaagtgtttcaaaattcaaagcattgtattcaaagttgcagtgaaggcatcaacttatgtaaaaactcagaaggaaggctcctctgataaaaacacagctcctttattatgctgcttttcttgttcactttacacactaagtaaacacttattgtcaggtgcctagtcttgagtgaattgttagatgtgcactgaactcgggatgttggggattggagagagagaattgccaaagtaacagcaaaaatatctcttactttgctttgtttataaataaattagtagattggaaaaactagtgttagggaaagaaatcacatgttcagagcctaattcagtaggaagggcttttctctaccctgaaatgaaggtaatccaaaggcatccattttctaggcttaaaagatatatttttgatatatttaatgatattctctacactccagcattaatatgtctgtttaaaaattactaattctcaaatggctcaagaacattagaatttaagtaccttttagagtaattattttaagcaaatagcctggacgtaagagattctcatgccagcatgctttcatttgtcagttgttgtgactgagagataatgaatgacacctgaaatgcatatggtatttttgggagagttaaggtataatttgaaggttggcagaccagttgtgctgattactcttagagaagaagaaatggaaaaatgaaagaaggcaggaaggaaagaaaggatataggaagagagggaagcagaaggcaggcatttttctattttccccacaaattatttc

SEQ ID NO: 260844 - DNA, 1327 bp, Homo Sapiens
  misc_feature (1190)..(1190): n is a, c, g, or t
ctggaatctggggacctcattgaggtctggggctgacaccccactccctgtttgacggcccagcctggacttggggagaatgactttccctttttttgccccataagggctagcataagctgaggtagaacttatctttaagctgcagcaaaatcaaggagtgacttttgtcccctctcctgttgaccctggtttagagccgttaaccacttggtgagttatgtgggtgttgttgccctgggtggcctgttgctccgtccacaagtcatgctgagttttgcagcctctgtgacttggagatgtcccttcacccctcccctttcaccaccatcctcttttcctcatggaaatgtctgctttatgaaactatgcacatattgaaagtgagttgaaacaaatgagggttgggtaggagcttccaggcctgggatttacaccacgcctagcccagcagaggccttagtcccatttggggcttgggagtgacatttgcttgaggcttatacactggtgtggttgcctggcttgcaggaaatgaccaagctcacacatgctggctgaagcgtaagcagacaactgaggtactcttttgaaggatgaaggtggtggattctcagccctgggggtcttcctcacctgaggacccttcagagccaccctttctagtttgcatttcctggtgcacacatttaaggcataacagcacattcatccctttggtttgggatctcaggaatacagtcccatgcaaagattctctggttttatggcttttttccctttctttacaccatcctctcccataagcacccatgtctttgaatatgaatgtatttgtaaaataccacgtttcatgtgtgaatatgtgcttttactgtacatagtgctattgtgcaataggtcttatgctgttttcactcaatgtgtgctaagatctagccccattgactcttctagaaatgcagtattgctttgacctgccatgtggcactccacaatgtcaattgcagtttacacacattgcctaaagtgggggacacctgggtgcccctgaccccttggcaccggatacaggccacgataaacatcctttcgtgtgttcccttctgtgcttgtgtggcatgtgtacccaggatgggcctataggtcacagaggtcagtttctctttggttttccagattttctttanaacggtgactgaccctcctacttgaggccgcccttttctccttatccttgccagcacttgtattgccagactacctaatttttgccagtctcatgggtagatagtggtgcagtgctttaacatacattcatctgatc

SEQ ID NO: 260845 - DNA, 942 bp, Homo Sapiens
  misc_feature (57)..(76): n is a, c, g, or t
ctgtgcacttaaaaatggtgaagacagtatgttttatgagtattttacgacaatttnnnnnnnnnnnnnnnnnnnnccagaacacactaagggttataggcacaaattctccttatgcccaccaccatctcagctggtagtatgacgggtgtagacaccattagaggcaatggtgaatctatggggaaccacccaggaaagtcaccatccaaatgtccacatccctgcttggcaattaaaacgaagacacttttcttcagcacctggtgaagatgtttagtttctagtgctttccaagatccacctcaggagaagtcaatttgtccacaggaagcgtagtttccaaagctgtctacggtgaacctctgagagatgtgaattgaattcagctttagggagccaaagtagaagttctcaaacaactttaaaatatttcggccatcaaatgattctctttccttgaagatatatttgccttccgctgtgtagagattgtacctgccttcagcattggggtctttcctgaatagtgtattcataactgtagcatgcagtttcacactattccactctttcactattagtccagatgcctgaaaacgttccagcactcgatcaactaattcttgtagcttaatgaattcctctttacactgctgtagcatctcacatgtctgctggatctcttcctcactcaaaagcaccaacatcccaatagttagatgaagctttttaggattctggaaaatgctgctgtcaaccccatgatccatggagcacttcgccagtacttcctcctggaatctcaggaatccttcctgaacctcaacttcattgaggaaaaaggcaaggaagtgagtgaagggctgctttcttcgaaaagtgtccaaaagaacatcaatccgtgttcgggctgaaattacaccatttcgatgcggccag

SEQ ID NO: 260846 - DNA, 597 bp, Homo Sapiens
ttataacttcagtcctttgtatttatgatgcaactcacagtagatctcaaacgcatgtcctatatttccagttcaacatactaaagactttaaaaattccgtatttagctacaacaatcaatacgatttccccagagatggcttcatttaaaaaactgcctcttcctcacaggaaagaaaaaactgaacttaagttataagaacaccccaggctatcagcaccttcatcccgagaaaggaagttattacagacacttagttttttaagtgaggcttaaagagagtacttcctggtcagacagctaacgtcaacagcaatttatacagctttgcatttcgacattttagaaagaactctctaaaaatttttccagaattttccccccagtacctacaaaagaggaaaacttgctcaagctaatcttatgtaaaaatctatgaaagtctatcaatgctcaccgttatggtatcaagtagatatcagaactggttaatattattgataattatatcagcttaagttttaattattttacacttaggcaccctccactctccctgcatactagagtaaggtttcaaggaacacaatattag

SEQ ID NO: 260847 - DNA, 575 bp, Homo Sapiens
gggagcagctcttttgagtagcactaaagtgaatggacaatggttctggaaaaacgcatacttctccaaacagctgaaaagctaaggtctagtgaaatatcaactttttggggcttgaaaatgggttaagaagcattcttttgatgttccacaccaacataagcattagggcctcaaacagaagttgccataaataagacagcttcagatctgcagtttcccaaagcaaagataaaaagcattagcaaaacaatcagcggcctgcagtaaggcaagcatcactctgcaaagcacgttagagaaactcccgtgaaaagacagacccctttcagggaaaagcaagcaaagcagttatgagacccaccaaccttgaaacaccgcctttaaggttcctgacacagtaggggaaaaaaggtaagtcatttaaaaataaaattgcaaatttattatctattccagcaattttaaaatcttagcatctataaaaagtattcataactacagcaagaggattttccaaattgtgtatatatgaataaaattaacaaaaatggtggagcggccgccgctccaac

SEQ ID NO: 260848 - DNA, 1005 bp, Homo Sapiens
gtggtcgaccccctggatgtgtgtcctgaaagtgcagaggtaacgcttacggattttcgggcctatcagaccgtcgtcctggatcctgagggtgatgctcaaattgacccaaactgggttgtgctcaaccagggcatggaaatcgttcaaacccatgaacagtgacccgggcttggcagttggatacacggccttcaattggtgtggactttaaaggcaccttccaatgtgaacacagtgactgatgatgactacgcaggctttctctcaagttatcaagacagtgcccgcttctacgtagtcatgtggaagcaagaccgagcagacctactggcagggctacacccttccgggcggttgcccagcccgggctgcagctcaaggcagtgaaatcagtgtctggccaaggtgagcacctccgaaatgccctgtggcatactgccaacacccctgatcaggtacgactgctgtggacagacccacgaaatgtgggctggcgggacaagacctcctatcgctggcagcttctgcaccggcctcaagttggctacattcgggtgaagctctatgagggaccccagcttgtggcggattctggggtgatcattgacacatccatgcgaggggggcgtcttggtgtattctgcttctcccaagaaaacataatttggtccaatctccagtatcgatgcaatgacacagtgcctgaggactttgagccattccggaggcagctgctccagggaagggtgtgaggaggaggccaccagattcagaattcagaattttagaccctttggccttggggtccatcctggagaccctgaggtctaagctacagcccctcagccaaccacagacccttctctggctcccaaaaggagttcagtcccagagggtggtcaccccacccttcaggggatgagaagttttcaaggggtattactcaggcactaaccccaggaaagatgacagcacattgccataaagttttggttgttttct

SEQ ID NO: 260849 - DNA, 592 bp, Homo Sapiens
  misc_feature (461)..(469): n is a, c, g, or t
atttttttgaaagtacaaaaagccacatagtttttccagaaaggtttcaaaactcccaaagattaacttccaacttataagtttgtttttattttcaatctatgacttgactggtattaaagctgctatttgatagtaattaaatatgttgtcattgatataaacctgtttggttcagcaaacaaactaaaatgattgtcatagacagtgttttatttttcctgttggtgttgctgatttgtgagcatgctttaagatgaaaaaagcatgaatgataacttccttaaaaaggtgcggcatccaattcaaatattttcgtcctgattttaaagctggttggtgtagtgctattaaaatttcgttcagttaattttccttttgaaaacttgttcgcacgttgtttagggtgcccttacttcagcaaaggagaaggagtaggagagccttagaatttttgaggnnnnnnnnncctataacatacaatgtactgtatcaaactattttacatgaatgacacaagtattctgaataaaaaataattgaacattgttaaaaacaaggtgttatgtaataaatttatttttcataaatc

SEQ ID NO: 260850 - DNA, 1043 bp, Homo Sapiens
accggagcatctgacaaaccaggagaagtttcaaaacttgggaaaaggatgggtttcctctatctcacattttatggacatacttggcaagtgcaagacaaaatcgatgcaaacaatgtggcttacacaactgggaagctaagctttcacactgattatccagccctccatcatccacctggggttcagcttcttcactgcataaagcaaacagtcacagggggtgattcagaaattgtagatgggtttaatgtgtgccaaaaactaaagaaaaataatcctcaggcattccagattttgtcctctacctttgtggactttacagacattggagtggattactgtgatttttctgtacaatcaaaacataaaattatagagttagatgataaaggccaagtggttcgcatcaacttcaataacgcaactagggacacaatatttgatgtgcctgttgaaagagttcagcctttttatgctgctctgaaggagtttgttgacctcatgaacagcaaagaatccaagtttaccttcaagatgaatccaggtgatgtgattacttttgataactggcgcttacttcatggccgacgtagctatgaagcagggaactgagatatccccgcccatcctagaaggagcttatgctgactgggatgtggtcatgtcaaggcttcgtatcttaaggcagagggtggagaatggaaactgaagtcacctgtagataattttaataagattccaatgaccatattttgtgagatatggcacattattcacagaccatgatctttgtgatttacatataatttccttaacaatgaacatgtaacttctctcacaagagtactctttactttgtaatcatatacaatgtcaactttttagatgtttcaccactcttttgcaaataaagcatcctttctgctctgttgcatgcctgctctaatttcttttgcccatatatgagtatctccagaatgtctacaaatagtttttgtagcaaatgaaaatttcttcaaataagccttttgtttcaaata

SEQ ID NO: 260851 - DNA, 1527 bp, Homo Sapiens
  misc_feature (853)..(853): n is a, c, g, or t
  misc_feature (870)..(870): n is a, c, g, or t
  misc_feature (879)..(879): n is a, c, g, or t
ccaaccaaaagtttgacgtgaatagaaagatagcccttctgcatggtagtcaccaaataccagcactagaaaatcaattgctttaattgcattgcagcagggagcctcagcaccatgtggggaggaggaaatgggaaggtcttggtttcagagtgcttttggctggccagagggtggccaaacagggcaagggggctccctctgcttgggcattgtccacccctggtcagtgagaggggggcagcaggggtgctccccacggcagtcctgctgcggccttccctcctggcctattcctggggcaggaacaagctccagccttcctccacatggctgaggtaatcagcacccctaccccaggggcatcttcccagcctacaaagcaggaaggagcctgtgcagaagttacattttaaaaccagattttcacctgaggcgtcaaccagatgtcacctctgcttaaaactccaactgcaaggctggcaagcagcacagaggaagtgcagatccttcctgtgtcactccaggcccagaggaactgagaagccacctgctgttccggcccttgggctgtttgggaaaagccagcagtcagagtgccagcctcaagctctgattatccccctcctgtggccctggtagttcaagcaggtcctggcagcaggagggctgtgccatggaggatggacacgactgcactcatactcaaaaacagccttgaccgtggcctggtcatgggattaaaaaatttgtgtgtattggtggggaaggatggggtgagggtgaggggatctcattgatacagagtatgtcataagccatatatattaaaatcattaacagtatatagtcncacgggtagctccaacncctcacacnatgctcaggtggtgtggccagccctttgcctcagtccagcctcatccttgggggcaaggagggggcagcttgctccctttctccaggctcttggccgacagccccctgaggctgtccacggtacactgcagccagcccggcagcaggcagcccccagcagtcatcggtgctcgccagcactgtggtcactgggatggggtcttggcctcactgctgtccccctggctgggctttggctttagcaggatgaatctgttgaggaggtctgtttccgagctggcctgggctgccccatacccctcaccagcatagctggaggcttcggcgatgttctgggaaccagtgatgtggtgccagtaggcactgcgcggcagcatggtcgtgggtgtgcagggatacgagtaatgttccgtgcccttgttcagcagcctcacgttcttctccatttccagcaggacccgcttgtgctgctctgcgatggccagggtggcactgtggacgcgctggtaaatctgctccccctcttgtgtctggaaggtatagagtccttccccagcatcacacatccggccagcctcgaaggtaaagcgtgtggcatcccggccatagcggcgcagtgagcagaggggccacgagacgagcttcaca

SEQ ID NO: 260852 - DNA, 552 bp, Homo Sapiens
gaccagatgaagagaagggacaaaagcaatgttttcaagtacacattaaatttcattcaataatagtatgtcttcataaaactaccatgaataaaacaaacgattctaaaaggcagtgggcataaggagggctgcttcacagtctaccccagtcaccacattgaataatcgtattgtgtttatatcataaagtgaagttctagtctcatcccagtgttgagttcacctgatgaaccctgacccttttccctgcccaactcatcctgcaaatagaaatcttacttctaagggaatccatttgtctttcttcccattactgtggttcaaaaactgatactacagctgcagaaggcaacccaatatttaaggattttaatcacagaatcctgtaactaagactttctttaaagaaagacaaccagttcttttttatgtcatttatttagaaaaacccatttgcccctagtgaatgtactaaccttatttaaacaaagataagtgagggaagtaagaagtgatttgaggaatgagcctgggatctgaggcccacca

SEQ ID NO: 260853 - DNA, 667 bp, Homo Sapiens
  misc_feature (116)..(116): n is a, c, g, or t
agaatagaacagttcatcatgcttatctcaaacttctagctccagttaggaagaccaagaaattacttaaggaagcttaagctgatgttagccagattggaaggaaaaccacgacnccataagtaaatgcattctaaaccccatcctaactatctctgtccacagaggtggggttaatgctttatggcaggggccttttacctactttatttaatgaaaaacaggaagaaaaacttctgaaataggagtgtgttggtgaatttacgctgcaacccacataattcgaaaaatgattccatacctaacagagtacttttcctgatttactcctttagaagcttgaattacagccaggttgtatggaaatacaggttgagtgtcttaccttaggtatccaaaagcctgtaatctactcaaaagaaacattagtgagttggaattcaaataatccttttctattgttattttttgttacacacaaggcacatctgaaagcacaagagctcagtgttctagttgtgttataataatgaggtcacaagtcctgtactacgatgaggtaggagtgtgtgaaataccatggtggttaaaagcatgggctttggggtggagccaagatggagataacaaggaattatcacaataaaggaaaatggtggagcggcgg

SEQ ID NO: 260854 - DNA, 961 bp, Homo Sapiens
  misc_feature (235)..(278): n is a, c, g, or t
tattgtgattcattttagttactgtgttttattttgaaaatatttaaatattgcacttctataaatagtatgataaatgcacagacaattgcagtaaattcttttttaagctaggatatttgaaatgacaacctttggttaagtgtgtcaaggttgcaacagaattttcacaatttttttgttgtttgcaaattgttactaatattgaagaggtaagggaggcaatgcaaatgannnnnnnnnnnnnnnnnnnnnnnnnnnnnnnnnnnnnnnnnnnngtgactttatgcaaccatatttttactttgtcttgacaactgaaagatgtataaggttttttgccagaaatgtactgtatacatagttttaagtataacagattttactgatatgtaaaaattttgccattaaaataaatgatttctcactgagaggaacttttctaccaggttggggcatatgggagcttaatatatcatatctaatttaaaataatttcactgaaataaactccattgcttttacctaatttttttcttgagatgcttttgtagtttttcagagttttagatgattttatacaaaatcctctgcctagcactgctctttttgatgttgtagtgacaccatttacattgaattaatgcttggtagcctggggctagatgtggaactccatggatctgtgttctgactggcacctttggaatgaaagaaaagtgtgtgctgtccaaattttttccccttaattctttccctcatcttctcacccataatagaaattttatttccattgtgagttctgacaagaatgaaattccacatacaacataactgtaaattgttggtaggtagaagttaatatttgtggttcatgtatattttgaccagagtatatttaagtatataatttcagcttccttgatttagaaatatgatataataaagaaaaactccattt

SEQ ID NO: 260855 - DNA, 186 bp, Homo Sapiens
gccttattttctaatgagtgtatattagcttttttatatttgaaaataaagtaaactttagaaagaaaaactatgcagtaagatactataagttattctaagatgatattttctataagtcattttgaaagaattatgcttttgaattgtggaagaattatttctgcttaagtttagaaatgagcc

SEQ ID NO: 260856 - DNA, 704 bp, Homo Sapiens
gttaccattactgaaacatttaaccagttgtggactggtgaagaacagaaaaagctggaacagctactcatcaaataccctcctgaagaagtagaatctcgacgctggcagaagatagcagatgaattgggcaacaggacagcaaaacaggttgccagccgagtacagaagtatttcataaagctaactaaagctggcattccagtaccaggccgaacaccaaacttatatatatactccaaaaagtcttcaacaagcagacgacagcaccctcttaataagcatctctttaagccttccactttcatgacttcacatgaaccgccagtgtatatggatgaagatgatgaccgatcttgttttcatagccacatgaacactgctgttgaagatgcatcagatgacgaaagtattcctatcatgtataggaatttacctgaatataaagaactattacagtttaaaaagttaaagaagcagaaacttcagcaaatgcaagctgaaagtggatttgtgcaacatgtgggctttaagtgtgataactgtgggcataggaacccatccggggtgtttcggtgggcattgcaggggattgtcctccaggaaatgtctttgggatttctgtggattcttgtttcagactgtctacatggaaacaggtatttcacagggaggtccaccattaggaaccccttttatagggt

SEQ ID NO: 260857 - DNA, 613 bp, Homo Sapiens
ttgaggaattatcagggaagtgaggaaatgtttgggagaggactttctaagctctatttaggtgttagatctaattacttatagattctgtagtctggtgaaggtgtgggtgacgtgatgagaggtttgagaaatgggtgaaatgaaatgggggatatgtaggtcaaatcaaattaaagatgatttttttaatgtgaataaagttatgttctgatagtttgtacagaaaaaataaaatggatgcccatgttttattgctattactaaatgtcaagattgtatgctattatgtcttgtaaatttcttttgttggtgtaaatatggaaatgccacattggttaagtgccatcatttgtaatgcaatgtgtcacttgaaaagagatttgaagaaactgacaacttcaaaaacaaatgagaagcccaaggaactgtgagcaattaaaagcaaaccgcgacaccctttgtctccaccacacatagtgtactttggaagcacaacgtccaggctggtaccgcagcgccatgcccattcctcgcctcgttcataggacacttcactgccattttctattcacataaaagaaaaataaatgtggaaatttcatccttgaaa

SEQ ID NO: 260858 - DNA, 853 bp, Homo Sapiens
  misc_feature (496)..(496): n is a, c, g, or t
aaaagggctcaagggcagtgactgccccactccaccacagagtgggagagggctggaccccagtgccactttcggccacccctgggccacacggccacccctatccctgggacagggactgcagggtcacaccctcaaacaaccacgcctcagccatactcgcgccacactttccaagcctgtcccagaccagggacaagcccctagtagggttgggggaggagactagaactagagaggtgggacacaaagcatgggcacccctgcaacctcggccacccccagcatggcaccatgcccctgagcaccgccagcttggaaaggcatcggatggagacgggcgcttttcgacgagatacccgccacttgctctgggatcccggagagggtgggcaagcgtggaccagggaaggaggcccccaggggtgttgggagggagtttgagagggaggaagtaagagagacggatggcaacggagacgcccaggcatgcgcngagggggtggacaaacctgtgtccagggctgactttgaatagatggcagggagggagctgctctgctatgtatgaaaccacggacctaaaaactaatttctgtaagatacaccataaaggtaaaaataatgcaagtgttcagctgacagtaagtataaatggtactcattttcattcttagctggttctgacctttagcgatccatagaaagtacattcatgaaaataaccagttttaagcacacaaacaataaaagcatatacacttgatataaaatggccgtaagtcaagtattttcaaaatgtttgatttcagaacctttgatggttcattaagatagcataaaaacaaccttc

SEQ ID NO: 260859 - DNA, 677 bp, Homo Sapiens
aaccaccaaatcctctgcgtccccactcctccttcagggactggcctgagaccggggcacagggtaggggggatcccaacactcctccctgtggaggaggcagttagggaaactaggatccagccaaggcccggggggagacccgcatgttgcttggtctgctcaagtcggagtcaggtttcagtgtcttttccctcccttagcccaaccctccaaggcctcatgtctcctaagcatgctgactgcatccgaaaggcccccactcaccatggtctgccctcaccccacatatgtgtgtacacgcgcacgcctgtatgtgcgctgccctcagacatgcaagtgaaaggaggaggcttctgtgtaaatgcactttcttcctcccctctttctccataagaccccaggcagaggtgggtgcctcccctcccctctttgtcactttggtttcctataaatatgtatgtatcgtatgtgcatctttgctattgtaaataactttgaccttttttgttcctgttcctgaagtgctggaaggcagttatggaaggagctgcttagggaagaggggtttcactttgtatctccttaagttaacaacccagttccaggatcgagcctaaagcgggagccaggcctgagtgttcctgtccctgtgaagtgggaaggtcttctggctc

SEQ ID NO: 260860 - DNA, 733 bp, Homo Sapiens
  misc_feature (24)..(24): n is a, c, g, or t
aaaaaagacactaaaacctttcancgtatttaccacatttcagtataataatctatttaaccatttagcctttccattatagactacaagaccaaaggtgtggcattgtattatattcatatttttatccctaagtttctggcacaatgactgtacatggaaggcctttaaattattacctgtagtaaagtgtctctcttcctcactttcaattacagcattgtcaaaataaccttagttagcatcatatattccttccctgctctctccagcggcaccccaatgcctaccagaaataagctaaactgcttagtttagtattaataagaatctccataatctgatctcaaccttcttttctagccttatttcctagcataccctcaacttgtggtctacactcttgctcaacagtcctgctctatatgatgcactaatcttcccctttcttattttacccttaatcatcttatttctacctgttgaaattgtattgcgcattccttccaggactggctaaacaccatcaccttcaggaagcctatcttgaccatttaactatcagggatcacttttttccagttttgagtattctggacatttctgtaccaagtcttacttatcctcatataacctgcagcactcaccatgactgtttgcaataccacagagaaaataggggaaaataacgcactctacaagaacacatttggtcacaaaattatttttatct

SEQ ID NO: 260861 - DNA, 2058 bp, Homo Sapiens
aggctggtaccggccgattcccgggatattggcggcttcacatgcaaatgtcctcccggatttacccaacaccatacgtcctgcattgataacaatgaatgcacctctgacatcaatctgtgcgggtctaagggcatttgccagaacactcctggaagcttcacctgtgaatgccagcggggattctcacttgatcagaccggctccagctgtgaagacgtggacgagtgtgagggtaaccaccgctgccagcatggctgccagaacatcattgggggctacaggtgcagctgcccccagggctacctccagcactaccagtggaaccagtgtgttgatgaaaacgaatgcctcagcgctcacatctgcggaggagcctcctgtcacaacaccctggggagctacaagtgcatgtgtcccgccggcttccagtatgaacagttcagtggaggatgccaagacatcaatgaatgtggctctgcgcaggccccctgcagctatggctgttccaataccgagggcggttacctgtgtggctgtccacctggttacttccgcataggccaagggcactgtgtttctggaatgggcatgggccgaggaaacccagagccacctgtcagtggtgaaatggatgacaattcactctccccagaggcttgttacgagtgtaagatcaatggctaccccaaacggggcaggaaacggagaagcacaaacgaaactgatgcctccaatatcgaggatcagtctgagacagaagccaatgtgagtcttgcaagttgggatgttgagaagacagccatctttgctttcaatatttcccacgtcagtaacaaggttcgaatcctagaactccttccagctcttacaactctgacgaatcacaacagatacttgatcgaatctggaaatgaagatggcttctttaaaatcaaccaaaaggaagggatcagctacctccacttcacaaagaagaagccagtggctggaacctattcattacaaatcagtagtactccactttataaaaagaaagaacttaaccaactagaagacaaatatgacaaagactacctcagtggtgaactgggtgataatctgaagatgaaaatccaggttttgcttcattaattcaccatccagagaccaaataattaaaagaaaaacaaatatagataggtagaactatattttcccccaatcagaatcatcatatcataggtacaatctttcaccaagtaaatttgtataaataagcactattctttgtattaccaaagcaaggtacaggtgactaccctagttcaaaacaaccactttctcaggcttctcatgtgtgtagctaagctaccttgtcatatgtgttgattcttgaaaactgggacgtgtatttccattgggggttggccatttatgctgacatgccatccttccagcaaacgtacgggaatgtgctttcaattgatggactactctattttttgcaaatttgtaaactttgcttctccaaatacaagtactaggttgtccatttatggtacctatttggtgctagtaaattttcaaactagatttataaatgcactgtaatatgtacacaacttagaaaccaaattacaagtattcagttccaatacttcattaatttcaatcaaccaaagttagttcagtagcttatctcagttatgagtataatacattacatgtaaattaagtgtgtgtatactgtaatcgtgctattttttatcattgaaacatttataaactagaataataatgcccttaatgtgagggtttgtaatggtgcttattaagaccaaagacttgttaaatgtatacaccaagtggtaatgaaatttctgtgactggcccacacgtgcatagaggtctgggaggaccaggaaacagcctcagtggccagaggatcaccagtgcatccttcatcacagcatgtgcaatatgccaagattaccctcggtcattcctgtcaacaaggggtcaatgtcataaatgtcacaataaaacaatctcttcttttttttagtttaaaaaaat

SEQ ID NO: 260862 - DNA, 553 bp, Homo Sapiens
  misc_feature (29)..(29): n is a, c, g, or t
  misc_feature (60)..(60): n is a, c, g, or t
  misc_feature (293)..(422): n is a, c, g, or t
tttaaaaaaccgaagacctaacctgcttnccttagtacaaataaagcccaacttttagcnccttttacagtattactttgcccacttgagtagggctaaacaccttttggacccatattcattgttactatcaatacatagacacacattagaattaattgaaaggctggtgctatattttctactttattattaaatgataaaagtaacattcactgtagaagttttagaaaatgtagggaaattataaggataaaactaaaaataacctctacgtgggtgcagtgctcatnnnnnnnnnnnnnnnnnnnnnnnnnnnnnnnnnnnnnnnnnnnnnnnnnnnnnnnnnnnnnnnnnnnnnnnnnnnnnnnnnnnnnnnnnnnnnnnnnnnnnnnnnnnnnnnnnnnnnnnnnnnnnnnnnncgcatgcctgtagtcccagctactcaggaggctgaggtagaaggatagcttgaacccaagaggtcgaggctgcagtgagccaagattacacactgcactctggcctgggcaacaaagcaagaccctgtctc

SEQ ID NO: 260863 - DNA, 452 bp, Homo Sapiens
  misc_feature (110)..(111): n is a, c, g, or t
  misc_feature (114)..(114): n is a, c, g, or t
  misc_feature (119)..(119): n is a, c, g, or t
  misc_feature (122)..(126): n is a, c, g, or t
  misc_feature (128)..(130): n is a, c, g, or t
  misc_feature (134)..(134): n is a, c, g, or t
  misc_feature (142)..(142): n is a, c, g, or t
  misc_feature (146)..(146): n is a, c, g, or t
  misc_feature (157)..(157): n is a, c, g, or t
  misc_feature (176)..(177): n is a, c, g, or t
  misc_feature (180)..(180): n is a, c, g, or t
  misc_feature (183)..(184): n is a, c, g, or t
  misc_feature (191)..(191): n is a, c, g, or t
  misc_feature (195)..(195): n is a, c, g, or t
  misc_feature (206)..(206): n is a, c, g, or t
  misc_feature (213)..(213): n is a, c, g, or t
  misc_feature (215)..(215): n is a, c, g, or t
  misc_feature (220)..(220): n is a, c, g, or t
  misc_feature (232)..(232): n is a, c, g, or t
  misc_feature (237)..(237): n is a, c, g, or t
  misc_feature (244)..(244): n is a, c, g, or t
  misc_feature (248)..(248): n is a, c, g, or t
  misc_feature (250)..(251): n is a, c, g, or t
  misc_feature (255)..(255): n is a, c, g, or t
  misc_feature (340)..(340): n is a, c, g, or t
  misc_feature (414)..(415): n is a, c, g, or t
atattgaactcgagttggaagaggcgagtccggtctcaaaatggaggtaaaaccgccgcccggtcgcccccagcccgactccggccgtcgccgtcgccgccggggggagnnggnccatnatnnnnngnnngcanagcagttnatanaactgtttatnggtggtctgagccttgaanntanatnntatagtntacnagaacaggttnagaaatngngcacnctcacagattgngtggnaataagnccangnntacnaagcgttccaggggctttggttttgtgacttattcttgtgttgaagaggtggatgcagcaatgtgtgctcgaccacacaaggttnattgggcgtgtagtggaaccaaagagagctgtttctagagaggattctgtgaaagcctggtgcccatctaacanntgaagaaaatttttggtttggtgggtattaaagaaga

SEQ ID NO: 260864 - DNA, 699 bp, Homo Sapiens; identical to SEQ ID NO: 97925

SEQ ID NO: 260865 - DNA, 723 bp, Homo Sapiens
  misc_feature (555)..(555): n is a, c, g, or t
cagagagtggagatgcaggcaggaacccctaacaataaatatcagtaatattaatcaacaataactattcaatgacttggcattttctatgtcaaaaattattacttcatatacagaaagaatttgtatcccccttgctaaaatggaactaccccattgaagtgacttcatcttctaaccactgtatctctctctaggtataatataaaattttctcccaagaaaagtcatagacaaatcatttctgaatgtttgacatacattgaacagtaataattttatcaccttcctcattatcaccttaaaatatttattaactttatatattaaatcagactaagcattgttttaaaaaagagagaatttgtttctgccctcctggaggttcaaaatataaacacaaatagtttatctcctcaagctgtagaatgacatattgcaaaaatggaatgcactggtatatttgtgaatgtgtgcccacgtgtgtaggtatatttattttccacagtgtattcaaaacagcatcatgcaatagtatgttattatcataaaacntagttgggtttgtacttaactcacaaagaaaactgtgttaattctaggctcacaccagtttaacagaaatctgtctttatgagcccagaaacaatgactaagactttccctttccttttcagcttttctcatcacccagattatccatttcttgatgaatataaagaa

SEQ ID NO: 260866 - DNA, 637 bp, Homo Sapiens
  misc_feature (78)..(78): n is a, c, g, or t
accaagagaaggcccaggaggaagaagagaaaaagatgctgtggttactagtgccaaaaatgctggcaggaacaaggnaggagaagacaatcataaaaaagctgttcttttttcgatcggggaaacagacctagatccaaggccacaagtaaggctatggctctgattctagaagacaaccttccaagatgcctggcaaaaccacctccctgtgccacacagacacactaggcctgtgtatttatttccccttcaaagcagactgaggagggaggagacgaggttctcttggcatcactttctccctggctgcagaactagacacccttgaagatttggcctgggccagtgagactgaaatcaagaaaaacagaagggatgtgcagggtgggggggtccacttcctgctcccatgtcaacccccagggcctccagcgtgcagacgcgtgtcctactcatctgctcccacggatgaccctggtcttcaatggttagcagaagggagaaaagaaagcaggaaaatgtgctattgagattccagtggtgacttcactgatatttagtgaatatttgatttagccaacatgcctttctttatgtgattttgtattaaagtaaaatgatttttatactttca

SEQ ID NO: 260867 - DNA, 723 bp, Homo Sapiens
cagaaaagcttgcagaatatatttgttcagggagtcctcatcactgcctcttctatttccctgtggaaacctcaaaagagaaatcctgccaaaagcgctcaaggacaaagggattgccatggaaagcataactgtgtatcagacagttgcacacccaggaatccaagggaacctgaacagctactattcccagcagggggttccagccagcatcacattttttagtccctctggcctcacatacagtctcaagcacattcaggagttatctggtgacaatatcgatcaaattaagtttgcagccatcggccccactacggctcgcgcgctggccgcccagggccttcctgtaagctgcactgcagagagccccacgccacaagccctggccactggcatcaggaaggctctccagccccatggctgctgctgagtcagccacctagcgctggccccatgcagcctccctgggctgggctggctctggatggagccaggcatcggcaagggctctcgggagctgctgccgtcagactcctgcctcaagcctgagtggaagcacctgaggaccggggatcgggacctgacctggggctggcctcaggcccacgtgcacgtgactgccctctgtggaagccagcttaaaccctagccctgtgagagcttcctgtgcccagcaggaaggaagtcaaataaaccacactgactacctgtgcttactga

SEQ ID NO: 260868 - DNA, 361 bp, Homo Sapiens
tgtggcgtggggctcctctgcagtgacagcttacaggaaagccctgggcggccagcgcgcgagccgtagtgggccgatggctgcaaacttaatttgatcgatattgtcaccagataactcctgaatgtgcttgagactgtatgtgaggccagagggactaaaaaatgtgatgctggctggaaccccctgctgggaatagtagctgttcaggttcccttggattcctgggtgtgcaactgtctgatacacagttatgctttccatggcaatccgcaatttcagtcagatattgacttatgaggggcagccagatggtaggtgaaaagtagtgaaaactcaggcttcttcattcacatagctc

SEQ ID NO: 260869 - DNA, 871 bp, Homo Sapiens
  misc_feature (546)..(559): n is a, c, g, or t
  misc_feature (566)..(659): n is a, c, g, or t
  misc_feature (702)..(702): n is a, c, g, or t
  misc_feature (813)..(813): n is a, c, g, or t
  misc_feature (840)..(840): n is a, c, g, or t
attgtttgtgtgtgtctgtttcccctgtgaaaaggaagtaagaagaagtaaggctttctttgggggcttactagagagaattcaagaaaatataaatggtcacagaggcagataatccttagaaagagataccaagaggtcagctgtctaggtattcattttcccctgagacacataatctctgtccaagctgaaaggtgtttatctctttcttgagactctcccaccgttcatacccttgtgtaaaggcatcactgtggatgcttaaaatcaggaatgtatttgtttttgctttagctgaagttgagttttgtttgcttcacattaagcctgctacagtttcttgtgtgatcaccgaatatgaggaatgtctgaatgatctcttctttttttctttaagtggagctagtacttgagggctgccatgctatttcctagatatctcttctgacgaccaaatcccagcatctgtcacctttctttctaggctcttttccaccttgcatatttcttctcagaatcctttccaatttcttcactacttcnnnnnnnnnnnnnnaaaactnnnnnnnnnnnnnnnnnnnnnnnnnnnnnnnnnnnnnnnnnnnnnnnnnnnnnnnnnnnnnnnnnnnnnnnnnnnnnnnnnnnnnnnnnnnnnnagtgcgagcccatgtatctggcattatttcttcatttcttttnaaaagtctgaagtccctaactgagacataagctcttgaataaatgggttggggtcattaaatgaaaaggatgccactttttaagtttggcatacacacattaagttaactnccacccaccattaataaagtccaagantgttaacatagaagcatatattaatcatcag

SEQ ID NO: 260870 - DNA, 665 bp, Homo Sapiens
  misc_feature (45)..(56): n is a, c, g, or t
  misc_feature (562)..(562): n is a, c, g, or t
  misc_feature (575)..(575): n is a, c, g, or t
  misc_feature (588)..(588): n is a, c, g, or t
  misc_feature (608)..(608): n is a, c, g, or t
  misc_feature (643)..(643): n is a, c, g, or t
  misc_feature (655)..(655): n is a, c, g, or t
atttccacagcatacagggttcacatttatgctgtggaaataaannnnnnnnnnnncatttagctccatttcatttcttgcctcattcaaaataagatttctgacatcttgtgggtgtatgcaaaatctaccaagatcacgaacttagaagcaggtaagaaagaagaagataaaggtggggacataacgtatagccaggaattgggctgatataaaaatgaagaccataaaatcatctgtattacggatgggcacaaatttggcttcaagcttcttagcagccaacacaaataggggaatatgtttgaacacttacgtaattcagcatctataatagtgctgtgcaattgaaatataatgcaagccacttgggttattttaaatttccttgtagccacatttttttaaagaaaaaagtaggaagaagtggtgaagttaattttaatgataaattctgtttaacacagtgtatcaagaatattgtcattctaacatgtaatcagtataattaattattaatgaggtatttacttgttttttcgtattgagctctcaaaatccnatgtgtgtgtgtntttttgtttttcntttccccttggtttggaacnccccgaggcacatcttagtttgggccgggccaccnttttaaggtgcnccggtaggcc

SEQ ID NO: 260871 - DNA, 863 bp, Homo Sapiens
ttctttcttacaaatcacatatatttacattgtggatctgggatacacttatcacagtaggagctgctcaaatcaatctgaatgctacgcaatctgggaacctccccataactgtttgagccagcatttcagattatagataagctgtttccagctggactgggtttggaaagttcactctaaagaatgaagtcacctgttgtcactgtcctcctctccaggattccttttggggccaggtaccatcctgtggctccttaaggaggcttctctctttaattctccatgaggcatccagggtggtctgggctatgggaagaacccttcaacttgggagtagacaggtgctccaattcatagtgcccattctcagaggccttgtgtgtgagtttctccttcatgccttccttctggctcttcttgtgctccataatctgctggagctggtgcccagcatagtctggcttggtggtcaagcgggccagccggcacagctacaccaaggacatctgacaccatgtaggggcgcagccagcccaccaagggagtgcttccggggctgtagtgggtctgtttgtggtagaagagaagtccatctacctcaaaagggaaatccatagatagcacatcacacaggctttcgggagtgcaagggaagttctttagccccacaaatttaaaaggattaagcttggttttctctcccagtccttcttcttctggtaactttgaatgcatccagtagaatcggaaatcagtctggcaatcataaaaagggtgtccccgccagcacatcacatccagaacgtagtaggtctggtttacctcattgtaaatgcaatctagaatggtgtagtcttttg

SEQ ID NO: 260872 - DNA, 389 bp, Homo Sapiens
aaattgctcgttacagttctcttgtggggagggactttgtcagtcattttgcatcttaagctagactaaactttttgttgttgttttcctaaaaccataggtgcaagctttgccgctgggaagtcatattgaattaagcacttttgaaaatgtcactgtttgtgacacacaatgttctctacagaaaacttcttctatcttatgtcattttagcagtagatgtaactgcctgccaccaggtgcaatatgtcatttgcatcagccttttcagttaaggaaattaaaacttggcatgcattagttcatatgtatgaggttggctgtgtccccaaacagcaattgcttgtacaagatagaagtttgcttctcagctgggcatggtggctcat

SEQ ID NO: 260873 - DNA, 444 bp, Homo Sapiens
ggcggggtggaaagctaaggcctttgaagacctgggaccccgtagtttcgggagagggaagctgggccgggctgctgtgcctgggaggagggaaggaggaatgagaaagcggtgacggtccctgccccccctcgccaggtgactgtcccacccatttagttgaatgtagcggccagagaggcactcgcggcagcccgtacgggtgggacctctcggtgtccttcgggaaacaggaggagcaagttcgactccagcgagggaaaacggaggtgggagactgaaccatctccacatctagttgccccagcaatgggaaatccagaaaacatagaagatgcatatgttgctgttattcgtccaaagaatactgccagtctcaattctcgggaatacagagctaagtcatatgaaattttgttgcatgaagttcccattgaaggacag

SEQ ID NO: 260874 - DNA, 736 bp, Homo Sapiens
  misc_feature (656)..(675): n is a, c, g, or t
  misc_feature (677)..(679): n is a, c, g, or t
gggtttcatcggcgctttgccacttgtacccgagtttttgattctcaacatgtccgagactgctcctgccgctcccgctgccgcgcctctaaagagcgtagcggagtttctctggctgctctgaaaaaagcgttggctgccgccggctatgatgtggagaaaaacaacagccgtatcaaacttggtctcaagagcctggtgagcaagggcactctggtgcaaacgaaaggcaccggtgcttctggctcctttaaactcaacaagaaggcagcctccggggaagccaagcccaaggttaaaaaggcgggcggaaccaaacctaagaagccagttggggcagccaagaagcccaagaaggcggctggcggcgcaactccgaagaagagcgctaagaaaacaccgaagaaagcgaagaaagccgccgcggccactgtaaccaagaaagtggctaagagcccaaagaaggccaaggttgcgaagcccaagaaagctgccaaaagtgctgctaaggctgtgaacccaaggccgctaagcccaaggttgtcaagcctaagaagcggcgcccaagaagaaattagcgaacgcctacttctaaaacccaaaaggctcttttcagagccaccactgatctcaataaaagagctggataatttccnnnnnnnnnnnnnnnnnnnnannnaaaacatgtcggcccgcctcgggccctcaagaaagcttttctagaccatttccggtt

SEQ ID NO: 260875 - DNA, 866 bp, Homo Sapiens
  misc_feature (68)..(69): n is a, c, g, or t
cccaacacgaaatggtttagaaaaagactctctcgagggcccgaagggcgggcggccaatgttagttnntttttgatggtcccgctccaagaaggaaattattccagctctttttattgagatccagtgggggctcgaaaaagagccttttgggttttagaagtaggcgttcccctatttcttcttgggcgccgccttcttaggcttgacaacctggggcttagcggctttcggcttcacagccttagcagcacttttggcagctttcttgggcttcgcaaccttggccttctttgggctcttagccactttcttggttacagtggccgcggccggcttcttcgctttcttcggtgttttcttagcgctcttcttcggagttgcgccgccagccgccttcttgggcttcttggctgccccaactggcttcttaggtttggttccgcccgcctttttaaccttgggcttggcttccccggaggctgccttcttgttgagtttaaaggagccagaagcaccggtgcctttcgtttgcaccagagtgcccttgctcaccaggctcttgagaccaagtttgatacggctgttgtttttctccacatcatagccggcggcagccaacgcttttttcagagcagccagagaaactccgctacgctctttagaggcggccacagccttggtgatgagctctgacaccgggggaccggacgccttacgaggcgtacccccagcctttttggccgccttcttctttacaggggccttctccgcaggaggcgcggcagcgggagcggcaggagcagtctcggacatgttgagaatcaaaaactcgggtacaagtggcaaagcgccgatgaagcccc

SEQ ID NO: 260876 - DNA, 493 bp, Homo Sapiens
  misc_feature (195)..(195): n is a, c, g, or t
  misc_feature (343)..(343): n is a, c, g, or t
  misc_feature (348)..(348): n is a, c, g, or t
  misc_feature (426)..(426): n is a, c, g, or t
  misc_feature (448)..(448): n is a, c, g, or t
  misc_feature (468)..(468): n is a, c, g, or t
cttgtacccgagtttttgattctcaacatgtccgagactgctcctgccgctcccgctgccgcgcctcctgcggagaaaggcccctgtaaagaagaaggcggccaaaaaggctgggggtacgcctcgtaaggttccgggtcccccggtgtcagagctcatcaccaaggctgtggccgcctctaaagagcgtaggangtttctctggctgctctgaaaaaagcgttggctgccgccggttatggatgtgggagaaaaacaacagccgtattcaaacttgggtctcaagagcctgggtgaggcaaggggcattctgggtcaaaacggaaagggcaccggtgtttcntgggntccttttaaacttcaacaaggaaggggcagccttcccggggggaaggccaagccccaaggttttaaaaagggccgggncgggaacccaaacctttagganggccattttgggggggcagnccaaggaaggcccaaggagggccgg

SEQ ID NO: 260877 - DNA, 559 bp, Homo Sapiens
cggcacgagggaaaaaggagggcgagtggcgagcaggggcctcggccgccacccacacgccccgaagcgtgctcgtcccccgcgcggggctcccggccgccgccctcggccatcggctgctccccggtggcccaggcctcggactccgcggccggcccggcgcggcccagcgccctcagggatcatggcccaggtagcagtgtccaccctgcctgttgaagaagagtcctcctcagagaccaggatggtggtgacattcctcgtgtctgccctcgaatccatgtgtaaagaactggccaagtccaaggcagaagtggcctgcatcgcagtgtacgaaacagacgtgtttgtcgtcggaaccgagagaggatgcgcttttgttaatgccaggacggattttcagaaagattttgcaaaatactgtaggtgttttaattttatcctttgtattcccaatctcaaaaggatcgcaggcaagacttccacagtattttcttctaagctatcataagcattctcctagaaacgatcctaacacatcttcttggattcagcttac

SEQ ID NO: 260878 - DNA, 585 bp, Homo Sapiens
agctgtaaccaatccagctgtttctgcacctcactttcattttctgtgcaacactttctttttgctgtccataaatgttatctgaccacgtggcagccccaagtcactcagaacctattctggttctagggactgcctgattctagaatcattctttgctcaactaaactgcgttaaatttaatttgtctaaagcttttaacacctgtgatggaacagcaatcttcctgtgcacttgttgaccaaatcaagggggtaggccatgtagtggggctggcagaggggcaatgaaaagagcctgggtccatgacaaaaccatcagctccaacgcatcctgaaaccaccatatcttggcctttctgttcaggaaacaacaaatgccctgcacagtttaaatcttttagctggactctgttactcaacaaagatttgctacctttaaactctaagaaaatattaagcaatatatcctatgcaaagcgtgtttctttctaagtacagtagaaatggcctcctaaaggggagcatcctaaagtggatttaccttttctccttggaacagcgtgcttctattctttacagaggt

SEQ ID NO: 260879 - DNA, 721 bp, Homo Sapiens
taagaaactcaaagggcagctggtggagagacacaagattggcaatctacacaatcttcgatctgaagatgatgtcttggaaaacgggacagacatgcatgtaatggacctacaaagggatgccaacagacagatcagcgacctcaaatttaaacttgcaaaatctgagcaagagataactgcattagaacaaaatgtaataaggttagagagtcaagtatcacgttacaaatcagcggctgaaaatgcagaaaaaatagaagatgaacttaaggcagaaaaacggaaactccaaagagagctccgctctgcattggataaaacagaagagctcgaggtgagcaacggccacttagtgaagcgtctggaaaaaatgaaagcaaatcggagtgcactcttgtcccagcagtaaattccagctctgatcaggcaactggttggtgactggagagcattgtttcataggcttttctctgtcctgtctgggagcgctgcttcttcccctgccttccgagagacgaagaccgtggcgagcttggcgcttaggggctcccgtgccatggctcaccccagggagccccagcagccaccaggtgcctctgtctgcagacccctggcccgggctggcgccgacgctcagaacctgcaggtacttcataagcacacaggggcctcgagggagctctgtgtctgaccgcacagcagcctctgaatgccgctg

SEQ ID NO: 260880 - DNA, 490 bp, Homo Sapiens
catcattgctttcttgctgtgagatttttgtttcggtactctttgggagagaattcctaagaaggtttttagaataaaattgtcctcaaccagattgactaattacacattataactacaacttgaataacatttaaagagttggttatttctgtttgataggttggtgctgttatatgtcaaggctttttaaatcggttttaagaaataagcattattttggtggaggtagaaatttcacaacattcataagttctaaacatctagaaatggttggaggaaacattttcgttttgaagatagtttcattaagtaatccctgctgtgctcctttgcttacagaaaaaaatgttaaagataactcaaaataggatagttggtgtaattataattctccttacttcagctttctcttcatcctttttattctttaagcttgggggaaaatgtttggatgttctcgtatcttaaaactggaggagagaggctg

SEQ ID NO: 260881 - DNA, 429 bp, Homo Sapiens
ggtgcccgcgataggcttctatggttttgtctttgctgttcctggcagcgctatattgggcaggcttctgtggtctccacatgcctgtgtgcagagtcccccaggccctgggttctggggcccatactgaggagtggggatggccaagccttggctgttgagtaggcagtgcccagttgtgctgtatgggatgctgtttttcacttaagaaatctttccctacctggggggtacaaaggcattatcctgtattcccaggttgtaactttctgcctttgacattcaaccttgagtccacctgtaagtgtaactgcggcagaagggaggggtttgctgtcatccttgatagcctgtgatgagcagagcccctttgccgaccgcgatgcacatgtaatatgagcaagaaataaatttttgatgtgcgaaaaa

SEQ ID NO: 260882 - DNA, 545 bp, Homo Sapiens
  misc_feature (42)..(59): n is a, c, g, or t
  misc_feature (67)..(92): n is a, c, g, or t
  misc_feature (97)..(212): n is a, c, g, or t
  misc_feature (527)..(527): n is a, c, g, or t
gggggcccggccccccaaaaaaagtttttaaaaaattttttnnnnnnnnnnnnnnnnnncgaaaaannnnnnnnnnnnnnnnnnnnnnnnnnttttnnnnnnnnnnnnnnnnnnnnnnnnnnnnnnnnnnnnnnnnnnnnnnnnnnnnnnnnnnnnnnnnnnnnnnnnnnnnnnnnnnnnnnnnnnnnnnnnnnnnnnnnnnnnnnnnnnnntcagaaaatttacccattttattgatgcattgcaattgctctacattttaccatattatgtagaaaatactgaaaatacaagctactttgtaaaaccaaagacaaacattgaatccaaagataaactatgttttacacaatggacccttttcccatagttagtattaaattttaaatatctatttcttttgttaaaatgattattttacatactccctaagtacatctgcattacaaacatagctcagtaattctcagaaactatctgtttctagaggcttgttgtaaaagaaagcgcacaaccaaaaaaagggngggaagccaaaaaaggtt

SEQ ID NO: 260883 - DNA, 720 bp, Homo Sapiens
  misc_feature (331)..(341): n is a, c, g, or t
aggaggggaacacaaagccccgcccctcaggcctccctaaccttctcttaagctcacgatggaaaaggtcacctgcaccatcatctttggaaatgagcacgtcgatgcccgaggaaagaggcaggtagtcaacgttttggtttcacaagaactacagacactccagagttggaagggccctgcggaaccgctgcacagcccccaccgcaatctgggcagggctgctctcgacagtctgccatctggcccgtgctggaacagtcccatgtccgctggctattcttccgtttggttcagacacgctaccacccagttttctgcaaacagcttnnnnnnnnnnntctaaggaagttggtttggtctactgacctgggagcctgaaaaccttgtttctagttcagttctgaagaaagcctccaagaagtgttctattttcagtgatttattcaattctacagtttcccaggacagatggccatccggtcattctgttttcattttgaagagctcactaccgtacaatttccagctgtgctgaaccttcaaacgcacttgttgcgatatcctctagaactacccagaatgatgtctataccctttgcaagcaggtgacaagccgaggcttactaactctgggacagggctgtacaaagtaaagcatgggttttctgtctggaagctgaagatgtcaagttgacactaagcagtgatgaactcctg

SEQ ID NO: 260884 - DNA, 1612 bp, Homo Sapiens
  misc_feature (1309)..(1309): n is a, c, g, or t
gggtccttgcgcgccgcggctcagggaggagcaccgactgcgccgcaccctgagagatggttggtgccatgtggaaggtgattgtttcgctggtcctgttgatgcctggcccctgtgatgggctgtttcgctccctatacagaagtgtttccatgccacctaagggatattcttgacagccattatttctcaccccttacattgaagctgggaagatccaaaaaggaccaccacttgagtttggtcggccctttcccaggactgaacatgaagagttatgccggcttcctcaccgtgaataagacttacaacagcaacctcttcttctggttcttcccagctcagatacagccagaagatgccccagtagttctctggctacagggtgggccgggaggttcatccatgtttggactctttgtggaacatggccttatgttgtcacaagtaacatgaccttgcgtgacagagacttcccctggaccacaacgctctccatgctttacattgacaatccatgggcacaggcttcagttttactgatgatacccacggatatggcagtcaatgaggacgatgtaggcacgggatttatacagtgcactaattcagtttttccagatatttcctgaatataaaaataatgacttttatgtcactggggagtcttatgcagggaaatatgtgccagccattgcacacctcatccattccctcaaccctgtgagagaggtgaagatcaacctgaacggaattgctattggagatggatattctgatcccgaatcaattatagggggctatgcagaattcctgtaccaaattggcttgttggatgagaagcaaaaaaagtacttccagaagcagtgccatgaatgcatagaacacatcaggaagcagaactggtttgaggcctttgaaatactggataaactactagatggcgacttaacaagtgatccttcttacttccagaatgttacaggatgtagtaattactataactttttgcggtgcacggaacctgaggatcagctttactatgtgaaatttttgtcactcccagaggtgagacaagccatccacgtggggaatcagacttttaatgatggaactatagttgaaaagtacttgcgagaagatacagtacagtcagttaagccatggttaactgaaatcatgaataattataaggttctgatctacaatggccaactggacatcatcgtggcagctgccctgacagagcgctccttgatgggcatggactggaaaggatcccaggaatacaagaaggcagaaaaaaaangtttggaagatctttaaatctgacagtgaagtggctggttacatccggcaagcgggtgacttccatcaggtaattattcgaggtgggaggacatattttaccctatgaccagcctctgagagcttttgacatgattaatcgattcatttatggaaaaggatgggatccttatgttggataaactaccttcccaaaagagaacaatcagaggttttcattgctgaaaagaaaatcgtaaaaacagaaaatgtcataggaataaaaaaattatcttttcatatctgcaagatttttttcatcaat

SEQ ID NO: 260885 - DNA, 682 bp, Homo Sapiens
  misc_feature (73)..(81): n is a, c, g, or t
agtgaactgagttttcgtagttaagacctcaaatgaggggagtcagcagtgatcatgggggaaatgtttacannnnnnnnncttcagaagtaacgctttctgatgattttatctgatatttaaaacagggagctatggtgcactctagtttatacttgcgctctgaaatgtgtaaacatagggtgcctacctatttcacctgacccatactcgtttctgattcagaatcagtgtgggctcctgcagtgggcgcgggtcacggctgactccaacttccaatacaacagccatcactagcacagtgtttttttgtttaaccaacgtagttgtattagtagttctataaagagaactgcttttaacattagggactgggagcagtccatgggataaaaaggaaagtgttttctcacgagaaaacatgtcaggaaaaataaagaacactttctacctctgtttccaggatttttggaaacacttatttttaaaccaaatttttaatttctgtgtccaaaataagttttaaggacatctgttcttccatacgaaataggttaggctgcctatttctcactgagctcatggaatggttctgcttatgatactctgcacgctgccttttagtgagtgaggagtttggggttgcctagcaacttgctaacttgtaaaaagtcatctttcc

SEQ ID NO: 260886 - DNA, 649 bp, Homo Sapiens
tccaaagctgcgtgaacagaatgctaaaggataggaagtgtgagaagaatgctttgaaagaaaccttaaaaacaaaacaactgactattcagagaataccaggtcttatgtggaatcatctagcacgtgcaaagttccccatcaagtggacggcccccgaggcagccctgtacgggaggttcacaatcaagtctgacgtgtggtcttttggaatcttactcacagagctggtcaccaaaggaagagtgccatacccaggcatgaacaaccgggaggtgctggagcaggtggagcgaggctacaggatgccctgcccgcaggactgccccatctctctgcatgagctcatgatccactgctggaaaaaggaccctgaagaacgccccacttttgagtacttgcagagcttcctggaagactactttaccgcgacagagccccagtaccaacctggtgaaaacctgtaaggcccgggtctgcggagagaggccttgtcccagaggctgccccacccctccccattagctttcaattccgtagccagctgctccccagcagcggaaccgcccaggatcagattgcatgtgactctgaagctgacgaacttccatggccctcattaatgacacttgtccccaaatccgaacct

SEQ ID NO: 260887 - DNA, 973 bp, Homo Sapiens
  misc_feature (895)..(906): n is a, c, g, or t
atcttgtggacatggcagcacaggtggctgcaggaatggcttacatcgagcgcatgaattatatccatagagatctgcgatcagcaaacattctagtggggaatggactcatatgcaagattgctgacttcggattggcccgattgatagaagacaatgagtacacagcaagacaaggtgcaaagttccccatcaagtggacggcccccgaggcagccctgtacgggaggttcacaatcaagtctgacgtgtggtcttttggaatcttactcacagagctggtcaccaaaggaagagtgccatacccaggcatgaacaaccgggaggtgctggagcaggtggagcgaggctacaggatgccctgcccgcaggactgccccatctctctgcatgagctcatgatccactgctggaaaaaggaccctgaagaacgccccacttttgagtacttgcagagcttcctggaagactactttaccgcgacagagccccagtaccaacctggtgaaaacctgtaaggcccgggtctgcggagagaggccttgtcccagaggctgccccacccctccccattagctttcaattccgtagcccagctgctccccagcaagcggaaccgcccaggatcagattgcatgtgactctgaagctgacgaacttccatggccctcattaatgacacttgtccccaaatccgaacctcctctgtgaagcattcgagacagaaccttgttatttctcagactttggaaaatgcattgtatcgatgttatgtaaaaggccaaacctctgttcagtgtaaatagttactccagtgccaacaatcctagtgctttccttttttaaaaatgcaaatcctatgtgattttaactctgtcttcacctgattcaactnnnnnnnnnnnngtattattttccaaaagtggcctctttgtctaaaacaataaaattttttttcatgttttaacaaaaa

SEQ ID NO: 260888 - DNA, 1114 bp, Homo Sapiens
caagagagtagagagggacgccttaaagagcagagccacagcctccaatgcagagaaagtgccaggcatcaaccccagtttcgtgttcctgcagctctaccattcccccttctttggcgacgagtcaaacaagccaatcctgctgcccaatgagtcacagtcctttgagcggtcggtgcagctcctcgaccagatcccatcatacgacacccacaagatcgccgtcctgtatgttggagaaggccagagcaacagcgagctcgccatcctgtccaatgagcatggctcctacaggtacacggagttcctgacgggcctgggccggctcatcgagctgaaggactgccagccggacaaggtgtacctgggaggcctggacgtgtgtggtgaggacggccagttcacctactgctggcacgatgacatcatgcaagccgtcttccacatcgccaccctgatgcccaccaaggacgtggacaagcaccgctgcgacaagaagcgccacctgggcaacgactttgtgtccattgtctacaatgactccggtgaggacttcaagcttggcaccatcaagggccagttcaactttgtccacgtgatcgtcaccccgctggactacgagtgcaacctggtgtccctgcagtgcaggaaagacatggagggccttgtggacaccagcgtggccaagatcgtgtctgaccgcaacctgcccttcgtggcccgccagatggccctgcacgcaaatatggcctcacaggtgcatcatagccgctccaaccccaccgatatctacccctccaagtggattgccccgctccgccacatcaaagccgctcgccagcggaatctgcgaggaagccgcctactccaaccccagcctacctctggtgcaccctccgtcccatagcaaagcccctgcacagactccagccgagcccacacctggctatgaggtgggccagcggaagcgcctcatctcctcggtggaggacttcaccgagtttgtgtgaggccggggccctccctcctgcactggccttggacggtattgcctgtcagtgaaataaataaagtcctgaccccagtgcacagacatagaggcacagattgcaaa

SEQ ID NO: 260889 - DNA, 502 bp, Homo Sapiens
  misc_feature (32)..(32): n is a, c, g, or t
tcggcacaggagggacgccttaaagagcagancacagcctccaatgcagagaaagtgccaggcatcaaccccagtttcgtgttcctgcagctctaccattcccccttctttggcgacgagtcaaacaagccaatcctgctgcccaatgagtcacagtcctttgagcggtcggtgcagctcctcgaccagatcccatcatacgacacccacaagatcgccgtcctgtatgttggagaaggccagagcaacagcgaggctcgccatcctgtccaatgagcatggctcctacaggtacacggagttcctgacgggcctgggcggcttcatcgagctgaaaggactgccagccggacaaggtgttacctggggaggcctgggacgtgttgtgggtgaggacgggccaatttcaacttacttgcttgggcacgattgacattcatggcaagccgtctttccacattcgccaaccctgatggcccaaccaagggacgttgggacaagg

SEQ ID NO: 260890 - DNA, 510 bp, Homo Sapiens
cggcacgaggttttaaagagtagtaacggaccttaagacacaaaacaggaattgcatgaaaagggctcagagttgaagaaatataaagagtacagtgttcagtaactttaatacagaaaatctatttgatatttattaaacttagtttctccaactatggtttggcattgtacaaagcatcttaatgacacagtagagttaaaaagatctttacaaattgaaatgtgatacccttgtctccaaatattttaattgccataaatttgtttaaaaatacacattaaacgcatgtttgacactctaaactttctatactctcaataccacaaaatacatataatatactatacagatgtggaaaaatctagttagtatataatactttgctcaccattaacagctttatcgtgtgaaatgcacatactgacttagaaatcctagcttttgagccccaaagtacctctgaaattgtaatgtattgcaacaaataaaaatcacagtatataattg

SEQ ID NO: 260891 - DNA, 713 bp, Homo Sapiens
ggcggaagtgctctcggcggaagtgatcgctgtgtgaatcgtgggtgggatggccgcgggccgcctctttctaagtcggcttcgagcacccttcagttccatggccaagagcccactcgagggcgtttcctcctccagaggcctgcacgcggggcgcgggccccgaaggctctccatcgaaggcaacattggcctgcactgcccaaagtcttggaaacttgctggatatgatgtaccgggagccagcacgatggtcctacacattccagacattttcctttttgagccgcctgaaagtacagctggagcccttccctgagaaactcttacaggccaggaagccagtacagatctttgagaggtctgtgtacagtgacaggctccactttgaggctctgatgaacattccagtgctggtgttggatgtcaatgatgatttttctgaggaagtaaccaaacaagaagacctcatgagagaggtaaacacctttgtaaagaatctgtaaccaataccatgatgttcaggctgtgatctgggctccctgactttctgaagctagaaaaatgttgtgtctcccaaccacctttccatccccagcccctctcatccctggagcactctgcccgctcaagagctggtttgttaattattgttagactttgccattgttttcttttgtacctgaagcattttgaaaataaagtttacttaa

SEQ ID NO: 260892 - DNA, 850 bp, Homo Sapiens
  misc_feature (245)..(245): n is a, c, g, or t
gggagtgctctcggcggaagtgatcgctgtgtgaatcgtgggtgggatggccgcgggccgcctctttctaagtcggcttcgagcacccttcagttccatggccaagagcccactcgagggcgtttcctcctccagaggcctgcacgcggggcgcgggccccgaaggctctccatcgaaggcaacattgctgtgggaaagtccacgtttgtgaagttactcacgaaaacttacccagaatggcacngtagctacagaacctgtagcaacatggcagaatatccaggctgctggcacccaaaaagcctgcactgcccaaagtcttggaaacttgctggatatgatgtaccgggagccagcacgatggtcctacacattccagacattttcctttttgagccgcctgaaagtacagctggagcccttccctgagaaactcttacaggccaggaagccagtacagatctttgagaggtctgtgtacagtgacaggtatatctttgcaaagaatctttttgaaaatggttccctcagtgacatcgagtggcatatctatcaggactggcattcttttctcctgtgggagtttgccagccggatcacattacatggcttcatctacctccaggcttctccccaggtttgttttgaagagactgtaccagagggccaggggaggaggagaaaggaattgagctggcctatctagagcagctggatggccacacgaagcctggtttatttccaagacacgaagctccactttgaaggtctgatgaccttctcagtgctggcgctcggaagcccatgaatgattttcctgaggaaggacccacccagaagaaccccctc

SEQ ID NO: 260893 - DNA, 980 bp, Homo Sapiens
ggggaagtgatcgctgtgtgaatcgtgggtgggatggccgcgggccgcctctttctaagtcggcttcgagcacccttcagttccatggccaagagcccactcgagggcgtttcctcctccagaggcctgcacgcggggcgcgggccccgaaggctctccatcgaaggcaacattggcctgcactgcccaaagtcttggaaacttgctggatatgatgtaccgggagccagcacgatggtcctacacattccagacattttcctttttgagccgcctgaaagtacagctggagcccttccctgagaaactcttacaggccaggaagccagtacagatctttgagaggtctgtgtacagtgacaggtatatctttgcaaagaatctttttgaaaatggttccctcagtgacatcgagtggcatatctatcaggactggcattcttttctcctgtgggagtttgccagccggatcacattacatggcttcatctacctccaggcttctccccaggtttgtttgaagagactgtaccagagggccagggaggaggagaaaggaattgagctggcctatctagagcagctgcatggccaaacacgaagcctggcttattcacaagacaacgaagctccactttgaggctctgatgaacattccagtgctggtgttggatgtcaatgatgatttttctgaggaagtaaccaaacaagaagacctcatgagagaggtaaacacctttgtaaagaatctgtaaccaataccatgaagttcaggctgtgatctgggctccctgactttctgaagctagaaaaatgttgtgtctcccaaccacctttccatccccagcccctctcatccctggagcactctgccgctcaagacctggtttgttaattattgttagactttgccattgttttcttttgtacctgaagcattttgaaaataaagtttacttaagttatgcttgtttttctaa

SEQ ID NO: 260894 - DNA, 983 bp, Homo Sapiens
  misc_feature (24)..(24): n is a, c, g, or t
  misc_feature (33)..(33): n is a, c, g, or t
  misc_feature (42)..(42): n is a, c, g, or t
agcatggtgtgcaaaacacagctnatcctgatntcaatgganacgaggttcacggacacatgactgatcaaaagaagtggggagatggaaaactgtgagaaaggaaactccaaaaaacaccatgttccaaggctgccccatgttttacacgtgcagatctttccttccttgtaggagagcagtgggctggctttggtggcgtttgtactggaatccaataagcacatctgagggctggtcacccctttggttatgcagttcctctcctggatacattcagagatacttcttcacgacattcaggtgatgcgctcttgaaggtcctccttccaggaggattttgccaggtgggatgggctgactttgaaccccaaaccctcaagtttttccaccgccatccagatgtaggccctcccagttgactatggctcttttcccgagtggctctcatcttgtttgtggaagagttctctgggccctggagaagggaaggggctgggctgacacagcccatcgtgaggagggtcagcatgaggaatggattttgcaagagaggcggaaagtgtttggttttcctcgaagcatgggacatcatcgatcatggtattcaaaatgtcttttgcactgtacaagtttatggaaaaaagatcatatgatgaaaagtctcaaagcaaactttgtattaaatacaaaagttcttttatgaaaaacgctgagacccacaaagtgcttagcagttaagaggctgacatccaatttaaataagctcttattaagtgggattactagtgctgttgtcttggggaaaaaataaccaccttttctcacctgtgatactgtagggtttcagaatggctttctgtttgggaaagcaagacttgctgttaaaaggctacagtatatattgtgactacaggaagacaatttggtttaaaatcacactgagtacatctcaatatacacatcataaggttcattcggat

SEQ ID NO: 260895 - DNA, 1117 bp, Homo Sapiens
tcaagtgccgacacctccctcatctctcttatagtggaaggatggtcagcattaggctgaatggggactgagaaggataggaagggatagaaattgccatgtgtataaagctttattctttagcccttaaccctaaggctcagggaaataccctatgttattgtgctccctggattcctgcaactcattttccttccactctggagcagggtgaggggaatgttatgggtaacagacatgcaggcatggctctacccatttctttgcacaagtatggggcccatgtggtagtccccatacccctccagttcctatatttttgtcttcttcctttcccctctttgccattcctaccttgcatttttcctgtcagtgccttagccaaggcaaggagataaggatgctcttcttgctttttatatctgcacattcatacctctccaaagaccagcttttccccagccagggccctcagccttccctgctgccccagtgattgattgagagagctgttggggtttctctgccaatgacccctgggagagggactttggtagggtcatgataaagtggcgggggtctggtcctgctcagggttttcatccttcctcctctccctcctctgtgactgtggatatggttataaggtggttgcacctgggagccctgacaactggctgcacaaattccaaaagtaaaggtgtcagtccctgtggccttccttggggcttctctgaccacatgtgcccaacttcaataagagaaccaagggaccctcattttctgaggtgcttggctctgattcagggctttgcaaggggttagaagctgactgtaaaaatgggaagaggcaacggaagacatttatttctcctttggattttggggagaaccaagccctggtagggaagaggtaagggggatgattcacctccatatttcctaagcaggttgtatagggaccggtggcaggaggaaggctgttttcacaaatgacttgtaatgtcgtgattaaaaaaattcctatattcttctgcaaatcaaacgttctttcccaacccaatccagccttggttttattttaaattaaatattaaaattacacatttatattgaa

SEQ ID NO: 260896 - DNA, 992 bp, Homo Sapiens
  misc_feature (822)..(822): n is a, c, g, or t
  misc_feature (841)..(841): n is a, c, g, or t
  misc_feature (851)..(851): n is a, c, g, or t
gggccagccggggtcggtggccgcatggcttcggtctcctctgcgaccttctcgggccacggggctcggtccctactgcagttcctgcggctggtagggcagctcaagagagtcccacgaactggctgggtatacagaaatgtccagaggccggagagcgtttcagatcacatgtaccggatggcagttatggctatggtgatcaaagatgaccgtcttaacaaagaccggaagctatgaagcagataacccagctcctaccagaggacctcagaaaggagctctatgaactttgggaagagtacgagacccaatctagtgcagaagccaaatttgtgaagcagctagaccaatgtgaaatgattcttcaagcatctgaatatgaagaccttgaacacaaacctgggagactgcaagacttctatgattccacagcaggaaaattcaatcaccctgagatagtcccagcttgtttctgaacttgaggcagaaagaagcactaacatagctgcagctgccagtgagccacactcctgagacactctctaaattgctgcactccctgtaacaaacattattttccatttcattgaattgggttttgccatggttgggctggtgatttccctagatgggagcctgtttggttttcaattgcctgaacctcagcaaaaaatggggatacaacttgggcacttaaaagaagcccccgaaaacggaagcgggccatggaaagtggccattggatggacccctggaagggtggcagtgccccggtttttgaacttaaataaaattaaatattaaaaccgcccttcgcgnggggcgcaaggaggaaccnagaaggattncctcttgtgggggcgcgccctcgggccccttaaaagaagatttttcttaaaaacaaatttcttttttgtgcgcgcgcgcgcccccccttaagggataggggggaacatgtgggccataaaacgtgtgttctctctagagat

SEQ ID NO: 260897 - DNA, 1009 bp, Homo Sapiens
  misc_feature (68)..(128): n is a, c, g, or t
tacaggcagcggctggataccaggtccggaattccgggatatcgtcgacccacgcgtcgaaagagatnnnnnnnnnnnnnnnnnnnnnnnnnnnnnnnnnnnnnnnnnnnnnnnnnnnnnnnnnnnnngagcttcgccgcggcctgctccgcccagccggggtcggtggccgcatggcttcggtctcctctgcgaccttctcgggccacggggctcggtccctactgcagttcctgcggctggtagggcagctcaagagagtcccacgaactggctgggtatacagaaatgtccagaggccggagagcgtttcagatcacatgtaccggatggcagttatggctatggtgatcaaagatgaccgtcttaacaaagaccgatgtgtacgcctagccctggttcatgatatggcagaatgcatcgttggggacatagcaccagcagataacatccccaaagaagaaaaacataggcgagaagaggaagctatgaagcagataacccagctcctaccagaggacctcagaaaggagctctatgaactttgggaagagtacgagacccaatctagtgcagaagccaaatttgtgaagcagctagaccaatgtgaaatgatctcttcaagcatctgaatatgaagaccttgaacgacaaaacctgggaagactgcaaagacttctatgattaccacagcaggaaaattcacatcaccctgaagatagtccagctgtgttcctgaacttcgaggcagaaagaaacactaacatagctgcagctgccagtgagccacactcctgagacactctctaaaatgctgcactcctgtaaccaacattattttttccatttcattggatttggggttttgccaatggtgggcctggttgaattcccctagaaggggaacccgggttggtttttcaattgggctggaacttccaccaagaaaattggggataccaactttggggggcccttaaaagagaaggcctcacggagaacgagggaa

SEQ ID NO: 260898 - DNA, 498 bp, Homo Sapiens
attccttgtttttgctagtatctcatttagagttgagatggaccttaaaactcatctgttttaactcactttttaatagatgagttaaacttaatttacttaaggatgtacagttagagcctggaacttcaaccattattcactccccatgccctgtttccccccacttcgaaattaaatgcggttagcatcatatagttcattttccccctccatgctgctgtgtgattcttgactttgggtatgagtttttcatccttcatgcagggttctgtcagttcatggtatagtgattcagtgttaaaatggtggtgtcctcaagctgtgctgtgcacattccaaccttgtcaaattaataatcataagcaagcaagaaaaagaggtaataacatacccatttctttaaaaaaataagcttataatattttttcatgtgctatttttactgagcaaattgtatgtctcacatgttaacccaataaatatcttgacaatttt

SEQ ID NO: 260899 - DNA, 489 bp, Homo Sapiens
cttttgtaatcatggtaataacagagtatggatatgtatcattcttgtgcaatttacaatgtattggactgattttctttctgactttgggcttggggtaacatatagcttttctatttagctataagaattatatttttacttcatttggcttttgacaggtcttttttaggagacctttccctcttgtcataccctaatctatttttgaggtaaatggactatttcttagtatctcagacgtaggaaaaaattgtttctcccagaagttattggactggtctagtctcattgagtatattaaacttgaatctagcctgaacataaagttttttgattgctaacttttaaatatgtattcataaagtctagaggtgagggtggggggaaaatggatatttatttgtcatgtgccaataagtttggtcagtacaattatctttatctcatttaatttttacaactaccctgaaaaataattcttacagg

SEQ ID NO: 260900 - DNA, 805 bp, Homo Sapiens
  misc_feature (607)..(757): n is a, c, g, or t
aacataccctttagtatgtaaaaaaataagcttcaaatgcgtgggttaaagttaactatcaatcccagtttaagaatgatatttctgtaagaaaactgctttattttccaagttgtagtatttaacataggctgagtcacaaataagtttttaattgtatcttaatgcagttgtctctgcctttcaagtcactttgattgaaacattttaagcagaacaaatatagccaataatttaaaataatcaccccaaaaccatttctcaaacctgctaaaactttgagcatgtgaataattttctcctcttcacattcttatgtgggaaggaagtgaatttgaaatattaaaatctgccctttggaataggctactttggccgtttataacttatttctactcggggaggaaggtacattcccaatagctttccaattgggatatcctgtgatatgattggcaggctgtccgagtagttacacttaataaaatttgggttcgaaagcagattcctggaagttcaaaaataattaaaacagccccggataggttagaaagtgaacttaaatcattctcagaattagaaaataagaagttattttttatcttcnnnnnnnnnnnnnnnnnnnnnnnnnnnnnnnnnnnnnnnnnnnnnnnnnnnnnnnnnnnnnnnnnnnnnnnnnnnnnnnnnnnnnnnnnnnnnnnnnnnnnnnnnnnnnnnnnnnnnnnnnnnnnnnnnnnnnnnnnnnnnnnnnnnnnnnaagatcacgccattgcactccagcctggagacagtgagacgctgtctc

SEQ ID NO: 260901 - DNA, 1125 bp, Homo Sapiens
  misc_feature (107)..(107): n is a, c, g, or t
  misc_feature (300)..(300): n is a, c, g, or t
ggcacgagctgacctctgaagagctgagtactcaggccactccaatcaccctacaagatgccaaggaggtcccaggaagtccagctccttaaactgacgctagcaantaaacctgggcaagtgaggcaagagaaatgaggaagaatccatctgtgaggtgacaggcaaggatgaaagacaaagaaggaaaagagtatcaaaggcagaaaggagatcatttagttgggtctgaaaggaaaagtctttgctatccgacatgtactgctagtacctgtaagcattttaggtcccagaatgganaaaaaaatcagctattggtaatataataatgtcctttccctggagtcagtttttttaaaaagttaactcttagtttttacttgtttaattctaaaagagaagggagctgaggccattccctgtaggagtaaagataaaaggataggaaaagattcaaagctctaatagagtcacagctttcccaggtataaaacctaaaattaagaagtacaataagcagaggtggaaaatgatctagttcctgatagctacccacagagcaagtgatttataaatttgaaatccaaactactttcttaatatcactttggtctccatttttcccaggacaggaaatatgtccccccctaactttcttgcttcaaaaattaaaatccagcatcccaagatcattctacaagtaattttgcacagacatctcctcaccccagtgcctgtctggagctcacccaaggtcaccaaacaacttgggttgtgaaccaactgcctttaaccttctgggggagggggattagctagactaggagaccagaagtgaatgggaaagggtgaggacttcacaatgttggcctgtcagagcttgattagaagccaagacagtggcagcaaaggaagacttggcccaggaaaaacctgtgggttgtgctaatttctgtccagaaaatagggtggacagaagcttgtggggtgcatggaggaattgggacctggttatgttgttattctcggactgtgaattttggtgatgtaaaacagaatattctgtaaacctaatgtctgtataaataatgagcgttaacacagtaaaatattcaataagaagtc

SEQ ID NO: 260902 - DNA, 435 bp, Homo Sapiens
ccacaaaacatcctccctcacccccaatgccctgtcctggaaccctcaccccaaggtcaccccaaacaaccttggttgtgaacccaactgcccttaacccttcctgggggagggggattagcctagacctaggagacccagaagtgaatgggaaagggtgaggacttcacaatgttggcctgtcagagcttgattagaagccaagacagtggcagcaaaggaagacttggccccaggaaaaacctgtgggttgtgctaatttctgtccagaaaatagggtggacagaagcttgtggggtgcatggaggaattgggccctggttatgttgttattctcggactgtgaattttggtgatgtaaaacagaatattctgtaaacctaatgtctgtataaataatgagcgttaacacagtaaaatattcaataagaagtc

SEQ ID NO: 260903 - DNA, 669 bp, Homo Sapiens
taatgcttgagctggggtcaagcgggcagaggggtcccagtgaagacaccttttcaagaactctataaacaagtagtcatcacaccctttcagtgctgtcccccagtctttgctgcctgggggaccccgctttttacccctacgtgagcgaccccccacaagcacaaccctcccatctgcctgggtagtcacagagcagtagcggggtatgcccttggaattaataaagtacttggcacgtttggattgctccagaagttttggtggtggcatccctagaagctccatcatgcaggccaactggtctccttcatcctctccagggaagagaggctgtcctgttaaaagttctgcaaggatgcagccaaaactccatatgtcaattggtgtgctgtagcggcttcctaagatgatttctggagctctgtagaaccgagactggatatatgtgtagagcttctggtactcgaaacagctggacccaaagtcaatgaccttggttgaactgcgcccgtggtgtttcaggagaatgttttctggcttcagatcgcagtgaataatcttatttttgtggagggcatccaaagattgcaagatggactgggcaaacttgcgtaccaactggacgctaaaaccctgaaacttattttttttaatcagctcataaag

SEQ ID NO: 260904 - DNA, 928 bp, Homo Sapiens
caacacccctgccttacgcctaatgactttccaacattcactgcattcataagactttgctcttgtgagaattcgctcatgccccaaaagcaaagatctttgattgaagggtttgccatcctcatcatatctgccctgcttccaccttgtttgcgcattctgatcttgaataaggttaaggttttgaaggaagcccctgctgtattcatcaccactagtagggaaagtaagcctgcaactgtccacaaattctttacacttatgtaacttttctgaaagtttctcagctgattcctgcattaccactgatatcttatatgactctaaatcttcagaaaatttctgttttggagttagctttttcatcttgtgtctggcttcagaacctgggcaagcactaccggaagccttcctattcccagttctcggtagatccaggatccactgctcgtcccagttctccagctgacagatcatctcaggtttgggaaactgaaatcctactcatggggaagtaaatgggatgtggccgttagtgagttacagagacatggcccggggctcagtggcaagcagagataaggacaataatcaaaagcggtggtgagaatagagattggcacaatctttgtaaatatctggcagtctttattgaaagcctgaacaatgttcatacctttggctgtggtcatttcgctcttagaaatatagcctaaagtacaattgcaaccaagatgaatgtgccagagacgttcagcacagtggtattgcagcatcaaactggaaataaactgaatatcaaaagggaacaattaaatcaagcgtagcttgaagaagctacatgtctaaggtgtatatgaaacataagtgaatttcttgtcagatcctcaaattatcttattatatatttatgagtattccaaaatcc

SEQ ID NO: 260905 - DNA, 677 bp, Homo Sapiens
ggacaacatgacagagaaggaattctggacacgttttttccagtcccattattttcacagggatcggctgaatacagggtcaaaggatctctttgcagaatgtgccaaaatagatgaaaaaggcctaaaaacaatggtttcattaggagtgaaaaacccactactagatttaacagctttggaagataaaccattagatgagggctatggcatttcctctgtgccatctgcttccaattctaaatccataaaagagaatagtaatgctgccatcatcaagagatttaaccatcacagtgccatggtcctggcagctggactcagaaaacaagaagcacaaaatgaacaaactagtgagcccagcaacatggatggaaattccggagatgcagactgctttcagccagcagtcaaaagggcgaaattacaagagtccattgaatatgaagacttggggaaaaataattctgtaaaaacgattgcactaaacctcaagaagtcagataggtattatcatggtccaactccaatccagtcactacagtatgcaacaagtcaggacattattaattcttttcaaagtattaggacaagaaatggaagattatacacccaagttaactcaggttctcttcaagtagtgctgccagtagtaccatcacaggcactgttcacct

SEQ ID NO: 260906 - DNA, 455 bp, Homo Sapiens
  misc_feature (48)..(48): n is a, c, g, or t
cccccgggaacataggtagggacctatggtaagtaccttattattacnccttatataacccagaattaaaaagaaccccccctacagttgaacaacattaatcctcccacattatatagtaaaatataaaattatttggtatttggcaactgttaactttgtggaaaagtacaaaatgtgaaagacttggaaaacttcaaagatagtaattttgggattctcaaagaactcacaagtagccagttcccctacctggaatgcattcctccccatgttggcctcttgaatttcatttatcttgaaagtctccttcaattctcacagtatccagtaaaatattcctggatgctctttgttttaaatatctttctgtctcctctttacctcttttacacttgaatttctgtcacaattttttgtcccacatctgtccttctagctagactagaaacttc

SEQ ID NO: 260907 - DNA, 851 bp, Homo Sapiens
ggatgggagatactgttgtggtcacctctggaaaatacattctgctactcttaaaaactagtgacgctcatacaaatcaacagaaagagcttctgaaggaagactttaaagctgcttctgccacgtgctgctgggtctcagtcctccacttcccgtgtcctctggaagttgtcaggagcaatgttgcgcttgtacgtgttggtaatgggagtttctgccttcacccttcagcctgcggcacacacaggggctgccagaagctgccggtttcgtgggaggcattacaagcgggagttcaggctggaaggggagcctgtagccctgaggtgcccccaggtgccctactggttgtgggcctctgtcagcccccgcatcaacctgacatggcataaaaatgactctgctaggacggtcccaggagaagaagagacacggatgtgggcccaggacggtgctctgtggcttctgccagccttgcaggaggactctggcacctacgtctgcactactagaaatgcttcttactgtgacaaaatgtccattgagctcagagtttttgagaatacagatgctttcctgccgttcatctcatacccgcaaattttaaccttgtcaacctctggggtattagtatgccctgacctgagtgaattcacccgtgacaaaactgacgtgaagattcaatggtacaaggattctcttcttttggataaagacaatgagaaatttctaagtgtgagggggaccactcacttactcgtacacgatgtggccctggaagatgctggctattaccgctgtgtcctgacatttgcccatgaaggccagcaatacaacatcactaggagtat

SEQ ID NO: 260908 - DNA, 668 bp, Homo Sapiens
caaaaatttcttaaaagcagttgtttgaagacctggaagaacaaccaagacactctgatgtggaattggccattgttcttccctggctgctgttgctatgggtcatggtgctcgcagccctccttggatggtcggatgggtgagaggggtgctcacacaaatgccctgcagttttttaaaacaaaagatcacccccttcagttagaaactgaaggtcgctgtagtggaatccagacagcagagtctttgggtacggggaaggctggcagggggacactgtggagcagagccagggcaggccaggctgggagctatattgtagggtgctcaaattctaccaagattcctaaaatatctcaagtgtaattaggggtgcattgtttaaaaaatagtctaaaggaagtcagtaccttagtagccacaccggggagtggtaagaccccaagggctgacctgatcaatggcacagtgactgaactgcactgtaaggagaggacccaggcaggtagtgtcagggtgaggtttggttgagctgggatgtccaagtttgggaccagagctgaccaggcctaaacagtaaaagaggaacaccaaaaactgccccggaggacttcgttctccattttcaccccagaacactgtttccccttgtccttccagctcgtgcc

SEQ ID NO: 260909 - DNA, 510 bp, Homo Sapiens
  misc_feature (215)..(254): n is a, c, g, or t
gggaagttgtggttgttaggttcacaccctgttttataaacaacatcaaaatggcagaaccattgctgactttaggttcacatgaggaatgtacttttaacaattcccagtactatcagtattgtgaaataattcctctgaaagataagaatcactggcttctatgcgcttcttttctctcatcatcatgttcttttaccccagtttccttacannnnnnnnnnnnnnnnnnnnnnnnnnnnnnnnnnnnnnnnagattgtgaggcaattattaaatcaaaattaattcatccaatacccctttactagaagttttactagaaaatgtattacattttattttttcttaatccagttctgcaaaaatgacctataaatttattcatgtacaattttggttacttgaattgttaaagaaaacattgtttttgattatgggagtcaactcaacatggcagaaccatttttgagatgatgatacaacaggtagtgaaacagcttaagaattcc

SEQ ID NO: 260910 - DNA, 1055 bp, Homo Sapiens
ctataaaacctacacgtccccataatactatctgcattagttttcctgataggaaaaaaagtattgcagaatgctcaaattagacttaggtataaaaaagtaggttctgaaaaatctcagaaatagctcccagaagcagtagagttcataacctagaatttattgccttttctgtgacacccatctttctgtagctacttttgctcatgtaatcaggaaaaacacctctataaggtaggttgatggcacatattgattcatttggatggagttacatctgttgaaggcctaaaacttgtaaatgcgaattatacttattgatagctttgtggagactgtgggggaaaaagattcctatactttgttgtttttagtgctggcaaacattaagaagtgattccttggcaatgtaagtcctatttcttccctttgcatataggcaaagtgtcaggctccagcctgagttccagcacaaccaaggctaggatggaaacatgaatggcaagctggaggacctggcggggcaggcctacagcgagccatgggttgaagatctgagttgtgccctgagaggacactcattgtgacctaagaagaaagaggcagtacaaagtggacccagttctaacacctccttgggatagggcctcctgctccatcatgtcctctctgtagcccaaggacacgtctgcatccacggcacagagggtaaaaccagatggtagtttcatcagaagttctgtaggctccccagcacaagcagcactgtctgacatctaacaggatgtgttcctaaatcccagcaccaagctttggcatcttgagaggacccagtaggagaatggaatgcctcccgggaaagggcagcagtagctgaccacagaaacacggaaagctgcagaggctgctcaagacatctcttagcacatgagactcgcagaaatacttggggagggatggagacctggtaatgaaaaggcttggcaagagctacttaaatagcggtttttaatcattaaaataaactctcattttgaaaagcctggtaagccggt

SEQ ID NO: 260911 - DNA, 866 bp, Homo Sapiens
  misc_feature (801)..(801): n is a, c, g, or t
  misc_feature (827)..(827): n is a, c, g, or t
  misc_feature (835)..(835): n is a, c, g, or t
  misc_feature (852)..(852): n is a, c, g, or t
cagcttggtttgggccaggtggactggaaggggcggaggtaaccagaagcggctagtggcggctgcctgcgtccccaaccccctccgcgcagcgctcgcgacacgcgtgccaggagtgggagcgagcggcggggccagctgcgttctgagcctgggcgcagctgccatctgctctgggaagcaccagggtgtccccgccgccctcagctcgaagtcagccaccatggaggcgcaggcacaaggtttgttggagactgaaccgttgcaaggaacagacgaagatgcagtagccagtgctgacttctctagcatgctctctgaggaggaaaaggaagagttaaaagcagagttagttcagctagaagacgaaattacaacactacgacaagttttgtcagcgaaagaaaggcatctagttgagataaaacaaaaactcggcatgaacctgatgaatgaattaaaacagaacttcagcaaaagctggcatgacatgcagactaccactgcctacaagaaaacacatgaaaccctgagtcacgcagggcaaaaggcaactgcagctttcagcaacgttggaacggccatcagcaagaagttcggagacatgagacgaaagtaggcggtacgaaccctaatggaggcagttttgaggaggtcctcagctccacggcccatgccagtgcccagagcttggcaggaggctcccggcggaccaaggaggaggagctgcagtgcttaagtccagccagcgtgcagtgcattccagaaaccggccattacccagcccatttttgcctgtgnttattccagataaggaaggaccaaantcccgttngggaaaaaacccagggntttgacattgttta

SEQ ID NO: 260912 - DNA, 418 bp, Homo Sapiens
  misc_feature (21)..(21): n is a, c, g, or t
  misc_feature (314)..(314): n is a, c, g, or t
  misc_feature (354)..(354): n is a, c, g, or t
  misc_feature (406)..(406): n is a, c, g, or t
gcagggcaaaaggcaactgangctttcagaacgttggaacggccatcagcaagaagttcggagacatgagttactccattcgccattccataagtatgcctgctatgaggaattctcctactttcaaatcatttgaggagagggttgagacaactgtcacaagcctcaagacgaaagtagggcggtacgaaccctaatggaggcagttttgagggaggtcctcagctccacggcccatgccagtgcccagagcttggcaggaggctcccggcggaccaaggagggaggagctgcagtgttaagtccagccagcntgcagttcattccaggaaaccgggccattaccccagcccntttttgcctgtggtttattccttttaaggaaggaccaaattcccgttggggnaaaaacccaggg

SEQ ID NO: 260913 - DNA, 539 bp, Homo Sapiens
gaaaagcagtttccagaaattcgaaaacaaagagaacagcaagaaagatttcagcgagttgggcagaggggagctggtctttcagccaccattgctaggagtgagcatgagatttctgaaattattgatgggctctctgagcaggagaataatgagaaacaaatgcggcagctctctgtgattccacctatgatgtttgatgcagaacaaagacgagtcaagttcattaacatgaatgggcttatggaggaccctatgaaagtgtataaagataggcagtttatgaatgtttggactgaccatgaaaaggagatctttaaggacaagtttatccagcatccaaaaaactttggactaattgcatcatacttggagaggaagagtgttcctgattgtgttttgtattactatttaaccaagaaaaatgagaattataaagccctcgtcagaaggaattatgggaaacgcagaggcagaaaccagcaaattgctcgaccctcgcaagaagaaaaagtagaagaaaaagaagaggataaagc

SEQ ID NO: 260914 - DNA, 1688 bp, Homo Sapiens
gacagtggtccttatcaggcccaacccaatgccatccttgaaaaggtgttcatatctattaccaagtatcctgataagaaaaggctggagggcctgtcaaagcagctggattggaatgtccgaaaaatccaatgctggtttcgccatcggaggaatcaggacaagcccccaacgcttactaaattctgtgaaagcatgtggagattcacattttatttatgtatattctgctatggaattagatttctctggtcgtcaccttggttctgggacatccgacagtgctggcataactatccatttcagcctctttcaagtgggctttatcactattatatcatggaattggccttctattggtcccttatgttttctcagtttacagacattaaaagaaaggacttcctgatcatgtttgtgcatcacttggtcaccattgggcttatctccttctcctacatcaacaatatggttcgagtgggaactctgatcatgtgtctacatgatgtctcagacttcttgctggaggcagccaaactggccaattatgccaagtatcagcggctctgtgacaccctttttgtgatcttcagtgctgtttttatggttacacgactaggaatctatccattctggattctgaacacgaccctctttgagagttgggagataatcgggccttatgcttcatggtggctcctcaatggcctgctgctgaccctacagcttctgcatgtcatctggtcctacctaattgcacggattgctttgaaagccttgatcaggggaaaggtatcgaaggatgatcgcagtgatgtggagagcagctcagaggaagaagatgtgaccacctgcacaaaaagtccctgtgacagtagctccagcaatggtgccaatcgggtgaatggtcacatgggaggcagctactgggctgaagagtaaggtggttgctatagggacttcagcacacatggacttgtagggccactggcaacatactcctcttggcccttcccatatctactcttctgtgattgggagactgcaaggcactgaggagtatcaaagaagcaaatattttcactttgaaagaaaactgccattttgtatttaatagcctccaggttctttcagtaatgttatttgctctgtgtgtttttgtgtgtttgttgatgtgcgtttgtgcatatgcgtgagtttcattgccggggttggggcacaattgtggactggggccatgaggccttccctggtccccactgaacccaccttagttccacatttggctgcatcttgaattatgccgactccagacttctcctccttttttgcccttggctcttgacactctaaacccctggaccatctgaatggagcagccaagttcagtcccacatttctgtactgttcctctttcacagctggaatatgtcacatgatgaagttgtatagaaacagaaccatggatggatggccaggattgccgtggtccctagctagatccccttcctatcaatcacctgatagcaacagggacagctgccaataccctgctctttactcaatggtacccagggagggagcatgggaagagggtgagctgagggctggaggagggcaacagccactgggtgagctgttcacggtcttatactattgtttgtgattaaaagtgcttcaacccacct

SEQ ID NO: 260915 - DNA, 922 bp, Homo Sapiens
  misc_feature (904)..(904): n is a, c, g, or t
gtcaccagttttggaaccagtaggccgctctactcttgctcagcggagaggtattaaaaaaatcacctcaacagccctgtgaagtgacctcagtgagatatttggtaccatgggtgtaagctgatagcacaagttctggcgacaggtagcacgtatctgagagacacctgcaagcacacactgtcccagctggtacccataatgctgctgttcctgctgctgctcctgctttcctctcttctcgctttaaatgattgttagcaagttagattttcctggagcttcggaagaaatgaaaatggaaacatgatgaagatatagtcactgaatcaatgagaaaaataatgaacatatgaataccacctaaaaatacactgaataaagtacaccatatagcattatttttataggaaatatttcatgtcccttaaatattctttgttagttatagggatggacagtttatgttaagcacttagcttaaacaatccgtttatattagcactgtatcccttgtgccatccaacattttgtatgtttttgtaaacagttcatatacagtacatttctgtactgctttctttaatgtatacatgccttgtttaacttggaatctattattattaatcaattgactattaaatctggttaaatagttcacctggattaacagtattgttggacagtcctaaaaatggccagattgtggaacagctgttgaatgtaatacttccaaaatgtacatatctttccccacgtctgtttcactggttcgttcatttgtttgtttcttaaagtcaggtgctctgtcagactaacctagagagctgttatggtagagaaagttatcatatgtgtgtggcatgaaatcaagaatacacctatgaagttagtccatataagnataatactccttagagta

SEQ ID NO: 260916 - DNA, 1726 bp, Homo Sapiens
  misc_feature (1065)..(1079): n is a, c, g, or t
  misc_feature (1563)..(1578): n is a, c, g, or t
ggaatagaagggaccaatggccagcttgctgaaatgtaatgccattcttaaaagccagctaagaatcagaccgtattagttaaggacccataagagtagacatttagaaaaagtgaaaaatggcaagagtggcccaatcttttgagagtttagagaaaatatcatttggaaagggagtagctctccttctattttagccttattattacggtatctataaagcaatgccatattctaaatctgcagaaataaaattctaaggggcgaaagtccaaggcagaagtcaaaagttttgcaaggaaaccgatgaggttgctgacctgagctgggcagggttgaacaggcgagtgccaagatcaaggtctctgattgtctctccttgaaaggtaagcagagaactagggctatcccataaattaagtgggagattggaaaggggtgcggacttctgtattggggagaaggtcttggatgaactggggcagagaactgccagagagagtacctaggaatacgttgttagcaggagaaagaccaagttcagatgcagacttgggaaagtaggtaacttgaccaaaggtagcaaaattagactacccaactggattgtgaatgcagtttatgaaatggatcaggacaggaacaaaaatagattttctagaaactgcagactcctgtgattggagcagtatacaaagtacagcaacatcagactagatctcacctgaggtgctgggtgagaaatcttagggaccagatggaagagggcctgtgtataaagacattaggaaggaggtttgggaaggtttgggagggcagcctgacttgtctccagagaaagttagaactggttgacttagcaaccaagggacactgggtcaaagacgaggaatcaggacgtcggtgcctagtgactgagcgccagcccagcccatttctctacattgccatgggctaaacccagtgtgctgtaaactcttcagttcctttggttatggattttgtatcttttctgtgtttcttaataaagttcttttgaaatttgggaatcaagaaacagaaccnnnnnnnnnnnnnnntagaccaccgacgtgacatgtttttcttaagaactctgtgcatgtaggtcgtgtaaaaatactgtgtatttaaactcaagtgccgcaagactcgcgtttactcctgtactgttcactgagtggcatcaccgatggcattccctctgccctgagactgcggtgagtgctcaagtgcgcttcctatcctctcaaggaatctctctccccatgtgccactcactgaggtgagggggttaccccttcccccccgctaatatttttgtggagcttgtcttgaagtctgtgccctatatttgcgaaatagaacctttctttgttctcccggaaacatgtggggccgcctaaagggctcgaaaactttttccaaaacagatcctgtggggtgcccaggggcttgaggtacaccccaatagggaatccctggtggccaacggggtccttcgaaaaggggtggagcatgggattctcaagggaattaaaaggnnnnnnnnnnnnnnnngttcaaaccttaattgggataaaaaatgtagagtcttggggccaaacactggtccctatttaccggtgttattatgtaaaaatctttatgtcaaatttggccgccgcatttgggaccccaaaagaagaaatttttttatccccccgtt

SEQ ID NO: 260917 - DNA, 884 bp, Homo Sapiens
  misc_feature (360)..(381): n is a, c, g, or t
tggtgtttcgcacacccaatgaactaaaactttatacgtaggtaaaatagtaaagataaatgtttttccttggccttcatcacaacccctgaaacggaaagatggcgctgctgtgcttctgagcctaggcttcttgcactaaagcaccaagggcatcgcacacaggcttggcagaggggccatggccagaatcaccaccttcagacaagtatgttggaggtctcgaatcccttggcacccccaagcatgcagtgtgcacccaccttctgggtgtctgcagatcgatacaggaacacatccttacctctgcagcgaacccatttccctggaaaagattttcacacatcctctcccacctcnnnnnnnnnnnnnnnnnnnnnnccattttttaaagccacacggagatttttaaatgtgtcgaattttgtggggaaagagagccagaaagctctgaagaacagtggaagagatgtgaggacatttcagcagtaatgagacacattcatgcaacccaccagggaggggtctgtagttcgggagtttccgttaatccaatgcttaaagtgagttcaccgggcaaatgaacccaaggtgttgggacatgcgttaggcccagaaccgactttggaaggacgagagaaagcacagagaacaccaccttgatgtgggggctgattttggcactgccgttggtgaagagtagccagcggggccctgtgctcccccaagtgaggtatggaaggtcagagctagtagtgtttcccaaggcaagaacctgagcctctgctaagtgaccgcagcgtcaggttttttcagtgttattcttccaggccaagagagacctcagtcaaatcttcagaaatcccattcacggcaaagctaca

SEQ ID NO: 260918 - DNA, 571 bp, Homo Sapiens
gcttatggagataggcatggggcagcaagaaatatagagtgggaatctgcagagaaaagaaagatgagccctctttctttgcttgttttccctgtttgtttgtttgttttttctctgctttgccttgggcatgattgggattactgagattattcctcttgtctatattgttgcattagtattttaactggtgtccctaatttattatttttccatcttaattcctacaattcaccctgcatactgctgccaagatgagtcatccttacatactgcttttgttatatcattatccttcttgagaaccagcggtggattttcagtgtctatcagatgaaatccaaatgctttagcctggcatctaaggcccaggacagtctgtccccacattaccttttcaactcagttctaaccaaactgttctactaacagttccttgaatctgtattcattagttcatttaaaaatactcattcactgattctcctttatgcctaatgctggagataccaacatagaataaggtacccatgatttgtactttactgtagcctctaagtgcaagagacag

SEQ ID NO: 260919 - DNA, 569 bp, Homo Sapiens
  misc_feature (513)..(513): n is a, c, g, or t
gcaagagtcattattgacaacaaagatggaccaacacagaaatatctgctgatctttggagcgtttgtctctgtctatatccaagaaatgttccgatttgcatattataaactcttaaaaaaagccagtgaaggtttgaagagtataaacccaggtgagacagcaccctctatgcgactgctggcctatgtttctggcttgggctttggaatcatgagtggagtattttcctttgtgaataccctatctgactccttggggccaggcacagtgggcattcatggagattctcctcaattcttcctttattcagctttcatgacgctggtcattatcttgctgcatgtattctggggcattgtattttttgatggctgtgagaagaaaaagtggggcatcctccttatcgttctcctgacccacctgctggtgtcagcccagaccttcataagttcttattatggaataaacctggcgtcagcatttataatcctggtgctcatgggcacctgngcattcttagctgcgggaggcagctgccgaagcctgaaactctgcctgctctgcca

SEQ ID NO: 260920 - DNA, 861 bp, Homo Sapiens
ccggaaccggcggcaccagctcggagagaaaggaggttccataggcaattcttaccaagaagatgtcgattccattctccaacacccactaccgaattccacaaggatttggaaatcttcttgaagggctgacacgcgagattctgagagagcaaccggacaatataccagcttttgcagcagcctattttgagaaccttctagagaaaagagagaaaaccaactttgatccagcagaatgggggactaaggtagaagaccgcttctataacaaccacgcattcaaggaacaagaaccacctgagaaaagtgatcctaaacaagaagagtctcagatatctgggaaggaggaagagacatcagtcaccatcttagactcttctgaggaagataaggaaaaagaagaggttgctgctgtcaaaatccaagctgccttccggggacacatagccagagaggaggcaaagaaaatgaaaacaaatagtcttcaaaatgaggaaaaagaggaaaacaagtgaggacactggttttacctccaggaaacatgaaaaataatccaaatccatcaaccttcttattaatgtcatttcttcctgaggaaggaagatttgatgttgtgaaataacattcgttactgttgtgaaaatctgtcatgagcatttgtttaataagcataccattgaaacatgccacttgaagatttctctgagatcatgagtttgtttacacttgtctcaagcctatctatagagacccttggatttagaattatagaactaaagtatctgaaattacagagatctcagaggttatgtgttctaactattatcaaatgaataaatcctctctatcacatccccc

SEQ ID NO: 260921 - DNA, 520 bp, Homo Sapiens
caaagaatgtactctatacaaaagacagagcataaagggcaccgtacctcccaaaccaatgtcccaaatagacatttagtttaaaaatttctgttaaaaacagaattcactatttccttgccactgccaagtcacgccatggcagaggctcgagtgcatacaagcttcggttttacccttaatacaccatcatgaccaatggaggcattgctgctggaggtgtcatggccattaacactactttataagaggtgcggaagactgccctcactcatcatggcctagcatgtgcaatttgtgaagctgccaaagcgttagacaagcaccaagcccacttttgtctgcctgcacccaactgcaatgagcctatgtatgtcaagttggtggagtcccatggtgctgaacaccaactcaccctaattaaggttgatgacaacaagaaaccagaggaatgggtaggcctctgtaaaactgagagggaaacccccgaaaagtggttggctgcagttgtgcagtagtt

SEQ ID NO: 260922 - DNA, 894 bp, Homo Sapiens
  misc_feature (209)..(243): n is a, c, g, or t
  misc_feature (590)..(611): n is a, c, g, or t
aaataaatgaactggtcattgggtgaactggcttttggttaattgacctagagcccagttctgcttaagcctgacttttctaaagggataattagccaaaatttcatctggagctggctagagcccagccatgctaagcttacaaagaaaatggttctctcatctggcccccattacactgtctcaaataaaatcctcattggtaccannnnnnnnnnnnnnnnnnnnnnnnnnnnnnnnnnntcccactttcctagactaccaccagagacaattcaaaccaactcatcacttaataagcaggattatccttagtgatctctatgagcattggattgggaagacagaaatcagtgcgacaggcaagagtccacatatgggaacggcaagcagtaaggctgaaaacacagccccgaacaaaaatacaaagcaccctgagtgtctgcccaaggaatctggacgatttcacaggccacagctagccatgagggcagtggaataagttcacttgctgatgaggtataaaaaggaatttgagaagcgcaaggccaaacatgaataaaccagtaggagaccactgaatccatggnnnnnnnnnnnnnnnnnnnnnnttataaacacatgaacagacctgcaggctctggaagaaaggattttaaactcacttcctattgcctttagtttaactaatgatgattccaaggaagatgcaataggatttgataattcattagattttgaggaaggtaaattagggttagggaaaaataacagaagttttcaatattttgagatttgagtttgagagatcaggagaataaaagccaacttacatagacacaaaatagtttgaaactactgaagcaataaaaaccctcaaaatattccctaaat

SEQ ID NO: 260923 - DNA, 1147 bp, Homo Sapiens
tctttcaaaatgaaaatgtccgtgattttaggaatcattcatatgacttttggagtcattctgggaatatttaaccacttgcacttcaggaagaagttcaacatttacctggtttccatcccggaacttctcttcatgctctgtatctttggataccttatatttatgattttctacaagtggctggttttttcagcagaaacctccagagttgctcccagcattctgattgaatttattaacatgtttttattcccagccagtaaaacaagtggcctttacacagggcaggagtatgtccagagagtgctgctggttgtcacagcattgtctgtccctgtcctcttcttgggaaagccactgtttttgttgtggcttcacaatgggcgtagttgcttcggggtgaaccggagtggctacacacttataaggaaagatagtgaggaagaagtttcattgctgggaagccaagatatagaagagggaaatcaccaggtggaagatggatgtagagaaatggcgtgtgaagagtttaattttggagaaatattaatgacccaagtaatccattccatcgagtactgtctgggatgcatctccaacaccgcctcctacctgaggctctggggcgcttagcctggctcacgcacagttgtctgatgtcctgtgggccaatgctgatgcgcgtgggcctccgcgttgacaccacctatggcgtcttgctactgctcccggttatcgcgctctttgcagttttgaccattttcatccttctgatcatggaagggctttctgcgtttcttcacgccatacgcctccactgggtagaatttcagaacaaattctacggtggtgcaggcaccaaatttgttcctttctcattcagtctactttcatcaaagttcaataacgacgacagtgtggcatgatcatattgctgtaaccaacaagctttcagatttatggagaatgaccatgttatagactttcacttatgtcagatttatgataggaaaaattccatcttcattactgccttatgacatagccaaataattctgtaagatatacctcttcctcatatgttaaatattttgtaaagtttaccaatttgagatataaaaatttcttttggtttttatcaatg

SEQ ID NO: 260924 - DNA, 567 bp, Homo Sapiens
atagtgaccttaggaggagggacagcctggggaggtgctcctggttgactcgcggagtagaagcttttggccagaatattgctacattttcacaaattgcagggacatgtgacttctggaggaccgtgggcaccctttcctaaaccagggacacatttcaatagacgctctctggctcgctggggaggggaggtggaggacagaggcagagtcggggagcctccttggaactcagcagttggttattttgtgatacagtcatggtgggtaaatctgttaccaaccaagtatcttctgaatgtcaaatcctgtttaatttcactttcgctttgctgatctgtggcctgcctcatactgagtgtcaaagagacactgagtgtcaaagaaggaagtaaacgtctttggccagatttaatttctgactctgttggggaagcgaagtaacatggatggggtgcaagatacacagaatggaacatcaggggcttggattcacattcctcatctgtgaagccagggcgttgcctgagtggtccttagggtcctttctggctctaacattctgca

SEQ ID NO: 260925 - DNA, 946 bp, Homo Sapiens
tccacttaacgggtgggtttcccagaaattcgggggaagaattgatcgggtgtgagtttcccacagggacaactcaggggctctcaccccatttagagatcctggaccttaataaggtttgacttttggctaaaggtttttcccaccattccagcacatttatagggctttctctccaagtggggacctccgctggtgaaagatgagtttggactgcgaacccagaggtcttccccacacttcgtggcaaggcgttagggcctttgtcgcctgtggtgcacgccccggtgctgaatgagggctgaggctgtggctggaaggccttcccacagacactgcatctgtacggcttctctcccgtgtggatgatctggtgctttcggagcactgagctataactaaaggcttttccacatacattacacacgtgaggcttttctccagtgtgaattctccgatgctgaataaggctggagctctgactaaatgctttcccacagtcactgcacttatagggcttctctccagtgtgaaccctgtggtgcttaatgaggttggagacccgactgaagggcttgccacaatcattacactcataaggcttctctccagtgtggaccctctggtgcttcctcaggtgtgcactctggctgaaggctttcccacactcgccacactcaaaaggcttctctcctgtgtgagtcctgtggtgtttgatgaggtttgagcttcgcctgaaggccttcccacactcactgcacacatacggtttctccccagaatggattctttgatgttggatgaggtttgagctccgcctaaaagccttcccacattcattgcattcatagggcttctcactcatgtgagacttttggtgctttttaaggctcgagttctggccgaacgcgtgggtcgacgatatcccggaattccggaccggacc

SEQ ID NO: 260926 - DNA, 1118 bp, Homo Sapiens
  misc_feature (67)..(67): n is a, c, g, or t
  misc_feature (106)..(106): n is a, c, g, or t
  misc_feature (903)..(903): n is a, c, g, or t
gccctacctacacgtgtccgtggagtcccgtggccagcctgtcaagatctatgcctgcaaaggttgncctggacgagccagtggagctgacctcggcgcccacggncacaccttctcggtcatggtgacacagcccatcacgccactgctctacatctccaccgacctcacacacctgcaggacctgcggcacacgctgcacctcaaggccatcctggcccattgatgagcacatggcccagcaggaccccgggctgcccttcctcttctggttcagcgtggcctccctaatcaccctcttccacctcttcctcttcaagctcatctacaacgagtactgtgggcctggagccaagcccctcttcaggagtaaggaagatcccagtgtctgagtgaactaacagtcctgctttcagccaccatttgcacaagacacccagcactgaaagtcccgctgccaggagcaagggatcctttggaagcacccgccctttgtgccttgttgggggaaaccggtgacgcagaagtgagtgtggatacaccagagtttgcattggaaggaatgagtgtcacgtggggagggaaggggccagtggaccttttgtaagctttccactcaataaaatgaacctgtatggcaaatacttgaaatggaactcactccttccactttccccctttcttctgtcccaggaaatagatcatcttttgaaaagactcttgtctaggaaaagttgtgtccttttcctaatttaacgtgttctttcttaatgaagttttaatttatttttgttgagattttgctagatggcttttgcatcccctgtagatggtgagtgttggcggtgatgtccatctcggcgttcggaggccccacggtcccgaggctgggccggggccccnccagggtggctgtgctgctgcctgtaggagggtgcgggttgtgctgtcatcctcgggtttgcacgcccttttttaggagcctgtggacatctgtggttttgtactttggggcttcaggggaggtgtttaactttctagtgattgatgattgtcaggttttgaaataccaaagcttttttgttctgtttttaaataaatatctttcaaactttcaa

SEQ ID NO: 260927 - DNA, 679 bp, Homo Sapiens
agaggtctagggaaggaagggagcggccacctctgggtgcggctggcctaggtctcgtatcccggccccaaggggccagaggccatccaaggggtaaaaaggcccctctagcagcccgacctgtcacgagacacgcacgcccgagccagggaaggcctttggtcctatacctcgaatgttccggggataggggcacggtcctccgtttccagacggttcctactcgtttcccgcaaaaagcacctcccgctggttggggtgtagtggtggaagctggcctctcggatgcagaacaggaagtagcgagcagaatttcgtacccgtttaactttgccatctagggaaagggaataaaccaccctcctcgctcctgaaataacatctagctgccattgagatgagcaggtgtgctctcagagggcgggatttggcgcttgcaattgctggaactgtttctttccacgggttgctacgcctctttagggtaggattccttaatgatgtgtgaactcattgaaactgttgggaaatttttgtgaatatacacatttttctggggagagtgccggtgttggagacttacctagtctcccccagccaccttcaagcaatcaccccttcacccccagtagtttggtgcccctcagaccttcctacataaaaactgggggcctctact

SEQ ID NO: 260928 - DNA, 1042 bp, Homo Sapiens
  misc_feature (762)..(762): n is a, c, g, or t
  misc_feature (828)..(828): n is a, c, g, or t
gaactgccaagttgatagaatttagtcctctgagggcaaccgatgtaaaactcccaagtggagcagtgtttgtgattgccaacagttgtgtggagatgaataaggcagcaacttcccatttcaatatcagggtgatggagtgtcggctggctgcgaagctcctggctaaatacaaaagcttgcaatgggacaaagtactgaggctggaggaggtgcaggctaaactagggattagtctagaagaaatgctgttggtcacagaagatgcccttcatcctgaaccctataaccctgaggagatctgcaggtgtctgggaattagcctggaggaactccgaacccaaatcctgagtccaaacactcaagatgtgctcatcttcaaactctatcagcgggcaaagcatgtgtacagcgaggctgcgcgagtgctccagtttaagaagatatgtgaagaagcacctgaaaacatggtccagctgctgggagagttgatgaaccagagccacatgagctgccgggacatgtatgagtgcagctgccccgagctggatcagctggtggacatctgtcggaagtttggggctcaagggtcacgacttactggagcaggatggggaggctgcacagtatcaatggtacctgcggacaagctgcccagctttctagcaaatgtgcacaaagcttattaccagaggagtgatggaagcttagcaccggagaagcaaagtttgtttgctaccaaacctggaggtgggggctttnggttttgcttgaggcctgaaaaaaatgtaaaaagtctgaagagaaactacttaggggcactttagngaattggcagggactttctgtggcccaggaaaattaaccttcccttctggttttgaataaggaggaacgggttgctatttatttccagatattttttccaaggaaatggttgtaaagctttccaatgccttcaaaaggaattctttttccattcttaaaataaggcgttttacctattaaaaaagccagtaaccttgtcttgtgaacgatcctt

SEQ ID NO: 260929 - DNA, 669 bp, Homo Sapiens
ggaacatgtctgagtcggagctcggcaggaagtgggaccggtgtctggcggatgcggtcgtgaagataggtactggttttggattaggaattgttttctcacttaccttctttaaaagaagaatgtggccattagccttcggttctggcatgggattaggaatggcttattccaactgtcagcatgatttccaggctccatatcttctacatggaaaatatgtcaaaaacctgctgaaaccgtcagctgcctgcagccagcccatgtctgctggagagatgggagtaggggagccatctctgcaccaaagcaagagtgaggtcatcacagggaccatgcaagaagaggcgcagctgtgtggcactgaagccggcagccggccttttccaccactccctggctcctcgctttcctggcatcagagctgattgtggggagaaccgaaaggagcagacagagaagcttcaggagcaggagcagtgacttcacctgagaacatcccagcgggaggacaagagaaatcatgtttattcctcaggaatactgaagtgccctggagtaagctgccattcttctgtaacaatgttatcagtaatgctttaaactccagcacctggttatgcatttaaaaccaagtctgtttcttgttttgtattttctctctggaag

SEQ ID NO: 260930 - DNA, 845 bp, Homo Sapiens; identical to SEQ ID NO: 74273
  misc_feature (542)..(554): n is a, c, g, or t
  misc_feature (556)..(557): n is a, c, g, or t
  misc_feature (613)..(625): n is a, c, g, or t
  misc_feature (676)..(676): n is a, c, g, or t
  misc_feature (681)..(682): n is a, c, g, or t
  misc_feature (684)..(684): n is a, c, g, or t
  misc_feature (698)..(712): n is a, c, g, or t
  misc_feature (719)..(741): n is a, c, g, or t

SEQ ID NO: 260931 - DNA, 911 bp, Homo Sapiens
  misc_feature (727)..(774): n is a, c, g, or t
  misc_feature (811)..(822): n is a, c, g, or t
  misc_feature (842)..(854): n is a, c, g, or t
ggaaagctggaggcgcgggtggggaacatgtctgagtcggagctcggcaggaagtgggaccggtgtctggcggatgcggtcgtgaagatagaatcctggtaattgatgtccacccgagaaatccctgcagatgttccagcctctgtctagtccagatagccaaaggaagggtactggttttggattaggaattgttttctcacttaccttctttaaaagaagaatgtggccattagccttcggttctggcatgggattaggaatggcttattccaactgtcagcatgatttccaggctccatatcttctacacggaaaatatgtcaaagagcaggagcagtgacttcacctgagaacatcccagcgggaggacaagagaaatcatgtttattcctcaggaatactgaagtgccctggagtaagctgccattcttctgtaacaatgttatcagtaatgctttaaactccagcacctggttatgcatttgaaaccaagtctgtttcttgttttgtattttctctctggaagttgtaaggaggtggtcttaaataaattaaacaaaaataggagaaaaaaagccgggagaaggcgcagacagtgcgcgaaggcgacacacggccctcgcccccttgcggcgccggtccaggcggcgaacggattctccgcccccacaacgcaccccaaagatctctttccgcgccctgtcgaaaataggggataacttannnnnnnnnnnnnnnnnnnnnnnnnnnnnnnnnnnnnnnnnnnnnnnntgggtgtaaatttttttcttaacaaaaactcctttannnnnnnnnnnngcggggggaccgcgcgcggnnnnnnnnnnnnnttttgggtggtgtgcgaggatcgtgaagtgacaaagaggtgggggcgcggcgaccac

SEQ ID NO: 260932 - DNA, 711 bp, Homo Sapiens
tgttttctttgagaagcaggagttcactttaatttttatgaacatctcacaccacttccacctaaccctacctactgtaatatgggctggcctgtcaagtcttgggcaagaatagtgataagatgctatcaggtcagaacccatattgttagagtagctgaaagattcaggagttcttattttgaactcttgcatgtagaatcattacaagatgtctcttaaatgcagttagagtgagaggaaagctggagctgtgggtggggaacatgtcagaggtggggctcagcaggaagtgggaccagtgcctgctggatgtggtagataagtaccggttttggattagggattgttttctcacttaccttctttaaaaaaagaatgtggccattagcctttggttctggcatggcattaggaatggcttattccagcagtcagcatgatttccaggttccatgtcttctacatggaaaacatgtcaaaggacaggagcagtgaccacctgacaacatcgcagtgggaggaaaagagaaatcatgtttattcctcaggaatgctgaagtaccctggagtaagctgtcattcttattataacaatgttattagtaatgctttaaactccagcacacttgttatgtatttgaaaccaagtctggttcttggtttggattttctctctggaaattgtaaggcggtggtcttaaatacatt

SEQ ID NO: 260933 - DNA, 938 bp, Homo Sapiens
cgggaacgggctcaaagtaggattcaagaactggaggaaaaggtcgcctctttgctgcaccaggtgtcctggagacaggattctcgagagccagacgccggccggattcacgctgggagcaaaactgccaagtatttggccgccgacgcattagagcttatggtgcctggtggctggaggcctgggactgggtcccagcagccagaaccccctgcagagggcgggcatcctggcgcggcccagagaggccagggggaccttcagtgccctcactgcctgcagtgcttcagtgacgagcaaggggaagagctcctcaggcatgtggctgagtgctgccagtgaccgagactcacccgtgcccttgcggcctcctggcccggtgcagctgccctcagggacaggggtgggtgctctcagatgccatgggttgagctctactgagagccaaggcccctagaatagttgcggggcactctgatcgttcactttggtccctttggctatggaacaggctgggtcacagggaactgccagtgaggctggaggctggaggtggagatggggtcaggaacatctggcagagggaggtcccagtctgtgtctccatcaggcttaagccagagctatctggtgctggtgtgccagcccctcccccagcctgcctagaaaggggtggctgcctgagggagtcacttgtatggtccccagggtgggagccccatcctgttctatggaataaagcgtcgcctctctgcctcgaaccagtcaaatggagtattgcggctgcacgtcacactagggtggccacccccgccattgcgagccacatgtctgcactgagaaactgcatttcagtagcatttgtcatccagccggaagttaaagcacacttactttattcacctatttttataataaactgttctccgctgctgaaa

SEQ ID NO: 260934 - DNA, 669 bp, Homo Sapiens
tttgtctgagggccttgggaacactccttattcattgtggctgaattttttcaacatcagcattgaatactacaaaggattgtatcagatataaatcaatagtcaataattttattaagaagtaaaaaccatccatttaaactgaattacagtgggaaaatatatttgtaaagaaggcttagaaaataaacaataacaataaactagaatgagattatttcaagcatatattttctaactattcgtagggtaaagttttaaaaattgaatggattctaggcctctaatccctgtcactaggaaaatgactgacctacagcatgctttaggtatcttttcttcacaataagagaataatattttaataatgacacacaataattgctaaacaggcttgatgggacagtaagcgtagttccacaaagatgccaagcagcctgcgtggcctggggcattatataaaaatgagctagccattcaagtagaatgtacctctgcaaggctgcaatattacttacattaaagggcccatcatcaaggggacaagggctatttccccaagtctaacgtggattggaaaaataaggaatactcatctgaaaccatattgtgtttgtgtttgggcatcactaaacactctgccgaactttggctgggcatggtggctta

SEQ ID NO: 260935 - DNA, 682 bp, Homo Sapiens
tgtgggtaattgaggaggaacaagaagaggaggatgaggcaccattccaggagagtatgtgaagttgttttgtgtactttggttgtttggtcataattgtagtttgtgaccttggttactttggcattttctaggatgctaaatgttacaaccagtcccttaaattgggtagatactccgtgttaaaagagatgactgtattggttcctgttaatatttttaaaggttcagagattctcacgattgcccaccatttgtaatggttgcaccctttatttaatgatgtctgtgttcaaacactgaatgaacaatttgcttaagtaacagtcacattaggcattgtgattgagatttgtattttgccctggtggaggaggttgtagacctcttttcacagaaaaaaacatgttaataataaaatttaggtgtttcacaggttattcagattagttaattctatgtatttttgttttgtgtttggttttcttgtttcacttattcataattggaccaaaaaggccctgtcagttcagttttgtttccctggtctcaaccagtactacttggaagtgatggaactaccaaaagttatttgatagtttcagtttttattcagattaactcttacccttcctgttttcaatctacttttcaaacacatcactcatgtaactctctcatg

SEQ ID NO: 260936 - DNA, 492 bp, Homo Sapiens
ccccccagagctgtactgtctcccatgagggtacttctccatggagcagcctgaggcgatccctatattctgggcttctctcagaaatggattcccacacagtattcaaagcaaatttccccagaggaaaccctattggaagaacttaaaaactcagaatctttttctttgtccagagagttgaggaagcttaagcttaaatgatacatgttttttaaaaaaaatcagattataaatttagtttttggtgattcattaaattctttactattatagttattttctagctgttcatcttttagctaaatttgttccaaagaagcaaaagtttggtttctactaagttctggattctggatgggagattgcactgtgtgtgacatgcaagtttcatggtgtgggagattgcagagcatttgggttactgcttttactctttggaagctgttatcatctgtatctgctttaaataaagttaaagatttggaacaa

SEQ ID NO: 260937 - DNA, 301 bp, Homo Sapiens
ggtgggtcatccattctcctttacccaaacaggctttgaaatgacacattccattcatttgcatctttttaaaaaacttctgattccttactgagtgtccagcagcctcaaagtttttaatggtagctgatgcagacataaacagtgctcaatttggcccttaaactataaaatcaagaaagagtatttcaatcccatccacctgcctgcaagatttcttaatgttcactagttataaccattgtttaaacagtgctttttgtgtaatttaaaaataaactttaatgctttttaaaacaaa

SEQ ID NO: 260938 - DNA, 614 bp, Homo Sapiens
cctgatttttagatattttttgttcttgtctatttgaattggttcataatatggcctgaactctaagccaaggtactagaaattaagatttcaattttaagtggttatttttgtgattgacaataaaatggtaccttttgtgaaatgttagtgaatgttactggacgtcattcaagtttgatgaattggccaaaattttaaaaacagtgttatcttaagtctatttaactttaaagctaacttcagaactcattaatctgcttgttacatgcacaatgattaaattggtctattttaagatgcagctttaaaaaagaatgaatgtagaagccattaaacatttataggtgtcatattcccattgtggcctgtttgtccagtgaccctgaaattgctcttctagcaacacactatttgtgatgtcactgaaaagccagatatgatttaatctagcatgttaattagagttttgcttatatttatgctacggaactgcaccattctaagagctacagtcagttcctttgcagtctaggctattgacttattttaaggaaaacatttttagcttttacatagggattgtgggcatttagtcacaaaattccaatgtg

SEQ ID NO: 260939 - DNA, 700 bp, Homo Sapiens
gtgttctgtaataaaagtgaactgataagttctgggcatccctgagaatttgttttcctttcagaaagtttcctacactactgaggtttaggggcactgtgaagcaaaagccacgcctcagaatcccaggcggagactccgacctcgtcccgggagggaagccagtagctgagcacctgcgggagattaaagagaggaataaggaggtgagtacatgacaaagagccacagtcgcaggcggtggggcctggctcagaacaggctgtgctgggaagcgggagcaggagctggcgccgccttgcgggctggcagaggaccatccactccctggcgctggggccgtcccatctcatgggcaagaaacgtgagacccctggctcgctccacacacaacctaagtgccagatggatgagacgcctacgcgtgagtaaatgccaggaacatgagactcgaacgtggcaggatatccttctgcccacgaatctaaaagcttactcggtaatgggagaatggttccaatttgataaactcgggtttttggaacgtctgtgctccagaaacactggaaggcaagtggctgctgactggaggagataattggatgctgcaagcggcaaagggctcgggatgcaaaacaccgcaagaaatgcaacaagtgaggagcattcccgcaaagaaaaaacgcacaggccgagagca

SEQ ID NO: 260940 - DNA, 908 bp, Homo Sapiens
gtaatttcagtgaaatggtgtatagatgtattgtaatttaaatgtatatgttatttttggctattcatctaaatgcagtagacatgttgatcggtgttttgcaaacatttctttttccttcttagataactagtcgtgaatcatttctcctctttctcagtgtggcttgggaatatatatgagtgaagaatttatctgtgaatcctttgtactgatgattgtttgaaagtctgtgtgtgtccagcacctttgtaaatacacaattcagagcagggatgggctgggtgtgtgtcctggttcttagtgaaaggtcatctcatgtctgtttaatacatggtgaatgcaactgtggaacttttgattacctagacttaggtaggtttagaatgagaacatccatctacagtcctcctttgcttggtggattgggctcagaggaacaaaaagttagtctgactctgtgcatattagcatcatgtctttagagaaaggtcagcctctctggttgccaaatactcatcatgatgctcatgacttaaaggttctgaggagccttgtctcccttggatttttgagtcagggtacaggaaaaaacattgctgactaactaactgcaaatgcatctgcaggtgaaaccctacgaaagcacagttctggctataaacttcagagttctctgtaaaaaacttagagcactagaagcacaggaatagtgagtgtacagcttatgcggttgtagaggggcaactgatgaacacaggtcccacatatatgagggagtatgacgttctctacctaatatgttctgtgtgcatgttttgaatgattgaagatgggattaactaatgcaagtttacagttgcctcctaaaacacacattctgtataattatcgctaaatacaatgct

SEQ ID NO: 260941 - DNA, 1459 bp, Homo Sapiens
  misc_feature (16)..(16): n is a, c, g, or t
  misc_feature (1407)..(1407): n is a, c, g, or t
  misc_feature (1432)..(1432): n is a, c, g, or t
agccgctgagaggtgnagtggagttcactcacatggattgaggcccagttcctggaagaagagatgctgggcaggaaggtgtctgcatgtgggactctgtacagcccggtcctctcccacatctgggaggggccagagtcagacaactgctgggttcgtccctaagagaggtcatctgactggctgttcagcctaggctgcacacacccccactttcctctaccaggccacaccggagcagtgctcacacaggcaagctaccaggccacaacaacgacacccacctgcacctctggaatccggcctgagcatccactgctactgagcaaggcaaccactagcaccacatcagtgactggcaagaagatggcaccgtccctcacccaggagatccccagccacctgcgcctgtgctgctgagcaagactgcagcgtgggggaccctgggcaccctcaggaccttcttgaacttcagcgtggacaaggatgcgcagaggctactgagggccattactggccaaggcgtggaccgcagtgccattgtggacgtgctgaccaaccggagcagagagcaaaggcagctcatctcacgaaacttccaggagcgcacccaacaggacctgatgaagtctctacaggcagcactttccggcaacctggagaggattgtgatggctctgctgcagcccacagcccagtttgacgcccaggaattgaggacagctctgaaggcctcagattctgctgtggacgtggccattgaaattcttgccactcgaaccccaccccagctgcaggagtgcctggcagtctacaaacacaatttccacgggggaggctgtggatgacatcacatctgagaccagtggcatcttgcaggacctgctgttggccctggccaaggggggccgtgacagctactctggaatcattgactataatctggcagaacaagatgtccaggcactgcagcgggcagaaggacctagcagagaggaaacatgggtcccagtcttcacccagcgaaatcctgaacacctcatccgagtgtttgatcagtaccagcggacactgggcaagagctggaggaggctgtccagaaccgtttccatggagatgctcaggtggctctgctcggcctagcttcggtgatcaagaacacaccgctgtactttgctgacaaacttcatcaagccctccaggaaactgagcccaattaccaagtcctgattcgcatccttatctcttcgatgtgagactgaccttcttgagtatcagagctggagttcaggaagaaatttggggaagtccctcttactcttcctcttccaaggatgcagttgaaaggggatttgccagttcagccctcctggccttgttgcagggctgaagacatgttgagatttnccttgccccaccccacattgacatnccgagggatctgaggattttccctttt

SEQ ID NO: 260942 - DNA, 556 bp, Homo Sapiens
  misc_feature (451)..(451): n is a, c, g, or t
  misc_feature (518)..(518): n is a, c, g, or t
  misc_feature (530)..(530): n is a, c, g, or t
aagtttgccaaaagaattcgagtatcagtgagatgttctggccagggtacaggagggatgagtgaggcagaaactatcaaagaaaactcatttccccacacccaagaaggagctggatgacccaggtacagatataattttgagatgggaaaattaagggattttaaagaaacagttccagcctcaacaagaagctagagaatgtggtgctcagtgaggggttatcctacttggaggcccagctggtctcccaggttcagccaaacacggaaatctcagatcctcggatgtcatgtggggtggggcagggaagtctcacatgtcttcagccctgcacaaggccagggagggctgactggcaatcccctttcactggcatcctgggggagaagagtagagggacttcccaaatttcttcctgaactcagctctgatactcagaaggtcagtntcacattcgagagattaaggattcgaatcaggacttgggtaatttgggctccagtttccctgggganggcctttgaatnaaagttttgtccagcaaaatttacaa

SEQ ID NO: 260943 - DNA, 978 bp, Homo Sapiens
  misc_feature (885)..(885): n is a, c, g, or t
  misc_feature (887)..(887): n is a, c, g, or t
gggtggcgaattcggcacgagggacagatctgtcttatgcctcacaaaactttataccttctgcacagtgggccactgctgattcctctgtgtcgtcttgttctcaaactgatttgtcgtttgattctcaagtgtctcttcccattagtgttcacactcagacatttttgcccagctctaaggtaacttcatctatagctgctcagactgatgcatttatggacacctgtttccagtcaggtggggtctccagagaaactcaaaccagtgggatagaaagtccaacggatgaccatgtacagatggaccaagctggaatgtgcggagacatttttgagagtgttcattcatcatataatgttgctacaggtaacattataagcaacagtttagtagcagagacagtaactcatagtttgttacctcagaatgagcctaagactttaaatcaagatattgagaaatctgcaccaattataaatttcagtgcacagaatagtatgcttccttcacagaacatgacagataatcagacccaaaccatagatttattaagtgatttggaaaacatcttgtcaagtaatctgcctgcccagacattggatcatcgtagtcttttgtctgacacaaatcctggacctgacacccagctcccatctggcccagcccagaaccccggaatcgattttgatatcgaagagttcttttcggcctcaaatatccagactcaaactgaagagagtgaacttagcaccatggaccaccgagccagtcttggagtcactggacataaaaactcaaaaggacttcttactcccaaatacctctgctcagtcctatgggtgaagggggaaattctacttcttagggcctgagatgtttgcncnccgacccccgacgacttaaaactttttcttaaacagtagccctcatcggccttctgggaaagaatctgaaaccctccagcttttccgggaa

SEQ ID NO: 260944 - DNA, 817 bp, Homo Sapiens
  misc_feature (512)..(512): n is a, c, g, or t
  misc_feature (551)..(551): n is a, c, g, or t
cgggcctcccctcacgatgtcttggagaccatctttgtccgaaaagtgggggcttttgtcaacaaacccattaaccaggtgaccctgacgagtttggatataccctttgccatgtttgctcccaagaatttggagctggaggataccgatccaatggtgaatcctccagattccccagagactgaatctcctctccagggcagcctgcactcagatggctccagcgggggcagcagtggcaatacccatgatgactttgttatgatagactttaaaccagctttttctaaagatgacattcttccgatggacctggggaccttctatcgggagtttcagaacccacctcagctgagcagcctctccatagatattggagcacagtccatggctgaagacttggactcattaccagagaagctggctgtgcatgagaagaatgtccgcgagtttgatgcctttgtggaaaccctgcagtaaaagtatccttgagtcccagcagcacccccttntttgtggccccagggcataagcagcctcccatgcatcangctgctccaacccctcatcctgctctgagccaggtggaagggaggctggcttctcccatggggaccccagaagtccctacttcttggacctcctggagactccgtggcggaagtcaagcccagtgcccagttggagaagactcacgttgcttggccttggaagatggggaagaacctttcgtacgaaaaagccctcagcagggcaatctgtgtgccctgcccatcaccaacttgcttccaagggtgtcatctgttcctcctgctgc

SEQ ID NO: 260945 - DNA, 513 bp, Homo Sapiens
ctttaagccatattttcagctttgggtccagaaagccacatacctagaaatttggtatgtgagaagagttagagacctctcattcctgtgcctggaagatggagcaggaagggctggggtttgcctgatgaggggcccagtgacccacaggtaagaaccttgtgttttccagattctgagtgtggctcagctcgtgaatgcagtggcacaaggcactctgtgggagtggatcttgggtgcatgatcctcttggattttggcttccctcagggaatcaaagccagggtgggagttctctcctcaccgtggtgcctgtggcatagagagtgggcattgcttccctgtcacgggctgtgctgtatcattgcagatgtaaagacgaccgtggtttaccctgccacagagaaacacctgcagaagtacctgcgccaggacctccgcctgatccgagagacgggagatgactacaggaatattactttaccccacctggagtcccagagcctcagcatc

SEQ ID NO: 260946 - DNA, 794 bp, Homo Sapiens
ctcttcactgcgcagccacctctagcccgccgctttcgggactctcagccttcttttcccttccctgagggccggccggcaccacaacggggccaaaggcagtaactcggttgaaaggcgcgccctgggacaggtcagcgggctccgccatgcgcggcacgcatcccgcaggagcgggtgccagagcagggtaggccgggagttagcagcccagccaggccgctggactcgggctaggggcggggccagcgcagggggcgcaggcgcacaccgcctccgcggcagcatggcggacgcagctcctcaactaggcaagaggaagcgcgaattggacgtggaggaggcccacgccgccagcacagaggaaaaggaggcaggagttggaaatggtacctgtgctcctgtccgcttaccgttctccggcttcagactgcagaaggtgctgagggagtctgcgcgggacaaaatcatttttctacacgggaaggtgaatgaggcctctggggatggggatggagaggatgccgttgtgatcctggagaagacgccatttcaggtggaacaggtggctcagctcctgacgggcagccctgagctccaattgcagttctccaatgatatctacagcacctatcacttgttccctccaagacaactgaatgagaaacacctgcagaagtacctgcgccaggacctccgcctgatccgagagacgggagatgactacaggaatattactttaccccacctggagtcccagagcctcagcatccagtgggtgtataacattctcg

SEQ ID NO: 260947 - DNA, 436 bp, Homo Sapiens
  misc_feature (238)..(238): n is a, c, g, or t
  misc_feature (240)..(240): n is a, c, g, or t
  misc_feature (284)..(284): n is a, c, g, or t
gggcaaggaggcccatccctgcaacgcctaccgggatgaaaggggaagacccatctgcgaagtaataccctgcacctaccctgcccctccctactacccaccctgcatgtgcacctttcaaccgcccctgggcttcgaggcccccggcctcaggcgtggagcgggccccacctgctggctgaggtgatcgagaacttggagtgtgaccctaggcactaccagcagcgcacgctcaccntntccctcagggctgacgaccccctgctcaagctcttgcaggaggnctcgcaaagctgaattaactcaggcagaagagcacagatgtgtgggattgggggaggagtggggacaagattttttatctccaagtgaattttctaaaaatgtattttataccggcttattcctagtattgaataaactagcgggctcactc

SEQ ID NO: 260948 - DNA, 1086 bp, Homo Sapiens
  misc_feature (680)..(680): n is a, c, g, or t
gaggcaggagttggaaatggtacctgtgctcctgtccgcttaccgttctccggcttcagactgcagaaggtgctgagggagtctgcgcgggacaaaatcattttcctacacgggaaggtgaatgaggcctctggggatggggatggagaggatgccgttgtgatcctggagaagacgccatttcaggtggaacaggtggctcagctcctgacgggcagccctgagctccaattgcagttctccaatgatatctacagcacctatcacttgttccctccaagacaactgaatgatgtaaagacgaccgtggtttaccctgccacagagaaacacctgcagaagtacctgcgccaggacctccgcctgatccgagagacgggagatgactacaggaatattactttaccccacctgggagtcccagagcctcagcatccagtgggtgtataacattcttcgacaagaaggcttgaagcgggaccggattgtttttcgagaacccagattccctctgatggttttgttcctcatccctgacctcaagtgggaaccaacagcagctcgatgaattgtacttgatcgccatctgccatcgccggggcatcagatccctacgcgaccttactccggagaacttgccgctgcttcaggaaaatcctccacccaggggcaggaggccnatcctgaaacgctaccggatgaagggagaccatctgcgagtatacctgcactacctgccctcctactaccacctgcatgtgcacttcacccgccctgggcttcgaggcccccggctcaggcgtggagcgggcccacctgctggctgaggtgatcgagaacttggagtgtgaccctaggcactaccagcagcgcacgctcacctttcccctcagggctgacgaccccctgctcaagctcttgcaggaggcctagcaaagctgaattaactcaggcagaagagcacagatgtgtgggattgggggaggagtggggacaagattttttatctccaagtgaattttctaaaaatgtattttataccggcttattcctagtattgaataaactagcgggctcactcaaaaa

SEQ ID NO: 260949 - DNA, 816 bp, Homo Sapiens
aacaaactcagcatgacgaggaagcacacttcacagctccagggtgcaatactgatgtaaagttgcctcgtgaggatacatttttcgctcatgtatgcaaaattcctatcagttcatttgcacagccagttccaatcatgtatgtgatcaccagattaaaagcttcatccagaaagacaagactcctcagaacgaatagtagacaagtaagactgctacccacagaagccagtacgcttcaggtgtgaggcggggtaactactcatctcttcacagagccaaggaaagaaaaagaacgtctctaacatgatttaccattttaaacagccttataagttttgtctcttaaaatcatgctgcagaaggagggggtaaaagtcgtgttctgccctgtctgtggcattggagtgccccgctaggtaagaagcaatgcttagatcttgcttccaggcagcagcttgaattcccgaatcttcctgcaaggtgcatacaaatgcagcgtgagatccatacacgtaatccatattcaccttcccatccatcccgcagaagaggcatggtgacacccaggctactgtccatgcttgagaggacgtatttgaaggttctgttactacaagttgggaatattcacggacatgcctgaataccccggctgtaactcacacgtggtctgtgtaagtggattaaccctcggggcggccttgtttaatcctgaataatatctgaaagactgagtttacttgggaatgtgtagtttttctaatgcacattaaaatttattttagctgttaaaaataaaatcattttattact

SEQ ID NO: 260950 - DNA, 784 bp, Homo Sapiens
  misc_feature (34)..(34): n is a, c, g, or t
  misc_feature (49)..(98): n is a, c, g, or t
  misc_feature (722)..(722): n is a, c, g, or t
acctaaagcccacctatcccaatcctcaaggttnactgggaatgtgggnnnnnnnnnnnnnnnnnnnnnnnnnnnnnnnnnnnnnnnnnnnnnnnnnnggacccactgggtacaagagatgggatgctccgacagcgtctcccaattatgaaactaatcttaaccctgtgctgtcagataccctgtttctggagtcacatcagtgaggagggatgtgggtaagaggagcagagggcaggggtgctgtggacatgtgggtggagaagggagggtggccagcactagtaaaggaggaatagtgcttgctggccacaaggaaaaggaggaggtgtctggggtgagggagttagggagagagaagcaggcagataagttggagcaggggttggtcaaggccacctctgcctctagtccccaaggcctctctctgcctgaaatgttacacattaaacaggattttacagtaaatgaagaggtggcttgtgtgtttgtcaagttctttctcctgcaacctctgacctcccccaggatgagctggccttggttttttactgattaagaaaggaacagggcaaaagaagtagttacttgagtagctgaagctgcaaatgaggaaatcactgtacttctgggccgcagagccagccccggagccattcctccctgttgcttttgttgttgtggttcttgtctttttcattgtctaataacagctttattgngatttagtttacatacctccttcctctgattttgaaaagattaaaaatgacaactccctctg

SEQ ID NO: 260951 - DNA, 839 bp, Homo Sapiens
cctgcattgatgctcaggagttcctgggctgctcttgatcctttctgggcatccagcttccagttaagctctgtttgccaaacaaactattctcagctgccctttggcctgcgcctgatgtgttcctgttgcagtcccgcctgcctgagacaggagcaggcaggagagccttcatgcccagattcccacaggacaattggggagctgctggcattgtctttctgggaagattctgctttcttggaccaaatggcagcctgattaccagtgtcgggcctgcatgctgcccccgacacacgcacgcacgcgcacacacgtgtgcacatgggccatagccacaagccagctctcctccagggtcctttcaacctcgctgtccagggaccctgtccttcttgcccgtggggcttccatctggcagagaacgttcagggcttgttgaacttgaaagctcattagacttaagctgtcacctgtgcttggtgccccaggaacagcccagagaggacagtgccccactcacttcttgttggcagcctcctgtgcaggaagtgccagccgggcctcgacgcacccagctggctgtgggtcctgaggaggggcgggaggcggccgctcagtgcagatggggactcctctcctctgccctgaccttaccctccattacctccttcactggagtggggctggggggtgggtggaatcagtgttttaatcggatttttaaaaaacattttatttctttgtacaattaccatcctatgtaaagatgaaatttgtgttgagttgaagattgtcatggaataaagatcacaccgtacttgaggccatcttcatgt

SEQ ID NO: 260952 - DNA, 1061 bp, Homo Sapiens
  misc_feature (30)..(30): n is a, c, g, or t
  misc_feature (502)..(502): n is a, c, g, or t
  misc_feature (868)..(991): n is a, c, g, or t
ctgtaaccctttgccccttcacaatatagnaaataatttggtttttgccattacattttaatgccatggtttaaaacctgtttgaaagctgcagctttatacagctttccttctccctgtgaaatcactttgtttatgtgatggcatttaaaaaatagcatgttcctttttaaactgaattttatatctaatcaatgtcttcagtcttgaagaagaatttgcattgttgtgtttgtatatagagtattgcagtgcatgaattagctttatgcattttattaaatgctgtttcaatgtggcattattgttgtggcttaatactactacctaaatgaggtttatactattaaaagtgaattaaagactaacatgcatcctgctcttcatttttcttcatgatagtagtaatgcctggcccccaaacaatgcagcgctctcttgtgttatggacatgaagcatcctggtggtcctgtctctacagctctctggctcctaccttancttagcggccaagagggattgggccctctgtggtccactggacttattaatacctttagtgggaaaccctggcaggacagtctttacatccacccagcaaggcagctccttggtgtggaggtagggaagccacacacatgtttctggagcagagcacagttaggctgctggaacattcagatgccattacagacaggccttaaattggcaagcttattctctaaggatacgtgctatcaagggcaaaaacaagctccaaaagtttcagaagttagaacatattcattatgtcatctgacctctcatgttccaggtgaaaattctgaggtccaaagtctgatgcatgacagaactcactggcaggcnnnnnnnnnnnnnnnnnnnnnnnnnnnnnnnnnnnnnnnnnnnnnnnnnnnnnnnnnnnnnnnnnnnnnnnnnnnnnnnnnnnnnnnnnnnnnnnnnnnnnnnnnnnnnnnnnnnnnnnnnnnncagatgatacaggtttagatggtgctgccaggtagtgcctcaaagagaagaaaagtggtggagcggcggc

SEQ ID NO: 260953 - DNA, 759 bp, Homo Sapiens
ccgttaatgatgagaagaaataagacaaccagtttaatcaagatctgacaattgcaaattttaagtatttaaattacagataaggaatatcgtttgtgcattttctagcttcatatggtagttagacaaccagaaaactaacagttgtcagactcaatgtcaaataatggaatttgggaaagcattcttaatatcactttcatttaatatgcactacatgcacatgatgcaggtagggaagaagtttatgaatccatgcattaaagacaagacaggctggcactattgccaaacgtgcactgagccaattaggatgttgctctaagttctttatacataatggtttccatgaaaatatgtgcagaagcagaaatgtgtacatatctgaaaacatcttcatttggtttcctgagctttctttgcgttctgtttttcttttgccttttctactagtggtattaactgctggtgttctgctaaagtctttaacaattccataatgaaaggcagataattatgcttccttctgatattctcaatcttgtatctttttaatttctgtacttcttcttcaataagcatctgatttttggcaacttctgactgaatagcacttaacatactattaccttgatctgtatccatgggttcctctgcaagttgtctttgtaactctgctatcttctgctcatatatcatttttctgtcagacacaatggccattaaattaaatcgaatttcaccttcactgtacttttg

SEQ ID NO: 260954 - DNA, 758 bp, Homo Sapiens
  misc_feature (698)..(698): n is a, c, g, or t
  misc_feature (716)..(716): n is a, c, g, or t
  misc_feature (721)..(721): n is a, c, g, or t
  misc_feature (727)..(727): n is a, c, g, or t
taaagcactttatccaattaggccaagatttaacattgttgacagtcctgtagctgttttatcataatttattatcaatattttacattaatggtttcacagttgccaattacttggccttaagggtaaaaagtacaatatacactaaacctcaaccgttaaagcagatgcaaaaattcacctcacctaaattgaacttcttgcatatttccattactgacttggattgtctttctttcatatcactaatggagttggaataaagagctgtttgcctatccctgttaatgatggttgtgtttaagaatcttcctcgtcacgtttgtgttcagatctcttatgttataattagatcagagactggtagcatcgtttctctctctgaaagcaccagtgcccagagtctgctcggtaataaaattatggatccagattgttctgagagacgaagatacttgctgctgatagaggtgaaaacgagattgatccgtctggggttttacggtgtgcactgggtgctgcacagacttgtcaaggtttgctacgtcctctgggcatctgcaaaaggccctgctctctgggagtgttgtatatagtgtagcaaaagagtatttatacatcccaccaatcaaaacacagctttattacctcatgcgaactcatacaaaccaatagaattttcaacatgttctgtaggntaggagtgctcactttantaccnctggancattattcacggttgtagtttgtctctttct

SEQ ID NO: 260955 - DNA, 488 bp, Homo Sapiens
ctggttaaagaatatttgataatgagttaggctatgttgatactgttgatcgccattcttgaatttatagacattgatggttttctctaattttacatactgggaggtctacattttttagtctgtcttcacataggtgccttgccttatgctttagttacttttctttgatccttgtgacttagctgttaaatatctggtataaatacttggtgctttggtacaacagtagtataatgtagttaaagcttttaggtcagacagaactaggtttaaatcctggctcaggtcccttagataagatactaagaatttataggtcatacagctgttggaaggataagtaatatactgtatagaaagtgattaccacaacatctgcacaatgtcattatgtttataaaaggttcctttctgtttgtcagtgttatacttgattattcttatttgtcttctgcagcacatttggccagtgtttcgggaagtac

SEQ ID NO: 260956 - DNA, 843 bp, Homo Sapiens
  misc_feature (211)..(227): n is a, c, g, or t
  misc_feature (348)..(348): n is a, c, g, or t
  misc_feature (781)..(781): n is a, c, g, or t
  misc_feature (806)..(806): n is a, c, g, or t
  misc_feature (828)..(828): n is a, c, g, or t
tgtaacccctgaggattataacgaccccatgacccccgatgacagccagcagtttggtgactagagttttttgagcctgccattctcagtagcagctttggtctggagatggaacgtggagcagggaatctgacagccacgtttctcgtgatcacatggactggagttgtttttgttatctggggtggaaaattgcaatgatcaagtttcnnnnnnnnnnnnnnnnnacttagaaaagcaaatattgtgtttttgtaataaatccctttcagcaaaattgcggaggatcattcatccactagggccccacctgaggcacagcgctgactcatcacggtggtaccagtnaggtcagccatctggaaacagaagtggccctaattgggccaaaatgtggtaagactcgctggcctcaggcagggccaggccagttccctcacttctctgcacacctattcccagattccatccagagcaaagctgatgtttatcgtctcattgtacttaggctttcgtactttaaaaaattatgactttttaaaaataagccttcagcagacagaagtgaagaaatttagcctgggttgcctcagcaacaaagtctgcggttcctaagagccacatgttggggaagtggggtgacccaaacttggtgacataggttgatttgattcagaccctcagcctttacaaggcaagagcttcattgcaggttcccacaggaggcccttgcacattcctgttctttccttgacctttccttcaggtgggcaccacttgncggccccttgggacctgctgttttnggtgttcatgtgggaggtttgntggattccttttaaa

SEQ ID NO: 260957 - DNA, 803 bp, Homo Sapiens
gtggatttactaggaaggtgggacgttggaggggtggccgcatggagtgagtactgtctctggccaccgagcagagccagtgacagcagcgtcctggtaggcaggcaggcgtatcaggtttcagaggatgcggctgggaacgggagtagaggtgaggggtcgttgcatctgtcgcggtgtgtatcttttgggggttcagcgccaccagcgacttgggcctcattcatcgcgcttacatttctccacctcatttgaagaacgagcttcgtagcccacggagctgaggtatatgagctccctgaaagcacaaagcagttatttccatcttcagatcattcagagattatgaaggcacaaaccctgccttcaatttgcttatagtcaagtgggagcagacacaagtcaatggattgcagtattagccactgaagtaatctaaaagaggtggggaggccacagcttatggtgaatgactttctcaggagttataaagtgataccagacctatcagcaggttgcaggtgaacatggccttgaggtaaacctgtccccttgctgaatacagtttcagtagattgtttatagtagtttcaggaattgagattttttacaaaaatacaaaagttttgcttggttctgttctagatgttttcttctaaataaatgagaaagatgtttcaacaaaggctctttatgctgaataattgtgatgcttgaagttgctaatctgctttaagtggattttaaatgtcaggcaattctagacagttttttcttggtcaaataaaaatttaattaagcgg

SEQ ID NO: 260958 - DNA, 771 bp, Homo Sapiens
  misc_feature (505)..(505): n is a, c, g, or t
  misc_feature (507)..(507): n is a, c, g, or t
  misc_feature (628)..(628): n is a, c, g, or t
  misc_feature (656)..(656): n is a, c, g, or t
  misc_feature (701)..(701): n is a, c, g, or t
gcggaagggaggtggcctgggtcccttccctcggaatatcttagtttatttacctccttcattggccatttgcaggctcttctccttgaaaaatgaatctttacgcattctccaattataaaatcagtgactgttagctaccaaaggctgcactaggatttcttctgtgtccaacacgccaagagccctgaaattggcttcggtttactccatccctgtctgtcctgctggcagtgtccatgctaaaaaacaagtcgaggtgattgattgaaacggagctgaaggttgtttttaaatgtctgtcagtggagaaacgcgtatcacgaatctctgaggaagttagtaaaaattttttcccgtacttactggccttggtggtcactttctatagagatgccccaaatataaaaatcaattcatttcagaaatcaaaaaaattttccaaacaaacccggagcctttgctttaggaagcaaactcaagtctgtgatgattattgtgcttnanggatgggtttctaattctgtcataaaaaatgatgaaacaaggtgatgtcagagggacttcaggtgacaccaaaataccccatccagggcctggaagcccctctgcctttgactctaagatngggcaggacccccgctctcagtgggatntgcccgcgaccctggcgctgggaggcagtgctgcagagaggagtngtgtccgcacggctgtcaccagacattcctcattcacccttccgtaccgcacagcccagcgtacttcctt

SEQ ID NO: 260959 - DNA, 567 bp, Homo Sapiens
  misc_feature (437)..(446): n is a, c, g, or t
gcgtactggcgacccggagtgatgagcccgcccgagacgatgccgccgtggagacagctgaggaagcaaaggagcctgctgaagctgacatcactgagctctgccgggacatgttctccaaaatggccacttacctgactggggaactgacggccaccagtgaagactataagctcctggaaaatatgaataaactcaccagcttgaagtatcttgaaatgaaagatattgctataaacattagtaggaacttaaaggacttaaaccagaaatatgctggactgcagccttatctggatcagatcaatgtcattgaagagcaggtagcagctcttgagcaggcagcttacaagttggatgcatattcaaaaaaactggaagccaagtacaagaagctggagaagcgatgagaaacttatttctatgggacagagtcnnnnnnnnnnaatgtggaagaatgtcttataaaacctgaatcctgaggctgatgaattgtgaaaattcctcaaaaggaaattatgctggtcatcacaggaacatctcaacgttcgagtaaactggaggact

SEQ ID NO: 260960 - DNA, 871 bp, Homo Sapiens
aatgttgcagtctgcatcttcttgaagtaacagaactgttggtagctgtttaaaagtaaaatgtgtctaaagaccttttggaaattaagatgtaagagattaatgtaccaaagcagtctcttaattacttaaaatgaattatttcaaagaatctttaattgaattttctgtgaagtctggaatttgtaaattatgtccctttgttcaaaccagcccctgaaaagaacaattaaggcaattaagatagcattaaagttttcaatgaagttggcattttctgtgtattaagattagatgttagctgctgaagtttgtggaggtcggacataaagcttccaacatcagtaatgcaaaattgtcttgaacctgcgataaaattttgttggacttttttttcattgcagtgaaaagggccatgtagcatgcctcaaagccaggttactcagcctagtccttgtttaagcagttttgatattcattcaagttcaattttctcactgattttatgattaatttcttggaaaatttgaaagttttcaagaagtaaaaaattaatatcttgttatcccagtatatagagattaacttcagttcaatgtttggtgcattttcttctagtctttttttcaatgtataaatattaaagttatttcatagttgagatcatactgcatatatgatactgtatcttgcttttttcattttaacgtcgtgagcaattttcccatgacattacaaactgtctttgaaaaatggaaaacatttggggctgtcagcataactgaaaatgttttcttggtgtgacacatgtatcttgtaattggtttgatttagtgtgctttatttcaataaaaattcagtattataattg

SEQ ID NO: 260961 - DNA, 963 bp, Homo Sapiens
gtacctacctcaggtagggactgaataaacacgtgtaaggcactttggaaaaatacctggcatatatagtaagcagtatgttggccattacgaaaggccctgggaattctgtactgctgctcatgggtgtagtcggttctagaggggtgggcaggtgggagtagctgaggaagacaagtggctggaatggtatcacatgatacacagaagtatcctcagttctgaatctaccttggcctcaagggcccaggagaataacttttcccagctgacagcctctctgaggacaatgacatatgaatgaggatcaaaacgagctttggccaggcactgtggcgctcacctgtaatcccaccattttgggaggctgaggcggaggaccacctgaggcaaggaattcagaaccactctgggcaacataatgacactaaaaaagactatctctaatcaaggctagaaccaagggaaggctaagaattgcccagtactgtgcaactactgaaagccctacccaaggccaccagccttgtcttcctctttcctctgtcagttcaaaaagaacagaaacctccagctcttttacatagcaggtaccacggcatttatcagaagaggccaagcttctggttccccatgcagccctttgaatagtgtgtctaaacaaaaataggtgtccaagtagtcacactgagactttaactggtaaccccacctgtggcgtcagtcgcagtgctctggccaacactatagcagggcttattcttctccctcatgtgtagtgaaacaaaatgtaacaccttgggttcattcagttccattccctatgtctacctgtgtcaatataattccctgatttggaggcagctctcctcattttccccaaaacagggaaagcaaggagtaaattcctcttaaaatcaaaagctaataatatgcttcctaaaataaagactcatcaaggtc

SEQ ID NO: 260962 - DNA, 897 bp, Homo Sapiens
ggggagttcaaacctaagcagctggaagggccctgtggctaggtaccatagagtctctacacaggactaaatcagcctggtgtgcaggggaggcagacacacaaacagaaaattggactacagtgctaagatgctgtaagaagaggttaactaaaggacaggaagatggggccaagagatggtgctactgtctactttagggatcgtctttcaaggcgaggggcctcctatctcaagctgtgatacaggaaccatggccaactgtgagcgtaccttcattgcgatcaaaccagatggggtccagcggggtcttgtgggagagattatcaagcgttttgagcagaaaggattccgccttgttggtctgaaattcatgcaagcttccgaagatcttctcaaggaaacactacgttgacctgaagggaccgtccattctttgccgccctggtgaaatacatgcactcaggggccggtaattgccatgggctggggaggggctgaatgtgggggaagacggggccaagcatgctccggggggagacctatccctgcaaaatcccaagcctgggaccatcccgggggagacttctgcatacaagttggcaggaaacttaaaccatgggaaacggattcttgtggaaattgcaaaaaaacgagatcctgttttggggtttccccccggaggaattggtaaatttgaccgactgtgtctcgaactgcgtcctttgatggacaggagggccatacccactgtgcttttcaaatcacctttccccctccttcccaggggaataaggacccagcgtgtctacgaaaatttagattctttaccgggaactttcgtgattgaatttggaagggaaacctttgtggatgtttgcaacgactccccccgcc

SEQ ID NO: 260963 - DNA, 783 bp, Homo Sapiens
ggggggttctccggcagcggatctgcgcagaagcgttccgtgcgtgcaagtgctgcgaaccacgtgggtcccgggcgcgtttcgggtgctggcggctgcagccggagttcaaacctaagcagctggaaggaaccatggccaactgtgagcgtaccttcattgcgatcaaaccagatggggtccagcggggtcttgtgggagagattatcaagcgttttgagcagaaaggattccgccttgttggtctgaaattcatgcaagcttccgaagatcttctcaaggaacactacgttgacctgaaggaccgtccattctttgccggcctggtgaaatacatgcactcagggccggtagttgccatggtctgggaggggctgaatgtggtgaagacgggccgagtcatgctcggggagaccaaccctgcagactccaagcctgggaccatccgtggagacttctgcatacaagttggcaggaacattatacatggcagtgattctgtggagagtgcagagaaggagatcggcttgtggtttcaccctgaggaactggtagattacacgagctgtgctcagaactggatctatgaatgacaggagggcagaccacattgcttttcacatccatttcccctccttcccatgggcagaggaccaggctgtaggaaatctagttatttacaggaacttcatcataatttggagggaagctcttggagctgtgagttctccctgtacagtgttaccatccccgaccatctgattaaaatgcttcctcccagca

SEQ ID NO: 260964 - DNA, 708 bp, Homo Sapiens
ggggcccctcctccgccgccggctcccgggtgtggtggtcgcaccagctctctgctctcccagcgcagcgccgccgcccggcccctccagcttcccggaccatggccaacctggagcgcaccttcatcgccatcaagccggacggcgtgcagcgcggcctggtgggcgagatcatcaagcgcttcgagcagaagggattccgcctcgtggccatgaagttcctccgggcctctgaagaacacctgaagcagcactacattgacctgaaagaccgaccattcttccctgggctggtgaagtacatgaactcagggccggttgtggccatggtctgggaggggctgaacgtggtgaagacaggccgagtgatgcttggggagaccaatccagcagattcaaagccaggcaccattcgtggggacttctgcattcaggttggcaggaacatcattcatggcagtgattcagtaaaaagtgctgaaaaagaaatcagcctatggtttaagcctgaagaactggttgactacaagtcttgtgctcatgactgggtctatgaataagaggtggacacaacagcagtctccttcagcacggcgtggtgtgtccctggacacagctcttcattccattgacttagaggcaacaggattgatcattcttttatagagcatatttgccaataaagcttttggaagccggaaaaaaaaa

SEQ ID NO: 260965 - DNA, 726 bp, Homo Sapiens
  misc_feature (601)..(601): n is a, c, g, or t
ggggaaccacgtgggtcccgggcgcgtttcgggtgctggcggctgcagccggagttcaaacctaagcagctggaaggaaccatggccaactgtgagcgtaccttcattgcgatcaaaccagatggggtccagcggggtcttgtgggagagattatcaagcgttttgagcagaaaggattccgccttgttggtctgaaattcatgcaagcttccgaagatcttctcaaggaacactacgttgacctgaaggaccgtccattctttgccggcctggtgaaatacatgcactcagggccggtagttgccatggtctgggaggggctgaatgtggtgaagacgggccgagtcatgctcggggagaccaaccctgcagactccaagcctgggaccatccgtggagacttctgcatacaagttggcaggaccatggccaacctggagcgcaccttcatcgccatcaagccggacggcgtgcagcgcggcctggtgggcgagatcatcaagcgcttcgagcagaagggattccgcctcgtggccatgaagttcctccgggcctctgaagaacacctggaagcagcactacattgacctgaaagaccgnaccattcttcccctggggctggtgaaagtacatgaaacttcagggcccggtttgtgggccatgggttctgggggagggggctgtaaccgtgggtggaaaaacagggcccggagtggatggccttg

SEQ ID NO: 260966 - DNA, 769 bp, Homo Sapiens
ggggctgcgaaccacgtgggtcccgggcgcgtttcgggtgctggcggctgcagccggagttcaaacctaagcagctggaaggaaccatggccaactgtgagcgtaccttcattgcgatcaaaccagatggggtccagcggggtcttgtgggagagattatcaagcgttttgagcagaaaggattccgccttgttggtctgaaattcatgcaagcttccgaagatcttctcaaggaacactacgttgacctgaaggaccgtccattctttgccggcctggtgaaatacatgcactcagggccggtagttgccatggtctgggaggggctgaatgtggtgaagacgggccgagtcatgctcggggagaccaaccctgcagactccaagcctgggaccatccgtggagacttctgcatacaagttggcaggaacattatacatggcagtgattctgtggagagtgcagagaaggagatcggcttgtggtttcaccctgaggaactggtagattacacgagctgtgctcagaactggatctatgaatgacaggagggcagaccacattgcttttcacatcccattccccctccttcccatggggcagagggaccaggcctgtaaggaaattctaagttattttacagggaaacttcaatccataattttggaaggggaaacctccttggggagctgtgaagttcctcccctgtacagtggttaaccatccccgcgaccatcctgaattaaaatggcctcccctccccagcata

SEQ ID NO: 260967 - DNA, 1866 bp, Homo Sapiens
  misc_feature (45)..(45): n is a, c, g, or t
  misc_feature (73)..(73): n is a, c, g, or t
  misc_feature (247)..(247): n is a, c, g, or t
caagtcggcctacccaacgctctggaggaagccccgtgccatctnccatttcccccccatcccttttttcacntttgcctcacacccaggtcaaaatccaaaatatccggagagtcagacactgggagacttgtctgcttcattggcaacttcccaggtggttatgatacgcttcccggaccgcaacacttgacctacggaactgaaatgatgaattcatgtcagaagaaataggatttggggaagnattcattacctggaccattttcagcagctggaataaaaagtacttaacaacaacaacaaaaatcacacacaaagtccaaaaagtgttttgaaaaagtgatttgagaatttactgtacagtttttttaaacaatttatttatatgttggcttctacatgctcttacattcgtgtaaaacatttatacatattctttacaatttgtacatatattaaatggctatagcataaacattgttctatgggattttatagaagaaaaatcaagtggggagaattacttatgaaacattaacaaaaacccgtgatattgaagaacaagatgttctcatattcatttgatttcatctacttatttttggtgtcattttattgatgctggcccagactttccatttcccgtaattattaggtcagaaaaatgaaagcagcgggagggaacgcggtaaggcacctgtgggagacgggagcgctcctccgcaggggtgagacggtggctgccagtgttgagttcgagctgacggtgtgccaaggtcctgttttgctttatgccgttaagtgaagcgctggaagtgctggtgctcagaaacaccctgtgtgaagtttcggatgtagtcaggaagggcgctggtctgttctttctctccaacctcagagcgccggggactctgtacactgctgaggctgcagcccttctcagtccctacacttttccatctaatggggagctaacctgtgctttttctctttgctgatgacaccaactggccatgaacccgccacccaagccaagcagtgtgccgtggccacagcagcgcttctcatcacggtggatgaggagccaaagaataagaaagggccaagagacgccggggtgctgggtgccctccttcccccaggccctcccgaacacaggcctccgcacagccactcacccgtcggaccaaagccacaaaattctctacaaagtccctcaattcttctaatgtattcttcatggcataaaacatgccttaaccaagattaggaaggaagtgcaaagagagaaagcactggtcctcacataagagcagcacatcagaaatgtcgctgaggacatgggtggccaggggtatctgctcatctgccaggctgtggggtccccctggagggacatgggatggcccacctgccacacaccacgatggcactaggcagccccaggggcccccagcgtcctccctcttgaagtgtaagcacttgagctgtaactgtggcagtgaaaggcgtaacgacttccctcaatgacaggagccccagaggactgaaaggagttataaaaatatacaaacatagatattttttattctggcatagttcatgtttttaagaaagtaattagtaattaattatctgacactgggtaagaactggaagattgtgggagacttataaattatataagacttataatttataagacatataaattatgactctatgtaaaatatcagtggggagaaacccctcattttccattgaaaattctggtaacttttaagtactttccaaaaatagagacaatttccactggtttaaataatggatgcggaaatgaacaaaagaccatccctaaataac

SEQ ID NO: 260968 - DNA, 610 bp, Homo Sapiens
  misc_feature (67)..(192): n is a, c, g, or t
  misc_feature (490)..(518): n is a, c, g, or t
tcggaactagaacagataaggagcggcaagcacaactcggggaagtgggctggggagggggcagcannnnnnnnnnnnnnnnnnnnnnnnnnnnnnnnnnnnnnnnnnnnnnnnnnnnnnnnnnnnnnnnnnnnnnnnnnnnnnnnnnnnnnnnnnnnnnnnnnnnnnnnnnnnnnnnnnnnnnnnnnnnnngaaagagattgatttgtacaaaaaagtaaccagtaaaattgaagaaacaaaattgggcaacctcctaaaattaggctaagaggaggtgctgaggtagacattaactagaacattgatgaattaaaaacactattctgtaatacagagcaatccgactggcacttgtgctatcacgacataagacaagccacaaaaacaaacaaataacaaacacgaaacataatacccaaaccaaaaggcttagttttgcttggtcccagcagggcagcagggccctcagtgctataatttacatacnnnnnnnnnnnnnnnnnnnnnnnnnnnnncgggttggatgtcatggtgcaccaccacggcttcttaaccttacgaagatcatgcataacactatgtgaacaaatcctatgatacacaccag

SEQ ID NO: 260969 - DNA, 1016 bp, Homo Sapiens
ggggccgaggggcctcacaggggagcccccccagggctttggggccccgggagcccagggggtttaagggcaaacccctttgcccaagcccctaccccagaaaatgacaggggccagggactcccagggcccctccagggctagggggccaacccccgccagctgggggcagaagggggctcacacaggagagaaggccatggctcttgcagagaggcctgtccttcttggagtagaaggtctttccttccaggttgatcggacatatcgcacagacgaagcaggtgtcatgccagctgaagcccagggcctccaggaagcggtccccagcgtcgatcttgaagtcacagccatggcatttcgtgccaaacatcttctcatagtctcgctcgcaatagggcacgccctcctccatgtagaaggccctgttccggatgggcgtcttgcaggcagcacaggtaaagcagtgcacgtgccaggtcatcttcagggcgtgcatgatctcgcctgtaatcttcttcttgcacttggcacagctgggtgcatagcgcacgtcatagcatggtgggcagaagatggcgcccttctcctcaaagaagccaccctcttccaggaccttcccacactggctacacacaaactcctccgggtggtacgcgtggcccagcgccaccaggtagcggccccggatgaccttgtggcactggtgacacacgggagtcttgccgttgttgctgccccctcctggcacccctccggcagctgcctgcacaatggaggtgcggctctgcagcggcgtgggcgtggccggctggctgtgccgggtcagcactgtgctcgttttgtccggggcatagcgctcggcaaacgcagggtccacagcccagggcgggcggctggtagggctgggggcggtagggccaggccagggctcctggggtgtagatgaggctggggctggggcttctgtccccacccaggcctcgctaccttaaaaccgttagagttactgccgg

SEQ ID NO: 260970 - DNA, 977 bp, Homo Sapiens
gcctgggtggggacagaagccccagccccagcctcatctacaccccaggagccctggcctggccctaccgcccccagccctaccagccgcccgccctgagctgtggaccctgcgtttgccgagcgctatgccccggacaaaacgagcacagtgctgacccggcacagccagccggccacgcccacgccgctgcagagccgcacctccattgtgcaggcagctgccggaggggtgccaggagggggcagcaacaacggcaagactcccgtgtgtcaccagtgccacaaagtcatccggggccgctacctggtggcgctgggccacgcgtaccacccggaagagtttgtgtgtagccagagtgggaaggtcctggaagagggtggcttctttgaggagaaaggcgccatcttctgcccaccatgctatgacgtgcgctatgcacccagctgtgccaagtgcaagaagaagattacaggcgagatcatgcacgccctgaagatgacctggcacgtgcactgctttacctgtgctgcctgcaagacgcccatccggaacagggccttctacatggaggagggcgtgccctattgcgagcgagactatgagaagatgtttggcacgaaatgccatggctgtgacttcaagatcgacgctggggaccgcttcctggaggccctgggcttcagctggcatgacacctgcttcgtctgtgcgatatgtcagatcaacctggaaggaaagaccttctactccaagaaggacaggcctctctgcaagagccatgccttctctcatgtgtgagccccttctgcccacagctgccgcggtggcccctagcctgaggggcctggagtcgtggccctgcatttctgggtagggactggcaatggttgccttaacctggctcctggcccgagcctggggctcctgggcctgccccacccaccttatccttcccaccccactccctccaccac

SEQ ID NO: 260971 - DNA, 893 bp, Homo Sapiens
gatcgctggctgccgggacttttctcgcgctggtctcttcggtggtcagggatggcgcggaagtcgaacttgcctgtgcttctcgtgccgtttctgctctgccaggccctagtgcgctgctccagccctctgcccctggtcgtcaacacttggccctttaagaatgcaaccgaagcagcgtggagggcattagcatctggaggctctgccctggatgcagtggagagcggctgtgccatgtgtgagagagagcagtgtgacggctctgtaggctttggaggaagtcctgatgaacttggagaaaccacactagatgccatgatcatggatggcactactatggatgtaggagcagtaggagatctcagacgaattaaaaatgctattggtgtggcacggaaagtactggaacatacaacacacacacttttagtaggagagtcagccaccacatttgctcaaagtatggggtttatcaatgaagacttatctaccagtgcttctcaagctcttcattcagattggcttgctcggaattgccagccaaattattggaggaatgttataccagatccctcaaaatactgcggaccctacaaaccacctggtatcttaaagcaggatattcctatccataaagaaacagaagatgatcgtggtcatgacactattggcatggttgtaatccataagacaggacatattgctgctggtacatctacaaatggtataaaattcaaaatacatggcccgtgtaggagactcaccaatacctgggagctggagccctatgctggacgatactgcagggggcagccgcagcccactggggaaatgggtggataatattggatgcggcttccctgccaaaggcttacccaaggctgttagaa

SEQ ID NO: 260972 - DNA, 421 bp, Homo Sapiens
  misc_feature (64)..(64): n is a, c, g, or t
  misc_feature (346)..(346): n is a, c, g, or t
  misc_feature (371)..(371): n is a, c, g, or t
gatatattgatgcgctccctgccaagctacccaagctgtagaaaaacatggagaagaggagaangaaccaacccatagcttgcccaaaaagtgatttcaagaatcccagaagcattttcccagaaatcctttggggctgttatatgtgccaatgtgactggaagttacggtgctgcttgcaataaactttcaacatttactcagtttagtttcatggtttataattccgaaaaaaatcagccaactgaggaaaaagtggactgcatctaatccatctttactgtcaacatctgtatttaaagaagaaagaaacaaaggctgaaaaggctgctcactctcatcatcntaggtgttcctcatgtgttctaaangtctttttgtaaaataaacacaaaaataaatttatgttgaattgaaaaaa

SEQ ID NO: 260973 - DNA, 954 bp, Homo Sapiens
  misc_feature (925)..(925): n is a, c, g, or t
gctggcggccccgccccgccccgcccggctgctccatggcgctgtgcgaggccgcgggctgcgggagtgccctgctctggcctcgcttgttgctcttcggggactccatcacccagttttccttccagcagggtggatggggagcatcgctggctgacaggctggtcagaaaatgtgatgttctgaatcgtggattttcaggttacaataccaggtgggccaaaattatccttccaagattaatcaggaaaggaaacagtttggacatcccagtagcagttacaattttctttggggccaatgacagtgcactaaaagatgagaatcccaagcagcacattcccctggaggagtacgctgcgaacctaaagagcatggtgcagtacctgaagtccgtggacatccctgagaatcgagtcattctcatcacgccgaccccactttgtgaaacagcctgggaagaacagtgcatcatacaaggttgcaaactaaatcgcctgaactctgttgttggtgaatatgccaatgcgtgtttacaagtggcccaagactgtgggactgacgtacttgacctgtggaccctgatgcaggacagccaggacttctcatcttatttatcagatggactacatttgtctccaaaggggaatgaatttttgttctcgcatctctggcctttgatagagaaaaaggtctcttctctacctttgctgcttccttactggcgggatgtagcagaagcaaaacctgaattaagtctgctgggagatggagaccattagccaatcacaggagacccaaatctgcttgttatctacagaactcaaagttgtcaatacgtagaggtacgcttttttcctcaggcttaaacctttgccactgatattaataataaaagtattagatgattttccaggggaaaaangagcgcgaggacactaacgaaacatgtcg

SEQ ID NO: 260974 - DNA, 762 bp, Homo Sapiens
cagctgcccagggttcaagcttgagcctttaggtgatctttaaactatggtagtaaaataagcctcactcaaacatagctgacttcctattggtacagcttgaaaagcactttttactacatacacattttatgcttaaaaagttaacatgatacgaaactgtgattagaaaatatctggtctggatgtgattagtaaggatacaagataatgttctaagactgcctaatgctttttgtttgattttcatctgccaggcgttgttatgtgctatgagggtagcaagtacgtctttgtcttaatgatctaaggctggtgtagaaacaaagggcctaatgagaaccaatcatcatggaagtcagttgcgggggcagcccataaggaaagggaaagtgagtggggttgggcataggctgagtgaggtggcctgaatgacacctcttagaggactgtgaagtacaggcacagcccgactgcagggagggatgcacccatcatttacccatgggagcatctgtaggaccatctctctcccacttcttctcccctcccccaccgcatctggccagatggactgtcctacagcaatcgtttccatctgtcaccctcttccctctcctttcataccagtcactatcttgggtaacaaatttatacaggacagtggtacagaaatacatctttgctctgagaatacagcaaatattaacttaaattattataactgaacaaataataaaacctgaattttaatatcttcaa

SEQ ID NO: 260975 - DNA, 659 bp, Homo Sapiens
  misc_feature (27)..(27): n is a, c, g, or t
  misc_feature (293)..(293): n is a, c, g, or t
cccactcctcatccagcgggttggcangaaagcaaataaggggaaacatttttaacattccaagcaagagaaggaagaacgactattgggaggaggtacacccagagattgctcagtgtgcagcctgctacctcacttttggctctggattgcctggtggtagaagggaagagtattatgtcagttagcaccttacatatttgatgctcaggaagaaagtgcaagaagatccctaatagaacattaaagattcttaaaagtttttgaagtaggctgcttggggtgaccagccnccacccttacatctccatagttggtacagttagcttgtagcagctgaagctgatgcctggagatcactgtctgttggtctgatctcagtatcatactgagacacctcccctgagccttacctacttaaattggtaaccgtcctaccaaaatttgtcaattttaatcaagtgaggcaagttgcaagggagccagagatacgtgaaaaaagaaaagcagaaatactgatactttctaagaaagaagttgtaataatttctttggcacattgacttactgatatcttttgaaatgcatagatgactcttgtgaaccaaagagagcagtagtggttattccccggcgcaataaaaatgcctttgtgtatc

SEQ ID NO: 260976 - DNA, 679 bp, Homo Sapiens
ggcaatatcagaaccctggtttccatttgcagcaaaaacatgggcacctcggaaaaaatagagtccttttaactttgatttctcctctctttgatcagtagactatgccagttactaccagggcctatgggattgccatggtgaccagccagatgaactgtccttccaacggggtgacctcatccgtattctgagcaaggagtataacatgtatggctggtgggtgggagaactgaacagcctcgttgggattgttccaaaggagtatctcaccactgcctttgaagtggaagaaagatgaaacccaggaaatatattcttccctctctcctgcctttatgaggaaactgatcatcaaaagttcccactccctacttctgccaccccaccaacgccttggactcctctctttgctgaagagacccaagtctcttgacacctcagagtgactgtaagctaccagtaagacaagtgggaagaggcacgttcatcaaacctgttactaaaccagcctagtcatagctcatccccatctctaaatgtgtccacacaaccacatctgccttttccacaagcttttcacaaagaaggtgagagagaaggaaaccttgggaggaggacattactggttgttctggctggtttgaaaagcacaaataaacttgggatgtggttcctt

SEQ ID NO: 260977 - DNA, 401 bp, Homo Sapiens
  misc_feature (359)..(359): n is a, c, g, or t
  misc_feature (366)..(366): n is a, c, g, or t
ggcacgaggggcaatatcagaaccctggtttccatttgcagcaaaaacatggcgcacctcggaaaaaatagagtccttttaactttgatttctcctctctttgatcagtagactatgccagttactaccagggcctatgggattgccatggtgaccagccagatgaactgtccttccaacggggtgacctcatccgtattctgaggcaagggagtataacatgtatgggctggtggggtggggagaacttgaacagccttcgttggggattgtttccaaaggagttatcttcaccacttgccttttgaagtggggaaggaaagatggaaacccagggagaatatatttcttcccttttnttcctgncctttattgaggaaactgattcatcaaaagtttcc

SEQ ID NO: 260978 - DNA, 651 bp, Homo Sapiens
atcagtaagtcacttccaaactctctccctctgtgaataagttcagtcaatctaactccagccatatttatttggaatatattaagtgcctgacagtactcgagcagaactccatctcacagttatgttttttagtaaaagtcactaagacaatatttaatatatttgggcacctttcctttgcagttatttggtcctgatgtcacagaaaaatggattttcccacccttacattctcaccttgggatggggtttacagcccttgatcaaagagactcaatcacagggtaatgtctttatggggtactaatactgtaaggagatggtaaaatggatctaccactcagaaattcaaaagcaaagggttacattcagaggaaccaaaacatgctggagagaccttggaagaatacagggcaactgagaaattctctccaggaagaactgggcagagacaatctgatgtttgaggagctgagtgcttccactgagcttgcacagcaagcacacaagctgtcctctgattagttatttggagtggcatgtagaggtgaactggcagagatattatagaactaatgaaccccaaaacataccccagagcatcctgacagcagagattataaagagttaccttatttattacaaaac

SEQ ID NO: 260979 - DNA, 553 bp, Homo Sapiens
  misc_feature (14)..(14): n is a, c, g, or t
  misc_feature (37)..(37): n is a, c, g, or t
ggtgtgctgcctgntgtataacgaagagacaaatggnaaaaatatgtatttgcctttttttgtaaagcaatagaagaattagttataccaataactaataaaatgatctccttgttagtggtggtagggagctagacaaggacggcaactatttctgtatcttacataccttttattttgaggccctgtcaatgttttatataataaacattttttgaaaaggcaactcttaaaactaaaacaaacttaacagtctgtcaagttggtgatataaccccacagaagacttacttcaagtgacttgaaaacttagtattttgtctgtactttgctaatggaatatatcctacagaccaaacaaccacaaataaattttaaactgcattcagtagttttatttttagcaatgatattggtagtgtcatttgggtatttatgtgtgttaaaacaaatatttacttgtgtcattggaatcaagagccaagattttcagcagaggagaaaagagacacaagaatataataaagaatcgtatgatttatttttatttttg

SEQ ID NO: 260980 - DNA, 813 bp, Homo Sapiens
  misc_feature (649)..(649): n is a, c, g, or t
  misc_feature (651)..(651): n is a, c, g, or t
  misc_feature (658)..(770): n is a, c, g, or t
ttagaccaacacaatagaaagagtttacataaagagtagaaaaaggcagttttgtataaagaataatagtctggactagtaattatttttagacctcattttaaaagcattagtcttgcgcgaactttgagtagagactagcagcacataagtatgtgaaccagtgggacagaaggggctttattttataaaagggcttggattaggaggagacagggaaggagctgagagttaaagccagcttactggggctgcatccataaagaggtaccttgttggtaaacacccaaacttccatttttagctggttctagaactcttcactgtatatggctgtcctaacagccagggctgggtcacttgaccctgcccaactgccacaccccaacttagagggattgggggcaggggttctcagtggaaagtgagatactcctagtttccatggctataaaaccactacacaccactcagagtccaccgaaaagggtgtctgtcattggtggagtcttacaacttcaaagaggacatttcttttgatttacgtgtgacaaaataagaccatcggttattttattccagtgatctccctgtctgagaagccaacacgaatttaaaagacaatggttggtattgctgggcaggcatngngtgtcannnnnnnnnnnnnnnnnnnnnnnnnnnnnnnnnnnnnnnnnnnnnnnnnnnnnnnnnnnnnnnnnnnnnnnnnnnnnnnnnnnnnnnnnnnnnnnnnnnnnnnnnnnnnnnnnttagctgggtgtggtggcgcatgcctgtaatcccagctacttg

SEQ ID NO: 260981 - DNA, 445 bp, Homo Sapiens
  misc_feature (21)..(21): n is a, c, g, or t
  misc_feature (53)..(53): n is a, c, g, or t
  misc_feature (58)..(58): n is a, c, g, or t
  misc_feature (66)..(66): n is a, c, g, or t
  misc_feature (90)..(90): n is a, c, g, or t
  misc_feature (106)..(106): n is a, c, g, or t
  misc_feature (422)..(423): n is a, c, g, or t
aaattttttaaatttcccccnttggccacttaaaaggggggattttgtaaggncctgnctgtaaangatttggtaataaaatgggtctanggggctcttttcccancattccccatttttaaaaaatgttttaaaagcctagaagacaacttatgtatattcctgtatatgtatagccagcacatttcatttatggaaatatgttcctcagaatatttatttacctaatatatttatccttaagccatgtcttatgttgagagtgtgacattgttggaataatcattgaaaatgactaacacaagaccctgtaaatacatgataattgcacacagattttacatatttgcagaccaaaaatgatttaaaacaagttgtagtcttctatggttttgtaacaaattgtacacatgactgtaaanngagaaatacaattttatcaagt

SEQ ID NO: 260982 - DNA, 415 bp, Homo Sapiens
  misc_feature (23)..(23): n is a, c, g, or t
  misc_feature (177)..(177): n is a, c, g, or t
cagtgaggagttctgggaccccngcttaaaaatggaagttggggtgtttacccaaccagggtaccctcttttatgggatgcagccccccagtaagctgggctttaactctcagctccttcccctgtctcctcctaatccaagcccttttataaaataaagccccttctgtcccacgngctcacatttcatttatggaaatatgttctcagaatatttatttactaatatatttatcttaagccatgtcttatgttgagagtgtgacattgttggaataatcattgaaaatgactaacacaagaccctgtaaatacatgataattgcacacagattttacatatttgcagaccaaaaatgatttaaaacaagttgtagtcttctatggttttgtaacaaattgtacacatgactgt

SEQ ID NO: 260983 - DNA, 437 bp, Homo Sapiens
taaaactccagatatttaaaaattatacaatttacaaaacaaaacaacacaacataaagaatcacgtagcatggggctgcctatctgacaggtcctcttttcctttataaaaatgaaagcaaaaagaaaaaggggttaaatgggtgttcctggtcagcttaacccactctgatcacagcgacagtccctccccgtccctgcctacagctcacactgccagctctggcaacacaggcctggacctcctcccaaccccacgggtccctgtgggtcagggcacagctgcctggaatgtgctgaggacagggggccccagaggagggtcatcccttgattttgctgctgctgtgtacacttgatggggtccttgaggtcctcaccagccacagtgacccaggacacagctatgacctcaggcatctgccaatttcaccccc

SEQ ID NO: 260984 - DNA, 670 bp, Homo Sapiens
  misc_feature (609)..(609): n is a, c, g, or t
agttgacagttaatgccgatctataattaacaaaaatgtcaacttgtggatatgctgatgattttatccagttttcaaaatatgattcctacagttcaggatatcacttattagattgtagacaaggaaaatgtacattgggacattatgtacttaagagtttttccttaagttttgcagaggaagtggttgaaaattgagctaacactagatttcgaggttactaaagaattccagttttccagtctcccacttcaattaccaggtaactataaggcaaaaatatcccaatgctgtgaacttaaggcaatattcatttcctttctacactacttggcatggtaaccatgacaaacttttattttctctttctgatttcctaatgaaatctcattatttgcaaagctttaaaatgactagatgaaggaaaaacattgttatgacccatgaccctcggagcccaaacagcaccatgaagagcatcattaaaactaagagaaagtggctatcagaaaatgaaacagctttaaaggggttccttttaagtcttgttttctattcagaatgttctgtgttttttctcaagtgtgggaatgacatttatcttancaggttactcaactacactggatgatgtcactctaaccagtgtacggcactgacccaagtc

SEQ ID NO: 260985 - DNA, 970 bp, Homo Sapiens
gggacagacgctggaagcatttggaatgaaatatgactgaggactctcagagaaactttcgttcagtatattatgagaaagtggggtttcgtggagttgaagaaaagaaatcattagaaattctcctaaaagatgaccgtctggatactgagaaactttgtacttttagtcagaggttccctctcccgtccatgtaccgtgcattggtatggaaggtgcttctaggaatcttgcctccacaccacgagtcccatgccaaggtgatgatgtatcgtaaggagcagtacttggatgtccttcatgccctgaaagtcgttcgctttgttagtgatgccacacctcaggctgaagtctatctccgcatgtatcagctggagtctgggaagttacctcgaagtccctcttttccactggagccagatgatgaagtgtttcttgccatagctaaagccatggaggaaatggtggaagatagtgtcgactgttactggatcacccgacgctttgtgaaccaattaaataccaagtaccgggattccttgccccagttgcaaaaggtttgaacaatacttgaatctggaagatggcagtctgctgagtatctgaggatgtgttgcgcgtcgcctgaaagatccttagtttatctagctgtcgaaattttattaacctttaaaataaaagttatggcactgaacagtgcagagaagataacaaagtttctggaaaatattccccaggacagctcagacgcgatcgtgagcaaggccattgacttgtggcacaaacactgtgggaccccggtccattcaagctgaacgcacccgctggttgtggaccgtctgccaggcaccacagtgagcattgtgttcttggcatgtgatctgggaaactgattgaataatacacttttcttgctttggtgctcaaagtggtttttttcccccaataaaattatttaattgaaaaaaaa

SEQ ID NO: 260986 - DNA, 979 bp, Homo Sapiens
  misc_feature (862)..(907): n is a, c, g, or t
  misc_feature (961)..(961): n is a, c, g, or t
gtggcggcggcggcggcggggccccaggggggctgcagcacgagacgcaggagctggcctccaagcgggtggacatccagaacaagcgcttctacctggacgtgaagcagaacgccaagggccgcttcctgaagatcgccgaggtgggcgcgggcggcaacaagagccgccttactctctccatgtcagtggccgtggagttccgcgactacctgggcgacttcatcgagcactacgcgcagctgggccccagccagccgccggacctggcccaggcgcaggacgagccgcgccgggcgctcaaaagcgagttcctggtgcgcgagaaccgcaagtactacatggatctcaaggagaaccagcgcggccgcttcctgcgcatccgccagacggtcaaccgggggcctggcctgggctccacgcagggccagaccattgcgctgcccgcgcaggggctcatcgagttccgtgacgctctggccaagctcatcgacgactacggagtggaggaggagccggccgagctgcccgagggcacctccttgactgtggacaacaagcgcttcttcttcgatgtgggctccaacaagtacggcgtgtttatgcgagtgagcgaggtgaagcccacctatcgcaactccatcaccgtgccctacaaggtgtgggccaagttcggacacaccttctgcaagtactcggaggagatgaagaagattcaagagaagcagagggagaagcgggctgcctgtgagcagcttcaccagcagcaacagcagcagcaggaggagaccgccgctgccaccctgctactgcagggtgaggaagaaggggaagaagattgatcaaactgaatgaaaccccnnnnnnnnnnnnnnnnnnnnnnnnnnnnnnnnnnnnnnnnnnnnnngaaaatatactgtacagaaagagagaaaatagactgtttctcccccggaagganctgaaaaaaatgccgtgt

SEQ ID NO: 260987 - DNA, 1495 bp, Homo Sapiens
tgcctgagaaggggagataagggctgaactgggactagccagggggaccaacacaaatggtgggggatcatgacctgaaggattctttccttcccatgagctgcagggctggttgccgtccttgcaactgtgtcttatttgcctgtgccgttatatcttggtgacccctccacgtgtacactactgacaaacgggtggagtgctggggagaagtcactgtgccgcccacctagtaaaccttctgtctgtgctcatggcatctccaagatggggcactgctgtgtgcagaatccagggtcctctttctgcttgcaactcctttccctggatgccccagaaacaatccaggcctcctttcctatcttacccctttgctttgctttttaccccagcacctctataaccgccttctcttcttttcagaactccttgtttctcatcctgttttttatgattacaaaactcttgcttccaccctggaagataactgctatagatgcctgtatgtaaatggtgctgtctccagcaactggcatgctgaagaagaattgattcacggggtataaatgttggggattggaagtggggatgaaatggcacttgttgatacaggagcagagaggtgaggccgactgctgaagacagctcgccaccctccttgcctccactccaatccaggggctggggccacattctttgccttcatttatcctcagatcaggtgagatcgacaggaggtgttgatggcagtgccagcaattattgctaatccgtttgcatccttatgcatagatctgaattcagactttgtgaatttccagaggtgtgggtaatataatagaattcagtgagtgggcatggctgatcttgtgcaaattaaaagttatggggcataagaatagcaaaagttgaacttcttttaaaaaggaaagtaccctgagagccagtattggttgaggctctttcagtatgcccaggttggcagcactgagaaccgcagaaacggcctgttgttacaaaaaggagattgactcagctgcccttggtgcatctgactgactatgactgctgagagattccaaggacccttaatgccagggctaacctctccatgtgcagtgagacctctggaggaagtgtcatcctctggctttgtgtggtactcattatggtgcagtgcgggcatgaaatgaagacacccaaataggcttacagatacgatatgttttaaatgttcgtatttaacaaaaacatactgacactgtttggaaatggcaacaggaagatagcaaaatgaatactaacattacgaaaagatgaacaggtacatgttccaaggcaggtggctgtgaacttcctctgagtgaaggcatcccctccagcacctttcagcctgctagttaggacgacccgccgccaccctccaggacctccagccctgcactgcctttcctctcttttaaataattcttcattgagttctaatatgtaaaaa

SEQ ID NO: 260988 - DNA, 520 bp, Homo Sapiens
ggggagaaaggtttaagagcctgcgacttcgttgctgaacttttcccccccaagacaggcttccgaaagctgcgccactggagggatccgggacctcagactactcgggtttggccctggcatgtgtgggagcagtttttattagagagaatgctcaatttgcaagttaatttcaagtctccagccacgtcaggaaaaaaacatgaaggaattaaaggaggccaggccgcgcaaagataacaggcgtccagatctggaaatctataagcctggcctttctcggctaaggaacaagcccaaaatcaaggaaccccctgggagtgaggaattcaaagatgaaattgttaatgaccgagattgctctgctgttgaaaatggtacacagcccgttaaagatgtctgcaaggaactgaacaaccaagagcagaatggtcctatagacccagaaaataatcggggacaagaatcctttcctaggactgctggacaagaggatcgtagtctaaaaattatcaaaaga

SEQ ID NO: 260989 - DNA, 946 bp, Homo Sapiens
  misc_feature (345)..(383): n is a, c, g, or t
  misc_feature (406)..(565): n is a, c, g, or t
ggtcacattccaagtttcagtactctttgataaattgtattggattctagtttcccaacatacgactctgctccttctgcttacttttcccaaattattttgccttctgtgcccaggcaaacttagttccctgtctaggcaagagtggtcattattagacttcattttctttctactgtgcatatgtattgattagccatgggcacattgtgaacttgaaaagtcgatttagtcacattttaagtttcactatttgttggtattattctggcaagattttggaaggtttttattatttattcatttgtgtattttttgagacagagcccaattctgtctcctccnnnnnnnnnnnnnnnnnnnnnnnnnnnnnnnnnnnnnnntgattgaactcctgggctcaagnnnnnnnnnnnnnnnnnnnnnnnnnnnnnnnnnnnnnnnnnnnnnnnnnnnnnnnnnnnnnnnnnnnnnnnnnnnnnnnnnnnnnnnnnnnnnnnnnnnnnnnnnnnnnnnnnnnnnnnnnnnnnnnnnnnnnnnnnnnnnnnnnnnnnnnnnnnnnnnntagctgggactataggcaagcgccaccatacccttcaggtttttaatttattttatgaaaatccctccaaagcaacaatcctcaattctcctgcttgaaagtaatcactaataatcaggtactgtgtgatctgatccttgatgttcatattattgcctttaactgagtagcaatgttaaaatttaatcatttaaattagaaaacatatattgaaaagtcttcatagaagtccggcattataagaactcatcagaccatctagttatcctagaagtattgtttgctacttaaaaagcctatgtggaaagattgtaccatattccttggtaatagtttccaatgtctttttttctctaatagggcctttaaaacactctactt

SEQ ID NO: 260990 - DNA, 930 bp, Homo Sapiens
gaaaaagcaaacagctttaggggctgactccattagcgttccatagactgtgcttttaaccgttcagttcatgtttaatggcccatcggttccttacataccatcagcttatgctgtggccaaaagaagtgttcttgtggcttggtactcgtcccttcaaacagtaaacaagaaagtgcagacagtgctgccagagacaggaggattttcacatgagactgaaaaagccgacacacccttacaactaagtcatggtcgagtcggacctgccatccacctccaccagtccctggaacccggcaggtcagagttttctctaattctattccccaacatcaagtgaacactagaactcacacggaaggccccgagcaaccactggcctcggggctgggtgcacccactcctcacccagggagatagtcacaaaacacgctagggggcagagacgctgtaaactggacacacacggaacacaatgccctttccacttacacagcgtggggatgataaaaaggaatcttttgagcaagtctataattttacagaatttagaggtgggaaagatggccaattttccttctttaatccctggggcagaccacctgcttctggggtaaagtgtttgagaaggaaaaagagcccactgtacatgtgtttgttttgaagacatgggcaggtcccggatgtgcagtctcccaacagtcgctaatcccatcctcagatctgtgcacaatgtgaagacggagccgtcccctcctcagtgtacctgtgtgagattacaaggagagacactgtcttcacaaagaaagtggcgattccacagcctggagataaatatggttatttgaataaaaataaattccacagaaatccatgccttgtgagatactggcttgcacattttaaaataattgcttttaattacaa

SEQ ID NO: 260991 - DNA, 439 bp, Homo Sapiens
  misc_feature (22)..(22): n is a, c, g, or t
cctgtttgaaagggaccgagtnccccaagccccacaagaaccacctccctttggccccacagcataagcctgatgggtatgtaaagggaacccgatgggcccattaaaccatgaacctgaacggttaaaaagcaccagtcctatggaacgcctaatggagtcagccccctaaagctgtttgctttttcaggctttggattacatgcttttaatttgattttagaatctggacactttctatgaatgtaattcggctgagaaacatgttgctgagatgcaatcctcagtgttctctgtatgtaaatctgtgtatacaccacacgttacaactgcatgagcttcctctcgcacaagaccagctggaactgagcatgagacgctgtcaaatacagacaaaggatttgagatgttctcaataaaaagaaaatgtttttaatca

SEQ ID NO: 260992 - DNA, 915 bp, Homo Sapiens
  misc_feature (128)..(128): n is a, c, g, or t
  misc_feature (629)..(629): n is a, c, g, or t
  misc_feature (765)..(765): n is a, c, g, or t
taatcaaggatcatctggctaaactgcttcccccaactttctgcttagctacttttggaagcacaaaagtttaccccttttccatccttggcccttcccctggttggtacatctagttatgagatagnacgcgcaccacttaacaaatcactcccctttttgaccgcaggttgttttctcttccatatttgacgaggctggcaaacagctcccgaatcttggcctagcacatcaccgaattgggaagctaaagcttttagctttagaatcccaagtgacaaggacatggctgaagcaggaggggaaattctggaacaagtgcctctgggcaaacctcacaaccgagttttttaaattagtggtcattttctagaactagaggaacacattcaggacaaacagttctgatgggagagcggaatggctatgaacacataagagatcaggctgtgaccgtgaccataactcgtactcatccaggacccgacagggcggagaggacaccgcctccagacatgcaagtttctcaacagtgaattttaagaaaaagctgctttctcttaaaattaatagcacaaaaacactcctgcgtgtttcatagcctcaaacatacacacccaaatattaantgctgggcaatagcaacactcacccacaacacagtactgtatccttcattgctacggacagtaatgatgtatatacacatcagccttcaaaatggtatttagtgtcaccacttgctactgtggccatctcccctcnccccaacctggataaaatgttacactacccactaatataaccactgacacacaaaccaagctccttccagtttaacattgaacatcaatctacatttccagtgaatgagctaaacttatgagcaggccattcaacttttcatgatacatt

SEQ ID NO: 260993 - DNA, 1128 bp, Homo Sapiens
  misc_feature (315)..(315): n is a, c, g, or t
  misc_feature (832)..(846): n is a, c, g, or t
tagaagagcagtaaaggctgattgacacacagggggatggagttggtccttgtccattctctcacccttgctgtgcatgtatcaatccttatcccagaaggtactatttagactgtatagactgatttagattacatactttagaggattaaggaaaccatagagtttgggccttggaactgttactgccttgtcctagagttgtcctgatcaggcttggggcctagttacagattagtcttaaagaattgcattaacttaaaaaaatcaaaccttggcaagagctaaaataatatggagatatctttgcccttngacttgtagacgacatctaagaggatgaagaaaggagagtctaagtgagactctgggcctacttcctaacaatgtcttggaagtgggattgatggtaaaggagaaaggccacagtccaatccctctgccttcagatagggaactcaaatcctgaaattactgttttctttctggccttttctcctggttagaggaggaagcggaaagtagttttgagtaatactttgttcatattaccccccttttgttttttgtttctggcccctctaccaatagggcagtagcctcctgccctggatgggtataaggtgggcttggtccaacaggtgcccagagggtacatactcctttctggggagagaatgctccctaccatatagttgacagtggttaggaactctccctttccctacctaccttccttttaatagcagaattcctatttttcccttgattatgtgtattgatcaccctgcaatcctattatgtatctgagtgtgtgtatgtgtgtgttatnnnnnnnnnnnnnnnttctttaaaaattctgtggtttgtggctttttcttccatacattagttcccaccatcgcatgcccagggaccactgcctggcattatcgcatgctgggatcatcgggggagggtagtgaagctcaccactgtcctttgttttggagatttttatttttgcataagtagtccatcctatacagatagctgattaactgtattcccctttcccctatggctgctggtgtaaataaactgcatctccccattggtaaacagtaataaaattttaaaaaatgtggt

SEQ ID NO: 260994 - DNA, 536 bp, Homo Sapiens
cgcttttcctttatgttttctcgttttgttctctgatctgttgtctgaacagaaaatcagaaaattatttgcttgaagccaaatttgcaatattcctgtccaaaaagatgaaattttcttctaaaaatagactagttaattgatcttcaggccacctctaagaagctgtccttgagatcctcacaatgaagccctatgaagtactctcctatgaaccctctgatgtcttacaaagtttcataagagttcacagagcatcttgcaagccttaacactcaagaaaaccaacccattccgtcctacaccttaatcctttaagtaactttctattttcccatccaagccaccccaaaagtaccacatttgggaccagatttaaaacatcaaagttacacaggttacttgtgagcagttataaaatttgaaacacaaaaatagtatggcaactacctttatgcaattctgaatatcaattttaatttctaactaatttactagatttttctgcagtatggtccagcaagaaaccaagcgct

SEQ ID NO: 260995 - DNA, 668 bp, Homo Sapiens
tgtttagtgataaacaggaaaaacctaaccgagcctactgaaccatgtccatctataaaagaaaaagggagatcatactggagatttgaaagaagagtagacctccagaactgattgattataatttatttctgttatagtatttccacttagtattatgatttatttctgtccctcatgaaagggacagaaagtagtcaggcggttatgagatgaaaagacagtaagatgggatgaaatcggagtgaaacaataaaaaaaagactaagttaaaaatgtaatagcatattaaaattcatgtgtaagggggtaatgagctgaaaataaagtctgtgttttgaaggagaaacaagataaagctctttggaatccaaaggataaaaacataaaatgagggagaagatatatagagagaatatctaacaggagaattacaagtgttgataaacagggaaccaagtgaaatagaacaacatcattataagaagttttcatgcacgtgtgcagatttgaaagtgttgccgtatttttcatgtgaaatcaatgaaaaatatgtttgggcatttctatttaagaataatgttaaagtaccttgccaaaatatctggcaagatattagctaccagggaacaaagttgtttttcttctcctttctagcaataaatgcc

SEQ ID NO: 260996 - DNA, 419 bp, Homo Sapiens
  misc_feature (223)..(231): n is a, c, g, or t
tcaattttctggcactacaagaatatatatatatttttgtaatcgactttaaaataattaggaaaatgatagaacattttaatataagaacaagatatggtaaattgatgaatattattagacattatcagtaacaagagctttgtatcttaagttgttttgagttcaatttcttgttcacatcttttagcttggttgagctaaaaaatcattaaccattgannnnnnnnngtaaccttgcatataatatgtacaatgagagaatcaattaatttagaattacatactcctaatttaaaaaagaaactggtgtacttattgctgataactaggaattatattatcaaagggctgttaattcaacaaatttacatgctaaaagagaaatttatatgttaaaagaaattaaaaggtggagc

SEQ ID NO: 260997 - DNA, 786 bp, Homo Sapiens
cgaggcacagaattcggcacgagcggcacgagcaagaagaacaaaccccgctgcgtctgcgccccggattgttccaacatcacctggaagggtccagtctgcgggctggatgggaaaacctaccgcaatgaatgtgcactcctaaaggcaagatgtaaagagcagccagaactggaagtccagtaccaaggcagatgtaaaaagacttgtcgggatgttttctgtccaggcagctccacatgtgtggtggaccagaccaataatgcctactgtgtgacctgtaatcggatttgcccagagcctgcttcctctgagcaatatctctgtgggaatgatggagtcacctactccagtgcctgccacctgagaaaggctacctgcctgctgggcagatctattggattagcctatgagggaaagtgtatcaaagcaaagtcctgtgaagatatccagtgcactggtgggaaaaaatgtttatgggatttcaaggttgggagaggccggtgttccctctgtgatgagctgtgccctgacagtaagtcggatgagcctgtctgtgccagtgacaatgccacttatgccagcgagtgtgccatgaaggaagctgcctgctcctcaggtgtgctactggaagtaaagcactccggatcttgcaactccatttcggaagacaccgaggaagaggaggaagatgaagaccaggactacagctttcctatatcttctattctagagtggtaaactctctataagtgttcagtgttgacatagcctttgtgcaaaaaa

SEQ ID NO: 260998 - DNA, 596 bp, Homo Sapiens
  misc_feature (202)..(244): n is a, c, g, or t
tttttaaggacaagatcaggatagctttggtgaaggtagggtcatattaatatgatgataatgtgcaaccaatttatactttctgcagggagctatggggtacattccttgatttccaggatagtttttcaaataggaaagcaataatggcagtagttctcaaatgggctaggccttttttatattgaagcaataattccannnnnnnnnnnnnnnnnnnnnnnnnnnnnnnnnnnnnnnnnnngtacaaatagaactatatatatttaggtaaaatagatctatcgtgtttaaaaccaaagaaatcaatggaacccttgcacaaaaaagtgtgataaatatttttaaataaaaacttaatacaaatgtaatttgttaatattgtttcatgttttatgtgtagatctaatagctgaactgattcaaactgtaataagctcatcaatttcatttctatgaaaatgtgctctgttgtcacaggatgtttctgttgattttattcatttcctggggaattgggtaaacatcatgttcctgatgataacccagtagcaaaaacatttgtactgagtgggtacaagccttggggactgaaa

SEQ ID NO: 260999 - DNA, 456 bp, Homo Sapiens
ggtggaggatgtcatcttttcatagatgctggaactagagtgcacttgttagatgctaaaggtttgagctttacacaaaatgtcttcatctgtatttgttattgtctacaatatatttgaatttggggcagcatattaaaatgtaatggcctgttatgtcttgaaaatacttgttttgcctcttccaggcatactgcattctgtggatcagtttgaacagcttctccaccttatttggacagtgataaattgaaccaagagtgtagatttacaagtgtaaccttcaaaagaggaagaactatttggggtctgtaggtaatgaacagtcacaccaaaatagactatgatgcttttgttaagaaaggtttcatgttttagatattttccgtgtcctaaataattttcaataatctataatccctaaaatgcaataaaaactagtatgtttccaaaaaa

SEQ ID NO: 261000 - DNA, 621 bp, Homo Sapiens
acaatacataaaggatagagaggcagtagagaagcttcaggagccacttcttgatgtgctacaaaagttgtgtaagattcaccagcctgaaaatcctcaacactttgcctgtctcctgggtcgcctgactgaattacggacattcaatcatcaccacgctgagatgctgatgtcatgggagagtaaacgaccacaagtttaccccacttctctgtgaaatctggggacgtgcagtgatggggattacaggggaggggtctagctcctttttctctctcatattaatctgatgtataactttcctttatttcacttgtacccagtttcactcaagaaatcttgatgaatatttatgttgtaattacatgtgtaacttccacaactgtaaatattgggctagatagaacaactttctctacattgtgttttaaaaggctccagggaatcctgcattctaattggcaagccctgtttgcctaattaaattgattgttacttcaattctatctgttgaactagggaaaatctcattttgctcatcttaccatattgcatatattttattaaagagttgtattcaatcttggcaataaagcaaacataatggcaaaacaaacaaaa

SEQ ID NO: 261001 - DNA, 1618 bp, Homo Sapiens
aacagataccccgccaccggggggctgggtggcgaattcggcacgaggatccttccgtgttgcgggaaggagtcctgactggcagccctgagcagaaggaggaggcagccaaagccttaggcttggtaatccgcctgacctcggctgacgccctgaggccctccgtggtcagcatcactggccctctgatccgcatcctgggggacaggttcagctggaatgtgaaggcggctctgctcgagacactcagcctcttgttggctaaggttgggattgccctgaagcccttcctgccccagctgcagaccactttcaccaaagccctgcaggactccaaccggggggtgcgcctgaaggccgcagatgctctggggaagctcatttccatccacattaaggtggaccccctcttcacagagctgctcaatggcatccgcgccatggaggacccaggtgtcagggacaccatgctgcaggccctgaggtttgtgattcagggagcaagggccaaagtggatgccgccatccggaaaaacatcgtctcactcctgctgagcatgctgggacacgatgaggacaacactcgcatctcctcagccgggtgcctaggggaactgtgtgcctttttgactgaagaggagcttagtgccgttctacagcagtgcttgctggcggacgtgtccggcattgactggatggttcggcacgggcggagcctggcactttccgtggctgtgaatgtggctcctggcagactttgtgccggcagatatagcagtgatgttcaggaaatgatcctgacgcagtgccacggcggacaggatccccattgcggtgagcggggtccggggcatgggctttctcatgagacaccacatcgagacaggcggagggcagttgccggccaaactttccagcctgttcgttaagtgtctgcagaacccatccagcgacatcaggctggtggctgagaagatgatctggtgggcaaataaggacccactgcctcccctggacccccaggccatcaagcccatcctgaaggctcttcttgacaacaccaaggataagaacaccgtggtcagggcctacagcgaccaggcaaattgtcaacctcctcaagatgcggcagggtgaagaggtgtttcagtccctctccaagatcctggatgtggccagtttggaggtgctgaacgaggttaaccgaaggtccctgaagaagctggccagccaggccgactccacggagcaggtggacgacaccatcctgacatgagaggcctgggcaagcagcagcattgccgctccacatctttgctcaatgttttcatttttgaaaatacatttgttccaatggggagcttggaagatggcgttcccagaaagtattttaatatcaatagaccacagccaaagccttaaatcaaacccacacacaactgaaaattgcctcctccatctctcaccttttcctgtgggagaaggaggaaggaaaaagcacacgcattgcgccttcaggcaaatggggcagcccaggggagctgttttgttccagttttaggcatgggttagggtcttggggactattaattaggcagggttcagacttttgggggtt

SEQ ID NO: 261002 - DNA, 586 bp, Homo Sapiens
ggtgagaggcctgggccagcagcagcattgccgctccacatctttgctcaatgttttcatttttgaaaatacatttgttccaatggggagcttggaagatggcgttcccagaaagtattttaatatcaatagaccacagccaaagccttaaatcaaacccacacacaactgaaaattgcctcctccatctctcaccttttcctgtggagaagagaaggaaaagcacacgcatgcgcctcagcaaatggcagcccaggagctgtttgtccagtttagcatggctaggtctggaactataatagcagggtcagactgtgggttcctcttctcctgtgcttgagctctggtttgagagctggcgctaccaacctttttcctatatcccgagtggggcacagacggtggatctctgcccagtgtggtgtgtctggcttggcttttcaatattgtgaggtctgaatggatctgatccctgtcagatgaaaatgattcacagctctggcagttcccaagtctggggaggggtataggtttgaaaggctgtttgaaagaggaatgtttaataaaggctttgattttatcttgt

SEQ ID NO: 261003 - DNA, 475 bp, Homo Sapiens
gctacttgaacttcccttgactggtgggtttttttaccttgatctcttcttcctcaggtaatccagggatcctggggcacatagacttcttgctgcgatacagttggaaacaagtaagtctacagaatgtttcagtttcccagcaattccaggtctaaggcgcacagttcccttttaggggaagaaacaacttttttacttacaagtctaagaagagtccacatcaatctaaaaacccactccagggaccaggacacattcagaccacccactgtccactttttcaagagcaacactgttcttacctgtattgccacaaggcactgattttccatataggcaacagttctgtttccatagatctaaacttttccacttttcatgcaatgagcatccagagaatccagggaataaaatcctcaagtagcaaattatgggtgcttttctcaaaagaatcattgacagagaatcaatt

SEQ ID NO: 261004 - DNA, 606 bp, Homo Sapiens
  misc_feature (519)..(519): n is a, c, g, or t
  misc_feature (521)..(521): n is a, c, g, or t
  misc_feature (523)..(523): n is a, c, g, or t
  misc_feature (528)..(528): n is a, c, g, or t
  misc_feature (553)..(553): n is a, c, g, or t
  misc_feature (555)..(555): n is a, c, g, or t
ggcaccgaaccccgcgcacctcgccgcgggcggggctgggccgtagtcggctcgatttaaggctggtatccaaggctgcggccggtcaggcgaggcgaggcgaggcgacgtgagcgagggtgcttagggagaacagccgctggcagctcaatgctgggtggctaacgctcgacggtgcccggcagcaacccggccgacaccccgacccggatcccgagctgcgtcgcggacaaagccgcgggcccgtcccggactacgactcccgacgggctctgcgaccgctccggggcggcccagcgtgcactgcgccggccagtttgacagccgggcgccctactcggctagctctgctcccagccagggacgctggccttctcgcggctttcccccgatgtctctctttattccagctgcctgaaactcggtcccacgaatggcaggcagcgtccaaaattcaaccccgtaaagccagcaccagccaataaagcgcacggatggaggccacgtgacagcagtggncngncctcngctgagccctgatctctatggtttncncggctcgctagaaggagtgtggtccactggaggactccctacattcttcct

SEQ ID NO: 261005 - DNA, 942 bp, Homo Sapiens
  misc_feature (679)..(679): n is a, c, g, or t
catttcaagatgaagaaactcagagtgaccagctggcaaccctgagactgttccatacccctcacctcctggactgttatggggggacatgaggggcacaacagaggcaggagtatggtgaggaggctggtgtgagaggatacgtatggtcttatcacacagctaggatgggaggccttttgaggagcttggctgtgcgaggagaacaggtaggtagctggaggcaggtgcagggtccaggaggctttttaaagatgggaggcccttgggctgagagggaggacaaagcagaggatggcctgggggacccaggaagggatgtggggcagcactgagggcccagcggaggtggaagccataggtcatggcagggccgtcagtaccacataggcaacaggagaggctgactttatcccagctggggccaggcttcattcctgtccccaaatgcttttcttgctctgggcccccatctgatgccttctcatctttttttctagcaaactacggagccaaacttccctgagatcctcctaattgccatcaacaagtatggggtcagcctcatcgatcccaaaacgaaggatatcctcaccactcatcccttcaccaagatctccaactggagcagcggcaacacctacttccacatcaccattgggaacttggtgcgcggganaaaactgctctgcgagacgtcactgggctacaagatggatgacctcctgacttcctacattagccagatgctcacagccatgagcaaacagcggggctccagggagcgggcaagtgaacagtcacggggaggtgctggttccatgcctgctctcgagggcagcagtggggtttcagggcccatcagcttacccctggcagctggggggaaggatttatggccattccccgggcaggcgagggttggggtttgggccagccaac

SEQ ID NO: 261006 - DNA, 882 bp, Homo Sapiens
  misc_feature (38)..(38): n is a, c, g, or t
  misc_feature (60)..(60): n is a, c, g, or t
cttcttttaacctcagaatgtcaaattttggtcttganccacagacatccaattacaganagaatataagcaatctcacaggcctgcaatcggacactgtctctgtgtggttcataggagatgatttttgaggtttgcactcatgcaatttgagaacaccgttgacaagaaggctgagtttacataaatgatctagattgaaactcagctacctttcttcctcatgtgggtgtaattacagccctatctggagacagcgaatacagcaaacagattttattacctagttcgctcaaacactacatgaagttattttagttaaagccctcccccaaaagttataaaaccattttatcagggcccaacatgtggcatgcaatgaagagaaaatgtaaagctacagaggttaatgtattgtattataaaatattttaagtgtactcaaaatatcataattgtacagtttatgccaccataatttgaggcctatagatttagcttaagagaacactgttctgtttgaaatgctttctgtcactgaaattggcttaattagtaaccatggataagatgctttagatcagactaggttttaatcattaacttccacaaagaagtcatactttgcgttaggtgtgctggttggatgtgcaggaacttcagcaagcagtaggttttactaagcagatggtcgggcactgcagggcaccaggcaggatcctagggcgcctcttagtctgcgttagcatctggtttgctgtatgaccttgcacaagtcacttccttctgagcctcaattttctcatctgtacaatgagattcaaaagctgacctgaaagtcaagtgtgaaaataaaatagagattaaacaagataattatga

SEQ ID NO: 261007 - DNA, 284 bp, Homo Sapiens
agatgaaatcatataaaatatgttttttgaccataatctagaaatcagtaacagcaagaaaatctccaaacacttggaaattaaacaacacatttctaaataactcatgatactacagggaagtcttaaaaaatattttaaaataaatgaaaatatcaccgtgcttggaatgcagccatgctggtgctgcaatttataacaatcgactgctttttactaaacaagaaaaagttctcaaattaacactctaagctcccactttaagaaagtaggaaaatctaact

SEQ ID NO: 261008 - DNA, 505 bp, Homo Sapiens
gcatgcctcacaattggctgtgtcatgggatccttccagggacacttccaggattactggcatttctggagacttcctcgtgccatttccatagtatttcttcagtatatgctgcaccaggttgctcagaatcctcatggtgctatccgaggagaactcaggcatctcatattgggaccaggagcacttctggcacctttggccaaagagcctcatacgcacctgaccctgggatgtccagtgctcccagtacgtgtggcacagaatctgcacttgggcagaagcccaacttcgctggcaggaggaacaccggaaccagccaaatgctctctgttggtattgcttccacccttgagccaggcagtctagatgaaggttgccatccaacttcagcgtccatgtggcccggggttttgcctcttggattagttcttgaaatgtctgctcccaagtccagaaatctacaaccattttttccctctgaagctgagagagtagctttcag

SEQ ID NO: 261009 - DNA, 270 bp, Homo Sapiens
atatctgagagacatcaagaagttcgtgagtattagttttatcactaatttgagattcatgcaaaagctacttatgttcactaattttcctgaattctcactgtagtgaatataatgaaaaatcaatgtactcttttcccaatatgaagggtccaacagatacaattgctaggacgagatatgaagggacctgctcatgataagctttggaaccaattagaagctgaaatacatttgcatcgtcacaaaactgtgatccgagcctgcaga

SEQ ID NO: 261010 - DNA, 678 bp, Homo Sapiens
tcaagagaaaaatccaagttaaatgtgcaaagcctccatcaaatttgaagtcattctcaacttttatggaccagtgaaaagcaacaaaacatgttctcccttaatctttgctcattactaaacaagacacctcaggtcaattttacagcagagagtcagggtgccatggaacacagtgtgggtggatggcctctgagcaatctgctttggtagctgggtctttgtaaatggcctaaaattatgacacttcctcagtgtttgttgctgcccacacgtgcaccatgaatcaaggaacaatcacttcacatgccagagtgctggcaatgaatattaatcacaaagaaatggaacaaacagtgacggtactcaattttccgaataccattctacaaactgaagccatcctagaaattctggagagaaaacaccatggtaaccctttttcttatgttaactgacaatattcaagttattgaaagaatatataaatgcaaaaaatgagatatctattgccctaaagatttcatttgatttggcttttaaaatgagatctttaaagcattttctctttatctcagaataaaggccagttttgttcagtaacagttctaaattgaacatcctgccatccatcaatggtgtgtactacagctgcctatgctttttcctccagggcag

SEQ ID NO: 261011 - DNA, 832 bp, Homo Sapiens
ctacaagtgaatttcctaatattccgggaggtcaaaaccaaggctcactgttttcacaatacacacagttctatgtttataaataacaggtttcaaaagaaactcaggacagtatttaaaacaagttcttaaactattaattgaacaatggcatttttaaatatgtaaacacagcggaattcgtgtatacactaacagaagctttaacaaaacatgtagcgtggtgggacactctgccacagcttagctgattggtatcaagccttgtctttggtttctgaggcctcctgagcccttctgtactgggagaccgcactccagagtctgcagaggagaccacccctgggaaacaaacacagctgtcttcagagtcagtgcttcaagccaacagagcttaaaactgcagtccctaatttaaaaacctaatgaaaataaaaacattctcctcacatatggaggtgacgctcgtgtcccagcagtagtaggacatggccttagaggtacgtacctgcagagagctggctatttcaaatgactcgggaacaagaaggcaggctgcagtttaaagaagggggtgggtccagcgtgcaggcacgcttgccatgtgcctccacccactcccagccaggcattaatggcaggagattggccagctcttctctgtcacattcctatttctgacttctgcctggctttcagtttctgccccaccttggctttttcccagctttgaacctaatagaactccagagtttggggggaggcccagccctttgttttctgctcttgaagcatattcacacataaaaagttgtattctcttatacaaact

SEQ ID NO: 261012 - DNA, 333 bp, Homo Sapiens
caaaatgcactcatgaagaaccaaagttcatattccaaattaaatctgtatgtctggaaaagtaacccaatcaaagttcattaaaatatacagtgaaaaccggtataaattaggcaaacaccataatctaatgaatatcaggaaatttctgagtttctaaggattgtattaaaggtaactttttaaaaccttagaaatcttaagcacataaatgttataatgaagcatttgcaaatgactgctcaattacttttattctagctctaacatgaaattgcattttattaactcttcatagtgctgctattcttattttgatattaatctaacttt

SEQ ID NO: 261013 - DNA, 488 bp, Homo Sapiens
ttaagttgatcctctccggcccggccttcggatgggacccccggccagcccaacacctggatgccacccctgtgagagacccttggaaatagaacccatttcctggatctcccggaccccacagaaactgtgaaataaatatgtgttaaggtacctaagtttgtagtaatttgttacacagcagattgtaaataacacgtagataaaacccagacagaacagaaaaataaaatggctttaaactctagaaagtttccccatgtaaaattttgaaaatgctactctgcctaaggtcaaaccgtcatacatatatacgtatgaaaacacagaaaggtgtctggaagggtaataccaaattaaatctttatccaagaggaatgaaaaccagtattcacacaaaaacctatgcacaaaccttgtgaatatattaaaaaccagtgacttatgcactttaaaaaggtgaattatgtggtatatgaattatatct

SEQ ID NO: 261014 - DNA, 617 bp, Homo Sapiens
  misc_feature (142)..(142): n is a, c, g, or t
tatgtagtgaccaataaacccatctgcagttaaacttaagtctgataaaaactgaataagaagttcatttctctcagacacaattggcgcaggtggactatcaccacaatactttccaattcttctagcatcgttgacttcnccgccattaaacacagccacataatcatatcggcagtagttatctcgctccacatcaaacttctcaaactttaattctataagctgattctttggggctacaatgtgccacacacaagtgactcctgcagggtaatcccggtctggccagttgggggttttaaaagagccggaaggtctgtcaaggagtcctccacaatactgatcccctctttcgtttggttcagcagcggagaacatggccatgaagccattgccagctgtgttggcatcagaaatcatctgcaccatcatcttgttgccactggacacaagggctccaggccggaaagtgccacagaagcggccaatgcgctggccattggcatggccattgtacacatccacaaagtcatagcggcacaggttgtcactctcgaggtctatgaatcggaaattgagaacgactacttttccttcgggaactgtgattttcc

SEQ ID NO: 261015 - DNA, 585 bp, Homo Sapiens
  misc_feature (250)..(270): n is a, c, g, or t
  misc_feature (303)..(303): n is a, c, g, or t
  misc_feature (532)..(532): n is a, c, g, or t
  misc_feature (572)..(572): n is a, c, g, or t
ctcaaagaagttgttcagaatcaaagaagaaaaagtctggcttaaacatagtaacttctgtgtgccaggttaatgacaaccaaaagctctctatttaccattattgccaaacttcatcagttgcccatcctgcaccaaaatcctgtgcgtgtttaaattcacgttgtcaccaaagaggtgcacagatcaacaacctggatgacgcaggtgttctccagggaaaccagaccaagtcaagtctccaggtaannnnnnnnnnnnnnnnnnnnnaaggcgcgcaggtaccaagcaacacgaatagangtaacctgaacgttcttactctcccaggcatggcccacgtggtgcttcaggtagaaatgtgcttcaccctcctggtggggggcgaggacacagcccactgcatgcagcatggtagagagctggggcgaatatctccatgtctttggaggatgtcagctggccgctttcagggcagagtcggggtgggcgttggtgccaccttaaggaaggagagtgatgcgtgggtctngcagagctctggaagccaatgccggctgcctgagagcaanggaaatgcattgg

SEQ ID NO: 261016 - DNA, 719 bp, Homo Sapiens
gggcttcattgcaaacctggagcctgtctctcttgctgatcgagaggtgatatcccggcttcggaactgcatcatctcgctggtaactcagaggatgatgctgtatgataccagcatcctgtactgctatgaagcatcccttccacatcagatcaaagacatcttaaagccagaaataatggaggagattgtgatggaaacacgccagaggcttttggaacaggagggataaggaggtgctccagaagcacgggactgtggaccttgcaggagtgaagactgtgatgtgtggtccccatatgtggctcagcaaagactcgagagatcatccctttgtctgcattgacggccctgtgacggcctccagcccacaggcctgctttctccctgtccctaacacccaagcctgggtggcagatgaacagtgcttccttgggttgccagctgagtcccggtattagggaatagtttcagctctttcaaagtgcacagtgttacagtcgaatgggctcccatccctggaataatatggagaatcctttgtcttccactcactgtcattcacaaggcacagtgccccatgaaattgccccaatagaaaacatggcatccctgacctccaaatggtctgttttggcctccattcctatatcctttaaatgacctgagaatgcagctggtaaagttggaagaataaagttaaccaagcaggccaggta

SEQ ID NO: 261017 - DNA, 465 bp, Homo Sapiens
  misc_feature (13)..(13): n is a, c, g, or t
  misc_feature (37)..(37): n is a, c, g, or t
  misc_feature (42)..(42): n is a, c, g, or t
  misc_feature (51)..(51): n is a, c, g, or t
  misc_feature (76)..(76): n is a, c, g, or t
  misc_feature (119)..(119): n is a, c, g, or t
gggatggatctcntcggagtcctttgcctggagcccnaacantaagggggnacccacaacatcaaaaagtccttanaactcccctgcaaaggttcccaaagtcccccgtgcctcctggnagcacctcccttatcccctccctgttcccaaaaaacctctggccgtgtttccccatccacaatctccctcccattatttcctggctttaagatgtctttgatctgatgtggaagggatgcttcatagcagtacaggatgctggtatcatacagcatcatcctctgagttaccagcgagatgatgcagttccgaagccgggatatcacctctcgatcagcaagagagacaggctataaggagacacagagaggggaagggaaatacaaacaggaccaaaatacgtgaccagccacagaaattcacaaataaatcatttatgactcagacagtatcaccctggaactc

SEQ ID NO: 261018 - DNA, 448 bp, Homo Sapiens
ggcatttttctacaaaaaacaatcatccttctctcccccataaagactggctgtaaccttaagcccatcaaagttacttccaccctggagaaaacctcaccaaacagctggtgtggcctgaaggtggccatggtgggaaatgggcatgagaataaatacctccccaaattcaatctgagcccagcaggagaggatggtagggttgccagggctcagaagtgcaagctgattactcaccccaccctgcctcgccgcacctttcctttgtttccttgggtgaatgcaggagcagcagtggctgcccttcccacctggacagtggtgtgtgtagaaagccagctggatgtttgtggtggggcctcatggtgcctaggaggagataaagatgaggaggtttttccttattgtataaatgaatatttgtatgattaaattaacacacacacca

SEQ ID NO: 261019 - DNA, 774 bp, Homo Sapiens
  misc_feature (687)..(687): n is a, c, g, or t
  misc_feature (750)..(750): n is a, c, g, or t
agatcctgtctcaaaaaggaagttcatgtcatttttatgtaacaatccaacatttgactagagcagtttaagtgttctgttgtctgcctttgtgtagagcctggtttatcagccttcagcagctagcttgagagagaaaagatggatatactttcaagcataagattgattttagtctttgtgtttctaggctaatgggagctgtcctagagatagatactatataaaatgaagccactcagactttaggaacataaacttttattgtcatccagcacctgtgatagtttcatgtctctctaaaggagacaggaaattggagcattgtgggcccttttaaaagaaaagaggagtaggtaggcacacccaggtgcttctaaaacaaccaagcccaaacctgacatgctcctccccacagtcaccttcattgtcccctttaaaagtctggaacagtatgtagcaaaacaaataaattacttttcatttcaaaaagtaagttcaaaggttgaagctgcctaggccagggcttctgggacaggtgcctccaaagaagtgagctttccttttcaacttccttagctctagccagtaggaccaggaaacccctgcttttccacatcagggttccagatggggttttagttagacttgggatcccgttgcttgggcatctctcctccatcttcnaaatccatttctgcagcaactgacatacacaggacctggaggtaccttgtggcagaccccacngaccttcggaggtaaaagcggtcg

SEQ ID NO: 261020 - DNA, 218 bp, Homo Sapiens
  misc_feature (12)..(12): n is a, c, g, or t
  misc_feature (37)..(37): n is a, c, g, or t
  misc_feature (46)..(46): n is a, c, g, or t
  misc_feature (53)..(53): n is a, c, g, or t
  misc_feature (103)..(103): n is a, c, g, or t
agtatcccaaangaatgcctccctcggaataaaggcnaacgtgggnaactgtnggtggctggggtggaacgggacaggagggaaggtaggtgtgataaacccnagatccagattaacaggcagactcaactgggcaatttccaggcaccagtctactgggtttattcaaacatccctggaaatacaacagggtgaatacagttgcatttactagaact

SEQ ID NO: 261021 - DNA, 1227 bp, Homo Sapiens
aaatcgagagttggggatgtgcacaagggcttccttgtcaccaggtttcccagggtttgcccagccaggaggtcacagtaacaccaggtggaagaggctggtcaatgccctcccagtacacgccaccatcactggtctcagccacattggtaaaaatagtgttactctggattgtagccatggcgttgggattggtggtggcagaggtaccaggggcaaccccaaagaaagccgttctcagggttgagggcccggagtcgaccttcactgtcaaacctcatccaagcaatatcatcccccaccacactccactttccagcctggcagtgcaggccgcatcatagccaggttggtcttgccacaggcactagggaaggcggctgccacatagcgcttcttccctgcagggctggtgatgcccaggatcagcatgtgctctgccagccagccctcatcccgggccagccgagaggcgatgcgtagggcaaagcacttcttgcccagcagggagttgccaccatagccgctgccgaaggagatgatctcccgctggtcgggcacgtggccaatcagggttttctctgggttgcacggccactggctcactggctccccttgtcctgtcaggggctggcccacggagtgcagacacttgacaaagtcaccatctcccagggcctgaagcacaggtgtccccagtcgggtcataatacgcatgcttgccaccacataggctgagtcagtgagctgcaccccgatgcgggacagcggggagcccacaggacccatgctgaatggaagcacatacatggtgcggccctgcatgcagcctggaaacctctcatccacagctcgctggaaatcagctggggacatccagttgcccagctgcccacgggccccaccaggcgggagtggtaccgtgtcccgctgagaaggagttacaatcaccgtcttgctctctactcgtgccacatccttggggtctgtgcgggccagccagctgggggagaggggattgtcaggaagatggtggccagcaggtttcccttgtccctagacccactttttcaagtccaactttgactccaggtcttctgttggccttatgtttccccacccaatcacatctcagtcccttcctccaggctttgtcccatctaaggggtgttccccaaggtcccagacctctggggtctctcccctggcaaaagctccctgaactgg

SEQ ID NO: 261022 - DNA, 958 bp, Homo Sapiens
ggcctgggtggcgaattcggcacgagggccttccatacctccccggctccgctcggttcctggccaccccgcagcccctgcccaggtgccatggccgcattgtaccgccctggcctgcggcttaactggcatgggctgagccccttgggctggccatcatgccgtagcatccagaccctgcgagtgcttagtggagatctgggccagcttcccactggcattcgagattttgtagagcacagtgcccgcctgtgccaaccagagggcatccacatctgtgatggaactgaggctgagaatactgccacactgaccctgctggagcagcagggcctcatccgaaagctccccaagtacaataactgctggctggcccgcacagaccccaaggatgtggcacgagtagagagcaagacggtgattgtaactccttctcagcgggacacggtaccactcccgcctggtggggcccgtgggcagctgggcaactggatgtccccagctgatttccagcgagctgtggatgagaggtttccaggctgcatgcagggccgcaccatgtatgtgcttccattcagcatgggtcctgtgggctccccgctgtcccgcatcggggtgcagctcactgactcagcctatgtggtggcaagcatgcgtattatgacccgactggggacacctgtgcttcaggccctgggagatggtgactttgtcaagtgtctgcactccgtgggccagcccctgacaggacaaggggagccagtgagccagtggccgtgcaacccagagaaaaccctgattggccacgtgcccgaaccagcggggagatcatctccttcggcagcgggctatggtggcaactccctgcctgggcaagaaagtgctttgcccctacgcatcgccctctcggttggccccggggatgaaagggctgggttgggccaaaaccacatgcctt

SEQ ID NO: 261023 - DNA, 1774 bp, Homo Sapiens
  misc_feature (1665)..(1702): n is a, c, g, or t
  misc_feature (1705)..(1713): n is a, c, g, or t
aaggtagcgaggcctgggtggcgaattcggcacgagggccagtggccgtgcaacccagagaaaaccctgattggccacgtgcccgaccagcgggagatcatctccttcggcagcggctatggtggcaactccctgctgggcaagaagtgctttgccctacgcatcgcctctcggctggcccgggatgagggctggctggcagagcacatgctgatcctgggcatcaccagccctgcagggaagaagcgctatgtggcagccgccttccctagtgcctgtggcaagaccaacctggctatgatgcggcctgcactgccaggctggaaagtggagtgtgtgggggatgatattgcttggatgaggtttgacagtgaaggtcgactccgggccatcaaccctgagaacggcttctttggggttgcccctggtacctctgccaccaccaatcccaacgccatggctacaatccagagtaacactatttttaccaatgtggctgagaccagtgatggtggcgtgtactgggagggcattgaccagcctcttccacctggtgttactgtgacctcctggctgggcaaaccctggaaacctggtgacaaggagccctgtgcacatcccaactctcgattttgtgccccggctcgccagtgccccatcatggacccagcctgggaggccccagagggtgtccccattgacgccatcatctttggtggccgcagacccaaaggggtacccctggtatacgaggccttcaactggcgtcatggggtgtttgtgggcagcgccatgcgctctgagtccactgctgcagcagaacacaaagggaagatcatcatgcacgacccatttgccatgcggcccttttttggctacaacttcgggcactacctggaacactggctgagcatggaagggcgcaagggggcccagctgccccgtatcttccatgtcaactggttccggcgtgacgaggcagggcacttcctgtggccaggctttggggagaatgctcgggtgctagactggatctgccggcggttagagggggaggacagtgcccgagagacacccattgggctggtgccaaaggaaggagccttggatctcagcggcctcagagctatagacaccactcagctgttctccctccccaaggacttctgggaacaggaggttcgtgacattcggagctacctgacagagcaggtcaaccaggatctgcccaaagaggtgttggctgagcttgaggccctggagagacgtgtgcacaaaatgtgacctgaggccctagtctagcaagaggacatagcaccctcatctgggaatagggaaggcaccttgcagaaaatatgagcaatttgatattaactaacatcttcaatgtgccatagaccttcccacaaagactgtccaataataagagatgcttatctattctaaaacgacactgtgcatccttcggaaaagttcccttgtcgggccgccttcggcccctccaaaaaacttttttttaaaaccctttctcattttggggcgcgccggggcccccctttaggggaaaagcgggaaaccgtgggcccacaaaaacctgggttttcccctcaggggaaaaacccctggggggcccagggaacctaaggggcggtctggggaattttnnnnnnnnnnnnnnnnnnnnnnnnnnnnnnnnnnnnnngcnnnnnnnnnaacaacccctcggaaaggcgggttttcttttggaaaacacaaaaaatctccccacaataaa

SEQ ID NO: 261024 - DNA, 491 bp, Homo Sapiens
  misc_feature (358)..(358): n is a, c, g, or t
  misc_feature (378)..(378): n is a, c, g, or t
  misc_feature (416)..(416): n is a, c, g, or t
  misc_feature (463)..(463): n is a, c, g, or t
ttcctctgagtacaagaaggcctctgtgttccccttgggcaagagcaggtgcttaccttgtcctgtcaggggctggccacggagtcaggacacttgacaaagtcaccatctcccagggcctgaagcacaggtgtccccagtcgggtcataatacgcatgcttgccaccacataggctgagtcagtgagctgcaccccgatgcgggaacagcggggagcccacaggacccatgctgaatgggaagcacatacatggtgcggcctgtgggaggaaggcatcccctgggatgaaagggtttccaaacctgtttcacatctttccgtgccctttgccactgttgcccctgccctggttaccntgcatgcagcctgggaaacntttcatccacagttcgttgggaattcagttgggggacntccatttgcccagttgcccacgggccccaccagggggattgtacctnttccgttgagaaggatttacattcaact

SEQ ID NO: 261025 - DNA, 691 bp, Homo Sapiens
gttaatgaacaaacaaactagatttggtatgttttcagcttttgtatcatgtttaattgtttaatttggttgaaaaactgcagttgagaaatcagatagcaatatagacattcacagcagctctgtggataccatgtaattgtcaggtaatttcagaatgttgaaaattattcagtgcagccctcatagtatcatacttgaagaaattgattacagttccactaaattgttgaagataaattatttttaaaggttatgaaaactaagttatattaattcatatgtttgatttttaaatcccacctcctcaagctatccaattttctgactttgaaaataaccatgagagatgccacatttctctctgggaaactaccactcaaagaataattgttaaaaattaagcttttaggtattagaagctgttataaagtataaaattaagatataagcagatcacatgtaaatcattcctaaagcacaagaaaagaatgtgccttgatgtacatatattactaagttgcctctcccagtttactttaaaaatggctttaaggataaagaataaatgtgatagctgtgcatgcattatatatttgcatttgcaaatttcccattgttttaacagctgtgtggctgactttcaatttaagacgtgaattgacatacagcccataactttataatggct

SEQ ID NO: 261026 - DNA, 1343 bp, Homo Sapiens
gcctgatttctccaaagccttgtgtgaactcaccaaacacaagaaaatcaaatatataaccaatagtgaaatgccacacctttgtccactgtcagggttgtctacctgtaggatcagggtctaagcaccttggtgcttagctagaataccacctaatccttctggcaagcctgtcttcagagaacccactagaagcaactaggaaaatcacttgccaaaatccaaggcaattcctgatggaaaatgcaaaagcacatatatgttttaatatctttatgggctctgttcaaggcagtgctgagagggaggggttatagcttcaggagggaaccagcttctgataaacacaatctgctaggaacttgggaaaggaatcagagagctgcccttcagcgattatttaaattattgttaaagaatacacaatttggggtattgggatttttctccttttctctgagacattccaccattttaatttttgtaactgcttatttatgtgaaaagggttatttttacttagcttagctatgtcagccaatccgattgccttaggtgaaagaaaccaccgaaatccctcaggtcccttggtcaggagcctctcaagattttttttgtcagaggctccaaatagaaaataagaaaaggttttcttcattcatggctagagctagatttaactcagtttctaggcacctcagaccaatcatcaactaccattctattccatgtttgcacctgtgcattttctgtttgcccccattcactttgtcaggaaaccttggcctctgctaaggtgtatttggtccttgagaagtgggagcaccctacagggacactatcactcatgctggtggcattgtttacagctagaaagctgcactggtgctaatgccccttggggaaatggggctgtgaggaggaggattataacttaggcctagcctcttttaacagcctctgaaatttatcttttcttctatggggtctataaatgtatcttataataaaaaggaaggacaggaggaagacaggcaaatgtacttctcacccagtcttctacacagatggaatctctttggggctaagagaaaggttttattctatattgcttacctgatctcatgttaggcctaagaggctttctccaggaggattagcttggagttctctatactcaggtacctctttcagggttttctaaccctgacacggactgtgcatactttccctcatccatgctgtgctgtgttatttaatttttcctggctaagatcatgtctgaattatgtatgaaaattattctatgtttttataataaaaataatatatcagacatcgaa

SEQ ID NO: 261027 - DNA, 775 bp, Homo Sapiens
  misc_feature (222)..(230): n is a, c, g, or t
  misc_feature (433)..(443): n is a, c, g, or t
aatgaagagcatcaaagaatggagtagtccttatttaaactgtaatggtgtcaagtctcactgtgtgcacactctcacacatacacacacaattatactaattctagaaaggaaccaaaggtaaataaccagtgtttccattatcactaaatggaaaaattgactggaagttagagttgtgccaattaatcattttgttcatcaactgttctggtaacttannnnnnnnnattggaatcttaaattggaacaactgttacagaatgtatattgctccagttctaaagccagttaaccctgtgccctctaacttatgaaccttcatttcaaaacagtatgtgggaagtcctgtagtttgataagagtaaaattattttaaagaggataatttaccattttactactataaaataagttgatatcagttgaccannnnnnnnnnngatggactctttttgttgggagaaagaaatgaatggaagaaaaaaatatgttgcttttatttgaatattgattactaacaacttataaactacattgcaggaaatgaagaaatattttgaaattagcaaaatagcaacagtattcaagtatctgaaattttaatatggtgagtcttagagctttagactttcctataagtgacagtatctaagttattcttaatagtcacacttgataattctgctgaccataagcagctaacctacagttgaagatatttatgtgacatgaatagcctgtgttttaaaaattaaatattttatataaaact

SEQ ID NO: 261028 - DNA, 2152 bp, Homo Sapiens
ttccagacactggtcatgttcctcgggcagctggcagttatcatcgtggggtcagccaaggtgggcggcttggggcgtgtgtgggccgtggcttcccagcacggccgcattctctgggtttgagctggatccagacccctttgtgcggcacaccttctggaccttggccttcgggggtgtcttcatgatgctctccttatacggggtgaaccaggctcaggtgcagcggtacctcagttcccgcacggagaaggctgctgtgctctcctgttatgcagtgttccccttccagcaggtgtccctctggcgtggggctgcctcattggcctgggtcatgttcgcgtattaccaggagtatcccatgagcattcagcaggctcaggcagccccagaccagttcgtcctgtactttgtgatggatctcctgaagggcctgccaggcctgccagggctcttcattgcctgcctcttcagcggctctctcagcactatatcctctgcttttaattcattggcaactgttacgatggaagacctgattcgaccttggttccctgagttctctgaagcccgggccatcatgctttccagaggccttgcctttggctatgggctgctttgtctaggaatggcctatatttcctcccagatgggacctgtgctgcaggcagcaatcagcatctttggcatggttgggggaccgctgctgggactcttctgccttggaatgttctttccatgtgctaaccctcctggtgctgttgtgggcctgttggctgggctcgtcatggccttctggattggcatcgggagcatcgtgaccagcatgggctccagcatgccaccctctccctctaatgggtccagcttctccctgcccaccaatctaaccgttgccactgtgaccacactgatgcccttgactaccttctccaagcccacagggctgcagcggttctattccttgtcttacttatggtacagtgctcacaactccaccacagtgattgtggtgggcctgattgtcagtctactcactgggagaatgcgaggccggtccctgaaccctgcaaccatttacccagtgttgccaaagctcctgtccctccttccgttgtcctgtcagaagcggctccactgcaggagctacggccaggaccacctcgacactggcctgtttcctgagaagccgaggaatggtgtgctgggggacagcagagacaaggaggccatggccctggatggcacagcctatcaggggagcagctccacctgcatcctccaggagacctccctgtgatgttgactcaggaccccgcctctgtcctcactgtgccaggccatagccagaggccaccctgtagtacagggatgagtcttggtgcgttctgcagggacaggcctggatgatctagctcataccaaaggaccttgttctgagaggttcttgcctgcaggagaagctgtcacatctcaagcatgtgaggcaccgtttttctcgtcgcttgccaatctgttttttaaaggatcaggctcgtagggagcaggatcatgccagaaatagggatggaagtgcatcctctgggaaaaagataatggcttctgattcaacatagccatagtcctttgaagtaagtggctagaaacagcactctggttataattgccccagggcctgattcaggactgactctccaccataaaactggaagctgcttcccctgtagtccccatttcagtaccagttctgccagccacagtgagcccctattattactttcagattgtctgtgacactcaagcccctctcatttttatctgtctacctccattctgaagagggaggttttggtgtccctggtcctctgggaatagaagatccatttgtctttgtgtagagcaagcacgttttccacctcactgtctccatcctccacctctgagatggacacttaagagacggggcaaatgtggatccaagaaaccagggccatgaccgggtccactgtggagcagccatctatctacctgactcctgagccaggctgccgtggtgtcatttctgtcatccgtgctctgtttccttttggagtttcttctccacattatctttgttcctggggaataaaaactaccattggacctagaaaaa

SEQ ID NO: 261029 - DNA, 878 bp, Homo Sapiens
  misc_feature (220)..(326): n is a, c, g, or t
gaaatagggattggagacagtaaccttgaagctcaggaaactgtcctggctgggctgagtcaggaccttgccaggacgggctgtacccctggcttctagaagactgcctagcacacagtaggcattcaatacttgttgaataaataaactggctttcacctaaggactcaaccctaaattcctgctgcctcatctgttaagaactgacactttccccttnnnnnnnnnnnnnnnnnnnnnnnnnnnnnnnnnnnnnnnnnnnnnnnnnnnnnnnnnnnnnnnnnnnnnnnnnnnnnnnnnnnnnnnnnnnnnnnnnnnnnnnnnnnatgcctcccaaccttgctctgggagaccaatgcctgaaccagggtttgtttaccttctgagctgcagagatggggcttctggaatttaaggtaacaggatgaggcaggggtatcttgatcatccggatggggcaaatactgctgtgtggcatggtggtacccacccctatggaggggcactcttggacagagcccagacctttgtgccctggagggagccaacccaccctgacacggagacactggcagaatagaccagagacagaaggtgctctcatggtatccagcctgggatgccaagcccaagtcctgggtggatagcagaggccagctgtttgggaaaagggcaggatgctctgaggcctggcagccacatttccatgtgtctttttaccaataaacggcttctcttctgaggcttggacagtgtgtgtgtacacacaggcatgaaaaaggtggagaggggtctctgcgcgcaaaactcagactgtaaattttgtgtggttcccttgctctctgagcccattaaataaagaggttgtcttggcctaa

SEQ ID NO: 261030 - DNA, 874 bp, Homo Sapiens
  misc_feature (73)..(73): n is a, c, g, or t
cagcaggagagcatccacagtctgtctctccagccaaggaggaaggtgacaagacctccatcaaggtgagatncaggtcggcagcctctggttcccctgccgttaggctggaaagtgaaccctctgagccggcccctggggtgggggcaccaactccagaatacactttaagcctgtccccgcaaatcaaggtctcaggttccgtgttatgctgtccgtctgaggtcttcaattaagtctcgaccccagtgggtaagaaaactaaaaggtattgtcagggtagagatgaaaccgccgttgcaaaattatgagccagtgaaagagatgaaccaactccacttgcttctaagctccaagctgtccttgtgcattcctgggtgtaggctgaactccccttgggaggaatttagtttatattaatagtttatagtttgatacaaagagaataacagccctttcccaaaacaaaaccccttcatgcctggggactagactgcctttgtgggactaacaaattagccacaagattagaaattatggttcaggaatcatacagctgaggctacaagattctgactctatctaaactgctcctaatatcagtgcttgagatattttacagtctctgcacttgatggatcagctggcaccaccagatgaataaactggctcatctgatcttgtggtccccacccaggaactgactcagtgcaagaagacagcttctactccctgtgatttcatctctgaccaatcagcactcccagctcactaacttttcccccacccaccaagttgtccttaaaaccctgatccccgaatgctcagggagactgatttgagtaataataaaactccagtctctggctcagtc

SEQ ID NO: 261031 - DNA, 608 bp, Homo Sapiens
gtgtgcctgtgtgctctttcaacaaatttattcaattcacagtgatatctgttggacagagtcggcaatcctaccagacaaaactcatacacacattgattccagatgagaaacaacagtcccccaaggagcttgagaaatcacctagggcagccaagctggggaagggaagtggctgtgcattgctgtgtgtcctttaaggctctttggtcctggttgatttcctcttagaaggttccaaataaaacttccctttcctattcagtacacaccagtctttcgtttggtgtttaacctaatgggctgaggaagggaggcagccaggaaattatacccattaaagtgtgtggttaatgcctatatatatcatttttactcacagttagtggacttatcttttaaaacagaggtatgtggcagtggggtaagagaacttcccttattatagagaagattccaagaataggttcagacatgatctgaagaaccacgtaactctgctgccttgcacggtcccctttttagcactaataactcctaagtgtctgataatttcaaggttagcagcactcccaaagaagctgtccgggctgggtgtggtggttcat

SEQ ID NO: 261032 - DNA, 467 bp, Homo Sapiens
  misc_feature (118)..(133): n is a, c, g, or t
atcaaaaaaacagctttgaactcccccttcaaaggaaacagtcgactttcataattagcatctaccattatccccaaatcttattttattcattgacttgaaattttttccaattgcnnnnnnnnnnnnnnnnaaggttaagagcagaggtttactaggccaaagaaagagaatagctctctgttgcagagaggggtcctggagaaatgggttacccccagttgtccttatttaaatggttaccccatcagattttaattttatccttctctttgagagcttggtaataagaagcacttaaatcactccaaagaagactttaaaaagggagcagtgaaaaggtcttaataatttattgattgaattaagaaatactagctaattaagaatctgagtctaaacagcacagattttttctttctgcttttaaattgtgttttaaaaaaagagacagggggctgggcgtg

SEQ ID NO: 261033 - DNA, 564 bp, Homo Sapiens
gcagatttataaaatggattctattttaggaacgatcaaattctaaaattgagaagctcaagggtagggcactggagataatatagaaagacatgtaatatataaacaattctctagatcttatatctggagttaagtaaagcagacaacaaagagggagacagcttggttgtcaggatggtggcttggacatgtgttaatatgtaccccatctcatcatgatgctatcagaagcacgggtctttaaccatctcctttttctgaattttaatatgtgaatgagtcattaaatattggcttccagttagtttctgcttgatatgtacaatcatgacagtagcatagtggtttgcacattaaaggtcaacaaatgtttgttggttgaatatacctttcctagatttagcaaaatttcaaaccataaaagtcccttatgtgcttttatattttaaatcaagtctttcatgttataaactttaaaactcaggctcatcgaagtgaagtgatttgcccaagcataccttcccacacaaggcttaacaccgactcccactttagtacaat

SEQ ID NO: 261034 - DNA, 555 bp, Homo Sapiens
gctggtaccggctccggaattcccgggatatcgtcgacccaggcgtccgcaatttggtgctattgtgcagtaactaatagtactcttaccagaggagaaattatattaacgaccctgctaatatcctttcttagttatttgctccttgcaaattaaaaaagccactaagagaaagaaaaacattgtagatatctatttatatttaaagtttatgtttcatgaactgcagctgcaggattttggcattttgcatgccattttccatcagatttgggatgatggctcagaacatgtacacagactaagagtaactgtgtgatctgttaaggggtggataacataatatgcagcttaggatgctattttgagatgtatgatattcagttcattcacctgattactttggttgcagcccaactgtatatattgtataaccgaaattgattattttcattgtccttaatgcagtgatttataattagagcatgtttaataagtttactcttcttgttaactagtcatttgactggaaaaaaataaaatacttttaaatgg

SEQ ID NO: 261035 - DNA, 1053 bp, Homo Sapiens
  misc_feature (464)..(473): n is a, c, g, or t
  misc_feature (997)..(997): n is a, c, g, or t
gggggtttgcagtggttgtgttttgcataaaatgtctagtctttgccacagatagtgagctacccactaatgagcccatggttttatttcgaagcacatgagggtgtgaaaccactctgttacctttctgtattgtcttagctattcaagccagtcagaggataatatatatattctcatcagcactcagagtagtcagtgaagagagtagatcacacttgggcacaccaggattcacataaacattgtatcttctctgtggatgctcaggccttgtctacaatgaggctttacaaccttcctttgttttggctcgggattacttcctgggctgtctaataattgaaccataaccatgtaatattatgtaaaggcctggaaattactgttgctaaaaaaagtcatgtagtttcatgtagtgtagcatccttggcatcgttttccaaaatttgttccttctcccnnnnnnnnnnctttcgtgtgtggcatgagtgtgtatctgtgtaaatatgattgtatatgtgttactccgatatgtaatccatttcactggctgagtttggcccctagccatgtgttaatataaagtaggcatggcttcccaatggaaatctctgagaatgacagtggagttgtgcaaacattttacatggccacataattggactggcaattttatgggtaaaaaacggcacatttaggcaggtgaatatgacgttaccttgcagactaaaaggttgaaggcccgaaactaacttttagctaacaataagggctgtgccaatggaaactgagttcattttctgagaaaggtttggatgactgaaatatttcctctacagtcaaggactttggcatgcggtggctgaaactgagcttttttgtgtgggctccagttctcactgttctgcaatgctcatgggcaagttgaatggtgagctagcttataaaattaaagagctctgaactgtattcagaccgactggggtatctaggnttactgtttttaacatcattgttgaaaccagacccgtagtccagtggtgctgcctt

SEQ ID NO: 261036 - DNA, 1457 bp, Homo Sapiens
  misc_feature (440)..(566): n is a, c, g, or t
  misc_feature (577)..(590): n is a, c, g, or t
  misc_feature (750)..(760): n is a, c, g, or t
  misc_feature (816)..(827): n is a, c, g, or t
  misc_feature (1309)..(1309): n is a, c, g, or t
ctaacagtcagggactttggcatgccggtggctgaaactgagcttttttgtgtggggctcccagttctcactgttctgcaatgctcaatggcaaagttgaaatggtgagctagcttataaattaaagagctctgaactgtattcagaccgactgggtatctagcctactgtttaaacatcattggtgaaaacccagaccctgtagtccagtggtgctgccctgttgtgcaaactgctcctttttctcgtgtttttgtaaagagcttccatctgggctggacccagttcttgcacatacaagacaccgctgcagtcagctaggacctttccgccatgtattctattctgtagtaaagcatttccatcaacaatgcctaattgtatctgttatttttggtttaacacacactgattcatactaataaatattttcagttttnnnnnnnnnnnnnnnnnnnnnnnnnnnnnnnnnnnnnnnnnnnnnnnnnnnnnnnnnnnnnnnnnnnnnnnnnnnnnnnnnnnnnnnnnnnnnnnnnnnnnnnnnnnnnnnnnnnnnnnnnnnnnnntctttggcggnnnnnnnnnnnnnnaaaaaagtttttgaaacttctctcggggcgccggcgcccaaaagaaaaacgacttggccctccccggttttcccaaaaaaaccggggcttccgcccagcggttttattcctccccaaacaaaaaaaccccccgcggtgacaaccctccgcgttttaaaannnnnnnnnnngcgcgcttttgcgaatatttttccgggaccccgccataccaggcgcatcctatggnnnnnnnnnnnnacatataaaacccccgcccccgcatgtttgcagatttctccgcagaagaaaagggggtgagccactctccattaataccgtttcttccgtcgacaacccgtgaggagtaccctccacaccacaacgaggtggtgcggagggataacatacccgggcgaaccgcggccgcagagggcggcgcaaattagcagtgttaccgcgtttggctctcacctgtgtgtgcgcgcgctacataaatataatttttcacctccccgcgcgcgcccgcaaataaaacagcggggtgttaaaatatccaaaacgccgccgctttacactattatggtggctaatgcgccggcctaacaatagttataaaaaattggggggaggacaacctccccttccccctcccggatcccccgcccgccttttttttccgcactattatccgcctctgccccgccgcctcagaatacctctatcccgccgcggagaaattnattcgcgccccgtattttctgcccgccgcgaacacgcccgccaaccagtattctcgggaaaataatataatgggactcaaaaacaccgctccccgcccaaatacgaacgtcgcggtggttattacttctcgccccgcccgccgccccg

SEQ ID NO: 261037 - DNA, 614 bp, Homo Sapiens
  misc_feature (56)..(73): n is a, c, g, or t
cccttccaaatgcgaatctgagaaaactgctcccaggaatcaaatagtggaagggnnnnnnnnnnnnnnnnnngcatcagtagaaccacgcagtgcaagaaggcctgctggtcacacttaagtgtcttcaggtaccccccaaagcgtttcacaatccccatggcaagctgtcgggaatgtcaggtccaagggtgaaaagtggaatccgctcatgtgcccacttgtgtgttgtgaatttcaggatctggtgccaggagacactgcattctactcccaggtgggtttctccggcttttaaaaatgcggaatactctctccatcgtgtcgcagggcatgatttctccattcagtgccttttgaaattgcaagtcaaagatctggttccgtcgtccgcttccgccagccttggcccaagtcattttgtcttttgatgttgggagggacaaaggagttcccaaggtccctggatctgactgacttaaaaaggggggtgtcatttactgaaatggcaggaggaggagtgggtttgaaagaagcagagaggaagggaggcagccgtggtttggaaatgttagaaaagggcattgtggccgggcacggtggctcacacctct

SEQ ID NO: 261038 - DNA, 991 bp, Homo Sapiens
  misc_feature (892)..(901): n is a, c, g, or t
ggactgagcttcatgtctggcatcagctctggcccactgagtggtggctactggtattgtcactattgtaattaatactccaacaggaagataaatgtgcccattctcacataggccactctgcctttgattctttccagcttttagggacctagtccagtgctcctcaaaccatctacagtgaagggccagtcccattctgatttgctttttacatttccaatgcatcaaagacccatgtatggtcctattgcatgtggctagtatgtagcagtaccacttgtatttggtaacacccaacctggccttcacccttttcaatgagatgagtccagtgatcacatgcttggatgttacaacgtctaattgctaaaaaatatttcaaaaatcccatgctcttaatttctgtacttatccaattgtggaccagcaggaaactgttcccaggtgcgcctccgtctagcactgtggacacttgtctagtcaatggtgccctctcttgcagaatacctgctatgttcctgacaccatatacgattttgttttcattcctacattaatctgggagataagatccctatttcatagatgtagaaaatcaagttcagagaatttgagcaacttgcccaagacaaacagccaaatttcctaagtgactgagccaggatttgaacttgtccatctagggcaaaagccctatctctttctactctaccacactgaacttcagctaaaagaagtccttttattgcaaatcaacaacccaagctcatattcatgaacctcttggtactcatccatcatcttttaagagtgcctctctaaaaagagaatggaaatacagccctccttgaccacaatttctgcctaagatgctagaaagtaaagcccnnnnnnnnnnctttcatttaaaatacagtacatgttcagttttggtgcagagagagagataatcttgacaggtcctggtggtttgcctttcaacagaact

SEQ ID NO: 261039 - DNA, 1150 bp, Homo Sapiens
agttccagcatcacagaaccagaagaagagacctgcaactgtgagagtccagacaggaagcagagaaggcgtccttgcggaaagggcattttagctgaggctttggagtacgaataggagctcagcaggcagacgaatgaggaataaaggtcagagaaggtcagagctgagtgacgtttggaatccaccccgtttattgtagaactgggggttcagagggcaggtgcctcagagttgaggccacacagtgaggtctggtgggtgaaaggacccaggaacgaggcgttcaggaaagcaggttgtcagagctatgtggagtctgtgggtggcaggggcagccgctccagccttgtgaagactttgaaagccagagattcctggcgcaggcttggacttcctgggagctcctccaagtacccgaggggcagcacagctgcctgggtgttacatggcccagggaacccaggttcagggtaggacaggcaagaccagatacccaatgtgcaaagtgaaaacactgggctccctgttaaacgatgaagaattcaagacagtgacagcattacgtcacccctggggacagaggtcagcctaaggtgacacacggggactactgtgcttccggaggctccctgtgtcctggaggagaaaagcattacagggggcagctggacaagctcccaactgcagagtcccagccctggctggggcagggccccggcctgggactcagcatttctgatatgccttaagaattcattctgttttgtacaactattttttaaaagtaaccgtgtggcgaacgcacccacgccatccgctcccggcaccctcagccgcatctgcgggcggcccctgcctccgaaagaattgctcaaccctcttttcgtggcgcgccgccccaatgcgagccggaaaagcccctaccgtgttctccccgaagaccatggggcataagcaccgggttgggatattccccaaacgaaaaaacaccccgcgtggcgaaccagccctcccgtgaaacccacccccaagcgcgttcccccggggtatctcctgggggttcccttacccgcggatgcttccgacgggcgctcgctgcacgatttaaaatcatcctcgcccccgcccctgttacccccttctatcc

SEQ ID NO: 261040 - DNA, 513 bp, Homo Sapiens
taaataagacatgccataagtcgtgaagttaacaaaatataagcatccgcacagaatatattctaaggtgacttcatttacaccgcttctcagagaaacacacaagtaaccttttgtctgcctatcagccagtgttgaaacagctttggaattcacatggaaggctgccgggctggttccccaacactagcctgatggagtcctgtatccgcaccgtgccgtcaaactggctggtttccactagaaaagcaatggagagtcagctctcccttctttacccagcgttcaactccacactgcaaaaactgcataacctgaaccctgctgtgatgggcaactgaagtttaaacccaagtttggtgaccttgctttaggtaacctgggctgctcaaaaggagaccgaggtgtgatatttaacattgcttgcaacattcaagagggcttggggacgtcagagccatgagtaacaataacgaaccagggctatgagtggaatcctgatgtaccccttcc

SEQ ID NO: 261041 - DNA, 968 bp, Homo Sapiens
  misc_feature (354)..(388): n is a, c, g, or t
ttccagaaagggacaaattaaaggatgaaccaaagattaagctgctcaagaagccagaaaaaggagatgaagaagaattggacaaaagagaaaaagccaagaaattggacaaagagaatctcagtgatgaaagagccagtgggcaaagttgtacattgcccaagcgttctgatagcgaacttaaagatgaaaaaccaaagagacctgaagatgagagcggcagagactatagggagagggaacgggaatatgaacgagatcaggagcgcatacttcgagaaagagagaggctgaagcggcaagaagaagagcgccgtaggcagaaggagcgctatgagaaagagaagacttttnnnnnnnnnnnnnnnnnnnnnnnnnnnnnnnnnnncacacttcgggataaaggaaagaaggctgaaagtacagaatcaataggcagctcagaaaaaactgaaaagaaagaagaagtggtcaagagagatcgaataagaaacaaagatcgtccagcgatgcagctttaccaaccaggagctcgaagccgaaatcgactctgtcccccctgatgacagcaccaagtctggagattcagcagcagaaaggaagcaggaaagtggtattaccccatagaaaagaaagaggagaggagtgataagtccagatggccttaagtgtcctgactgtctaggcagccaaagagcacaccgttaagcaatccagaaggtgccttcagggccaaagaatatgagagaaagggaagccgctggtgctggtggggtacactgcagaggagtaagtcttgtgtcaaagcaggaatctgatcagaggttcagaattggaagtacaatttcattgcttttgcaatttctacaaattaattttaaagtgtcagaaaaaggtgacggcaaggacatgcattgcaatttgcagggggaattgtcaagtgaggacttcatcacatatgacacgag

SEQ ID NO: 261042 - DNA, 880 bp, Homo Sapiens
cataaacgagctgaatttgatattcacaggagtaagttggatcccagttccaagcctttagcacaagtttttgtgagttgcaatttctgtggcaagtcaatctcctacagctgttcagctgtgcctcatcagggcagaggttttagtcagtatggtgtgagtggctcaccaacgaaatctaaagtcacaagttgtcctggctgtcgaaaaccacttcctcgatgtgcgctttgtctcattaatatgggaacaccagtttctagctgtcctggaggaaccaaatcagatgaaaaagtggacttgagcaaggacaaaaaattagcccaatttaacaactggtttacatggtgtcataattgcaggcacggtggacatgctggacatatgcttagttggttcaggggaccatgcagagtgccctgtgtctgcatgcacgtgtaaatgtatgcagttggatacaacggggaatctggtacctgcagagactgtccagccataaaatgttaccaccttaagagaacccttcaagtgtggagctttctagtaggtgtccttcatagctcagaaacatacctcagaacaagccattcatgacttacctgtaatgggaaaataaatcattctatcagatcagcagttttgatgttttgagtgattttgatatgcttcacagagacaaatgctgccaaaataaacatcgaagtatagacatgagttctgttcagcaggttgaaaagtctgatttagaaaaactttctaagttttggttgaaattatgaacactctagaagcagaatttctggaagagccaagaacagactttgagcctatatcttcaaagctgaaactggatatctttcaataaaatatgtgcactttt

SEQ ID NO: 261043 - DNA, 885 bp, Homo Sapiens
atgtaaagtattagcatgattccaatattaaaaaaaatggaccagaggagattctctctcctgtcctatcctcagcacccagttcccctccccacaggcctctcagatgttacatgctgataactatgtacatgtattccttaaatgtttttttaagttttatattcttggcactggtcttcaaatgtgtacatgtgtgccagggagcaaatgccttcttgtttctgaaattggtcttttagactgttcttttttcccatcttctcacctcctgcccctccttcagggtacttccgtggccagaacccctccaggtcagaggcagaagagaagcctcatgggtcacagcagcagatgtgggctggagatctattcatttggttttggcttgaattttctgaatggtttacttgatcttgggaaagatatatcttgccaggaaaaatgataggccttgacaatgttgaatgatcctgcaccaccttgaaagacattttctaatatggtttgtcaggcaaagtggttagtagtcatttgtggcctgaggtagaagtcctcagaaatcagcagacttcactgataaaatgctgacttgcccctggactgggctctgtgagagtggccttctgcactgtgcacagtaggtgtgaacacaccacacctacagggaccacgtggtgggctgtggactagcggccaagctccctgcaggcccactaatagaattcagcttttagcatgggctgtttcatactgttctgatgaaactgatttggtttctttcctccataccccttctgcatttcagtgtttttgtttagttttcctggtttttaattataactacaaaataaaatctttaggctattcaccttagcttagtaa

SEQ ID NO: 261044 - DNA, 620 bp, Homo Sapiens
tgacttgttgaacaaataatctgtaaactctttttcagatgcacttcccatggggttaaggttttcaaagaatctctggaattaaacaaataacacaagtgcatatatagtatgtatatattttagatcttattaaaataagatctcattaaaattttttgctgaaaattacttatttaatgctaaaaaataacacattaagagcccacaatatgtgaaaagttcacaagtgttgcttattccaatctctttacttctgaataagattatataatttctgtggaagttatattctagtcttaaagttctattaagaatatgagttttcatttattatcattttaatggctcagcagtagcactacttattccttaggaaactttactcctactcattgtaacaaatgatcatcactagtaagctaccaaaagtgtttagaacaaagctatggttataatccacaatgaagttttgataatcagaaaaaaagtggagataaattagattaaggtctgttaatccaatttatagatcattcttgatcatttataattactctggaaattccttttactttaaaagtagtcatttaaattactttaaaagtaatgtcaagaat

SEQ ID NO: 261045 - DNA, 813 bp, Homo Sapiens
  misc_feature (738)..(738): n is a, c, g, or t
  misc_feature (742)..(742): n is a, c, g, or t
tgatccatgttgcctcagcctgttaaaaactaaatgatcaaacaccctccaatcagttctcagtttcattaactttctttctactacaaagtaataatagaaaggggtacgtgtccagcagcattcgagctctcagaagatcaatcaggaagggcaagaaggaaaaaggcttcctcctggagagaatttttttcctttcatcaggaacaaacaccaataacccagatagttcaaacagtggtttgtactgaaacatttttcagattaaatagtgttgagagaaacagtgatcttttggttgggtattttagaagaggttaaagtggagaggttaatgttgggaaaataccactgaaagtacagcccccagcaggaatgggctcactcgtgaggtttgggggcagagccagggccccagccttgggaatgaaatctgagggcaggctctccagcagacacttgacctgctccctggcccagcttgatcttgtcatccagcttccgttgctcaatgaggagcgtggacttcattttcacgaagtgctggtagtcctggagctgctcctctgaaaggtaattggccaagatgcccagcactaactgctccctgcgatccaggttctccttcagctcccgggcatcctcatgctgaccagccaggatcttccttttctcgtaaagagagctcctttcttcattactggcatcttcaccaaggccgctaaggacattctcaancagntagacgcccgagagggagagcagcaggttgaccaccttgtccaaatcccctatgaacatcctatacttgtc

SEQ ID NO: 261046 - DNA, 1178 bp, Homo Sapiens
  misc_feature (842)..(855): n is a, c, g, or t
tatcccaagcccacacctatgcctcagaaagtcagcatgtgtcctgaagacgttcatagatttataggaaataaagccaaatgtagctcatacctctttataaaactaaactgttgttagataaaatgagaagagaccattccatcattgaagtgttggaatataaaaagacattccagagcatagccttttggtaactttctaggtaatcttgcaatctctccatactgggctccatgttgaaattgctttttccctcaggacccggggtaaggatgggctacatttaaggtgactctgaatggtggggttctagcttggtcactttcatttcttgccatcataaaaactagtaggctgtggagtgcgcttcctgtttgtgtcatctggtcgtagaaccttttccaaacagaagcatctgcctttggctgttctgtgacctttgaagccagtctcagtggtttaggcagctttgcagttctaactctagctagaggccaggctgtgtgcagagctaaagcacaaatgagcagtacatcagcatgggcagagaaaatacaggactccagatgggaaggttttaagagtcacactggcatggaaggcttatctgccattctatttatagcctgaaatgattctggcctaccctgtcctgtctgtatgatctaaaaaccagccttttccccagaaggctctgagcacatccagaagtgataacctgaccctccacaccaaagacaccctggtgctgctgctggtgagactggtgtccaaggcagggcccagcagaaactgcagcctgctgtctaccaaaggaggtacccgagttgggtactttnnnnnnnnnnnnnncctgcccttacccctctccctaatgggattttttttacctgttcctgggcccattacagagcctctgaagtttgcagtatgctttcaaatgaaataatatacttccattgattcaggaagcagattttttgagtgcctatatgtgagacagtgtgctggttgaaggcctgatgctgttattccaggagactgcaggcccttgatgccaggactctctctactaaggccagttcaggtctgggaaagggagctggcctattgcccaccacctgttgtcagtaagttaagagcagttgactcaggatgaggaagtatggtccttt

SEQ ID NO: 261047 - DNA, 258 bp, Homo Sapiens
tgagccaccgcgcccggcctactttctgagccttagctactctacctaaggagcagagataataatttgcttctattaagacagaggaataaataaaataacctcttaaagccactttaaactttccagtctgtgcctccattaatttcagggagaaattcatccttgataacaagctgttatgatgaaagcaaacatatttctacaaaagatgtttggtccttctttccttctcctttccttttcttcttcttcttc

SEQ ID NO: 261048 - DNA, 1178 bp, Homo Sapiens
gaaggtggaacagaagaagaaaatagagatggagatgttattgggccttgcccaccggagccagaggctgtgccaaccccacgtcctgctgcccagagtagcaaagtagaagtcattgtccaggagaggaaggacaccaagcctggagtgccacacatccgggagtgggaccgcggaaaagaattttcctttggatactggtcgaagaggcagtcagatctccgggctgagagagatcctgagtttgccccgccgtcagattactttgtgggtcagaagagaactggtttttccagcagccaggcatggagcagacctgggccagcacagagtgacccagggcagtgccctgaccagagccacggacctagccctgaacatacgtcacccactcctgcccccgacaacccaccacaagcccccacagttactttcaaaactctggatgacatgatttcctattacaaacaagtgacatgatctttcaaagcacgctgacttgggtttgtactttgacagtgcctttctctccccagagggagaaataactttaggaactgaattgtacctttgtcctgtcctttccctaggaggcacagacttcgggttggatttgtcagcaaggaggaaagttatggaaactttggccacttggctgttcattttattctaagtgggatagggacatacctacctggatttacatgtgagctgcgatagaatagaagtatttattctgtaaaattagacactgagatgtgcttataaccctgtttcatatctactcccacgacttactcatatttaagggttctttcccatcccttttgcaaatccgagcatgcaggtgtctttattccaagggttcagcttccagatcagccgatggaccataggtcacgaggaatttctccctgtcaagcagtggaaaactgcatgggaggcaaaatgctctgttctccaagaggacccggaagtaatcacataggaaatgataaggaagaccaggaggagctcttcgtagtccagaaaggtagaagtgggagttgtttacttaattttactgtcataccatgctattacctacactcctgtgtgcagtgggcattcagtaaatgtgtgttgaaggactgggacgtacgtggaggctgctggacctggtcagagactgatgtgcc

SEQ ID NO: 261049 - DNA, 808 bp, Homo Sapiens
  misc_feature (141)..(141): n is a, c, g, or t
gggaggcctcaaaataccgactgcgtccattctctgcctccatggaaacagcccctagaatctgaaaggccgggataaacctaatcactgttcccaaacattgacaaatcctaacccaaccatggtccagcagttaccagnttaaacaaaaaaaacctcagatgagtgttgggtgaatctgtcatctggtaccctccttggttgataactgtcttgatacttttcattctttgtaagaggccaaatcgtctaaggacgttgctgaacaagcgtgtgaaatcatttcagatcaaggataagccagtgtgtacatatgttcattttaatctctgggagattatttttccatccagggtgccatcagtaatcatgccactactcaccagtgttgttcgccaacacccacccccacacacaccaacattttgctgcctaccttgttatccttctcaagaagctgaagtgtacgccctctccccttttgtgcttatttatttaataggctgcagtgtcgcttatgaaagtacgatgtacagtaacttaatggaagtgctgactctagcatcagcctctaccgattgattttcctcccttctctagccctggatgtccacttagggataaaaagaatatggttttggttcccatttctagttcacgttgaatgacaggcctggagctgtagaatcaggaaacccggatgcctaacagctcaaagatgttttgttaatagaaggattttaatacgttttgcaaatgcatcatgcaatgaattttgcatgtttataataaaccttaataacaagtg

SEQ ID NO: 261050 - DNA, 803 bp, Homo Sapiens
gcggtgacgggctggttggagagtctgcggacagcccagaagactgcgctgctgcaggacgggagaaggaaggttcactatttattcccagacggcaaggaaatggctgaagaatatgacgagaagacgagtgaactacttgtgagaaagtggcgtgtgaaaagtgccctgggagccatgggccagtggcagcttgaagtaggagacccagcgcccctaggagcagggaacctggggcctgaactcatcaaggaaagcaatgccaatcctatcttcatgcgcaaggacaccaagatgagtttccagtggcggattcgaaacctcccctatcctaaggatgtctatagtgtctctgtggaccagaaggagcgctgcatcattgtcagaacaaccaacaagaagtactacaagaagttctccattcctgatctagatagacaccagctacctctggatgacgccttgctgagctttgcccacgccaactgcaccctgatcatctcttaccagaagccaaaggaggttgtggtggccgagtctgagctacagaaggaactaaagaaggtgaagacagcccacagcaacgatggggactgcaagacccagtagttggcccctgagccttatacctccaccacagggggtgccgtgagacttcaaggcttggcccttcttgaccacggcagcctcctgtcttctaggagctatcaagggtctctaagaactgggcatggggcactcctagccagtgagtcatggtcatatttcctgagtaaagtcattctgagttacttactgcaaaa

SEQ ID NO: 261051 - DNA, 292 bp, Homo Sapiens
gtatattttaacagcattacatttcatgccaattgacaagttttgccaattttaataagaaactaagctttatgtaatataacaccgtaatttatgaatttgttcattgtcactgcctttattcatgaaactgtcaaatagagtgtctttcaagggttgcaggatcttagagatagaaagtaccttggtgatcatctccagcctaaatttcatcatcccttctatggtattcccaacaaattatcatccaacctatacttaaaaacatatggtggccaggcatggtggctca

SEQ ID NO: 261052 - DNA, 192 bp, Homo Sapiens
taaggcttgcttgtgaaaggaacagttgtaaaaacaaaattgcttgaagcagggtcagcttagtgcttcacagtttgactgcttctctaagaggagcccttcctgcgcacgtgcattcaaaaatcacaaaaaagtacaaagacaaacacctaaaacacactgcgtcaagtgcagcaccgactttggtcaaat

SEQ ID NO: 261053 - DNA, 825 bp, Homo Sapiens
tgttcatctgtgtgttagtgaatcaggttgactagcatataatgatactgagtataacaggaggattatgtctctcttattaatgacaaatgcagctactacaaatacatgagtaaagtttataaacagcaaaggaaaacttggaattacttgatgttttgtggtttaagaacgatacttgagtatgatcttatgcatgaaaatgtgtaagatggtatttctctaattttaatataattgttttcaagatgaagatgttccagatttgagtcatcatcctcttcagcattgcaaatttcttctggaagaatgttccgtatcttgttgttgttcagcctcagaaaatgtagtgctttcatttcttgtatcccaggtggtatagattttaagtcattgtgatccagaaataattctctcagagaatgatatgccccatagaaggagacacggtccatgccatcatcagcaagtttgttaaatgacaggtacaagtattccaggcctggttccatgtggccaaacacatagccagggatccgttcaatctggttcccaaggagtactaggtgcagcaaggacttgggtagataggacgggacgtgatagagcttgttgtaggagagatcaatggattctagattttcttgatttatccaggctaaaggagcaatcctattttcttcaattttgttataacgtagtacaatgacattgatctttctggtatgattgaaacaaatttcagttatttcttcaatttggttattttctaggtataattcctcaatagaaccaggaagacctgcggtataattctaaatttat

SEQ ID NO: 261054 - DNA, 976 bp, Homo Sapiens
  misc_feature (100)..(199): n is a, c, g, or t
agaggaatttgattttaaagaacatgttattagcatcaggagaaaaagtctgcttacaacttttaagaaacagtggacctcaaaatacattgttattgannnnnnnnnnnnnnnnnnnnnnnnnnnnnnnnnnnnnnnnnnnnnnnnnnnnnnnnnnnnnnnnnnnnnnnnnnnnnnnnnnnnnnnnnnnnnnnnnnnnatccctttgatttgaatcataatcttggagctggattatcaaggaaaatgacaaattttataatgaaggcttttatcaatggtagaagagtatttggtattcctgtcaagggatttccaaaggactacccctcaaaaatggaatacttttttgatccagatgtgttaactgaaggagagctggccccaaatgatagatgttgtcgaatttgtggaaaaatcggacacttcatgaaggactgtcctatgaggagaaaagtaagacggcggcgagatcaggaagatgccctgaaccaaagataccctgagaacaaggaaaaaagaagcaaagaggacaaagaaattcacaacaagtacacagaaagggaggtgtcaacaaaagaagataagcccatacagtgcacacctcagaaagccaagccaatgcgggcagctgctgacctggggagggagaagatcctcaggccaccagtagaaaaatggaagagacaggatgacaaagacttaagagaaaaacgttgttttatttgtggaagagaagggcacattaaaaaggaatgcccacagtttaaaggctcttcaggtagcctttccagtaaatatatgactcagggaaaagcctcagcgaagaggacccagcaggaatcatgagggaaggaaaatgcagcactctaaatggccactcaggcgttcctattcactcggaaaattaggttcatttcacaggacacagcagtgtagatcaggcttcaacttaacatttaagggaaatgtcaga

SEQ ID NO: 261055 - DNA, 610 bp, Homo Sapiens
  misc_feature (560)..(561): n is a, c, g, or t
ttgtcttcatgtaaaagcactgcctaaaaaatgaaatagactggtttacaaaatcgaaaggaagagcatctgaaacagccttaaaaccgaaaccatatccaaggagagctgaaataaggcatgtgggtggcagaattttgcaagttaactgaaaagcaagaccatgggcaggagttctgaaacaaggccccgccatccggtgcccagtaagcctcaccacgcaccacacccgcgcaggacagacaggagtgctgcaggtcagccagaggaaggagggcccacactgccagcacagcgcaaggacatggtgcagagctgagagcactcagggagcagctcctgagtgaacagatgacagacacgcctccttctccgtttgagctaggtttacctgaacaaataaaccagttggtttcaatgggacaggtgagggcgatccaaacatacaatctgatttagacattcctaaaaaagaaattagcactttttgttcctactttaaattgaaagcagtagccctgttttcaaactttcacagagagactgtctgttggtgtganngaagctccactcagtatattgtgtggacaaaggagcaatatatctgaaa

SEQ ID NO: 261056 - DNA, 999 bp, Homo Sapiens
cagaatgctaaaaccttccagccgtcttctcttccactccctgaccactcacgagtcacctgcatttcttaccccagtcgtcatccttgtttccatgaacgatcctctccagggcttcctgccagaaaagtattttgcaagtttcatttgaatttctacacagtataattctgaacatgtaaataatatataaagtcaacctatgtttggagctaagagtgacaacaatctctcacactacagatccgtcccaaattggtaatgccctaaaaatgctaataaaaataaggtgcttgtgaaatactcaaatcccttcagttagtacaaaaacaactggtgacctaaaaattcaaggaatggcccagagtaaagggaaatgtaatgttgactctggtttacagaaagtgaatctgagtcatggcagatcctgaaatttcacatgaactcattctgcctgtaaatgccccagcatcaatagtgagcaaacgtgcattctggccagccaggcagaagcactttgttttccattgtgcggtgacgccagatccccattgcttctgacaaaggccctcgtcaagcctgtgtgtcatcgtttgcgtttgccacagctgcagcggggtgcgcgcagacccacttcccgactgctcatcaaccgacctccctggggccgggaggcaagccgggtccgcgcggggtgcagcgccacctgctggaattaatgcgatggagcagcagcctggagtggctgcggagtccagaagtcctgtccttgaggtttgctttcagacaacggccagtcctgactgcaagaacaaaaacactagcagaaatatgcacccgttacgcaaaccagcccttaaggctgtacatgatcctttccccactacagaatgtggtgtggcgtgtatatgtgcaccagtgagtatgtggggggagagggggtacacccatttgtggtgggggggtataatgtggtgtgtgcatgtgcggtgtctgtgc

SEQ ID NO: 261057 - DNA, 804 bp, Homo Sapiens
atgaacaaggtccccattctcaaaaaactcagtctagcaggagaatttactcaatagtaaggctcaacgagtaccagaaattgaaccacgtgcttagagaaataagatactgttgatattctaaggtagcagcattatttattacacaaaaaaaacctgcaacataggtctccatcaaggaccacagaaggccaggatgcttggcctggcttgaggagtccagggaccataatggcagacctgaaagacaggcaaatacaccagctaaacaaacagatctgatttgttttgagtctctggagaaccctgactaataaggcagccttgaaaaaggattgcaaacatatctgaatggaggtgatgtggctttctcacaagcttctctaaactctcttcatcatcgcctcagcacataagagtttctacttttattataatgttgctagagtttcaagtctttccctttgcgttttctcgccaccactcagtctgaaatgttaactccatggctcctccccaggtcctgatttaggggtctggcatgctgtagtcactgggctcaaaagagtattgcacttcagagttcagtgtttcccagatagcagtgtttcccaaatcaccctcacgatttttgctacttccaactaaaacccgtactttcattcacttagaattttttttaaaaaactaaactggaaaactcataagcaataatatttgtgttctattagttatattttaatatgtattaaatgtataactattaaaaaggatttttagggggtgcaatttaaaatcatcttg

SEQ ID NO: 261058 - DNA, 802 bp, Homo Sapiens
  misc_feature (115)..(132): n is a, c, g, or t
caacctggaattaagaccacctagattgcgagagctgaatttagaaaccagacaacgtcatgcagcccagaaactcctgttgttacctttgcctaagaaattttctttaatggcnnnnnnnnnnnnnnnnnntacaaagagaaatctctaaaagaatatgatcttccatccaagtggagggaaactttaaaacaaaaacacccagtactgtggctcaggatatgatgcgtgaggagagggagggaacagagatgaccttaacttttaaaaaagggactgctgtgggccaaagccaagcccatctgccaggacgaggtaatgtcagagctccatcagcccggacagtgggaactaactggtgcattccccacacttaccttccggtgggttgctgatgagagaacctgaaaaaacctacacctctacagcaggtcgaattcatgacctgaagctgaatacttccagcatatttattcagggtgtaggtgggaataaagtatctttcgcagtgctctgttccctccgtctccccagacatctgacaccctaaaagccatccacagctatggaacctgagcgacaccttgatttgtgttgtcacctgaccaagcctaaagacctccagctcagtcccccaccttcatcccaccccacagatgataaaattcagacctctctcctgaaaggcagaggttcaacattcaggactgtttctggccgaggacttcttccaattaaaacccccaccgtgggctgtctcccctcatttcatttttctaaaggggcagaggcctcttttaga

SEQ ID NO: 261059 - DNA, 411 bp, Homo Sapiens
aattggaaaatgtctcactctgccctccccctggactgcattggtactaaaatagttttccttcaggatgctgagacatcgcttcatgaccttctagtttttggacttgctgttgagaatgtcaacatcattctgattccttttctccgcactctacgcaccatggtttgaggattttctcaaccctgggtgttgtgaagttttacaataatgtgcccagtatgggtctattttccacttctcttctgggccctttttatgggagagacttgtggtccatgaggtcccaggataattttttgattttatatctttattactttctttccctttcattttatcccattaggatacggggaccaaaaaaatcagggggcattaaggtgaacggtatccgggggttccggaaaa

SEQ ID NO: 261060 - DNA, 762 bp, Homo Sapiens
  misc_feature (76)..(151): n is a, c, g, or t
tcaagaggcagctagctggtcaggctctcggagcaagggcagcaggtcagcccttggtcttcagcccagccacccnnnnnnnnnnnnnnnnnnnnnnnnnnnnnnnnnnnnnnnnnnnnnnnnnnnnnnnnnnnnnnnnnnnnnnnnnnnnacagtgatttagcagccagatctgctctgagctacatgaggcacttgtttgttggcatcaggctgagctaggagacactcccattgctgtggggtacacccctccccaagcatctgaccttagagatctttctctaacgttatccagattccccaaataatcctcaaatgtgctacttcgaatgcatacacctagtgacgctggaggggacgagggtttccggaggccaggatagcgttcacttaatgccctgatttttttgtcccgtatctaatgggataaaatgaaaggaaagaaagtaataaagatataaaatcaaaaaattatctgggactcatggacacaagtctctccataaaaagggccagaagagaagtggaaaatagaccatactgggcacattattgtaaaacttcacaacaccagggttgagaaaatcctcaaaccatggtgcgtagagtgcggagaaaaggaatcagaatgatgttgacattctcaacagcaagtccaaaaactagaaggtcatgaagcgatgtctcagcatcctgaaggaaaactattttagtaccaatgcagtccagggggagggcagagtgagacattttccaatt

SEQ ID NO: 261061 - DNA, 429 bp, Homo Sapiens
  misc_feature (19)..(19): n is a, c, g, or t
  misc_feature (34)..(34): n is a, c, g, or t
tccttcccagcctactganccaagatcccttcanccaggttaagaagtggccagaagacagtcacctgctgaaaggagcgggcagggagttggcccgtcccacgcggaccctggcctttccgttaggggaccctgaaatctgcgaccgccccgccaacacctgagagtgtaacacagtgcccgttacacattcacactccatcacagataacacacagggcctcagggactgcaacacgtgcatgtgtagtgacgcacgacaaattaagagtgagtgagaatgaaagctcatgcttagccctgtgaaaaataaaaatcagatagcaaaacgcaaagttaaatcacagacacctggaccacaaataatctaccccagttgtaatatgtattttaatggagaccataaatttttccaaaaacccgcttgag

SEQ ID NO: 261062 - DNA, 614 bp, Homo Sapiens
  misc_feature (290)..(331): n is a, c, g, or t
  misc_feature (420)..(435): n is a, c, g, or t
  misc_feature (552)..(560): n is a, c, g, or t
gttatgtaaattattaaatgagtataccagacctttacataaaaactaaggtacctcagtggaatctgctacagtgcttccccctccctacccctccattttgtttataaccttttagctatctaaataatacgtattccatactcaggatagctggttagctagcaaaagaattaacatttgtgatatttacttgcaaactttactgaagccatattcattatcttccttgtcaccaaggctgttgaccttaaataaacattaagttgattttgcacaacactgtattnnnnnnnnnnnnnnnnnnnnnnnnnnnnnnnnnnnnnnnnnnggaaataattatgtttgtttccgcatatattcatttttaatgcattctgtaacttttctcgagtggtggtcattgagggtagggaagannnnnnnnnnnnnnnngtcgttaaggtatttcattagtgttcctgagtgtaaaacagttttttcccaaatacttatggcagataagagcatttttgtaaataataaactagcaccgtttgggtaaatttgcannnnnnnnnggacaggttcattgtcatgtaaaacaaatatctcaaaattcattttacatttag

SEQ ID NO: 261063 - DNA, 1023 bp, Homo Sapiens
cgtgggtgcgatggtgcgtgctctcggggctcagctggtgcacggtggtggtggtttattttgcgcgttctgtgcgcgaggggtggtggttgtgggcctcgtcttgggcgcagttgtgtccccctggcttcccggtgtttggttgtgggccccccgcgcgctggcaagcttcgagtgtttgttgtagagatgggctcttccaacgttgccctgcggtcctcgaagtcccggctctagcaatgctgctgctagccttccaaggcctggaatacaggttgtagccaccgcaccaccagcattctaagggtttcgtagcaaaggtgtatcgtctggtcaaactgcgtgccagtcacttagaagatgaccagtttatgaatgcggtcttaaagaaagcatgcttacatttgccttttattgccagatttctctacttggctttattaaagggcccaaatggcagcggtaggggtgtcggacatgttctaataacatatgctaaacacatagaggggaggcagcttgtcattgcagaggtacctgccactgagcctcacccctttactcacccaacaaatagttaatgaggagctaccccgaactccctacacccccatgccctccgaagctgtctacatgggctgctctgcccttggcatgtgcccttgagggctgatctcacttggccacacatgggtttatgctctaggatttgaaagagagaattcctgctcttcacctttcaagcctaagccttaacatttcaagggctgcttcttcctctggaataacttgctttttattggtcattcatgatttgggtgaaaagatggagtctgtagttcttgcttaacacaaagggcttgacttatatttcttatagtgttgtgggacatccagccacaggcatgaagagaaggagcaaataaacagtaccctgaacccagaagttcttcttggctgcccccttctccattcttctcgggacgcgtgggtcgacgatatcccggaattccgggccgtacc

SEQ ID NO: 261064 - DNA, 1094 bp, Homo Sapiens
tttggtaacagacatgcatttgtatgcaaatatcccacgggaaaataagagcatgacgaatggggatattgtctttacacggcaaactcttattctgtggtgcatactgagtagtacagctcatgtctgcctccttcacgttatagatcggttatttcacatttgcatatttgtgtaaatagtgcttctagaaaatcttcagcaaaccagaagcagtctagaaaatcttcagcaaaccagaagcagggaaaacttcaacactgtcttctgtttcctaagaggcagctcaagaacaatgttcataccaactgatatatgccagcaagcagtagggaaagacgtaggttccatgctactttaaatgttacacatttcatttggaatgcatactggattcgcagagatactgaaaaacacatgtgatgtttagtatggaaaatcttgttatgtcctaattatcacagaggacaagaatttcaaattcccagtgattatgctaaattcacatgtgcagatctaaagcataccacttgtgttttgtggcatatccacataaaaccactaaattcataggatactgtttgtatatttcttatgctgctgtctagaatactcaattcattcaagattttaaaaagctcattgtagtacaactgggtatggctatttacaactggatatattctgatatgtattctttagctgggtatcacatgtaacttccagtataatgttctcatgggatcctatttttaatacatttttgagttgagagattgcatctcagtatgaattcccatgttccctcaatactgtcatgaggtttttcacccgcttgaagagttctggcaggagttttccacagtaagacctggctggagtttcagggtttctccccgatgtgaactctctgatggacactgagtcgggacttcctgctaaaggccttcccacattcggaacactcatatggtttctctcctgtgtggattcgcaagtgtaatctaagagttgacctctggctgaaagttttcccgcactcagtacattcatagggtttctctcctgtatgagttctcatgtgtatgatgagc

SEQ ID NO: 261065 - DNA, 1046 bp, Homo Sapiens
  misc_feature (39)..(39): n is a, c, g, or t
ccagtaattcggcacgaggcatcctgaaaaactcccagngtggaaatgccctcacagcatatgccttgtttaagattgcaacacctgctcggtataccgtgactttgggaggaacatctgtcactgtgaagtatctgcgcagtcatggctacatgtccacgccgccacccgtcaaggagtatctgcaggacaggatggaagagacaaaggagcttatcacagagaaaatggaagaaacaaaagatagactcactgaaaagttacaagaaaccaaagaaaaagtttcctttaagaaaaaagtggaataaggtgccttatatagcagtatagaaaattcctgcactttaaccctttggaaactatgggcaaagatacatgtgtctgattatttttttggttagttgccgaaatatactagttctctgagggttaaagaagtaaaatacctttttaaagttaaatatcactagaaaaatcagtgttattacaagggaagaaatgaacccagtttaagaatttgccatcagtagcagtattaagcagtggttaatgtcttagaagtcagacttctttttcaaggtcttcagaaccacacttgatttctgttttgttgcagctgtaattgacacacactaggcagctgactccttgaatatccagtgtgacccataaaatagtctgttaataccggatcttaatttttatgttattcattaagattttaactatattcagtacgtaatttggagacaaactagcatcatcaaaactgcctgtaaataaggtgtttagtctttctataaaaacagaatagagcagttacctaccagttaaaatatcttatatgaagaaaatagaataaagatccagtcatatatgtaaataagatgtactgattgtacgtaaatgaaaaatggaccctttaaaaattatttttacctgaagcttgtcataatttttttaaagcaaatatatatatggtgatggtacttttcaaagtgtgtattagtggtgatcacctcaaacataaacctctgttgtgaatc

SEQ ID NO: 261066 - DNA, 730 bp, Homo Sapiens
  misc_feature (661)..(661): n is a, c, g, or t
  misc_feature (695)..(695): n is a, c, g, or t
ccgccgctcccccgccgcagggctgagagagagagtggccgtctggtgcgcgcgtgcctcgcccacgcgtgtgaaccactacagaattacctcaatttttattgcttttttgcttagaaaaactatgtagaagatgccttaaagttgaaaggtaacgggattggctgccaactccagcttcagagggggaacgtgggccagtagaaggcagggaaggtgtaggggagccggtgcgttcatccaccttttgccaaggttgaggtttccaagtgcagacggcttctctccttgggctgagcggtgcgcaccgtccgtctccgcggactggagtctgccctgatgccccactggccagtcggcgctgactgttgcatggagcccccgagggtgctccacagcgcggccttacacccagggggcgacccctggcccctgagccgcgatccatgtagcactcctccccgcccctccaccccagccaccgcctctgttcacaccgcacccctgccgggcggccggcccctactcccgcggctctgaccgcgtttctgtaaataactggtgtgcacctgcgtactaatctcacgactgttaacttccaactttgacgaggccatgcgagcgacacggcgaacttgggggaaggttgcaatactgttcnggggcatatggcactttggttttattcaggggtnattttatttagtgttttgtatgttattttaatgtt

SEQ ID NO: 261067 - DNA, 607 bp, Homo Sapiens; identical to SEQ ID NO: 53621

SEQ ID NO: 261068 - DNA, 649 bp, Homo Sapiens
  misc_feature (484)..(546): n is a, c, g, or t
gaagaatgggttaaggaagactttggtgttaggcagattggggatcaaatcctgggttttctattagctatgcaatcttggacaaattacttaacttcttagagccttggtttcctcatttgaaaaatagggacaacacttacatttcatgaagtagttgaattaatagaaatagatattatattgcgattgaaacatagtaggtagtcaataaacagaagctatcattgctattattatttattattttacttatctgtctatcccatcagactaagttactcgggagcagggaatgggggacaacattctgtactcccagctctcagcatatcatctgcagacaacagctgctcgataaagatctgctagatgaatatgttgttcccacctcttaaaagtgctttactatgtgacaggagctgatttaaactctctgaagataatttcttcttagttctatgaagtatccttattttaggannnnnnnnnnnnnnnnnnnnnnnnnnnnnnnnnnnnnnnnnnnnnnnnnnnnnnnnnnnnnnncagtggaatagaaaccaagtttaactacttcgagccttcattgttaaccaccacctttatgtctctcactggcatgtcaaaaatagttatttttgaagaagtt

SEQ ID NO: 261069 - DNA, 1028 bp, Homo Sapiens
  misc_feature (97)..(159): n is a, c, g, or t
agcaaactatattttaataatttatagttaatgttaaaatattggctgatttagaccaaaagattcaaatctcctctttgtgaaatcccatctgcannnnnnnnnnnnnnnnnnnnnnnnnnnnnnnnnnnnnnnnnnnnnnnnnnnnnnnnnnnnnnnatagatgtaatctgattttcaaaaatcattaacactttttaattagtatcgactaagactttttccccctggaatcgaggctgtgtgtccgtcatcccagcccccggttggagcctgctctttgaactccgctgcgctcctcagcagcttctgtcctcttctgtgagtcagtcagcgagtgcttgggatccgcatccagccgtgctgagcacacaacaggctgtgtgtggaaatggccaccaccattctccttccccaccccaccacaaaaagagaagctgtgtctttagacaaccctgaggtatctgtgttacaatcgttctgtgtttgatatttgtgtaaagtatgcatgcagtcttgtactgtgacctaagaacaaaactgtaactgcattagaaaccatgaaaaaattagatattgttttgtgacttttagacagtggtaaatatagaaccatgaattctggtcacattccatttctctccaacatgaaggatcaaaaaatgtttttcaatgtgttctttgttccactggaaacttagagtcatgagtttatgagctgatttggtcaccttcctctgcctttgttcactgtgagttctgatgtcttagtgacttagttcttagaagctcacgccttagtttgaaacagattctccacggtggtccccaaaacactgtctgcatatccataagaattgagcgctatgggtgttaacgtgcatgaggatcagtttgcagcagcaagtacaaaaggagaagaggaacatccgttgaatgagtgtgttttgtacataacttcagatacttgtgaacatgccttatatttgtccaacaactgtcagaataaagaacattctaaaatgatt

SEQ ID NO: 261070 - DNA, 535 bp, Homo Sapiens
  misc_feature (19)..(19): n is a, c, g, or t
  misc_feature (146)..(146): n is a, c, g, or t
tgccatactttacacaaanatcaaacacagaacgattgtaaacacagatacctcagggttgtcctaaagacacagcttcctctttttgtggtggggtggggaaaggagaaatggtggtggcccatttcccacacacagccctgttnctgtgcctcagcacggctggatgcggatccccaagcactcgctgactgactccacagaaagaggacagaagctgcctaaggaaggccagcggagttccaaagagcaggctcccaaccgggggctgggatgacggacacacagccctcgattccagggggaaaaagtccttagtcgatactaattaaaaagtgttaatgatttttgaaaatcagattacatctataaaagatgaaaagcaaacacttaaaacaatctaacgggggaacataaaataataaaaaatcaaatgcagatgggatttcacaaagaggagatttgaatcttttggtctaaatcagccaatattttaacattaactataaattattaaaatatagtttgcttatgc

SEQ ID NO: 261071 - DNA, 845 bp, Homo Sapiens
  misc_feature (766)..(766): n is a, c, g, or t
  misc_feature (780)..(780): n is a, c, g, or t
  misc_feature (803)..(803): n is a, c, g, or t
agtctcctgaaatgtggtagtaagaggattttcttcctaatgcatctgaaaaactgtaaacaaagacaaccatttctactacgtcggccataaacagctatcctgctttggaagagaagcatcatgagccaatttgataggtgttttaaaaataacttgagttttcctaagttcatcagaatgaaggggaaaaacagccatcatccaacattattgagattgtcgtgtatagtcatcgaatatcagccagttcctgtaattttgtgacacgctctctgccaagcccaccaagtatttcctttatagctaaaagttccatagtactaaggaaataaagcaataaagacagtctcagcagccaggattctggctgaaggaaatgatccgccaccctgagggtggtgatggtagtttctacccatacctcagcctcaggcgagtggcttatagcctccattcatggtgcactttatttatggtactaagataaagactgtcaatccattgatttatctcctcctgtcccccatctaaaatacccatgctgcttttctgagtgttgatgggggttaccagcttgatccactgttgctcttagaaggcccagaaagtctttgggcattgccaagaaatcccggattatgtggaaaaccctcactttctcttcacggctgtaccagaaaatccctaaggacagatcttgccgtgggactaggcaatacctgcaagtgctgccaatggggaacttcaattttattcctggggnaacctaacgagggngaagcccggggcctagggcaggnagggcttggggaaacccttttttgggcttaagggttgctgtt

SEQ ID NO: 261072 - DNA, 499 bp, Homo Sapiens
  misc_feature (78)..(98): n is a, c, g, or t
acacaattttctaggattgatgaaagcccaccatccttagatttaagaaattcaaatcccatgcagagtaaatgtgtnnnnnnnnnnnnnnnnnnnnnctctatatagacatagtgaaactgtgcagaaaacaaagacaagaaagacgtaaagaaactatcctcaaaagagtgctatttccaaataacaaatgaaatctggagtcaatgaaatgatatcctaagtgtgctgtttaggaagggagtagaatgcaacctagagttctatacccagagaaaatttcgacagggaaagcataacacctgtatatcagtgttacaatcaaaccatctactgctttggaagaaagggccaagaccaagtcaggctgccatggtaagcagtcttcatcgaatgaccagatgatctctacagtcttcatgtggacgatgatctatgtctaatttatcagtaaatatcagcatctagaatgggtgctttcgataaattttgttgaatg

SEQ ID NO: 261073 - DNA, 496 bp, Homo Sapiens
actctgtctcaaaaaataataataaaataaatgaacacacatgctgctgagtccgcaggggggcagagcagaggacagcgtgcttttgtgtactgttggaagactggctcctcctgtacagcacctctgagcccttgtgcaccgccctgccacgggcaccatccagtcctggccgtgtgaccacccacagctgactgggcagcaggcacaggccctacccgagcaggccggagttggctcgcatgactccagctgaggctgcctgtgtacatttctccagataccctatggctaattttgttataactgcacagtggctgctgccattttgtattaaatatatttgtgaaacaaacctatcttggggagaagcaatctacttgccgctgcttcctgtctggatccagcttgtgtccttggagagtggctggcccaggtcctattcccgtcctccagcccgttctttcatgagggacaggaaggtaaaatcagccct

SEQ ID NO: 261074 - DNA, 510 bp, Homo Sapiens
aggcaccatgctttccacacatggtccccctaccaactctggccccattttcagcctttccctgccttgccatgtttggaatttctctccctggcttcacctggagtttaagagtgaattagaaacgcagctgcccatcacctgcagatggctctgcaccctgatggtgaggcagctcgttccttggtgcagcctgggaccctgcctgagccagaggatgtgttttgtttatccacagcccccaaatatctcccaggcctattgcgacgggaccccaaccccaattctgactcccctccctgcttccactatacccagaccagggttggggaggggggtgggtgcagatctgggaatcgagaagcgcaggaaaggaagtgttggaaaccagaactggcaagctcactgtcttctctgcctcctccaggatccacacacatcctcaccccacagaaactgctggacacactgaagaaactgggttaaatccacccttggcctctttccaca

SEQ ID NO: 261075 - DNA, 771 bp, Homo Sapiens
aaatttggaactgttaggagattgctccgtggttttgatcttttcaaaccattttctttttgaaaaaaggcattagttgtagtcatggacattaaatgggccatatatgcttatcaatcaaaaaagtgttccttttttggaactgcccattttctggatcttccctctcaatggataggggatgaaaaccttggttgccttttatttgtttcctcttctaaaatttctcacctgaatgtagtcctgggagagtcccgatcacgtctctcctgacatgttcactgaaatcggagacaagaagttacatggatgatgggatcttatagggtcacacaaagacaatttggcagcttatcttaatttcctgcagtgagacaacacatgtggaactgggaaggacagctgttgttacgagcagtttttcctggtcatggttgtaaagctctgtaacccacattgtaaagccgtgaatgtttttagtcttgttgacgagtttttagagactgctggacctctgagggctttgagagtgcagctgtgatgatgtttcactattacttcagtgtgaatgtagaaccaaggactcatcttcattttaaacctaaaagtgccttgtcaagaaatttttgcatgttttaaaagataaatatttttgtacacagagttcaaggggaaatgcactttaaaaatcccaagaatggatgttctttgtgtggtatgagaggttggtttgtatctcaaaagcaaaaaggtaataaaggaagccaaacc

SEQ ID NO: 261076 - DNA, 464 bp, Homo Sapiens
gaatcctgatgatttatttcgccattttcattggctgccaatctctgttgctcctccgtgggctccttaagctcatatttgcgctcagggtgtcttttcaactgaataaatatgctcagaaagtacatgcagtttacaaaaatgatgaagctggctggcccatagaaggctcccaaggagggttcccatgccatccagcaatagggtgcgtttggccgactgccgtaattcttaatgttcgctgctgcagttatgccgcaaacaatgatggggataccaccaccaatcaggtaaaatctgagcattggtcttggtggaggtggtggttcatcaggatcctggcatcttttagcttttttagtgacttgtttgtagatatttcgagctgtcactcctacccatagtactgtggcaagggtggaatagtgaagaattatcccaacctacaaggaagatcaaagaat

SEQ ID NO: 261077 - DNA, 837 bp, Homo Sapiens
  misc_feature (159)..(159): n is a, c, g, or t
gagatctaaagggttgaatgacaatagtgcccccgtttttagcagaccagccttaactctgggtttgaatcctaaggagattgccacagtgagacttaaggaaatgtttggttggcagatgagcaccaatgactgcagcgtggagtgacgcactgcatnggtctgtttattctctaattccaatatgtcttttgcttccagaagcaagaaaagtttcttctctcccctccttcccacccttttttcaaaggcaccacaagtatagacagttgcactacatcaaatctttttttgacacttgtagaaaccagtacacttttagattagacagtatcttcttttaatattttgatttgttttcctttaagtttgaaaagttgtataatacttaactgactgtagcaaagttttatatgtggtagcatacctttaatttatcctattacaaaactgttctgaattttcttttggtttttaaaaaacaaaacttgttgcttagaagccatgaattattttattttacttcaactgtcgaaacatccttgttttaaaaaaatgatcatttgggttcactcaggaaatgcatgtcaggaaacttgtattataagtttattagttgtgatgtatcagtaactgctgttacccctttttcaaagaaaatgtaattgattttgaagttttctagattgtcacatgctttgtgactaatgcaagaaagcaagtcctgtgttgtatttgttctagtcatttttattcaggctatagtattgtagcttaatttttatttgcaattaatttatttaaactaagtaaatacttttcaaaatacataaaaaa

SEQ ID NO: 261078 - DNA, 1021 bp, Homo Sapiens
  misc_feature (124)..(124): n is a, c, g, or t
  misc_feature (144)..(216): n is a, c, g, or t
  misc_feature (514)..(588): n is a, c, g, or t
  misc_feature (628)..(639): n is a, c, g, or t
ttttaaaagtcttaaaatgaagagccaatgattaaaggcatgaaattaaaaatttcaaatagttagaattggtacatcacaacagtaaatttttgctctttgcttctggaggaacaccctacanccaggtaattaaaaaattannnnnnnnnnnnnnnnnnnnnnnnnnnnnnnnnnnnnnnnnnnnnnnnnnnnnnnnnnnnnnnnnnnnnnnnncattgcaagagatggaaattacattttaaaggctgaaaataataaagaaattcactaaacaacaggccctattgtcctggctccttcagaaagattactgaaaggaaactgggaagtggtttggggaatagcagattctgggatatggtgggaagttcacaggttggcaccggctggaacagctgagttttgaaggcactctgcagacacaggggtgctgggggccctgaatcacatttacaaagtctttgtactgtatttttaaaagctagtcattaaaatcggttactgccaaccnnnnnnnnnnnnnnnnnnnnnnnnnnnnnnnnnnnnnnnnnnnnnnnnnnnnnnnnnnnnnnnnnnnnnnnnnnngaaaatgtgcagatctgtaacatttttttcacagctgatnnnnnnnnnnnntactaccattctcccccagactcccctttgatacagtaggtaaacaaaatagattttttttccacaaatatcagcagacactttctggcaccccacactgtattggcatcagtgttaacagtccccagttcagatgtgcaatacttcagattggatacactgtaacaagaatccaactttgcatagacatcctcagaatcgcaatcagtcatggggttgcccttccaagctggcagaaaaggaacccgatcttaatttccagctactcctggaaaagaaggaaaaaaagtttcttcctctcctcctgctccttcatatggttctcccggacttccttccatgtatttaaaacttggaactagaaaaacggctgttgaccaaa

SEQ ID NO: 261079 - DNA, 834 bp, Homo Sapiens
  misc_feature (172)..(181): n is a, c, g, or t
  misc_feature (221)..(265): n is a, c, g, or t
  misc_feature (367)..(367): n is a, c, g, or t
gttggattctgttacaggtatccaatctgaagtattgcacatctgaactgggactgttaacactgatgccaatacaggtggggtgccagaaagtgtctgctgatattgtggaaaaaaaatctatttgtttacctactgtatcaaaggggagtctgggggagaatggtagtannnnnnnnnnatcagctgtgaaaaaaatgttacagatctgcacattttcnnnnnnnnnnnnnnnnnnnnnnnnnnnnnnnnnnnnnnnnnnnnnttaagtttagcctttggttttggtttttgggttggcagtaaccgattttaatgactagcttttaaaaatacagtacaaagacttggtaaatgtgattcaggncccccagcacccctgtgtctgcagagtgccttcaaaactcagcggttccagccggtgccaacctgtgaacttcccaccatatcccagaatctgctattccccaaaccacttcccagtttcctttcagtaatctttctgaaggagccaggacaatagggcctgtggttagtgaatttctttattattttcagcctttaaaatgtaatttccatctctgtgcaatgaatttgtttccctttttttgcttcatttgtttaaattttcaggtatttagctcccctttcatattatttttaaattttttaattacctgttgtagggtgttcctccagaagcaaagagcaaaattttactgttgtgatgtaccaattctaactaattgtaatttttaatttcatgcgtttaatcattgtctcttcattttaagacttttaatacaaatgtcatttttaaagaaacaaacccaa

SEQ ID NO: 261080 - DNA, 761 bp, Homo Sapiens
  misc_feature (82)..(82): n is a, c, g, or t
tccctggaattctgggacactggctggggtttgaggagagaagccagtacctacctggctgcaggatgaagctggccagtgnttcttggttttgtggctcagcttgggggtggcctggctcagagcgacacgagccctgacacggaggagtcctattcagactggggccttcggcacctccggggaagctttgaatccgtcaatagctacttcgattcttttctggagctgctgggagggaagaatggagtctgtcagtacaggtgccgatatggaaaggcaccaatgcccagacctggctacaagccccaagagcccaatggctgcggctcctatttcctgggtctcaaggtaccagaaagtatggacttgggcattccagcaatgacaaagtgctgcaaccagctggatgtctgttatgacacttgcggtgccaacaaatatcgctgtgatgcaaaattccgatggtgtctccactcgatctgctctgaccttaagcggagtctgggctttgtctccaaagtggaagcagcctgtgattccctggttgacactgtgttcaacaccgtgtggaccttgggctgccgcccctttatgaatagtcagcgggcagcttgcatctgtgcagaggaggagaaggaagagttatgaggaagaagtgattccttcctggttttgagtgacaccacagctgtcagccttcaagatgtcaagtcttcgagtcagcgtgactcattcgttcttccaacagtttggacacc

SEQ ID NO: 261081 - DNA, 1365 bp, Homo Sapiens
  misc_feature (134)..(134): n is a, c, g, or t
  misc_feature (886)..(887): n is a, c, g, or t
atgaaagaccagcctccttgtatcagtcctctatagacagaagcctggaaagacccatgagttctgcaagcatggccagtgacttcaggaagcggaggaagagcgagcctgcagtgggtccaccacggggcttnggagatcaaagtgcgagcaggactagcccaggccgagtggacctcccaggatcaagcaccactcttacaaagtctttcactagctcttctccttcttccccatcaagagcaaaagaccgtgagtcccctagaagttactcatccactttgactgacatggggagaagtgcaccaagggaaagaagaggaactccagaaaaagagaaattgcctgcaaaagctgtttatgattttaaggcttcagacatctaaggagttgtcatttaagaaaggagatactgtctacatcctcaggaaaattgatcaaaattggtatgagggagaacaccacgggagagtgggcatcttcccgatctcatacgtagagaaactcacacctcctgagaaagcacagcctgcaagaccacctccgccagcccagcccggagaaatcggagaagctatagccaaatacaacttcaacgcagacacaaatgtggagctgtcactgagaaagggagatagagttattcttcttaaaagagttgatcaaaactggtatgaaggtaaaatcccaggaaccaacagacaaggcatcttccctgtttcctatgtggaggtcgtcaagaagaacacaaaaggtgctgaggactaccctgaccctccaataccccacagctattctagtgataggattcacagcttgagctcaaattaagccacagcgtcctgtgtttactcatgaaaatatttcaaagtgggggggaaccgtnnttcaggctctgtataactatactcccaggaatgaagatgagctggagctcagagaaagtgatgtcattgatgtcatggaaaagtgtgatgacggctggtttgtggggacctcaagaagaaccaaattctttggtactttccccggaaactacgtcaagaggctgtgaattgcgctccctccttctgtagaggccgcctgccagccatgcacctgcgtcaacgcgcctgaaacaccccgcgggcctcccgttgtcatgccttacggtttccaatgcgccgtcaccatctccacctgccaccaaaccaccagcagagtagccgccgctgctgtgagcctggggacgacatggcaggctggtccccctccgtgaaagtgtggattcctacttcctgctctaagctttgacacgtcaaaatgtgggatcagaaagaaaaaaatcatgatatttaaaaatggtcaaatatttgaggcaaaaaa

SEQ ID NO: 261082 - DNA, 577 bp, Homo Sapiens
actcctttcattaacaactgtccacaaggagaagaaataaaagacaactaatatagataggccttactgattaaaaatctgtgagcttgaatacattttaatatgttgaatctagagtgataaaccaatggttaatatacaacaaaactttacaaacaaaatctcatctgttgcagaacttcaaaagtagtggaattgatttcttctcccttttttcttccacagaaagtcctaaaactgagtagtcattggcatgcctgcactttcacaaatgtatcctcaaaacatgatggtttttctcaaaatgtatctacaaaacatgatggtttttgaaaatggaagtaatttcaaatgaggtcaaggatgtcatgctccctcaaaacatattttcagttctttgtgctccatgtcacataaaaaagaaatgagggtagctggactcatgtaatttctttcagctcaataatgtcattaaattcccaatgttttcacactaggcaaaagatccagtatttaaggtgatctactataaagcatctctatttctaaaaaagattcctttcattttttacttttt

SEQ ID NO: 261083 - DNA, 608 bp, Homo Sapiens
  misc_feature (383)..(383): n is a, c, g, or t
agtcttatggaggtgttagcactctttctactgatgaagaactgaggtacttcataaaaccacttacccaaggtgtcttgagtctggtacaactggcattcaaatctaggtcagtctgcccccagagccactacccttacccctcactgaatctgcctttatattgttgagcccatgaccccaaactgctctttccaatttgaacttccagggattttattgtgaacttacatagcaacattaaaatgaagttgaattgtttttaaatggcaacgcccgtctgtctccctcctagcttacccgccttcctcaccctttcaacccccatcctgtggcctttgtcccaggccccacagccttagccatggcttccctcctgcatnccctgccgtgggttgctggcctcacacttgcagcagctggacagtgattttagaaggccaccagtccccatagctatgtgacaatgagaagcaaacttttttgtgacagattgtattggcataggcatgatagatggggattggtacgttttgaatcagcatttgcaaaaaaattgtcttgaattttaaaataaacaacaaagatttgttcattgagtgcaaaaa

SEQ ID NO: 261084 - DNA, 507 bp, Homo Sapiens
catggatgtagaacctacagataaggtgagccaactgcattaggaaataactctaataattctgttaattcttagagaggaaaactttcaaaatcttcctcaggtatttattacaactgcctttaccattttagttgtaacacagtttaaattgttatgataacaagtaaataagagcaaagaatttatttcttaattcaaaactatacgtttgaattcaatatggtataacttaaagtggtataatacatacaatgcatgaatcataatggattcttttataagttattaatttttatggtttaatcagtctaattgttttgactgttatagaaaccaaatattttactgtttcttttaaggactaatattgtcaaaaactgctgttattaacttcacttgagttgtttaacttccttctgttttaagattgtaattaaaaattactattttgttatatggaatggttaatttttacctaataaaaacatagatgaaatacattgt

SEQ ID NO: 261085 - DNA, 796 bp, Homo Sapiens
atccttgacactttggacgtggagggtttgagcaacagcaccctcatttattttacgtcggatcacggcggttccctagagaatcaacttggaaacacccagtatggtggctggaatggaatttataaaggtgggaagggcatgggaggatgggaaggtgggatccgcgtgcccgggatcttccgctggcccggggtgctcccggccggccgagtgattggcgagcccacgagtctgatggacgtgttccccaccgtggtccggctggcgggcggcgaggtgccccaggacagagtgattgacggccaagaccttctgcccttgctcctggggacagcccaacactcagaccacgagttcctgatgcattattgtgagaggtttctgcacgcagccaggtggcatcaacgggacagaggaacaatgtggaaagtccactttgtgacgcctgtgttccagccagagggagccggtgcctgctatggaagaaaggtctgcccgtgctttggggaaaaagtagtccaccacgatccacctttgctctttgacctctcaagagacccttctgagacccacatcctcacaccagcctcagagcccgtgttctatcaggtgatggaacgagtccagcaggcggtgtgggaacaccagcggacactcagcccagttcctctgcagctggacaggctgggcaatatctggagaccgtggctgcagccctgctgtggcccattccccctctgctggtgccttagggaagatgacccacaataaatgtctgcagtgaaaagctgga

SEQ ID NO: 261086 - DNA, 742 bp, Homo Sapiens
  misc_feature (679)..(679): n is a, c, g, or t
agtatcttcctcatgtcttcttagctaagaggaggaaaaaaaggctgaaaaaatagggaggaaattccttcatcagaacgacttcaagtggataacaatatttataagaaatgaatggaaggaaatatgatcctcctgagactaactttgtatgttaaggtttgaactaagtgaatgtatctgcagaggaagtattacaaagatatgtcattagatccaagtgctgattaaatttttatagtttatcagaaaagccttatattttagtttgttccacattttgaaagcaaaaaatatatatttgatatacccttcaattgccaaatttgatatgttgcactgaagacagaccctgtcatatatttaatggcttcaagcaggtacttctctgtgcattatagaatagattttaataaccttatagcattgtatattattattgcctgttgtcactgttattattattgtggatactggcccttggtgtgttgcatagctccctatgtaatctctgtttccatctttaagttcccagaccaatatacattaagagttttgcatggtctaaattgtgtttattccaaccacgtggaaagctcctggaaagaaattttacattcggttgttctgtgctcctaatgacacttgaccttgttgaacaaatgcagagcctttcccnaggatttgattgtttgtgaattatctgcatgtgtcttttttttggtgtgtatttcatttaaaa

SEQ ID NO: 261087 - DNA, 368 bp, Homo Sapiens
gcaagagaggggactttgataggctctgcttccagcctcagccacaaagccatgcagcctgccagtcccaggcctgggtgaaaaagaaaacaacaatatttaacctcaattttgatctgtgattattgcaagaattcaaaatactacatcactttgcatggacagaacctccctatgacctaataaaaaatccaaatgatattagttctcaccctctaagtattctgttctaaataaataatcttttatatactgttcttggtttctttttaaggactttattcttttcaaagccttcttagttctctgatttttagagcaaggaaaggttaatttgtgaaaactaatgttaattttgataccattaa

SEQ ID NO: 261088 - DNA, 945 bp, Homo Sapiens
gtctccggggaacttctcattcgattattatgtcttctgatgatttgccatgttattttaaaggtgattttattttcttatggacaggaaaaaagaaaatgagggaggaggttggttttactcttagagataagacttcagcaggggctcagaaaccccaaactctagttaaattgcttctcggaggaaaatcttaatctagacagattcagattcccaggctctcctggaagccctgcacttcagggcacaggggccctgggacgtggttggcagccaggctgcgagagagctaaaaaggaacaagaacatcagctcggatgtttgtctctcagccctgacacctgccactctccttcctggggcacttggccctatcagagggacatgaaaatgctgtcccgaaatggtggcagaaatggcagcgacattggcatggcagcagagtctttgcttcgaaagatggggcgccatgtttcagagaacatttatcttagtcccacgttcaggtgagaagacctcaaaggtaccctctgtccagaataaacattggaacaatctctcaattggcttttgtcactacacataatgtaatctcccttctttcagctcccccaacagtgagcatgcttcccaaaaaattacaacatcaaaaccaggaatgtccccgcatctactattaccaggcttgcaattggttcaattttcccataaaaacatgtttgtccaaaagaagggaaactgtgaatttattccatgcatgtaataaactctgcaagaagtttaacccacataggtttgcggcactgcaaaattgttcatgggtctatgtagcaaatgattctctgccttgacaatcatgtatacatatcaagatttctatcataatgataatgagattgatgacttcctgttttcctccaataaagacaattaatcaccttc

SEQ ID NO: 261089 - DNA, 2257 bp, Homo Sapiens
  misc_feature (787)..(797): n is a, c, g, or t
ggtacggtccggaatttcgggatatcgtcgacccacgcgtccggagaattcttcgcttcatttttgatggctggctctgaaagcaccatgtggagtggaggtggagggagcgaggaaccatgaatgaactcgcaggcagtgccgggcggccccctggctctctgcgttttgcctttaacactaactgtactgttttttctattcacgtgtgtctagctgcaggatgtaacatggaaaacagtaactaaagattaaattcaaaggactttcagaagttaaggttaagtttttacgtttaatctgctgtttacctaaacttgtatgtataatttttgggtgggtatggggaattgctttgctaaaaataagctcccagggtgtttcaaacttagagaagaccaagggacagtattttttatcaaaggaatactattttttcacactacgtcaacttggttgctctgataccccagagcctgattgggggcctcccggcccgggctcacgccaagtccctggtgctgggtttgctctcccgctgttgccagggctggaagctggaggggtctcttgggccatggacatccccacttccagcccatgtacactagtggcccacgaccaaggggtcttcatttccatgaaaaagggactccaagaggcagtggtggctgtggcccccaactttggtgctccagggtgggccagctgcttgtgggggcacctgggaggtcaaaggtctccaccacatcaacctattttgttttaccctttttctgtgcattgnnnnnnnnnnncctcctaaaaggaatatcacggttttttgaaacactcagtgggggacattttggtgaagatgcaatatttttatgtcatgtgatgctctttcctcacttgaccttggccgctttgtcctaacagtccacagtcctgccccgacccaccccatcccttttctctggcactccagtcccaggccttgggcctgaactactggaaaaggtctggcggctggggaggagtgccagcaatagttcataataaaaatctgttagctctcaaagctaattttttactaaagtttttatacagcctcaaattgttttattaaaagaaaagatttaaaatggtgatgcttacagcagtttgtacgagctcttaagtgttgattccatggaactgacggctttgcttgttttgattcttttccccctacttttcctaatggtttaaattctggaattacactggggttcttttgccttttttagcagaacatccgtccgtccatctgcatctctgtcccatgactcaggggcgcccactctgcttcgattctcctcctgtggaagaaaccattttgagcatgacttttcttgatgtctgaagcgttattttgggtactttttagggaggaatgcctttcgcaataatgtatccattccctgattgaggggtgggtgggtggacccaggctccctttgcacacagagcagctacttctaagccatatcgactgttttgcagaggatttgtgtgtgctgcctcaggaggggagggctggtaggatggggggacaggtctctgtcctacctgcttctccagagggcatttccccttgcgccttctcccacagggcccagcccctctcccctgccccagtccccagggggtactctggagtgagcagtgcccctgtgggggagcctgtaaatgcgggctcagtggaccactggtgactgggctcatgcctccaagtcagagtttccctggtgccccagagacaggagcacaagtgggatctgacctggtgagattatttctgatgacctcatcaaaaaataaacaattcccaatgttccaggtgagggctttgaaaggccttccaaacagctccgtcgcccctagcaactccaccattgggcactgccatgcagagacgtggctggcccagaatggcctgttgccatagcaactggaggcgatggggcagtgaacagaataacaacagcaacaatgcctttgcaggcagcctgctcccctgagcgctgggctggtgatggccgttggactctgtgagatggagagccaatctcacattcaagtgttcaccaaccactgatgtgtttttatttccttctatatgattttaagatgtgttttctgcattctgtaaagaaacatatcaaactaaataaaagcagtgtctttattacttcgcagaagaccaaatccaggaataaaaatcctaccatgt

SEQ ID NO: 261090 - DNA, 1502 bp, Homo Sapiens
  misc_feature (343)..(390): n is a, c, g, or t
  misc_feature (465)..(473): n is a, c, g, or t
  misc_feature (574)..(616): n is a, c, g, or t
  misc_feature (976)..(988): n is a, c, g, or t
agcagtttgtatgtacagagaaaatggacttacaaaaacttgcagcagtagtttgttcttgctttaaaatttcgtttttggtttagattatggatgcatgaagtaagggagtgaatcagtttcttgtttatatttttttcaccttttaaacaaaaaattctttaaaatattttaatgcattcttttgaagaggtagatgtttggtacattttatggctcccagagcatatattcagttggtgcatgttgtggaagggggaattggaaattaaatgaaaacctatgactttggtcatgtcaatctgtaagacacatcagtaaaagggtattatgctctgttggnnnnnnnnnnnnnnnnnnnnnnnnnnnnnnnnnnnnnnnnnnnnnnnnggtgatgtggcttaaatgcaatagtttcttttttgggacatatttctgccaattaaagactaaaagggcacaacnnnnnnnnnaattaccatagagaaaatacattaaaaaaaatcttctgatgttttgtacccataactaaattatggtaaaaatgtgcactattgtgaaaaggagcaacgtnnnnnnnnnnnnnnnnnnnnnnnnnnnnnnnnnnnnnnnnnnnaaaaaattaaaatgtttctggataaggattagcttctcgaagtgtccatcattctgtgtaaaagcttaaatatgtaatgtaaccaaactccagtattaaaaatctctcatgttgttttctttatacaaagcaagataacggcatataacactgccattacatggcaaaatgtttgctaccttagtttaaaaaacaatctcaaacaaaagacttgcttcaaggtgtttttaaatagcagtgattcagaattttttttaatgaaagtataattgcactaaccttcttcctgctgctctgattctgcatttgtggtacttgtgactacgttttttcaaatatagatagatttaagctgctaannnnnnnnnnnnnagtaatcactactatatcatgtcttttactctgtttataatatcaagtattttcttaaagatatagatattaaaccttgtgctcatgcaacttagagtaacatatacagacaaatgattgcatgaggccatgtttatatgtgtgactaataaggcttgtcatgattaacataatccaggtatgtcatttctgaagagaatagtcatcaaatttatatctcgaagattttaattaaggaattgcttattgttgagcttagcaaattaataacactatttctgtcactaattattttgaaggcttttagtactaaaattttaacctgtgttctaagtagaaactgattttaccccagtaatgccgctttgaatggatttcaccattcgttggctttggctattttttacaaaccagcattggattggaagcaagatctttggtttttacctaaggaaagggtaagcattttggctattgggtaaaagagaaaaaataacccttaaattccccaata

SEQ ID NO: 261091 - DNA, 631 bp, Homo Sapiens
tactgcatcccttgagtagtcatctgtgatgtgtacttaccccgatggaaagtagacgtccccatcagtgctaaccgtggtcatagcagtggtggttggtccatgagagaaacagctcaggcagggtgcagtctggtctttgtggccctctaataggctgattgggacatttcttattctcttaccccaagtgaaagcccctcagggaaaaaaaccagaagtcctttgtcttcatcctggagcccaagcagcagggcgatcctccggtggagtttgccacagacagggtggaggagctctttgagtggtttcagagcatccgagagatcacctggaagattgacaccaaggtaggcacctgctcacccgggtgcaggtgggcctggcattctgagggctttggtgctcagttgggactgtgggtgggtccaggcagcaggatgagcaggcccaggtcctactcagaattcaggaaggagaccaggtggattcagacaattggagcacctcttgttagagagaggcagggatagtggaggtgccctgggaaggtgggtctggttgtctggttcgaaccttcagaaggctgagtgcctgcagcaatgctcattgatgatgtctttgcggcccc

SEQ ID NO: 261092 - DNA, 712 bp, Homo Sapiens
tgaactgctccaagtaacgctaattaaaaacttgctttaaagatattgaatttaaaaaggcataataatcaaatacttaatagcaaataaatgatgtatcagggtatttgtattgcaaactgtgaatcaaaggcttcacagccccagaggattccatataaaagacattgtaatggagtggattgaactcacagatggataccaacacggtcagaagaaaaacggacagaacggttcttgtatatttaaactgatctccactatgaagaaatttaggaactaatcttattaattaggcttatacagcgggggatttgagcttacaggattcctccatggtaaagctgaactgaaacaattctcaagaatgcatcagctgtacctacaatagcccctccctcttcctttgaaggccccagcacctctgccctgtggtcaccgaatctgtactaaggacctgtgttcagccacacccagtggtagctccaccaaatcatgaacagcctaattttgagtgtctgtgtcttagacctgcaaacagctaataggaaattctattaatatgttagcttgccattttaaatatgttctgagggttgttttgtctcgtgttcatgatgttaagaaaatgcaggcagtatccctcatcttatgtaagtgtgaattaatattaagggaaatgactacaaactttcaaaggcaaatgcttcca

SEQ ID NO: 261093 - DNA, 542 bp, Homo Sapiens
gctccagacacttgcagagtcctcagctcggaccagcctggccctgccgccaccgggcccctcctcgggaggccgcgcctcctcgctctccaggcgccccccccgcctgccagtctcaacgccgcactcgggcaccctcggagggcccctccacagagccagccgcgctctaggcgccccggggcgtcaccacgtcgatcagaccaaggtccccgccgggctgtcactcggggagggtgatgctgggcacccagtcgttaacgctgcggctctcctcgcaaaacaggctgagcttctccaaggcgggatccttccaggcgtcctcgttggggttcgaaatgaggatgcagtgcaggtcgcccggcgcacccgcctcctcgccggcgcccacgatagccgccagccgctgcacatcgcccacgcgcactatgtcgatgtcgttctcgcagcagaaagcctggatcagcgtaaaatggatctgcagcgcgatgtcgccctcgtcctcctcacccgcagccagcacacagaaaggtcacattgtc

SEQ ID NO: 261094 - DNA, 779 bp, Homo Sapiens
  misc_feature (586)..(586): n is a, c, g, or t
  misc_feature (613)..(613): n is a, c, g, or t
  misc_feature (692)..(692): n is a, c, g, or t
agaagggcagctcttgaatctgggccagtctatatcccttctgtgaagtgctaacagccaggctatctgtagcctgggtgggagcccagataatgtgagctggtaaagggtattggaaaagtgccaagaaatgccaagcttttggttcgtaaccactataaaaagtttatgaacatgtcagaggaatggatgagtgatttgtgaggtcttaactagataacccggtttcttccttgttttggcttcttttcagaatgccgggagagtacatgcagggattccatctaatcaccctcagcactctttctctggtcctgctggatagatttagatttcctttctttttttagggcctcagtctgctatctcctttggtggctaccaccactcactcccttgatatcttctactcccttgccttcaccttgcttaagactgagaagggagttagattttgtcactagctcttctttttcctcactgtgtaccccaccaaacaagattagttcaagttaaaaagaacctactggaggtaaactgggagagcaagtgttggatctgggctggtccctttcccataaaattnggtccctggttgtatgttcccatagcnccccatacttcctctctcagaataatcatttcccttgtaatgctcagattccgatcctgcttgactgcaaacttgctgnaggtagggactgtttgtcttggacttcgctgccagtccttagaacattgtctgggacacagtgtgttctcaaatatttgttgctgga

SEQ ID NO: 261095 - DNA, 501 bp, Homo Sapiens
gagggggtagcaaatctttaaaacacgacttacaaccaggggaacccgttgtggtaatctatgctgatgttttatgtgctttggccttcattttacaaaatgacttaatgcggggttacatgtctctctttttatgaattccagtcctgctcagagtgaagcttctccagtggcttctcccagatcccccagcgcccaggagtggtttgcccggtacttcacattctgaaagaattgtgttggcacagctctgtatagactgttactaagagcatgactttatacagattgttatgtaaataggctttcctatgtcaaacactgtgaatgagaaagtatttgtctctccaacttgaaaatgcactgtatttcctgtgatatttattggaatcattctataaggtactatattatgtgtgtaattataactgttatttttatttgagatggaagagtctttaacctttgtaattactgcataataaattttgttagaatcaa

SEQ ID NO: 261096 - DNA, 548 bp, Homo Sapiens
gtacataaagctgttccaggccccgtgccagcgctgcgggaagtttctgcaggacggccttcccccgacatggagggatttccgaaccctcgaagccttccatgacacctgccggcagtagcccccacgctggccccagcctcagaccccacccagcaccttcccagacacgcaggaagcccacagaaggctcagctggttcctcactgcccagatgtgtacagctgctcctccctttcataaagcagcgccatgtgtgcagaggccactcttgaagagcagactccctctgtggctgatgggactaattattcccactagccagcggactgaaggcaaagaagacctttctagaacctggtagaaggaagctgtgcagcatgctcctcgtccatgtgtgtcggcagtgctggtgtctgtcgtctccgcgagctgttactggaatgagcccttgtgttcatgggtatcgtcatgcggggttcttgtgttttgtggggcttgggttttggtaacttatttttataagcaataaaccttttgtatcctgg

SEQ ID NO: 261097 - DNA, 567 bp, Homo Sapiens
  misc_feature (326)..(362): n is a, c, g, or t
agtgatgagaatttaatgattatctcctccactataatcctctttagggtgattttttaaatcaaaacccagtgaatctcattactcctaagaaacgaaagattccttcaaagccttttcaggcacatgggtttccaaccaaagcctggctttgacattccttgtcctggaggagcactttccaggcatagttacagcttccccactgtatttacaagccagaattgtgcaactcttctggatcattaataaagtagcaagatcctcaaaaaacccaaaaacaccattctctaatagtcatgacaaatggcttcagtatggcttgnnnnnnnnnnnnnnnnnnnnnnnnnnnnnnnnnnnnngaagccccagtctttgattttacaggtaactttcaaaacatcatgatgctgccaaatgtacttttgtaaacttaaacattatgattcctgtattatttcagtgagagctacagtgtgatatttcagagtctattaaataaaaatgtgagtttgaattacaccatctgtgccaattacaaagcaattaaaagatttattttttatg

SEQ ID NO: 261098 - DNA, 658 bp, Homo Sapiens
acagccactgctctgaccacttcaatcttagatgagaaacctgttataattgccagctgtctacacaaagaatatgcaggccagaagaaaagttgcttttcaaagaggaagaagaaaatagcagcaagaaatatctctttctgtgttcaagaaggtgaaattttgggattgctaggacccaatggtgctggaaaaagttcatctattagaatgatatctgggatcacaaagccaactgctggagaggtggaactgaaaggctgcagttcagttttgggccacctggggtactgccctcaagagaacgtgctgtggcccatgctgacgttgagggaacacctggaggtgtatgctgccgtcaaggggctcaggaaagcggacgcgaggctcgccatcgcaagattagtgagtgctttcaaactgcatgagcagctgaatgttcctgtgcagaaattaacagcaggaatcacgagaaagttgtgttttgtgctgagcctcctgggaaactcacctgtcttgctcctggatgaaccatctacgggcatagaccccacagggcagcagcaaatgtggcaggcaatccaggcagtcgttaaaaacacagagagaggtgtcctcctgaccacccataacctggctgaggcggaagccttgtgtg

SEQ ID NO: 261099 - DNA, 568 bp, Homo Sapiens
gactcagatgtggaacaggccctgcagacctttgccaagacctcaggcaccatgaataactacccaacatggcgtcggactctgctgcgccgtgcgaaggaggaggagatgaagaggttctgcaaggcccagaccatccaacggcgactaaatgagattgaggctgccttgagggagctagaggccgagggcgtgaagctggagctggccttgaggcgccagagcagttccccagaacagcaaaagaaactatgggtaggacagctgctacagctcgttgacaagaaaaacagcctggtggctgaggaggccgagctcatgatcacggtgcaggaattgaatctggaggagaaacagtggcagctggaccaggagctacgaggctacatgaaccgggaagaaaacctaaagacagctgctgatcggcaggctgaggaccaggtcctgaggaagctggtggatttggtcaaccagagagatgccctcatccgcttccaggaggagcgcaggctcagcgagctggccttggggacaggggcccagggctagacgagggtgggccgtctgc

SEQ ID NO: 261100 - DNA, 817 bp, Homo Sapiens
  misc_feature (109)..(118): n is a, c, g, or t
  misc_feature (558)..(567): n is a, c, g, or t
tgataatcagtgcacaggagtataaaatattattttaaacagcgaaattaataatataaaatgccaaatggttgaaaaaatagaaacctttctgtatatttgatcatannnnnnnnnngccttgtcaatgtatttaaagtttacttaaggtcaggaaattctaaaacaacttttctggccttgttatttgatgtatatcttttaaatttactgaccaaagcatgttttaagctgcaatgcagtagtcacgggtggtaaccatgtagtcaggtattgttattagtacctatcactgctgagctgtatttaaaattttggtacaatatataaaatggagaagagcttgatattcaggtactaaccacaactagtctgacattgttggcagttaaaatcttattttgaattgtaaattagttaaattttatgtggaatttgctgagaaaagaatatagactactgaaatgtcattttagttatttttcttatgaccacattgtacaaatgaatctgtgttaaaaagactattttaaatgtatttcctgcttttgtaagcannnnnnnnnnataagaaaattattcaaactattttttataaaatgaaagttatgatttttaaacttattgattcctcttgcccctaccccctctttttggaagatattttgattccttataaacttttaccctaagcttatatatgttttctgtcacaagtgcttcctggcacacagacagccaatggaggggatcaaattcagtgttgtatgtatgtttatggcaacattttgaaaataaaaattaaatgtttttcttc

SEQ ID NO: 261101 - DNA, 845 bp, Homo Sapiens
  misc_feature (104)..(137): n is a, c, g, or t
ctcagcttatgatcccatttgtgaacagctttcagaaaagagaatgagagaagagtagaaggatgaagcattcttaaaagatgacgactagggaaaacaagctnnnnnnnnnnnnnnnnnnnnnnnnnnnnnnnnnntgtaaattctctggcctatagttagctattttctgcattttaacattttctgcataattaacaatgtcaaatccctttttcctgtaagctacggcctttaaggtggaactaagaaattgatagacagataaagaaagcataacatcaaaagaggtattcttctagttttatccctgcattaagatcactgaagataaactaaggatcaaaaagttccacattttcatttccaaaataccttatgactagtacaaatctaccttaattaagaagttactgctcttggcaaaaagaatacctgttttgttacagaggtatacggtaaagcccagacatttgcattggttcctgatcttaccactctcaatctacacaaccacaatctcttgggaccataagactatcttccctagaattcttctgacaggccaagagagtaagggtaaaggtgagggtatagcaggcagcaggattttctacccagatcagaaaaccaaggaagaaaaaacagggactgtacaaatataagaagaaaagggccatggtcagctaaataaaatgacccttcttgtgcggagttttatcatcatagagccaagtatcttcatggaagtaagttaaaagaaagaagaataactcttggagttttacgaggtggcccatcaaattgggattcatggaaccattagttcaaatggcctaataaaa

SEQ ID NO: 261102 - DNA, 1060 bp, Homo Sapiens
  misc_feature (352)..(371): n is a, c, g, or t
  misc_feature (921)..(921): n is a, c, g, or t
gactagctcctgacacacagtaggtaatcgtaaatgggtgctattgtttggcccgacccacgttataggacagaacgtctaacggatgcgtcagaacctgcgccctccggatcttggagggtacagagggcgcccctcggcctcctccctttcggaggtggggacaaggtggaggaagggctgcaggaggaggagctctagcatcgcgacccgccccgtcccgtccagtctggcctgggcgccgcgggaacgctgtcctggctgccgccacccgaacagcctgtcctggtgccccggctccctgccccgcgcccagtcatgaccctgcgcccctcactcctcccgctccatnnnnnnnnnnnnnnnnnnnncagtgcggcggtgtgccgggctgaggctgggctcgaaaccgaaagtcccgtccggaccctccaagtggagaccctggtggagcccccagaaccatgtgccgagcccgctgcttttggagacacgcttcacatacactacacgggaagcttggtagatggacgtattattgacacctccctgaccagagaccctctggttatagaacttggccaaaagcaggtgattccaggtctggagcagagtcttctcgacatgtgtgtgggagagaagcgaagggcaatcattccttctcacttggcctatggaaaacggggatttccaccatctgtcccagcggatgcagtggtgcagtatgacgtggagctgattgcactaatccgagccaactactggctaaagctggtgaagggcattttgcctctggtagggatggccatggtgccagccctcctgggcctcattgggtatcacctatacagaaaggccaatagacccaaagtctccaaaaaagaagctccagggaagagaaacccaaacaagagcccattngtgaaaatagggcagatttttaatccctggtcggccggcttccggccctctcaaaaagctttccataaaccctttccttttggcgccccgggggccccattaagggaaaggggaaacatggggccttagacttggtttc

SEQ ID NO: 261103 - DNA, 1029 bp, Homo Sapiens
atgactctaccagatgcctccctcttacccatgttactagtattgaaaatcagtaggaatgcaataactacgttttctaaggagcaacttgactcatttcacacactgaagactttggaagctggtggcaataacttcatttgctcctgtgaattcctctccttcactcaggagcagcaagcactggccaaagtcttgattgattggccagcaaattacctgtgtgactctccatcccatgtgcgtggccagcaggttcaggatgtccgcctctcggtgtcggaatgtcacaggacagcactggtgtctggcatgtgctgtgctctgttcctgctgatcctgctcacgggggtcctgtgccaccgtttccatggcctgtggtatatgaaaatgatgtgggcctggctccaggccaaaaggaagcccaggaaagctcccagcaggaacatctgctatgatgcatttgtttcttacagtgagcgggatgcctactgggtggagaaccttatggtccaggagctggagaacttcaatccccccttcaagttgtgtcttcataagcgggacttcattcctggcaagtggatcattgacaatatcattgactccattgaaaagagccacaaaactgtctttgtgctttctgaaaactttgtgaagagtgagtggtgcaagtatgaactggacttctcccatttccgtctttttgatgagaacaatgatgctgccattctcattcttctggagcccattgagaaaaaagccattccccagcgcttctgcaagctgcggaagataatgaacaccaagacctacctggagtggcccatggacgatgctcagcgggaaggattttgggtaaatctgagagctgcgataaagtcctaggttcccatatttaagaccagtctttgtctagttgggatctttatgtcactagttatagttaagttcattcagacataattatataaaaactacgtggatgtaccgtcatttgaggacttgcttactaaaactacaaaactt

SEQ ID NO: 261104 - DNA, 529 bp, Homo Sapiens
aggttggcatctatgtgggccttatatactctaaaatgaactttagtcaccttggtgcttatgggccattacttgacctatgaatctttaaggcacaatcagttgtactttacatttaaagatcacttgagtgatggccgcctttccctcctacccgctccttccccacatgccttccaaggttagctggtaactgtagggctgcagagctgagcccatggttgtgtgtaacttgccctcaccctcctcattgccaccttaggtcactttatgggtctcgtcctccagagggttcggaagtggagtctgttggcagccctcctgcaggccctagcaccctgtcctgctccttaactgtgtgtgtgactctccaagagagttgtcctgcctgctgaagtgaaccagtacccagaaagacaactgtgagccatcttggttttcactcgctgtttagctgaggtcttgggccacaaaaggggtttcacaaacctctggatatatcagagtttatgagaaaggaaacatgctc

SEQ ID NO: 261105 - DNA, 411 bp, Homo Sapiens
tattagataaagaatgtgaagtaagcatgaagagacaggctttgggagaaataccagaaagggatttttcaaagatggcattgtttaatctccgtgtggccctcggttgtgcaatcacagatgagccagaagagggccagccccctacttgtttgggctccgaaactcttaccaaacatcaatttttattcttgggatagaaaaatagtatgtgctatctctaatacgctacttccgatatttattaaagaagtatttttaatgtagtgtccacaggctcatttcattgaaaacaactgactatggatggataggacaggctcctggattgggcaaaagttccgatgggtatattccagaaattaaattttggcccgcggcacctaaacactgacaactttagcttaaagg

SEQ ID NO: 261106 - DNA, 1069 bp, Homo Sapiens
tgaagtaaatctgctgtaataattttgctgttaataaaacaaagagtttattttattagataaagaatgtgaagtaagcatgaagagacaggctttgggagaaataccagaaagggatttttcaaagatggcattgtttaatctccgtgtggccctcggttgtgcaatcacagatgagccagaagagggccagccccctacttgtttgggctccgaaactcttaccaaacatcaatttttattcttgggatagaaaaatagtatgtgctatctctaatacgctacttcgatatttattaaagaagtatttttaatgtagtgtccacaggctcatttcattgaaaacaactgactatgatgatagacagctcctgattggcaaaagttcgatggtatattcagaattaaattttgcctgcgcacctaaacactgacaacatttagcttaaaggttttccatggagaagagtggtaagagctgtagttagcaaaattggcatcctctttagggtgtcaattctgtgctgctttgcaaattgttgaaacttttgattttctgtttggcaatgctagtcagtgttcacttcttacagattagccaagaatttttatctaaatgcagaaacttattaatgaaatccatttaaactatacttacacaacattttgggaggccctgctggtaaaattatatatggatgcagaagtattgcaagagtccattttccatttttaaatctgcaatatctgattacattgatgaattccgttgtattgtatgtgtgaatataaatatctgaattctcccgggggacttggttttcgtccaaggatgttggcagtggacacttagtttacctcaggaattgcaatcatgtaagactatattcggaaaaaatgctggagtatataattttggatactgatataaaatcatcaagatggaagttaagcagaattgtcacgtgtagtccatagcgcttttatatgcattattctgtaatttgtttgtactgcggcaactttttatactttcaatgtatcatttaataaaaaaaataagcaagtc

SEQ ID NO: 261107 - DNA, 586 bp, Homo Sapiens
ggaaaacatgaagaacggggaaagtagctgccgcatgccaatgtgaaactccgaggagtctagccattctgatctggccttccaggtcattaggaggctctgccatcgtgtgaggagggaaagcctgctgtctggagagcacactggtctccagcgtggggagagagagcactttcgggctttgctgaggagggtcttcagaaaaaagagtactgccaacaagaaggcccaatcaagatcctcccacaacaagagcagattgtgagcgtggcaagctctatgctgagcactggaaggacaaagagagattgggcacagacttctcactgatccaggtgatgaagagctcacatctgagaggatgtgaccatggatgacccaccagaatgtcatgggatccagctacagccaaggaagcacagagcaccgtgggagcgatttattgtgcttggggatggggaaggggacatgggaggagccatattgagaaagtaacatgggtacttggcttcacagagtgtggcagctttcatcaggaagtgatggtgggggaacagcgtctctggcggagggaagcagcaggtgc

SEQ ID NO: 261108 - DNA, 1108 bp, Homo Sapiens
ggaatggctttcccatggcagcagtcataaccactccagagattgccaaatctttggcgaaatgcctgcagcacttcaacacctttggagggaaccccatggcctgtgccattggatctgctgtgcttgaggtgattaaagaagaaaatctacaggaaaacagtcaagaagttgggacctacatgttactaaagtttgctaagctgcgggatgaatttgaaattgttggagacgtccgaggcaaaggcctcatgataggcatagaaatggtgcaggataagataagctgtcggcctcttccccgtgaagaagtaaatcagatccatgaggactgcaagcacatgggactcctcgttggcagaggcagcattttttctcagacatttcgcattgcgccctcaatgtgcatcactaaaccagaagttgattttgcagtagaagtatttcgttctgccttaacccaacacatggaaagaagagctaagtaacattgtcagaaataaataaaaccacaagtctcaagaatttgccacgtatgttcaagggtgaatttgaagaatttcagaaccactggtatccagagaaagcctgcagctctccacaggagctgtaaaagtcatggttgactgcctaccaaccatatttgttagcagagcccctcttatcttgagaactccattcttcagggaaaggatctccctagctcagagaataaatcctaattagtttatgttaggtatggtaatttgattcccctttgcaagtgattggtttatgcatgaatatgtgatgtatttttgtcccagtgaatcttgaagaaaaatcttttggtggaggtgccttcagggaaagttttcttcaccctcactcttcagttcaagaagagatgtcttcttgttgcgctgagaacaccatatgttcatgacgagattcctggcaccatgtcagccggcttgtagtcatgaggacaaccctttttggtgaggttggaagatggatggaagccaagtgcttagtgatgtcaaagaagcactcacttaagcattcctggagccaccctacctcagggcctcttgatatttgaggtaataaattcattgttctgtaa

SEQ ID NO: 261109 - DNA, 141 bp, Homo Sapiens
taaaatttaccaaatgaaataatctgattatctggagattcccaagagttcaatgaagatgatgaaagaaacactatgaaaacataacctgggaggagcctgacaactggcatcattgttctatcttcctacttataagtc

SEQ ID NO: 261110 - DNA, 537 bp, Homo Sapiens
  misc_feature (453)..(462): n is a, c, g, or t
gtcgtagatttgtctgtaaaagtgcaggaacagttattctatgagaacactgcatctgcattcatagccacgagtttgttattgctacaggctactgagcgtcgtaacaggaaaaccacccacagctgaccggctcggtggaggacactcctgggacaggtctctttgtcagtgaacaagggcgtcactctgggaggggtcggcggtgctggcggccgggtccctggtgcactgacctatctgggataggcagtacccttggaggggggcctggggcagaggaggcagcagaaaaccaaacatttcactgagaaagccccctccctgctctaagaaggggctccgtgaagttcttcccagagccgcgctgcctgcagtgcgctctgaccttctcttcatgtgtgtaaatctgtaatataccattctctgtggcctgtttttcctggaagaagnnnnnnnnnnggtttggcaggccatctttttttgtacttaaaagtagccttaagaacaataataaagtgctcttaaaccaaaaaa

SEQ ID NO: 261111 - DNA, 611 bp, Homo Sapiens
acattagccaaattcctcagggatgacttacataatttttttagtgcaggcatcccttacagaaggagttaagatgctcttatttagttctcaagtggatggtggtcctccctctgtgggaagaatcttgcctttgagattacagtatggggagagaaacaagacaaaataatgaagaaacacccagttatccagccaacccaacatggtaactgatgggatggcagtcatcacagctggagccccttcacatctgcaaagttgctagaaagcataaataatggatactactttggaatttcatttgacacatcactgcctagtactgttattgatcccaggattaatacacttaactttgctaatcagtgtatatttaagcactcaggcttccaaataggctggatgaagttcactcaaacaaaataaaataaaatttttattttggaattaaaggaaaacaattagaaatttatgagttacgagtctatattgatatctcttattagaacagagtttgttcttttttttatcttaagggagatccttcatctcaggtttgttagacaaaaatacttaagctttgatttcatgtacaaaacatgagattc

SEQ ID NO: 261112 - DNA, 701 bp, Homo Sapiens
  misc_feature (184)..(204): n is a, c, g, or t
ttatattcatatgtattgcattgcaattataattacatatgcagattgattgatagtcatgaataataacgtctgctcctcttacatagaaagaaaaacgatattaaaagaagatcttctctttatttgagactcagaattccttctagaagaaggaagtgctttttgttataggatcccttcnnnnnnnnnnnnnnnnnnnnngtaagatgtagatgcttattctttgctttagaaaacttctcacttaaaaagatggcatgcacctaggggaataaaaggtcacctcagacaccaggcgtcattcctggtgaggcctgcctcgtcggaggcctggggtctgccggcaggatctggctgcacctgaaggctgcgtgcaccttgtcccctggacaggtctcctttcctggccctgctccagcccagcccttcttctagtggtagctctgggctttgcaggcccagctccaggccctgctcctcagagagaactcttcgagagctggagctgggcacagccataagacaggactggaccagatgctcctgtaaacatcccaggggtgtgccaaggccacccctcacaactggcttgttccaggtatccgtgatggggccactcgggtccaaaatcaagccaggcccattctttttccatcatcttcactttccaataaaccttaataaatttatattttggg

SEQ ID NO: 261113 - DNA, 1732 bp, Homo Sapiens
aaaaatcgcggggagggtcaaaggagacccggtctccgaggctcatggcgatgctggtcctagtacccggacgagttatgcggcctctgggtggccaactttggcgcttcttgcctcgcggactcgagttttggggcccagccgaggggactgcgagagtcttgctgaggcagttctgcgcgcggcaagcggaggcgtggcgtgcctcggggcgccctggctattgcctgggaacccggcccctcagcactgcgaggccgccacccccgtggtcgcagaagggccccggagactccacgcgcccctcgaagcccgggcctgtttcctggaagtctttagcaatcacatttgctattggaggagctttactggctggaatgaagcacgtcaagaaagaaaaggcagagaagttagagaaggaacggcagcgacacatcggcaagcctttacttgggggaccgttttccctcacaactcatactggggagcgtaaaactgacaaggactacttgggtcagtggttattgatttattttggcttcactcattgccctgatgtctgtccagaagaactagaaaagatgattcaagtcgtggatgaaatagatagcattacaactctgccagatctaactccacttttcatcagcattgacccagagagggacacaaaagaagccatcgcaaattatgtgaaagaattttctcccaaactggttggcttgactggcacgagagaagaggtcgatcaagtggccagagcatacagagtgtattacagccctggccccaaggacgaagatgaagactacatagtggatcacacaataataatgtacttgattggaccagatggtgagtttctagattattttggccagaacaagaggaagggagaaatagctgcttcaattgccacacacatgaggccatacagaaaaaagagctagccaaagcagtgttgctggatgcagtattctcttgctaagaggaaggaaactgtctcgcataggagcctatataaatataaacatatatacgtgcactctacagaatggccttcataccatgagaacatttctgttttggatggggatgttacccttgcgttcaaccaaaattgattcttggaactgtaaagattacaacccaaagtctcccaggaagctgtggggagaccagaggatcaagctgaagtgaagccagtgaagagcccacctgtggaaggacatggcggggcgaggcacagccagtgcattcctgcctgcgaacaggccctcccagcagctttgccgcctctccatcgtcttgggcccttgctcaaatagctgtgggactgaatttcacagaaaagaatataatttccatagtgctcttgcttgcctcttcttgagttctttgctcttctgagttcttggtggctaataacagtcagattagggtctctgccattcagagttgatgcttgaaaactttagttttccttattaatgaatatcactatcagatttgactaatgaagaggaaatctattgtttgggggaaaaaaaacatcagtttgatttctctaggggttcttttatgtgatttttagctaagtggtgtgccaggttttcagtgacataccaaatggaaataagaggatattgatcacgagtgtgatgctgagtacctttctgcatatactggattgtactttgtgtaaagtaaacatactcagttttgctgttca

SEQ ID NO: 261114 - DNA, 454 bp, Homo Sapiens
  misc_feature (27)..(27): n is a, c, g, or t
ctggggccccctgccccaaaaagccgnggggaccggaattcccccaggaaaaggaatataattccccccaaagtgctcctgcctgccccctcctcctgaggtcccttgccctcctcctgaggtccctggggggcctaataaacagtcagattaggggcctctgcccattccagagttgatgccttgaaaactttagttttcccttattaatgaatatcacctatcagatttgacctaatgaagaggaaatctattgtttgggggaaaaaaaacatcagtttgatttctctaggggttcttttatgtgatttttagctaagtggtgtgccaggttttcagtgacataccaaatggaaataagaggatattgatcacgagtgtgatgctgagtacctttctgcatatactggattgtactttgtgtaaagtaaacatactcagttttgctgttcaa

SEQ ID NO: 261115 - DNA, 870 bp, Homo Sapiens
  misc_feature (134)..(134): n is a, c, g, or t
ggcacgagggaacacaatcctttatatatcaacatcacagtggatttctggtttggtgcatgaccctggatcttttggtgatgtttggaagaactgattctttgtttgcaataattttggcctagagacttcanatagtagcacacattaagaacctgttacagctcattgttgagctgaatttttcctttttgtattttcttagcagagctcctggtgatgtagagtataaaacagttgtaacaagacagctttcttagtcattttgatcatgagggttaaatattgtaatatggatacttgaaggactttatataaaaggatgactcaaaggataaaatgaacgctatttgaggactctggttgaaggagatttatttaaatttgaagtaatatattatgggataaaaggccacaggaaataagactgctgaatgtctgagagaaccagagttgttctcgtccaaggtagaaaggtacgaagatacaatactgttattcatttatcctgtacaatcatctgtgaagtggtggtgtcaggtgagaaggcgtccacaaaagaggggagaaaaggcgacgaatcaggacacagtgaacttgggaatgaagaggtagcaggagggtggagtgtcggctgcaaaggcagcagtagctgagctggttgcagctgctgatagccttcaggggaggacctgcccaggtatgccttccagtgatgcccaccagagaatacattctctattagtttttaaagagtttttgtaaaatgattttgtacaagtaggatatgaattagcagtttacaagtttacatattaactaataataaatatgtctatcaaatacctctgtagtaaaatgtgaaaaagc

SEQ ID NO: 261116 - DNA, 1253 bp, Homo Sapiens
  misc_feature (1171)..(1171): n is a, c, g, or t
  misc_feature (1173)..(1176): n is a, c, g, or t
tcatccaggaatatgaagatagtggtggatcaaaaacgttcagcgcaaaggattatatggccagaactcctcactgggcattatttggtgccagtgaaagaggctttgatcccaaggacacaagacatcagagaaagaacaaatcaaaggctatttctggatgttgagattatctgatttcaaggtactgaaggacaaaaacttggatggcctcaaaaggttcttgaacaccactgtgattctccaaggacgaattacgtaaattatactttcatacaaaggagacaataaggcagtaaacatggagacacgggggacagcgtccacactcagagggcctgggcacagccccgatgtttcttttcagaactcagcccctttcctgattttacttctaagaggaaaattattttggggaggaactacacagtcgtgattagaatttatctgatggttttgtattataacttgtaagacctgccagaatgctagtcccgagagtgtcagacaaggaagaaatccctgggcctcttccccttacccggcccttagatttcatggagcagccacttagcattgaattgcactaccctgagctaaacgtgtctgtgctttctaagataagagcttgatccctttcttctatcttaagacagcacctcctgaaaagaatcgaagttgtcacaactctcaattattttttaaatactgcatagattgagttttggtttattaccaacccttcccagaattgcgttggatctaaaactactagatctcatcccattcccatgtaaattaccacagaccgcagtaccggggctggagcggagtgaagctgtctgctgtgagaggagtggccatgtgagggcatggagtcattagtctcacaaacacactttggactgaagaggatcatttctttttgttcgtgaggtcactgtccaggcctctcatatcatgaccagacggcgggtctccatcttctttcactcctgtggccctggctgctttacacaatctgttctataaggttcaggtgttttcaagttggaacgatcataaatactcaaaattgttttcaagttagcaagttcttttaacagtcttttatgcaaaaattgaattaataaaataatctttttgtaccacaaaaacaccacacaaaaanannnnacatggtgggccgccttcggccccttcaaaagttttcttaaaccatttccttgggggcccggccccccttaagtaaa

SEQ ID NO: 261117 - DNA, 752 bp, Homo Sapiens
cgccgctccgccttccgtatcaaaacctaaatagaagttgttgttaccgtgtgccaatgtgtcccatgtgggttgtgccaggtagagaaacaggaagtcaatcatctgtgacagtctctattctgtcgttttgctccttggtatttgatttgcactatatttagttgaagcctgttcactgtttaaaaccggaggtatcttcaaaggcatggagacctggttccagtaaatgtcccaccagtggggtatagaaagcatgctcatgaccctgccgtgtcgtctgaggtacccgttcttatcctagtggttcaggaagagaaaacgcagtttgcactttcaagacagcttctctaaggctggcatgttatctccttgctttgctttttgccgttttaaaatgtgtaattgttccagcattccaatggtcttgtgcatagcaggggactgtaaccaaaaataaacatgtaattgtgtaaatggtttgaagaagtcttgaatagctctttactgtcttacttggggttgataagatttgagtgtttgcaattttttactaaatgtagctccaaagtcttaaatggcttgtttgttcttaaactgttaattgatgaaactgtgcataagtttacaatgtactaacttattttgcttattatatatagtgttttattggaaattgtaaccacacacttcagcatgatgaaaataaagattagtgtttccatttaaataaatgttttatcctcccataa

SEQ ID NO: 261118 - DNA, 426 bp, Homo Sapiens
agctttctcaagtcctttgagtctcccaatagcaagagggatatttcaagcttccgcagtgattccacagaagcccccacattaggcttgaggttgggtaaagaagtaaaaaataataatcttctcaagatacaaataacataacctaatactccctcaaagcagcaacaacagcaaaacagcagctctctgcaaagaagttctttggaaaagttccttcctatctccacattctgtcttctttgggcaccttgttctagccaaaaggtagaagagttgtagagatggttcttaatcatttccttcatgaattctttatttgagtgaatctgtgtatattatttttatcattaatatctatcatattgatggctcattcaaaactgaagacagtccattttaacataatttattaataggagatgg

SEQ ID NO: 261119 - DNA, 669 bp, Homo Sapiens
ctgtccagctgtggactttcaggattcaggactgctggggatcaagcccaaggatgtttttcagagctctgtgatttaagatgctcgaaaagagtgtccaagaggagtaaaggtcatgacaatttactcccaggacaatctaagttctgccacaagtacccgtggtgtctgttcccacaacaatggccctttcacaagctcttgcctcacaacccctgcagaagtccttcaacaaaactaataatagactagtgaaacctactcctcacatgggtaagagttgcagtgggcaggtgaccctcctccctgcccccatcctttgcttcctcaagctccctgccaacctctggatacatcaatgggaaggaaaccagggaagcatagacctatagtacaacaggggtgtagtgaccactggacctgatgaagcgaatctgcctgaaatttaatacgcccttttattccccctctgtgttaaatcaaatgatctgttctgcactgagccaagcaagttacttttaaaactggtggcaccactcatttgggacttggagactgcttttatccagaacctgttaagagaacaggggatttaaatacaaaggaatatgaaggtggtgtgccttaaagacagtctaaaattaggttttagtttgttacattattttg

SEQ ID NO: 261120 - DNA, 1260 bp, Homo Sapiens
  misc_feature (46)..(82): n is a, c, g, or t
aaataaaaactgtggtaattggacaaaacaagcttgaagccaccgnnnnnnnnnnnnnnnnnnnnnnnnnnnnnnnnnnnnnaaaaagatgccactgtgttgttaatgccagcggtgaatatgaatcactatgtgccacaaaaacaaaaaagtccagataattcgaaagagagggagaatccagaaatacaatcacatttgttcttattctgttttagggatcttctaggtcctcgtttctgagtgtggttttaggccagcagcataggcatccctgagactccttagaaatgcagaatctcaggcccagcccagattacttggagcagagtctgcagtttcacaagatccccaggcaattcatgtgcatgtgaaatctggacaagcacctctctgggcgatacaaagccactcatcctcgtgtgcctatcacgttttccaaacacataggatcccatctcaggagcaggaccagtgtttagctagattaaacttcactggtgatcttgtttgatgcatataaagtaatctggcatatatggttaaattcaagatgttatggcagaagtgactttgttttgctcacaaagcattgcccaaaaggtaaattatggatttactgcttccttcttaggtagacatgggaatgaaaaatttctaggtcataattcaaactgtaagattttcctcgcaccataccaaactcatagaaagcttttttattcctctcaataaaataattgcacattgctgataacagaaacattacataaatgcatataatgcaaaaaaacctgaaaacactcatttgcttttctttttttctccaacaccagttgctaaatcttatcaatctctattatggatgaccaaagaaaatctctctccctgaaatcaaacacacaataagttatctttctctctatagctgttgaattacaataaaaagcacattcgatccattagcagttggctaaagggagtcaattcgcttcatctgtacaataataaataaggttgggtcaaatgcataggtagcttggactggctagtgaagaaacacagaagaattaataaactcgattatactatctaaaactaatcaaagaacatagttttggtctcatgttagttaaaaaccctgtctttcagattgtaaaagtttaatgaattacattttaagagtatcctacacataacaaaatatgaattccctgaagctgtaacgatctaggatttgaacggaatggccatcatctc

SEQ ID NO: 261121 - DNA, 672 bp, Homo Sapiens
  misc_feature (18)..(18): n is a, c, g, or t
  misc_feature (222)..(315): n is a, c, g, or t
  misc_feature (478)..(478): n is a, c, g, or t
  misc_feature (652)..(652): n is a, c, g, or t
gcccagattacctttaanatgccatccaacaaagatcacccagtgaaagtttaaatcctagcctaaacactggtccctgctccctgagatgggatccctatgtgtttggaaaacgtgataggcacacgaggatgagtggctttgtatcgccccagagaggtgcttgtcccagatttccacatgcacatgaattgccctggggatcttgtgaaactgcagacnnnnnnnnnnnnnnnnnnnnnnnnnnnnnnnnnnnnnnnnnnnnnnnnnnnnnnnnnnnnnnnnnnnnnnnnnnnnnnnnnnnnnnnnnnnnnncgaggacctagaagatccctaaaacagaataagaacaaatgtgattgtatttctgattctccctctcttcgaattatctgacttttttgtttttgtgcacatagtaatcatatcaccgctgcataacaacacagtgcatctttttaaaacaagggaaaggggnaaaaaggaggaaaaacgatgcatcaagcttgtttgtcaaataccacgagtattttattcattgttatcttgccaatggaaataaagtatgatattgcatttaaatattatatttatacctcatgtatatttttacctcaattgttgatatcaatcatcaattgtaaataaatanattccaaggcaaataaattt

SEQ ID NO: 261122 - DNA, 573 bp, Homo Sapiens
  misc_feature (40)..(40): n is a, c, g, or t
  misc_feature (106)..(106): n is a, c, g, or t
  misc_feature (196)..(196): n is a, c, g, or t
  misc_feature (213)..(213): n is a, c, g, or t
  misc_feature (236)..(301): n is a, c, g, or t
  misc_feature (319)..(319): n is a, c, g, or t
  misc_feature (322)..(322): n is a, c, g, or t
  misc_feature (453)..(485): n is a, c, g, or t
catatatgcccagattaccttatatgcatcaacaagatcncccagtgaagtttaatcctagctaaacactggtcctgctcctgagatgggtccctatgtgtttggnaaacgtgataggcacacgaggatgagtggctttgtatcgcccagagaggtgcttgtccagatttcacatgcacatgaattgccctggggntcttgtgaaactgcagnctctgctccaagtaatctggctnnnnnnnnnnnnnnnnnnnnnnnnnnnnnnnnnnnnnnnnnnnnnnnnnnnnnnnnnnnnnnnnnncagtaacgaggtcctagnagntccctaaaacagaataagaacaaatgtgattgtatttctgattctccctctcttcgaattatctgacttttttgtttttgtgcacatagtaatcatatcaccgctgcataacaacacagtgcatctttttnnnnnnnnnnnnnnnnnnnnnnnnnnnnnnnnncgatgcatcaagcttgtttgtcaaataccacagtattttattcattgttatcttgccaatggaaataaagtatgatattgcatttaaa

SEQ ID NO: 261123 - DNA, 488 bp, Homo Sapiens
  misc_feature (421)..(422): n is a, c, g, or t
  misc_feature (442)..(442): n is a, c, g, or t
  misc_feature (460)..(460): n is a, c, g, or t
gaaatattagagccccaggaggacttggtgctgtctgtttgaaagtctcccatgttttacgtttggttcaaaagatcccctgcgctccctctcacccagcaaaccagccaaaccagtttcttcaccctgcctgcttctgtgttaagcaaacagtgcactgcaaacagtgactaagcctagtgccttgttaggaagaaactggcgtttttttgcttgccactgtgcagggtgctcagggtggaccggaacggttttgttgtggcttaggaaaggggacctgctcgtggaggttgtgtagaactggagtgggaggagtggggcaaggcgcactaaggggccggggggagttcgggatgatcttgaaacttgttcagctttctgcttgggctttttaaaagttattccagggccagattagatnnctgttggcttcacgcctgtnattccccagttgcttttngggagggccaaggccccaggatttactt

SEQ ID NO: 261124 - DNA, 1123 bp, Homo Sapiens
ttttcatgaacaagaatatgtacctttttgatgctatattactgcgattaaaaagttcttgcaggtaatgtttatgatatgttaaacgttgtaatttcttatcgtaattataacattcccattcttttgtagatgaaacttctacatattgaaccacagattttctgagcttctaaatgtagcctttcattgcacatttcagtgatcagaatagatatccttttacacgcacaaaagcaatagattcattcagtggacaagttccttgtttaactacacagctatgatggaatgatatatccaagttccttgcctcagtgaaatatgcatatgtatatcatgaaagtgggatgccaagtaagcttaaaatggcattctctagcaaagagattagacttttaaataactcttataaaacaggttggcgatcatttcccaagattggtttcccttgagtttttgctaaaacaaatcttagtagttttgcccgtttaaaacaactcacaatcgtaaatgctactattcctaagatatcttacctttttatttcagtttagccatgtattgtatgagtgtattagtctaagcagtgagaatcttttctatgcctctattccagcaaaaagtagaagtatcaaataaaaagggcaacttttaaaatattaagcctgaagacttctaaaaagacaagaaacatggcctaaataaccaacatagatttacatagtaagtttcacactaccttattaccaaaagcaaacaccctcttactttaaactacattatcatgaatatctattgtatgctggcctttactttttgccaaaatcaacattataatgaagagatgccctttgtttcatgagattcaaacttgatggctatgcttttaaaaataacttccgtactttttaggaaacctttaaaaatccccaacaaccacaccgaacactccggacccaaacaacgcccgatcacaccctccaacacgtaaccgcagcctcttttccccacccaccgtaaatcccgaccacccctcgtaaaaaagaggccccggacccatacctatcaatcgagtggggccccgcccacttccaaagctttcataaaaggtttttcgcct

SEQ ID NO: 261125 - DNA, 612 bp, Homo Sapiens
gtcccctcacaacccagtgacacctttctgctttcctctagactggaacattgattagggagtgcctcagacatgacattcttgtgctgtccttggaataaatctggcagcaggagggagcagactatgtaaacagagataaaaattaattttcaatattgaaggaaaaaagaaataagagagagagaaagaaagcatcacacaaagattttcttaaaagaaacaattttgcttgaaatctctttagatggggcttatttctcacggtggcacttggcctccactgggcagcaggaccagctccaagcgctagtgttctgttctctttttgtaatcttggaatcttttgttgctctaaatacaattaaaaatggcagaaactttgtttgttggactacatgtgtgactttgggtctgtctctgcctctgctttcagaaatgtcatccattgtgtaaaatattggcttactggtctgccagctaaaacttggccacatcccctgttatggctgcaggatcgagttattgttaacaaagagacccaagaaaagctgctaatgtcctcttatcattgttgttaatttgttaaaacataaagaaatctaaaatttc

SEQ ID NO: 261126 - DNA, 2621 bp, Homo Sapiens
  misc_feature (2118)..(2130): n is a, c, g, or t
ccggtgcagtactactagcggttttaggtagcgaggctgggtggcgaattcggcacgaggctgaagaaggatctgaagggaacaccaggaaaagtaggaccaactggtgcaacaggagataaaggtccacctggacctgtggggcccccaggctccaatggtcctgtaggggaacctggaccagaaggtccagctggcaatgatggtaccccaggacgggatggtgctgttggagaacgtggtgatcgtggagaccctgggcctgcaggtctgccaggctctcagggtgcccctggaactcctggccctgtgggtgctccaggagatgcaggacaaagaggagatccgggttctcggggtcctataggaccacctggtcgagctgggaaacgtggattacctggaccccaaggacctcgtggtgacaaaggtgatcatggagaccgaggcgaccagaggtcagaagggccacagaggctttactggtcttcagggtcttcctggccctcctggtccaaatggtgaacaaggaagtgctggaatccctggaccatttggcccaagaggtcctccaggcccagttggtccttcaggtaaagaaggaaaccctgggccacttgggccaattggacctccaggtgtacgaggcagtgtaggagaagcaggacctgagggccctcctggtgagcctggcccacctggccctccgggtccccctggccaccttacagctgctcttggggatatcatggggcactatgatgaaagcatgccagatccacttcctgagtttactgaagatcaggcggctcctgatgacaaaaacaaaacggacccaggggttcatgctaccctgaagtcactcagtagtcagattgaaaccatgcgcagccccgatggctcgaaaaagcacccagcccgcacgtgtgatgacctaaagctttgccattccgcaaagcagagtggtgaatactggattgatcctaaccaaggatctgttgaagatgcaatcaaagtttactgcaacatggaaacaggagaaacatgtatttcagcaaacccatccagtgtaccacgtaaaacctggtgggccagtaaatctcctgacaataaacctgtttggtatggtcttgatatgaacagagggtctcagttcgcttatggagaccaccaatcacctaatacagccattactcagatgacttttttgcgccttttatcaaaagaagcctcccagaacatcacttacatctgtaaaaacagtgtaggatacatggacgatcaagctaagaacctcaaaaaagctgtggttctcaaaggggcaaatgacttagatatcaaagcagagggaaatattagattccggtatatcgttcttcaagacacttgctctaagcggaatggaaatgtgggcaagactgtctttgaatatagaacacagaatgtggcacgcttgcccatcatagatcttgctcctgtggatgttggcggcacagaccaggaattcggcgttgaaattgggccagtttgttttgtgtaaagtaagccaagacacatcgacaatgagcaccaccatcaatgaccaccgccattcacaagaactttgactgtttgaagttgatcctgagactcttgaagtaatggctgatcctgcatcagcattgtatatatggtcttaagtgcctggcctccttatccttcagaatatttattttacttacaatcctcaagttttaattgattttaaatatttttcaatacaacagtttaggtttaagatgaccaatgacaatgaccacctttgcagaaagtaaactgattgaataaataaatctccgttttcttcaatttatttcagtgtaatgaaaaagttgcttagtatttatgaggaaattcttcttcctggcaggtagcttaaagagtggggtatatagagccacaacacatgtttattttgcttggctgcagttgaaaaatagaaattagtgcccttttgtgacctctcattccaagattgtcaattaaaaatgagtttaaaatgtttaacttgtgatcgagacctacatgcatgtcttgatattgtgtaactataatagagactctttaaggagaatcttnnnnnnnnnnnnncgtttctcactgccttaaatagaatttttaaatagtatatattccagtggcattttgggagaacaaagtgaatttacttcgacttcttaaatttttgtaaaagactataagtttagacatctttctcattcaaatttaaagatatctttctcctcttgatcaatctatcaatattgatagaagtcacactagtatataccatttaatacatttacactttcttatttaagaagatattgaatgcaaaataattgacatatagaactttacaaacatatgtccaaggactctaaattgagactcttccacatgtacaatctcatcatcctgaagcctataatgaagaaaaagatctagaaactgagttgtggagctgactctaatcaaatgtgatgattggaattagaccatttggcctttgaactttcataggaaaaatgacccaacatttcttagcatgagctacctcatctctagaagctgggatggac

SEQ ID NO: 261127 - DNA, 891 bp, Homo Sapiens
  misc_feature (81)..(91): n is a, c, g, or t
  misc_feature (787)..(845): n is a, c, g, or t
ggtatttatgacttacagaaaaaaatttctcacagctatgagtaagctatagggaactgaaaacaagaggccaaagaaccnnnnnnnnnnnaatggccttggttacataaagatatttagaccagctttcaaaaataacaacagtttttaaaatttaccatatcgagcctcagtacgttactctaaaacacagctttataattcctctataatctacattaaatgaagagtaaaataaaactacaaatttaggaagatgaggaggaccaaaaaaactacaaataaggtaaataagaaaaattgcaaacctcaaatctcttacaaagaaaattatgatattaatagtttccttactcacatttggtaattgtataaagactgcagagttactacctgtacatctgaaaaaggagaaaaaggacctaaccagtgttgctgaaagaaactttacaaataaagggaacgatctggtacctagtcaggtttaattttacctgggaattagggcttccctgaggcaatgtagcctttaccctcttttaggtcttagctccctttgaaaatctgatgaaatcattagatttggggggtaggatgtcttgtataaaaaattttgtatgggcttgtttatgtatttcagggagtttgtgagtgctctgaaaacgaatgaactcctagaccacctgtatcggaatcacctgagttgcatattaaaattgcagactattggactccaccctaatcttattgtattagaatttctaggcctggcactgtggctcacacnnnnnnnnnnnnnnnnnnnnnnnnnnnnnnnnnnnnnnnnnnnnnnnnnnnnnnnnnnnaccatcctggctaacacagtgaaaccctctctctactaaaaataca

SEQ ID NO: 261128 - DNA, 618 bp, Homo Sapiens
  misc_feature (419)..(419): n is a, c, g, or t
aacattaaaagcaatcattcgcttaaaaagaagcaaaggatttcatttcaagtataaaaaatataaaaagagtcgtacgggtccagtttcgtctagtgtgggtcaaccctttaaattgcatagttcacgtggcacttggacatctagagggcgagcgagttcggcgctcggccaagggccacttctggacacacgcagatcggcaagtgctatgtcatgtgcgttcaggcaggtctgcaagagctatgcgggcgggcgggcaggcgggcaggtgagtgggcaggggccacgtccacggccagccctgatggctggggcccacatgggcaacttctgcaaatcagctgaaagccttccccatctctccaagaccaactaggctgctcccctcccttggcctccgctgaggggacaccccnccatcctcagcagttcaagaatgcctcctccccgccatttcctcctgcggtctcatccccttgcctaggggtcattcccacccgtccccaaaccagtcctagaggaatgtccccaatgaagggcacagattgcaactttttttctttccatttagaacaattcagattttcacttaaaaggtcatacctggtagaaaag

SEQ ID NO: 261129 - DNA, 428 bp, Homo Sapiens
  misc_feature (378)..(378): n is a, c, g, or t
  misc_feature (387)..(387): n is a, c, g, or t
  misc_feature (390)..(390): n is a, c, g, or t
  misc_feature (410)..(410): n is a, c, g, or t
gttatcagtggtctgtactttgtggatattttgcccagcaggaagtattagacacatcagtctagaagcattgtgaaaaggttccaaaacgggagacaaaatttaattcattcctcagttctgaaagtttgtgctttcttaccatgaatagatgaaaacttgaaaaaaatcttgacagtttactaatgtgaatcagatgtaacgtactactaattctacaatgcctttctctttaggtcaggtatttaaaaatcttttttaaagtattggggtatggaaaaccaaatttttgttgcccctggatatgggggatttttaaaactacccccacaggttttagggggggaaaaccttaaccttgggggtaaaaagggggtngggcccccnttnaaaccccccccattttgggnaattgggtaccccctttt

SEQ ID NO: 261130 - DNA, 1069 bp, Homo Sapiens
aggacacatcagtctagaagcattgtgaaaaggttccaaaacgggagacaaaatttaattcattcctcagttctgaaagtttgtgctttcttaccatgaatagatgaaaacttgaaaaaaatcttgacagtttactaatgtgaatcagatgtaacgtactactaattctacaatgcctttctctttagtcagtattaaaaatcttttttaaagtattggtatgaaaacaaatttttgttgccctgataatggaattttaaaactacccacagtttaagagaaaacataacttggtaaaaaaggtagccaataaaaccacaatttgaaattgataccattttctactcacaatggatgatgaaaaatttcacctttaaatgggtcagaagttgtctttgacatttaccatgaaaaaactacataaaatggctccctggtgaggttacagacacggccctggtgatgggcgttgcaaagttttcactgagcacacagcaatggtatcacctagagaagttcacgcaactttgttgaatgtagttgacttttccaaatttataaagggaaggaagaaggccaaatgttaattttgccaacaacgaatatcctttttctaaatcagatcattccttttttgttagtggcagtttatcctgtaatttcaaatgacgttaagaggtgggattatttgggggttttttttgtttgtttacagatgatctcatttgctgaatgattgatttaagagtaaaattatcactgcgtggctttgtgtatagtaaccggttttgttgcacttgtctgtggctgaaacacttacctgcagtggaaagccgagcaaggaggaggtaaacattggagatgtttgtgaaaatattactcttgctgtgaggttttagtttgttttgaatgagaaaagactaagtaacttaatccatctcaatgtagtgttttaataaaaaaggaacctaatatttgaaatgggtctcagacatgtctacaaatatgggtactatttttatgcccgtgtattttcacatttaataaaaatatttatggtcatatcagt

SEQ ID NO: 261131 - DNA, 489 bp, Homo Sapiens
tcaggaattacacttccccatccccttgcagttaggcacagccatgtgacttgctttggccaatgaaatgaaatgaaatgaggtgagtggcttgtggatggaagattttaagaaccactgcttgcttcaccatgtttccctcatgtttccacagtaatgagcaacttttatgatgatagagactgtggtcctcctagggcccttaatgaggataatatgaaactgagtccctaaatcacctacactggatacatagcatgcatgaaaaaacataacaaaccttggcagttttgagccaccaagatgttagggttttgctgtcctgttatcatagcataacccagttcatctggacctttatattttctctgagtagatggaattatgggtgatattctttcttacgttcttcaatatcattgacattttaaaatagagcaagtcttattcttacaatccgtaagaaaaataaagtcatttttatttttg

SEQ ID NO: 261132 - DNA, 536 bp, Homo Sapiens
aaaaatggtaagtacatctaaaaagactgggatggattactgataatactaatggtgaaaggtaaaggccattgttcttgagaaaaaaatctagatgtaatcaagagctggatttgtcttctgatgtttaggattcagcttatacatttatattcattgtttcaaaaccaagaagtcaacataagaattttttttaatttcaaatacatttttcctatcaagacaattttaagattattttttaacattaactttcttaagaacttgcttatagagttaatagcagaattgagtgcacctagtactcttgggtacactgagttaaaccatgtgaaaaaatcagaggaaaggtgacaaagactcaaagtaagtcactcaaaagattgcttgttggggcagggacaaaacatgctttactacaggaaatgtcatgccaaagatttctgtgcaacacaatgaagtagactttatgtatatattagtctacaattaagcaaggaaggcaaaaattacctagaaagtgcatctgctacttt

SEQ ID NO: 261133 - DNA, 643 bp, Homo Sapiens
actacagatgcttccatcggagcaaaacagactcatccctgctgaaggacaatcagagtcatccccgagttatctctgctgaatcatccctgctgagtcatccttgctgaggggtggtgctgagtcatccctgctgagtcatgtctgttgaggggcagtgctgagtcatccctgctgagtctgctgagtcatccctgttgaggggcaatgctgagtcatccctgctgagccatccctgctgaggggcagtgctgagtcatctctgcagagtcatccctgttgaggggcaatgctgagtcatccctgctgagccatccctgctgaggggcagtgctgagtcagtccctgctgaggggcagtgctgagtcatccctgcagtcatccctgttgaggggcagtgctgagtcatccctgctgagtcatccctgttgaggggtggtgctgagtcatccctgctgagtcatccctgctgaggggcagtactaagccatccctgagtcatgtctgttgagcggcagtgctgagtcatccttggtgaggggcagtgctgagtcatccttgctgtgtcatcgctgctaagggacagtgctgagtcatccctgctgagtcatccctgttgaggggcagtgctgagtcatccgct

SEQ ID NO: 261134 - DNA, 605 bp, Homo Sapiens
atgacatgttaatgggaccccgtcatcctataaatgtgctcagttcttttgttaaaacagatatactaatatcaaacaagatggcaattaagtaaaaactgttacaagagacaaaggacatctcatatacatcaccccaaaatcaaaggaaatgataattagggcaggaaaaagacaaaatcaatgaaactaggatttggttcttagaatgactaagaaaaaagacaactaaaatctgaaatgaaagaagtgacactactgattttagagaaatgggattgtaagagtattatgagcaactgtacaccaaacaactgggtaacctagacgaaatagcaaaatttctagaaacacaatctactgactgaatcatgcagaaatataaagtttcaatagaccataactagtatggggactggatcagtaatcaaaaatctcccaacaaaagtcctagaccagatggcttccctgatgagttttaccaaatatttaaacaagaatgcaatactcaaattctccccaaaaaattgaagaacagggaacacttcctaactcattccataagaccaataaccctgatgaacatttgatgcaaaaatcctcaa

SEQ ID NO: 261135 - DNA, 589 bp, Homo Sapiens
cattacacaggttttgttgtttggggtggggagggggcttttgttcccttttgacataatatagtcaatgcactaacaattatgtatattcaaacttgattattttaaattcgatcttcagctgtactgtaaatagggtactgcattgtagtctccatatctgtattacttttctgtaatatttaagagttgcttaaaagcatacaaaatgtactgttactaaaacagctaattatttctctctccccctttgacaggaaggggcttcagttgttcctccatggctagaaccataataaacaatgtacccgtaatttgtaacataaagtattgcaatatgttagtaacaatcttgcagccttcctttccaaagttcattttattttgatcagttcagtatattgcactaattattttaggtattttcattatatgaaagctaccatgtgtcagagatgatttaatctatttaagtgttggactgctaggagaacttgtacatttatgataatgcagaattaggaaaacggttcaccagtgtttagttttatattgaggtgctcaggttggaataaagtggtataaaaag

SEQ ID NO: 261136 - DNA, 607 bp, Homo Sapiens
agaggtaataaaattctttttgaaagagatatagttcaaattttcaagaagacactcttaacctattccattcatctttagctaacattattttatgtaacatatctactttcacaaagtctggtccattttttaaaatgatttacctaagaaaaaagaactctagcactaaagaaaatcacttaattgcatgcatagtcattccatcaaacctgacatttgttattttacaatactctccagggctttttcattccaaacaggttatgtgtcccaaaggcattctctatggcaaactatgaattccccattggttgtctagtagttataagcctgtaagttgaacataattaaaccatagcattgtttacctgccttctgttttcctatttaatgattgaaggcttttttcctttccaaattatattctgtaacttgctgctgcagcaatcatctatctgatttgctaacactataggttcacttgctacagtggacagtattacacaacactattgccaaagatattcctccctcttcctaagcccccatacttaatccattagtaaataatacatggattttatctcccaaaatatctctcaaa

SEQ ID NO: 261137 - DNA, 320 bp, Homo Sapiens
cattctgataagctctgtgaaagagaagatgtgcctggtgtgtgtaatgcggctggggtatgaaaacactgagaaggagatgaaggagtgtgtgtagcatgggggtgtgtacaacttaacacctggacttttactgggggagtgggaaagtgattctgtaaccaacattagaattactttggatttgtaatcagattggttctatgatttgtctttgactattcacagataattgtaaatgctggttttataagcccaagtcattttacatttgcttttccaaaatgtattaaattggaattttttaatcctttatatac

SEQ ID NO: 261138 - DNA, 400 bp, Homo Sapiens
ttggcccagctctttggcccagctccagcttttgcatgagcccatagggtgtggcctcaatggtgtacagggatcccagattgtgctcatccactggccagtgggttttgtcttggtctcacagggtctgagctcaggaggtgatacacagtggatgctcaggaaacactaagtgatgaataacacattgctggatttgagatcaccccctccccactccatgactgaggttgattaagaagcatcccacacccactagggctggcaaagctgtccaggcagtcgttggcttgggagcaatgggcaagggccagtgcataggaggctatggctacagcataggttgtctgaatgtcgggaagttttctctccaggaagccacgggctctctcgatgctgg

SEQ ID NO: 261139 - DNA, 584 bp, Homo Sapiens
taaaaaatgctatcatatgaataacctgagaatactatatgtgtatctttaaccttgaattgtaatccataattagccataattcaggaaaataacctcaatccctagacccagtgggtgggcattttttaaaagccctaagcaagatttaagtcctcctagtccacttaagcccaaaattcatgtgtccttattgcagcagccattcaatgccatttttaagttttcaactaaggttgagggcttcaaaccattgaaggcataaaaaccgctaaaagtattaacctggaagtggtaatgtctatctaaagtcctggcaatttaagcctattaatctgcatacatttttaaattatgagcttagttttaagggttgtatgatgttttcatctgagaagttctgaaacgtgatttctagtcaatatcttgcagagataaataatgcaaattagctgaaaatgctataaatttccaaaggcttaaatttcatttatggcaggttgtgtagaaaatccgcagaccacactgctcttgaacctaggagctacatgcatagagaatagccacttggattacatttctac

SEQ ID NO: 261140 - DNA, 602 bp, Homo Sapiens
acaatttaattactagttaatattattaatttcatttccatgattctcacatatatacttattccttgaaattatcatgcatgtacatttttatgaatactatcacatatcatgaatcaagaaataaaatttatatgtttgacttgtggaattagtcataacttttaattgatattcatttatatacaaaatatttattattatattgaatgaagaaccttttaattctcataacaatcttgcaaaagagatgatgccaattccattttgcagatttgggatgatattctgcgagatcatacaatgtgcccaaggtcacacaagctgcaaccagttagtagcagaattgagacattaacacaagctgtctaacgctagcaccagtgcactttccattttctttgctgtctccctttgtgagaatgaatatctattcttgtttttagctgtatttatatatgctttttcttcccagtgttatttcaatatttaataaccactaatgtgaacagcttttaattcaataacattagagaagcagagttaaatctgtctcctctgagagcctatacattttcacttttgagaaaagcagggttggg

SEQ ID NO: 261141 - DNA, 527 bp, Homo Sapiens
agatgaaagtaaaattctgctattaagaatactatctgggtaaagaaatgctttctgctttctttggtggaaatagataagagtgagcagacttatattcattcattgaaattcagataaattcataaccaaagttttattatatatatactgataaggtgaagagttcaacactaatctagtttgaactccatagatatttaaaaccagctattttaatttcttttagctttaagacaatgctgaaatatgtacttaattttctgaatactttgctctttatagttgccgtttcatgaatttgtgatattagacttattgtatgaggagttttgtatttttcttctttgaactttttgcttatagtgctttgggcacagaccttcccaaaccttagtatttctggatgaattttttgagagtgcacaacattggaaaggagcttttgcataatgccagcaatgtagctgaggaaatgggtctggaggaaaatgagatttgacacctgtaacagaggataaatatga

SEQ ID NO: 261142 - DNA, 1175 bp, Homo Sapiens
  misc_feature (1085)..(1125): n is a, c, g, or t
ttttcggataaggctgtgctttattacatgcataattacaaatctgtgctaagtgaaaatgtataaagcaatggcgacctgggtttaagccacacagagaaagggctggacaatccattaacccttctgccaatgtccattccattgcttttaacatgattgtttccatttcttacaatttgcatagcacttacttgtcaacttgctttgaattcattgtctcagtttatcctcacaacaaccctgtgaggtaggtagggcaattaacactatccccattttgcagatgggaacactgaggcacagagcggttaagatctcgaggctagttagtagaagcatagggaatagaaatcaggtctcctaactccccagtccacatcttcctttttagactatgttgttccgcatgactagggagtagaataaagcgagcagtgagccatagctctggttccaggctatgcctaggaacaggcgagaataaagctaagaaagcatggctaagggctagcaacactcagataaaaaactgctctggacagctcagcaccaaacttcctgcggaaacttgggctctattagctttggttgaagctactttctggatgcctagttactgctgatgtctagacattagcttcagctgaactttcaccaactctcaggcattaaaatgtcgagtcagacaggttttctttggctactgcagttggagccagccctacaaagagcttactacagagaaattcaaataagtggccatgggccggaacccagcccctctgatcttcctggcctcattggctcactcaacaggtggtagttttcccatagccagaaatgaatgggcagaggtaagaacaggaggctggccttggtcaaatgaagaagagtcacccacatgacatcactgtcccccttagctgacgtgagcaaggtactgactgggccacctcctttctggcctatacctggttagcagcatagcttcaaaagagtttaagagaacaaaatattaaacacatcattttaaaatccagaatggaataaattcttaatcatcacaaagtcccaaaggaccnnnnnnnnnnnnnnnnnnnnnnnnnnnnnnnnnnnnnnnnnctgagtgctaaaaagccaggaaaatgggagagaaaggaagaagaggggac

SEQ ID NO: 261143 - DNA, 486 bp, Homo Sapiens
  misc_feature (32)..(32): n is a, c, g, or t
  misc_feature (46)..(46): n is a, c, g, or t
  misc_feature (56)..(56): n is a, c, g, or t
  misc_feature (95)..(95): n is a, c, g, or t
ggcatagccctgaacccagagcctatggcctnactgcctcgccttnattccctacnccccctagtcatgcgggaaacaaccatagtcctaaaaanggaagatgtggaactggggaaggttagggagaccctgatttcctattccccctatgccttcctacctaacctagccctcgagatccttaacccgctctgtgccctcagtgttccccatcctgcaaaatggggatagtgttaattgcccctacctacctcacagggttgttgtgaggataaactgagacaatgaattcaaagcaagttgacaagtaagtgctatgcaaattgtaagaaatggaaacaatcatgttaaaagcaatggaatggacattggcagaagggttaatggattgtccagccctttctctgtgtggcttaaacccaggtcgccattgctttatacattttcacttagcacagatttgtaattatgcatgtaataaagcac

SEQ ID NO: 261144 - DNA, 609 bp, Homo Sapiens
tgggagatgtttggatcatgggtatggatctctcatgaacagatgaatgccccctctcagggtgagttctcactctattagctcctggaagagctggttcttaaaaagagcctgtcactgccctgctctctctcttgcttcctctctcatcatgtgttctctggacacagtggctcctcttccctttctaccagcattctgtggctctcactgaatgcagatgcccgatcttgaattttatagtcatgagtatagtgagccaaataaaacatttttacaaatcatccagactcagttattcctttatagaaacataaacctaaagtagactaagaccgacaacacctgtgtgtctgggaatacttccagcacatcgttcaagaaacagtggagattaacttaagtgactgaatctcaggtattcagtactcaatacatgtccttcacaggcaaatatttgacttaattcattagattacaggcaatgggagcccaaacaaaattaataagaaaaaagttggtattcaaagttctaattcttatttcagcaattgtaagataagcattcacctttacatattgggaggtcaggagacaatccaaagtggt

SEQ ID NO: 261145 - DNA, 881 bp, Homo Sapiens
ggcctgggtggcgattcggacgaggctgggggccatttttcattacatcgactccctgaacagacagaagagtccagcctcatagtggccgagccatccctgtccccgtcagcagtgtctgtgtgtctgcataaaccctcctgtcctggacgtgacttcatcctgaggagccacagcacaggccgtgctggcactttctgcacactggctctgggacttgcagaaggcctggtgctgccctggcatcagcctcttccagtcacatctggccagagggctgtctggacctgggccctgctcaatgccacctgtctgcctgggctccaagtgggcaggaccaggacagaaccacaggcacacactgagggggcagtgtggctccctgcctgtcccatccccatgccccgtccgcggggctgtggctgctgctgtgcatgtccctgcgatgggagtcttgtctcccagcctgtcagtttcctccccagggcagagctccccttcctgcaagagtctgggaggcggtgcaggctgtcctggctgctctggggaagccgagggacagccataacacccccgggacagtaggtctgggcggcaccactgggaactctggacttgagtgtgtttgcctcttccttgggtatgaatgtgtgagttcacccagaggcctgctctcctcacacattgtggggtttgggggtaatgatggagggaaacacctcctcaaaaacggcaggggcccacctttcagggagtctcccaacatgggcggaagcccgggattaactgctggaaactatttggggggtgggctggcttaaagaacgctttgtgcgggaggctcgcaaggccctggggaaaaaaatgggctccgcaacccc

SEQ ID NO: 261146 - DNA, 1307 bp, Homo Sapiens
tttacgaaggcgccgacaaaccaccataccaccgagcgctgggtggcgaattcggcacgaggcaaaagagtaagtaagagtctgaagtttttttaaaggagaaagcttattatggaaagtcactggtcctcccctccgcacaggaaaggtacccagtagataatgaaccaaattaagttccctccctccagccagaagttaaacatctgggatatgacgtcttcatgccaggggcactcatttcttagcagcctctctacatacatctctcaggtggtgccaagaggcacaccaggtagagcaaacttagcagctctgactaacaggctgcaaagtgcaagttcagattctgtggcagagatttggaaggcacccacctccagactgcttcccgtccaagttaccaggacagctcaaaaacatgctgacagaaaactcccatggctctaggaagaagtgacactaagccaacacctttctttatgtgggagcagaatcagctgatgaaggggtgggcagcagtgtggggcaggcaccccactggctgcagctagcccaccataggcacagcacatcccaccactctccttccagtcctgaccaggccccagccggcaacttctaccgagagccatggctcaacaccaaactggacagtagacatcatgatccctccagttagctctaattacagaccccaccagtacagcttgacagctcccggcaccatcccttccttcatctgacttattgaacttttacaaactaacagtcaccagcaccaaagaattaagtcaactaacctgccttgaattttagaccagcaatccatatggctttatctggtataaatcttctgcctttgatcatttctggaccgtaggaaaaaggaatagcaatccattaaaatcttgggcccagagaacactatttttacataacagtttcttaacctaaagtcaaggccttggactcttccctgagggttgcctgagattccttcatgctttctattcaggactaagtcccttactgcaaatgtgttagctctaacatctcccacaagctagagggaacttgcgagtatattaacaaggacacatctgacatcctgtgtttggttagaatatacagcacattgtgataacataaagtggattcatcttgtatcattataggcagaaggtatttggcaaatttttatgtattgttttatgtactgtacaagtaacttattcttgaataatgcaaattttgctataatgtacaaattgctatatgtgaattaaaaagttttcagaatcttg

SEQ ID NO: 261147 - DNA, 432 bp, Homo Sapiens
  misc_feature (19)..(19): n is a, c, g, or t
tctggacccgtaggaaaangggaatagccaatccattaaaatcttgggccagagaaccactatttttacataaccagtttcttaacctaaagtccaaggccttggactcttccctgagggttgcctgagattccttcatgctttctattcaggactaagtcccttactgcaaatgtgttagctctaacatctcccacaagctagaggaacttcgagtatattaacaaggacacatctgacatcctgtgtttggttagaatatacagcacattgtgataacataaagtggattcatcttgtatcattataggcagaaggtatttggcaaatttttatgtattgttttatgtactgtacaagtaacttattcttgaataatgcaaattttgctataatgtacaaattgctatatgtgaattaaaaagttttcag

SEQ ID NO: 261148 - DNA, 483 bp, Homo Sapiens
aatacccttttccctattttggctgttacccaaaacccattccaaagactattctaattcttccacctagaattcataatcaaactgctatataattggctttatgtaaagataaaaatttccaggctaattttcttccccttgatgccaacaggtagaatttattccaagagctgcccaaagactatcagtgggaagacaaaaagaaatgaactgaggaagaaagaatggaagacaatttaaagttgtttcattaattaccatatctataaaacaaacatagtatctgtcaatctctagaaaccacaagatgatggagaggtcataaaaactgtggtagtatgcttagaaactgttgatttaaaatatcttgtggttatgatatcagaggctaaattttgaaataaaatatttggcaaattcctccacattagtgtcaatgttcctatcatttcttaatataaaaatggtggagcggcggcc

SEQ ID NO: 261149 - DNA, 532 bp, Homo Sapiens
gccagcatgcggttgcacagcgcggcgtaggggttgagcagcaccagctggcgccgcgcgaaggggctgcccagccgtgccgccctctcgaagtccctgcgggcgtcgtcgtctcggccctgcagccgcgccaggagtccgcgctgcacaaagctctggcgggcggcgcggccccggccgccgctcagctccaccgcgcgttccagatcctccagggcgcctgccacgtctccctggagtcgccgggcctgggcacggttgttgtaggctgaagccctctcaggcagcaggcagatggcttggccaaacctctccagggctgtgctgaggtccccagcctctgctgccatcaccccctgcagctccagggccttggactgttccagctgtgcttgagggaaaacttcatcttcttctcgttcttccttttctgcttcctctccgaggtccaatccaacaatgtctccaaatggggtgtcagggttgaagatggcctgcagcactgcctgatcatttggagtccccatggtgc

SEQ ID NO: 261150 - DNA, 656 bp, Homo Sapiens
  misc_feature (574)..(574): n is a, c, g, or t
catactggtagctagaaaatcatatggtgagactgtatacaccttagaaatcagtaaacactatatgtcaatgctttatgtatttttttcagagtgctagttgtgaaatatttaccagcacaccactgggtaacacccttctttataattctagctcttgctaaagtcctataacaatatttccctcctcattccacatgcccaggaatagcagtgtcttcccgctattgctaggctcagatacctcaacatttctagtcattccagttaaccctaaccacgcctctatgagtagcgccttcattaaaatctttagcactttcggacccatagatacagaagggaccaccttcctatagcaggacactgatcctcttctaccccaggacaggaccaggaagtattatgttaggattgctctgaaatctcaagtccttggagttggaacttttagaggccttctcccctctcctggactcaccaacccaggcactgtgtctattgcaagctcctctaggctgaaattacctggagaagcatcacagcaggtactctctgttccaggaaacagaangtagcccagattgtttgagaactgctgacatccacagatcctcacagttaggttaaaaattgttgaaaaggcactacttgga

SEQ ID NO: 261151 - DNA, 1370 bp, Homo Sapiens
  misc_feature (173)..(173): n is a, c, g, or t
  misc_feature (532)..(532): n is a, c, g, or t
ttttcaagtaaacatctgcatttattttaaatcgcatcctcggtgtgtctgccccttttctgtccagctgtcaggtggcccaataacgccttggactccgtccccttgtcagtgccactggctgttcctggctctagttcccaggggagcctcaaactggggcctagcccagnaaagccaccggctaggcatcacatagcttctccagctcaaatagcccaaggttggcatgtctgccgacctccagggaataaccgcagtcaccgtgcccaggcaacacatcctcgtgctatgggggagaagcctctgctggggtgacccaccagccaaccctgggccaatttaatttaaataaaagcttcaaagtccaaacgggccacaggaaaccccggaatgtaacacctgttgtcccggccagctgtgtctcaggagctgactgcagacacctggtctgggtccctcaagcccagcagagcttgttatgtcccctaacacaaaggagggaaaatgtggctcctcgagaggaaggtgntgagcacttcaccccccaggtgtcaccgaagatgggcagtgacagcaccgtatggactggcggcccacaggccccaacctcacctggcccagggggtcaacagtcggtaaagcgggggccaggcgtgcccatggccgtccctgctccccaccctgaccatccgggcccaaacacacatggacagtaagaccaggtttcagaccaccaaagtcaagaggaaggaggaccttctcagtagcaccacgccacgcccctcgtgccatgattctgaaaaggtttcaccagagttgccactctggggagatgtgatctgtccctgtgactggtcacattgcctctgtagcggggcggcagcagcagcagggcaggactgctaggcgtcgtcactgcagtggtctggagcagtcagcagggggcgcctgtctcgggccatgctctcccactccttcttcaccatgacgtacagcctcattgctgcctgggcatcctgaattgaaacagtgctccgcctgctggacctggagcccaaggatcttctctgaaagtagtctcagagacggccttccactctttacttgactcttgaaaggtttatatttctgtgtgtcccgaatcttcttttttggatgatcaagaaatagtacctttaggtcattatgcagagcgtgccccactagaattctgcccttcagcatctctgccacttccttctgaacaacttcaagctcttctccctgcttgaggttctcaggccgaatcccactgaccgctgtcctatagtccgtcacgggctcagttggtttgacgtacttgtcataaacgcacttccctcgtccga

SEQ ID NO: 261152 - DNA, 593 bp, Homo Sapiens
ggctaaccagctcctgatggcctgagccaggcatcttgactggcacctggagagcccttaagtctgtcctggctgtggcccatgccgacagatatcgtggggctgacaggtccacggcaggcttgctttcttttataaaatggaagctctggtaccttcaatgtatgactcctgggagaatcaagggtccatctgagcctctgagtaaagatcccaatgttctacctctccctgtccctcttgtaggggatagggaggcagagagagccagcccctaccctcagagtatctggacctcagagaccatgttgtgccaggggtggtcccacctaaagatgctagcccctctccaggtgggcataaggagtaacagatggcaaaaccacaaactattttgatggactgtgctgcagtatcaccagaagacattagggggcagtaggcccccacacaaaaccttcaggcttgaattttaaaggggaggactttctgccaacttttcttgtatgccttgggaaagccagttgccctgaacccagcagacaccatggaatgtcctttgcacgcattaaatggtacagaactgaagcctc

SEQ ID NO: 261153 - DNA, 1006 bp, Homo Sapiens
  misc_feature (745)..(753): n is a, c, g, or t
  misc_feature (782)..(831): n is a, c, g, or t
  misc_feature (842)..(869): n is a, c, g, or t
  misc_feature (942)..(951): n is a, c, g, or t
aagggccagaggtcctgggatggaatactagagcccccaccttctcatgctttggaaacctgccagagcacttaccctgctggaagattaatgaagactccattctgtgtttcataacagtagcgttgttttctccatcaaaaacagagggtcacagaaatgtgctgaaaagatgtggtccagcaaggttctgtagtcccacctcagtgcctgtgggctgtgtttttcactgtaacaagcactttggtaaactagaaagaagaaaggattctcaggatgtgttcaaagctaagagagttttcattttaaaaagaaacatacatactcactccatggctttcctcatcctcctctcttttttcttcttggtgggaagctggatgcggggcatgcatcattctgtatggacaaatgtgttatgtccacccatactcttgtgacaactccccagcactgtcctgcaataccatgctggccttggtagtaaaactccttggtatctgtgagagtcctctttttctatgccctagactacttttaaccacttttctctggaatgactcccacatttgattgggtattgaaagggtaacagcaaaatgatgattgtggagatggatctattaggtctcatgttgggtccccctggttgaaaactatttttcaaaaaaggccccaacaatggggcctgtcccccttggctaagcccttcccattcctttaaagggcccaaatttaattccgnnnnnnnnntggaaggggcctttataaaaaaggttggnnnnnnnnnnnnnnnnnnnnnnnnnnnnnnnnnnnnnnnnnnnnnnnnnnaccccaaagtnnnnnnnnnnnnnnnnnnnnnnnnnnnnccccctccatccccggaatatctccgcgcgcccacttttaaaacaaccttccgaccctctttctaacaacaannnnnnnnnnagattttctttttaaaagagcgcggagaacttctgttttctcttattaaggggcc

SEQ ID NO: 261154 - DNA, 970 bp, Homo Sapiens
aagacatagaagaaaacagagctgtcccagacatgttgaaggacatggccacagaaacagatgcctctctcagcacgttgctcactgagaccaaaaagagctctggagagataacacataccctgtcctgcctcagcttatcagaagctgcttccatgtctggtgatgataaccttgaagatgactacttactctgaagtctgggcttcagtttgctcagccatctgctttgctgtgatttggcataggaattggtgcatggaggagaggagtgtatgataaaggatccatgcagtccttcctttattacacatatagtctggcttgctgtggaccaaattaatattctcctcccatcagactacaaaaaaattggactaccacgctacaagtgtgtctcccccattccacctccggatccctccccaaccctccagtgtttgaatactgctgtgttacttccaggccgttcaacgtcaggctcagtcccctctaccagtcatgattcacattactactaggctgtatcctttttgaggctgggaaacagtcaggctttcgtcattggaagtgattctgcagacttctgactcaccttatcaggtgactctggttaaggaaagcttttgagtggtgaactcaaagactccagttgaatcaggaggcaaaggcaaaaattagcataattatatttaaaagcctcaggaagtgggaagagaatactgcctcccagcctctattgctgatatgttattggagacaggcttttgaaactgctccagctatttctctgtaacctttagttaaaatataagtagaaaggagacaggaggctcaggaaattttctaaattgctagtaaaatatctatatgtatacacacatatacacccgtggagagagaggaagagtatacagtcctgtttgaatcatttggaggatttttgtgctgaataaagttctcaagaaaa

SEQ ID NO: 261155 - DNA, 1461 bp, Homo Sapiens
  misc_feature (645)..(705): n is a, c, g, or t
  misc_feature (747)..(765): n is a, c, g, or t
  misc_feature (928)..(964): n is a, c, g, or t
taaaattgcaatgacttaaataatgaggttgttaattagagtcagagcctgttcacatattgtgatcaggtagcaatgacatgtaccacttaaattattttatcgtcgatttggtagttcgattttaactactcaatgaaaacagccatgaatatcttttcttaaagagagttttgaaaatgatcacttacctaaaacttgaaagctatgaattagttatccatactctcatgacaattttgttggtgaacaacaaaaaagagatctatttctttaaaagatatttgtgcagaaactgcatgtaactctaagttttactcctaacatacatatgtttggggaagtattctattctatacttgccaatgtggagaacaaaatagttttttaagaatgaagaagtatatatatccattctgtattttacgtgcagcagaattatcttccgtaggatttttttgtgtattcacaaggtgatatttgtattgtaaaacaataatggtgaaggaaataaaaaggcttttaaaattttgtttgttttaaatctttgtaaagttattattccagagagtatactgggtatcttacagcttacctagatcataaattaatcaaaatgcactttttaataaaaactgatacttnnnnnnnnnnnnnnnnnnnnnnnnnnnnnnnnnnnnnnnnnnnnnnnnnnnnnnnnnnnnncacacctaacacacataaaaccacacaatccttccaattttnnnnnnnnnnnnnnnnnnnccttgtggggcccccccgccccccccaaaaaattttcctaaaaccttccttttggggggcggggcgccccacagtgtattggaaccttgggctcaatactggtttcccaaagaaaaaaccctgggcacataaaccaaggggttggggatattttaacaaattnnnnnnnnnnnnnnnnnnnnnnnnnnnnnnnnnnnnntaaacacattttcccaaatggggagttcttgcggaggccattcaccgggggtctctccacacacaagggcgcggcccccccagtggggactcctctatacttcccaaattatagccccccccgccgtcgtgcccccctctttttttaaaacatcgtgttctattacacccccctattaagactttttcttccgcccgcaattgggcgcatatccctctcacacaaaacgcggggatttgtataacaaccctcgaaacctcctccccaatggtgcaacatcacacacacctttctggctcgctcctgttgcgcaaaatataactattttctcccacccccgtgggaacgacacaaccgcgggggcggcacacaaaaaatattttgctcccccatcacttctgccgccccaccgctacttataatcacacaaaaaaccgggcgcggaataaacctaccccctccgcgtggcacatctggttggtttctaatacaacaaa

SEQ ID NO: 261156 - DNA, 1111 bp, Homo Sapiens
  misc_feature (215)..(224): n is a, c, g, or t
tttttcaattaaggtaatttattgtattcttccagatcaaacataaatgaacatcttgggaattgataccacaacacaatgttatacaccattttcacaaccaggcttgcattgaattcttttttaaagaacatagtaattttaaaaaatccaaatatttacatattaataaaacatatatacagaagattgagacattatccatagatatggannnnnnnnnngctaagaaagcctataaaaaggtttctgaataaagactgaacagtagtcacagtaagtaaacacaattttaatttacaaaatatgattttgctgttgcagttttgatacgtatttccagtgtgtagatccgttcatcgcacacatctttgggttgaacaagctccacccgtcctcaagtgctgaacaccccaagctgtggccccgccttggaaggcagtgcttctgaaggttcccagcagatctcttaacagaccacagttggaagttagcgtttctgccttgaccagcaacatactcatcctattttaacacggcgaaaggtcaccaattaatcttctcccttcccttgggtagtagctccttgtgggaggcagaggacggattttaaaacccatggtgcaaaaaacacaagagctgtggtttgcagtccttcatcagaccacttgagaaaacaaagggactgttgtcaggaacgggattacttactggccagaaatggaaaaaggctaacaaaaaggtatgatggaaataatttctccaaaccttccttgtagcccccgaaaagaagaaaaagaagccacacatatatgagatgtaacttgtctagtagttagattgattctacaagccacgcctaaagccagctttttgttaacagtaacagggatgcccttctcctcatctttgatgactggctggtctttggtggaacagggatttatcccagagggcctctcctatctctaggtttagcgtttcagtgtgatgtgacatgaataccttggacagggtagtcaggaaattcgggttctaggcagggccccagccacggaggggttaacgggctctgggcaaccgcttaccctcattcatcctcagtttcccg

SEQ ID NO: 261157 - DNA, 601 bp, Homo Sapiens
ttaaatgtattttattaagtagctcaaactcattatgagtactatttcttaagacatttaaggtagtatacatttttgctaaatggtgaaaaacaaattaactaatcatctaaatggcctccagattccatgtgtcctctttttcatgctttcactattgtcttccccaaattatctcctttcagcattcccataaatgcagctggcatgttttcaaatccttcaatgatatattccttgtactggattttaccctgatacaagtttttcgctaatgtattccagtgatggccttagcactccttcatggaatttatagacaagagtatttgcttgaaagtcagtcaattacaaagtagggaagctcctaagacccatttcagcaagtcaaaaaaagatttttggcgggcatctccttgccagcggtagacgacaaaagcttccatgcgaagctcctgatagataacaatctctgggggtgggcctgggggaagtgggccggttctgttatatgtagagatggctccacatatggcaatccttccaaatttcttcatctggccgataacagtgtttgaaaactctccacctacattatcaa

SEQ ID NO: 261158 - DNA, 513 bp, Homo Sapiens
cttgtggtgtttgtataccacttaaatgtattttattaagtagctcaaactcattatgagtactatttcttaagacatttaaggtagtatacatttttgctaaatggtgaaaaacaaattaactaatcatctaaatggcctccagattccatgtgtcctctttttcatgctttcactattgtcttccccaaattatctcctttcagcattcccataaatgcagctggcatgttttcaaatccttcaatgatatattccttgtactggattttaccctctaagacccatttcagcaagtccttcagagctttttggcgggcatctccttgccagcggtagacgacaaaagcttccatgcgaagctcctgatagataacaatctctgggggtgggcctgggggaagtgggccggttctgttatatgtagagatggctccacatatggcaatccttccaaatttcttcatctggccgataacagtgtttgaaaactctccacctacattatcaaaa

SEQ ID NO: 261159 - DNA, 1312 bp, Homo Sapiens
  misc_feature (348)..(356): n is a, c, g, or t
  misc_feature (577)..(604): n is a, c, g, or t
  misc_feature (929)..(966): n is a, c, g, or t
  misc_feature (1275)..(1275): n is a, c, g, or t
caaccccataaggaaagtaatcaaaaatgagagtagatggaaattcatctccttacctaaagggctcatgtacatttcagagaaagcaatttcccctagctatacttaatccccttatggtccttgtttattactataaacaagcaagttcactttatcatttactttttattgtgttgcttgaagtacctatgtaatgcaagtatgtactgtactaaaatacctatatttccaaataacatatgtggtgtagcccacagtctctgcagaagcatcatgagtaacctgtgcctttacactttacaatccgttattggttgctgttaaaagtatgataacagatgaagnnnnnnnnnctaagtatgaatacacttttccaaacacgcacatacacagcttacaatggaatcccaatggaaataagtgacaacatctgatgtagaatctataaaatgtagactctgcaataaaaagccaaaggcacgtaaaaatatattttaactttaaaaataacttagttacagtaatactttgcctgtgtcttaccaacatgtagctgacagtcaaaattttgcannnnnnnnnnnnnnnnnnnnnnnnnnnnagaactacaagaaaatccccaaaacccataaagttcaaatgtgaaaacagaaaagttttaacactggagaattcactatggtgagcctaagcaatatatagaaaagagtctacaaaaaggcttaggtgttaaataaattttgacttcctcttgctcagaaaatgtcggagtgctataaagttccgtgaagttccttaatgtgactcgctcagcccttcatagctagtgccaatcctggccaagccagatttcttgtgtgtctgcaaacaatatgtgagccgaacatcaccaatgcctcctgaaaatgggctctgactcacttccnnnnnnnnnnnnnnnnnnnnnnnnnnnnnnnnnnnnnnctaaattgtttttgcaaacagggcataacaggtaaaaaaatactttgtaagaatattattttagaaaacccaacacaaaactgcaaatacagctccggaagcccttctcttcaactgtggttagtttgtttttgtaccttttaccccaaaggaaaaaagttggcatcttgttacttatttttatccattacattcagcacctcatccaaaagtgagggcccaagatcaagctgcagggagaggagggaacctgtaaggtcagagagggactcctctgacttagtctttcccttgatgagctcgcatggngtggggatggtcaaacatgtcctcggctggccagtcg

SEQ ID NO: 261160 - DNA, 600 bp, Homo Sapiens
caaatggtgtccctccacttctgggagagtatttgtagctgttactacctgtaaaagtagtaagaagtgtcagaaaagaggtacttgtctttcaacactgtgggactgattccacacaacttaagcctccgatacaatcacttacaaaaaacaaataaggcctgacaacaaatcggaatgtttcaaacaaagaataagtaccacgctccctactttagagatcttccctttgaatagtgtgtctccatttgtaaagatgcacacagccccagatgtaatataacacagctccttattacaggggttctggcagactgcagtggaaatgagtcaattctgaaacgcccttcagagtgggagcagggaggagttctgtgcaggtgagcgtctggcccagcagccacaccagtgttaggacagggtcccctgaggccccgctgatggtggagggtcctcagaagggtctctccagcttttggaagtgcccacctgaccgtcctctcattactcctggctactctcctttgtggaggctccaggaaagcttgggagcacaaccaagaaatggttaatggaacaaaaaggagaattaatgaatca

SEQ ID NO: 261161 - DNA, 438 bp, Homo Sapiens
agggatcagtataagtgcttgcctttgtatgcgtttcactactgtggctgttgggtctcagcccatgttctatgatccaatcccaatcagcaatggccttgacctagaatactttgagagccaaagagaataaatactcatcccaagaaagttgccttctctagaggatgacaaactcatcccaatgaacacgttcatatcagcatttcaattttgtcttcacagtttttgaccagggaagctgctaaaataattaagctagcagcagccccacttttgccacattctgaccttggaatagtgaaattgtcttatgagagcttatcttatggtatttccagtggaaagacactcagcagaatttctgtgactgagacaacagtggtcacacctctctcagataaaagcagttaagatgcttgtccaactgcagtttgc

SEQ ID NO: 261162 - DNA, 549 bp, Homo Sapiens
cacaatttagaatgtgttagagaaatttaacaagtagaacaggtgatttctggttgatagactctatcttgcagcatattcatttcatgtatcagaccccaaagttgttgccttgttatttttttaatttctcacatttttgaaaaatagatgctatcctctatagtaaaatattgaatcactttatagtagacaatacatatgacatttaacaaatacttggtttgaaaaagtttggctttattcaacaattttagtttgcccactgattttcaaatgtctgtggggattgcttataactaagtaggaaagtgaagactgatttttacttaagaatgggatagagatgagttttatggtttttaaaagtattttcagttcattatttaaatgttgggttgttgatatggtcttgtttctgataaggaaataggagcaacttgttttaaaataactacactaaaagactttcttcatctccgtatagagaaatccagatttcaattaattcatttattgggtgctaacaaaattcagggttagagtaaa

SEQ ID NO: 261163 - DNA, 725 bp, Homo Sapiens
gggagtgggagggggaggtacctggaactgggagtgatgtcagctcccagctcggtgcctgcccggattcctgacatggtgtagtgcaggcagggtggggaaaggacggggaaggactcgtgtgctgcgagctggcggccgggccggagtgctggggctttgaactccgagaggaggtggaccagaacttttggaactagtgccggcggctctccaccccccagtataaaagaacgtgtggatcactttgctgagtacatccaagatttgaagaactgaaataaatcagctttaaacctgctttttaaaaatatctgggttggaatttgcccctgacaaataataaaatgatgagtgatgcaagtgacatgttggctgcagcgttggagcagatggatggtatcatagcaggttctaaggctctggaatattccaatgggatttttgattgccaatctcccacctctccattcatgggaagtttgcgagctctgcaccttgtggaagacctgcgtggattgttagagatgatggaaacagatgagaaagaaggcttgagatgccagatcccagattcaacagcagaaacacttgttgaatggcttcagagtcaaatgaaaaatggacacctaccaggggaacggagaatgtgttatcaagaaaaagcctggcccccgttttagaaaaaatgaataaaagaaatcccctctcggttctttcaaggt

SEQ ID NO: 261164 - DNA, 742 bp, Homo Sapiens
gggaaatcccggcccaactttccacaggcatcacaggcatcttccgcggattctagggtgggctgcccagccttctggtctgaggcgcagctccctctgcccaggtgctgtgcctattcaagtggccttcaggcagagcagcaagtggcccttagcgccccttcccataagcagctgtggtggcagtgagggaggttgggtagccctggactggtcccctcctcagatcacccttgcaaatctggcctcatcttgtattccaacccgacatccctaaaagtacctccacccgttccgggtctggaaggcgttggcaccacaagcactgtccctgtgggaggagcacaaccttcttcgggacaggatctgatggggtcttgggctaaaggaggtccctgctgtcctggagaaagtcctagaggttatcttcaggaatgactggtggccctgccccaacgtggaaaggtgggaaggaagccttctcccattagccccaatgagagaactcaacgtgccggagctgagtgggccttgcacgagacactggccccactttcaggcctggaggaagcatgcacacatggagacggcgcctgcctgtagatgtttggatcttcgagatctccccaggcatcttgtctcccacaggatcgtgtgtgtaggtggtgttgtgtggttttcctttgtgaaggagagagggaaactatttgtagcttgttttataaaaaattaaaaatgggta

SEQ ID NO: 261165 - DNA, 416 bp, Homo Sapiens
ctgggcccccttcccacaagggtccctccggaacccaagccccccactcccctgcctaggggtgaaagcattaccagagagatggagcccatcctatcccaagaagccttcacctcacccttcactgcctgctgttgcaactcggctgttcctggactctgatgtgtgtggagggatggggaatagaacattgactgtgttgattaccttcactattcggccagcctgaccttttaataactttgtaaaaagcatgtatgtatttatagtgttttagatttttctaacttttatatcttaaaagcagagcacctgtttaagcattgtacccctattgttaaagatttgtgtcctctcattccctctcttcctcttgtaagtgcccttctaataaacttttcatggaaaagcaaaaa

SEQ ID NO: 261166 - DNA, 2014 bp, Homo Sapiens
  misc_feature (515)..(524): n is a, c, g, or t
  misc_feature (1316)..(1324): n is a, c, g, or t
taaaggacagttgaaaagggcaagaggaaaccagggcagttctagaggagtgctggtgactggatagcagttttaagtggcgttcacctagtcaacacgaccgcgtgtgttgcccctgcctgggctccccgccatgacatcttcaccttgcagcttgtgctgagactgacccaagtgcagctagcactgggacacagatccttgtcttcagcaccttccaaggagccaacttttattccctttcctctctcccctccccacctcgcttcttcccaatttagtaacttagatgcttccagcacatacgtaggtagctaccccagccggtttggattacaggcctgtgctgggaacatcatctcagttggtccaccttcctggcaggctgtagacctgacattttgagacaagcctagagtcaggagcagggactttgactcttaggaagagcacacatgagggcaaagctgctggcagacgtctccattgtccttatgttgtctgtgttgtaattnnnnnnnnnnattgaacatggtgattattttttttaaaccatcggtaatatactgaagtgagctatagcacatatcatgtgcttagtttgtttatttttctccatctccccttggcttcctagagtttggacatattccaggctaaatgcttttactcaagactacagaaaggtttgaagtagtgtgtgcatggcatgcacgtatgtaagtaatctggggaagaagcaaagatctgtttcattcttagcctcaggcctcatgagggtctccacagggccggagctcaggttacaccactccttcgtccttacaggagatgtagggagaagaatctgcaggctgcttgtgggactgttcaccaagggggataccagcagcaagagagtgcacccgtttagccctggaccctgtttcttactgtgtgacttggctagagttgggagttcccccaaaataaacgtgtccccattttaccagaaccaaacctcaacacagcgaagctgtactgtctttgtgtggcaaagatgttcccttgtaggcccctttcaggtaaccgtcttcacaatgtattttcatcacagtttaaggagcatcagccgcttctcaagtgggtagggaaagcagaaaaacgtacgcaagaggacatggatccaaaatgatgatgaagcatctcccatggggaggtgatggtggggagatgatgggctaaacaggcaacttttcaaaaacacagctatcatagaaaagaaacttgcctcatgtaaactggattgagaaattctcagtgattctgcaatggannnnnnnnnaatgcagaagtaatgtatactctagtattcgggtgtttgtatatttatgtaataatttcttaaaaccattcagacagataactatttaattttttttaagaaagttggaaaggtctctcctcccaaggacagtggctggaagagttggggcacagcaagttctgaatgttggtggagggtgtagtggctttttggctcagcatccagaaacaccaaaccaggctggctaaacaagtggccgcgtgtaaaaacagacagctctgagtcaaatctgggcccttccacaagggtcctctgaaccaagccccactcccttgctaggggtgaaagcattacagagagatggagccatctatccaagaagccttcactcaccttcactgctgctgttgcaactcggctgttctggactctgatgtgtgtggagggatggggaatagaacattgactgtgttgattaccttcactattcggccagcctgaccttttaataactttgtaaaaagcatgtatgtatttatagtgttttagatttttctaacttttatatcttaaaagcagagcacctgtttaagcattgtacccctattgttaaagatttgtgtcctctcattccctctcttcctcttgtaagtgcccttctaataaacttttcatggaaaagctcctgtgccaggagctcagtctgaa

SEQ ID NO: 261167 - DNA, 541 bp, Homo Sapiens
atcaattttttgctaaacgactccgagaacaacagttgggctgtcaacattcaaagcagcagagagggaactttgcactattggggtatgatgtttgggtcagttgataaaaggaaaccttttcatgcctttagatgtgagcttccagtaggtaatgattatgtgtcctttcttgatggctgtaatgagaacttcaatcactgtagtctaagacctgatctatagatgacctagaatagccatgtactataatgtgatgattctaaatttgtacctatgtgacagacattttcaataatgtgaactgctgatttgatggagctactttaagatttgtaggtgaaagtgtaatactgttggttgaactatgctgaagagggaaagtgagcgattagttgagcccttgccgggccttttttccacctgccaattctacatgtattgttgtggttttattcattgtatgaaaattcctgtgattttttttaaatgtgcagtacacatcagcctcactgagctaataaagggaaacgaatgtttc

SEQ ID NO: 261168 - DNA, 1255 bp, Homo Sapiens
  misc_feature (27)..(27): n is a, c, g, or t
  misc_feature (35)..(35): n is a, c, g, or t
  misc_feature (1087)..(1089): n is a, c, g, or t
  misc_feature (1194)..(1196): n is a, c, g, or t
  misc_feature (1199)..(1199): n is a, c, g, or t
  misc_feature (1202)..(1202): n is a, c, g, or t
  misc_feature (1206)..(1206): n is a, c, g, or t
  misc_feature (1208)..(1208): n is a, c, g, or t
  misc_feature (1210)..(1210): n is a, c, g, or t
  misc_feature (1212)..(1212): n is a, c, g, or t
  misc_feature (1214)..(1214): n is a, c, g, or t
acaacataatgtcaaaacaaacacgcncgcggggncgccgctggcccgcggccggcgggccccgcctgtgtggcgaattcggcacgagggcttggttggcccttataaaacttgtgcccaaaagattgaggattagactttcccaggacttacctgtcctaggggagtaggcaagcacttccactagggagggggtgggggaaaggaatgacacatgacatacatggcatacacattaagcagttgatcatatgtctgactgggttccagtttcttgggaatgttggtccccttgttcaggcttgcatattttaaactaaaaatttcagtctattgtttttagtaacttcatttatagtcctccataacaagttagaaggatgtatctgctaccatttattcctataattttagaaagttggggcttgacattatactcatttagtgagagtagatgcaaaaaagtggaggggcaggagaacttctccagacacctcagataaagtccggagcccaaggctttatcttaaccatgtatggtaccccattcattcatcaagaaaaccctcaacagctgggcctgcatggagtgttatatttcaaggtttttcacaggggttacagtaggacagtccccaccccaatcaggcaccaggataaaagcagggacttaaacagcaccccggttcttcagcctgagccatcacatgctatcagtctcctaacctccccctgggccttaagacagggcttgggcagagaagataaatggtgggacaaaaaaatgagttacattgccacctgagaaacctcagaggggaggacccagccttagcctccctcctcccaagtgcaaaatgtgtaaacagagtaaacggaacagaaaagtgcagtctaagtggttttctctcctgcccctcccaccgcccctcccccgaccccctattatttggggataaagaatataaagacaaccctggcttttctattgccttgttgcttgctgaatataaggaatggggtggggcaggaaggggcttgcccttagccacagctctacggctgtgcatcactcaggtccacagtnnnctgccagtgtccctagagtttatcaggtgaattggtcaggggatcagtctccctcgagcctgacttacggctgggacagccccatctttctgtggattatgtggnnnccncanatanananangnatatatatataatttatataaatatttctctatgtaaaatt

SEQ ID NO: 261169 - DNA, 691 bp, Homo Sapiens
  misc_feature (319)..(319): n is a, c, g, or t
agaatagaagctacagagttcttttcttgggacctagactgggaggtgcaatgtcaggacctccaggtgaatggtaggatctgagttgaccctgcagttcggttatgcagtcaattatttctttttaagaggaggaggattcacttgggtgttgggatcaaatttggattctgtcccaggccttactgtaaaactaggggattgcctttccatatctgctgggggtggagacccttatgtgcagcactcaatcccactggaagcctaatgctgcagtcagaagcaatgcctggctggggcagtaggggaaaattccacnccccaattttgcctatgagcctaaaacctctttaaaaacggtcagttaactaaaaaataaaaatcaagtctttaggagagtagaaaacacaattaactaaaaagcagggacatctgaaagagacgtattaagttaacatttttaaaaatccaaaatgaaagtaaatggaataaatgtatcaggtaaaggacaagttgtaagcttggatttttaggtctagcaatacactgtttacaagagcatcacctaaaatgtgacaaaagatgttgaaaggatgaaaaaaggtatagtagacatacactaaccaaaaatgtagctctttgaatctcagaaaaaagtagattttaataaagtgtgaaagttgtcaatcaa

SEQ ID NO: 261170 - DNA, 1104 bp, Homo Sapiens
gggtgaacacaacttccggccccactgagcggtgtcctgagccgattacagctaggtagtggagcgccgctgcttacctgggtgcaggagacagccggagtcgctgggggagctccgcgccgccggacgcccgtgaccatgtggaggctgctggctcgcgctagtgcccgctcctgcggttgcccttgtcagattcctgggcactcctccccgccagtgctggcgtaaagacactgctcccagtaccaagttttgaagatgtttccattcctgaaaaacccaagcttagatttattgaaagggcaccacttgtgccaaaagtaagaagagaacctaaaaatttaagtgacatacggggaccttccactgaagctacggagtttacagaaggcaattttgcaatcttggcattgggtggtggctacctgcattggggccactttgaaatgatgcgcctgacaatcaaccgctctatggaccccaagaacatgtttgccatatggcgagtaccagcccctttcaagcccatcactcgcaaaagtgttgggcatcgcatggggggaggcaaaggtgctattgaccactacgtgacacctgtgaagctggccgccttgttgtagagatgggtgggcgttgtgaatttgaagaagtgcaaggtttccttgaccaggttgcccacaagttgcccttcgcagcaaaggctgtgagccgcgggactctagagaagatgcgaaaagatcaagaggaaagagaacgtaacaaccagaacccctggacatttgagcgaatagccactgccaacatgctgggcatacggaaagtactgagcccatatgacttgacccacaaggggaaatactggggcaagttctacatgcccaaacgtgtgtagtgagtgtaggagataactgtatataggctactgaaagaaggattctgcatttctattcccctcagcctacccactgaagtctttgggtagctcttaagccataactaaggagcagcatttgagtagatttctgaaaaacaatgttatttgttgatttaaaaagaaaactgtatttttattaaataaaatttaaacatcacttcataaaaacc

SEQ ID NO: 261171 - DNA, 1217 bp, Homo Sapiens
agaatagggacgtattttttaaaattgctaccaatcccaaggagcaaggagcatcgatgctttgacttttctgcagggcaggtgacttggcctagctggttttgggtggtgagtgcagtgagtgggccatgacacagtacacgccatgttcacctgtttcccaaaatgtttaggtttttccccttcagtaaatgtgactgtctctccccgttctgaagaaagccatacaacgacggtttctggtggcaatgggagcgtgttccaggcgggcccgcagcttcaggcactggctaacttagaagccaggagggggtctataggtgctgctctctcatcccgggatgtcagtgggctgcctgtttatgctcagtcaggagagcctaggaggctgacccaggcacaggtggcagcgtttcctggagagaatgctttggaacactcttcagaccaggacacctgggacagcctgaggagcccgggtttctgcagccctttgtcatctggtggtggagcagagtccctgccgcctggggggcctggacatgcagaggcaggacacctcggcaaggtttgtgacttccacctgaaccaccagcagcccagccccaccagcgtcctgcctacagaggtggcagcccctccgcttgagaaaattttgtctgtggatagcgtggcagtggactgtgcctacaggactgtgcccaagccagggcctcagcctggcccacatggatcactattgactgaagggtgtctcagaagcctttcgggggacttgaaccggttaccctgtgggatggaggtgcactctggccagagagaactggagagcgtggttgctgtccgcgaagccatggcttttgaaatttccaatgggagcccatgagttactgtctcagggacagaagcagatttttattcagacttccgatgggcttatcttgtcccctccaggtacaatagtgtctcaggaggaggacattgtcacagtgactgatgcagaggggcgtgcctgcggatgggcccgctagaaggagttcctctagaagctgtggagtcggtcgtcaccgcgagagccctcacagtgaagtggagtcagatcctagattcgtctgattttatccagagaaggtctatggcaagcaatgtatatttttctaatgtgaatattgcacagatgaaccttttatttataaagaataatgtctttctgcaaa

SEQ ID NO: 261172 - DNA, 790 bp, Homo Sapiens
  misc_feature (154)..(213): n is a, c, g, or t
gcagcagccaggtgaggttgctcacacttgcaatcccagcaacataggaagaccctgtctttacaaaaacaattttaaaaattagccaggcatgatagtgcatgcctgtggtcccagctactttggaagctgaagtgggaggactgcttgagcnnnnnnnnnnnnnnnnnnnnnnnnnnnnnnnnnnnnnnnnnnnnnnnnnnnnnnnnnnnngagtgagaacctgtctcaaaaagaaccaagaaacaaaacaaaatgtaaagaagtaaaactgttatccttccaactggaaagccaaataatgaaatacgcttagcccaaaccaggtgtctgaatctgcttacaagtcttttcaaactttttgtgttgaagaaccagaagaaagatataatgcagaagaaaaatgggtcaagtgagggaaattgctttccaactgagatttgagattgaataggaagtagctgaattaaatggaagaaagacagttatcatccattcatatgctgctcttacatgagttatcaaaggcagcttacgttctagcttaccccattaactaaagcattctagtttcaaggtgatacatttttttcagaactgtcttctcaccttttataatttagataaaaactagagtccctttaagtgggcttaattttttcagtaatgttaattttcaaatagtgctccaaggaaaatttgctgctatggcaggaaaaataaaggaatccgtgagatctctgcttgtctcccaggcacactgctgcctacactgcattctagatgccag

SEQ ID NO: 261173 - DNA, 498 bp, Homo Sapiens
ggttcaacatagcacaaacccttaggaaaaatgaaattaacatcactgatgtgtaatccagtaaaatctccctttttcgggtgtgtaatgtgggcatgtgcccatttctatgtgtgtgtctacgtgcagctcactaccaacagcctcatgtgcacttgacctgacagtgctcgctgagaactctcaccaggttggcgcctgaatgccttactctcagcagtcagaggcttgcttgctctgtgcagatttttaattttcttttttgccctaggctggttgggacctctacagcttcattctttcaccattaaatagtggcctttttcagtattttccctcttcccctttataaattatgctaaagccacaaagcacatttttggggatcatagaaggttggggttccagaaaggcatctgtgtgatggttccattgatgtgggatttccctacttgctgtattctcagtttctaataaaaagaaccaaatgaaatatga

SEQ ID NO: 261174 - DNA, 911 bp, Homo Sapiens
  misc_feature (862)..(862): n is a, c, g, or t
  misc_feature (865)..(865): n is a, c, g, or t
  misc_feature (872)..(872): n is a, c, g, or t
cagctaggaaaacgcagtgctcccaggataaaagatacaaaagttcttttttatttctttaataaagcccttcaaggtttactctcccatcttgcaaggcccacatcttgttcaaggaccaaacccacaggctttagcactgcctaatttacttcaccaatgaatgaaaaccataaaccaaagcttgctgcctaaccactccccaggtccagacgggacaaggaaatgctgagaggggaggggacccatggggcacactcatgagatgcaggagcaccagagttcacggaaatcaagccggctttggactggaggctcggaaagtcagtcccagatgtagtgggacagaaaggggtgacttcatcacaccctatagccctggactttcccctcctctgctccaggtatcgaaccaagagttccttttccaagatgccctgctggctcaggggtgcatgagcccgtgggtctggcctctggcacagtctacatgcttccacaacaacgacagcagtttgataacagatgttaccccacgacgtgggggcgggctcacactgtgcgcctcccccacactcttcccactgggtgtggtgctcaggacacctgcatttgtgggacgtatgcatgaggcaggagtagaagctgcctgctgcaggcaggcgactgctcacttcctcctgatcgtcccccaccccaagcagtccagtcaacaccagaagagatcatacctacagttaaaatttgcagtgtttctaaggggaagagaaatgtcacatagaaagtattacaaagaaggattaaatttatcagctgtccaaacactataagaccacatgctttatacagcggcaatgcagtnaanccgcttntccatggagcgggcagaattgggacaggcctcctccagt

SEQ ID NO: 261175 - DNA, 713 bp, Homo Sapiens
ttttacagcaattcaatggtatctgctatgcagtgcctactccaatgttgaaaacagggcaaagtgctgtaggacttaaaggttgcttgtgacaggtccagccaagaagacagtgaaactaactcacgcatcattcattccaaggacgcagcgttagttcactaggaggggtggggccacactcttctctgtgtgtgtgtgaagttaagtaatgttcacaatatttacaataagaaaaagaccttccactgcgcatgatgtaacttacagcaaaaaaaattattcatgcttcttttcatatcacatgatggtggcaagacgagagaacatgcttgtctaacactgcttggttaagggtaaattctctgaagacaaagcatcagcaactggatggaaggtcggatggcggagttcattttctttagtgtagctagtcaatcttcaggtaaatagccgagtccttttgcatgtgcagctatggcatttcggtgacagggcgtttctgtttcaaagtgtcaatgagggataagacccctcgttttacattggttgtgactcttctggttactgaatctgctggcggtggaggtggtcgaactttctgagaaggcggcctggctaccaagcacttctgatatcgtaaccatgcaagcggcctgcaccgcctcagacacgttaccagcattaggctcgcaccagaaaacgtggcactc

SEQ ID NO: 261176 - DNA, 437 bp, Homo Sapiens
  misc_feature (27)..(27): n is a, c, g, or t
ccggcaacaactttcccttgccagtgncccatcagtacgaatccctcggggacagtgaacaatgatgattccagatcttttggattccccaagtcccagtatagtgctgagcctcagctgtatggtaatgcccaccagtgaccatcccaacaatcaagatcaaagtagcagtcttcctgaagaatgtgtaccttcagatgaaagtactcctccgagtattaaaaaaatcatacatgtgctggagaaggtccagtatcttgaacaagaagtagaagaatttgtaggaaaaaagacagacaaagcatactggcttctggaagaaatgctaaccaaggaacttttggaactggattcagttgaaactgggggccaggactctgtacggcaggccagaaaagaggctgtttgtaagattcaggccatactggaaaaattag

SEQ ID NO: 261177 - DNA, 432 bp, Homo Sapiens
  misc_feature (329)..(329): n is a, c, g, or t
gaccacaagaagatgcgtgggcttctcctggtgcttatggaatgggtggccgttatccctggccttcatcagcgccctcagcaccacccggcaatctctacatgactgaaagtacttcaccatggcctagcagtggctctccccagtcacccccttcacccccagtccagcagcccaaggattcttcatacccctatagccaatcagatcaaagcatgaaccggcacaactttccttgcagtgtccatcagtacgaatcctcggggacagtgaacaatgatgattcagatcttttggattcccaagtccagtatagtgcttgagcctcnagcttgttatgggtaatgccaccagtgaaccatcccaacaatcaagattcaaagtaggcagtttttcctggaaggattgtgttacctttcagatggaaagtat

SEQ ID NO: 261178 - DNA, 1172 bp, Homo Sapiens
  misc_feature (20)..(20): n is a, c, g, or t
  misc_feature (80)..(80): n is a, c, g, or t
  misc_feature (142)..(142): n is a, c, g, or t
  misc_feature (168)..(168): n is a, c, g, or t
  misc_feature (177)..(177): n is a, c, g, or t
  misc_feature (392)..(392): n is a, c, g, or t
  misc_feature (597)..(730): n is a, c, g, or t
  misc_feature (743)..(756): n is a, c, g, or t
  misc_feature (865)..(875): n is a, c, g, or t
  misc_feature (912)..(952): n is a, c, g, or t
  misc_feature (982)..(991): n is a, c, g, or t
  misc_feature (1072)..(1080): n is a, c, g, or t
  misc_feature (1111)..(1120): n is a, c, g, or t
gattggggctggaatacccntgggaaagtgccccaggcaaagaccactcggattggagtccagttgaatattggtacccntcagtggagcccttccgggccttttcttcccacttcttgccagaattttccttcttggcaantccttcctttcctccctggcttgccntccaccatnatatttggaataagagatgggcccagaggataacaacttgtcctccttaaaaacctaagcctaaaaagaaccctagaacccttcaattgagcagttgtgaaaattgcctaatggtcccaaggccaagcaaagagtttcagaaaatgactgagaaggagcgataacccccagaatgcaaaatcaggggcatcattatccggtgcttgaacaaaggngccgctctacaactggtttttttaggacttgtgaggaacacagcaacggaaatccatccacaaaggatgcagtgccccaacttgtactgcgcctgaatagtcatgtgataatttactgaagaaatctagtgtactttaaatttttttcataaaagtttacattgtattgtaggttaacattaaatgttttatagcaaaaacttcnnnnnnnnnnnnnnnnnnnnnnnnnnnnnnnnnnnnnnnnnnnnnnnnnnnnnnnnnnnnnnnnnnnnnnnnnnnnnnnnnnnnnnnnnnnnnnnnnnnnnnnnnnnnnnnnnnnnnnnnnnnnnnnnnnnnnngattttggggcgnnnnnnnnnnnnnnaaaaattttttaaaacctttttttggggggcggggcccaaaagggaagggaaaggggccaaatttttttcaagagaaaccgggggaaaaaaaaggtgtggaattccccnnnnnnnnnnnccccccggggaacccagaggcttggaaaaaacccaannnnnnnnnnnnnnnnnnnnnnnnnnnnnnnnnnnnnnnnnccccccacgggcctccaaatataattgaannnnnnnnnnggggcccttttatgagaaaagggggggtgaaattttactaaaaagtttccgggcgcaaaagtggagaaccccttcccaaannnnnnnnnaagaaatacccgaaatccgccgcggggccgnnnnnnnnnnttggcgcctctccgaataaataacttttccccccaggggaaaaaaggggggc

SEQ ID NO: 261179 - DNA, 742 bp, Homo Sapiens
ggattttgatgagacctgcgagggagaagacactgagaagccagtgatctgcaagcatttgctcttgtttccacatcacctctgggatatttcagctgttgtttccaaatggcaaatcatcaactaaaagcacttgtttcaagttttgttctgcactcccacgactgaagttgtagattgagctgaataaccatgggaagtgaccaagcaaagacactcgattggagtcagttgaatatttgtaccctcagtggagcccttctggtcttttcttccacttctgcagaatttcctctagcaaatacttctttctccttgcttgcctccaccatgatatttgaataagagatggccagaggataacacttgtctcttaaaaactaagctaaaaagaacctagaaccttcaattgagcagttgtgaaaattgctaatggtgccaaggccaagcaaagagtttcagaaaatgactgagaaggagcgataacccccagaatgcaaaatcaggggcatcattatccggtgcttgaacaaggagctccgctctacaactggtttttttaggacttgtgaggaacacagcaacggaaatccatccacaaaggatgcagtgccccaacttgtactgcgcctgaatagtcatgtgataatttactgaagaaatctagtgtactttaaatttttttcataaaagtttacattgtattgtaggttaacattaaatgttttatagcaaaaacttc

SEQ ID NO: 261180 - DNA, 578 bp, Homo Sapiens
ccccaaaatgagaacagggaagaggagacccggcgacactaagtcaccaggtccaaggaacgtggctccctccccagggtcatctcacctagatctttctctcccaggtcatctcagctcaatctcaataaccctatgaaagccctggtctgttgtgttccttcaccgtacggtttctgtaataaaaagtgttaatccatgttaatctgtgtgaaaattattgcgtgcaacagtattttctcgtgtacctctttttcctatgtgaattgtccctcttttttatttataaatgtctacttttgtttttttaaagacaaaccaatgtgttgtagacctatatgtaacctattccttagtctcatattataggtatgttataagaatggatattttacttggctttagaatgttttacaagaaaactaattcttaactgatcaagtccttgctactaaaatgcttgtgtttttcatcatgacgtcgtgtgcttctaaattaatcattttcgttgtagaaaaatggagtgaatttatattagtcttggaaactaataatagcattgtaaatttatgagatga

SEQ ID NO: 261181 - DNA, 444 bp, Homo Sapiens
  misc_feature (75)..(83): n is a, c, g, or t
  misc_feature (421)..(421): n is a, c, g, or t
cacctcggagaccgaaaaaatgatcaaaaagaaactatgagtaacaagctataacatagttcaccacaatgggannnnnnnnntttttctcaccctacagttaatattacaattaaaataactatattcttctatattttttctgttaaaatcatctcataaatttacaatgctattattagtttccaagactaatataaattcactccatttttctacaacgaaaatgattaatttagaagcacacgacgtcatgatgaaaaacacaagcattttagtaggcaaggacttgatcagttaaggaattagttttcttgtaaaacattctaaagccaagtaaaatatccattcttataacatacctataatatggggactaaggaataggggtacatataggtctacaacacattgggtttgncctttaaaaaaaccaaagtagac

SEQ ID NO: 261182 - DNA, 333 bp, Homo Sapiens
  misc_feature (19)..(19): n is a, c, g, or t
  misc_feature (97)..(97): n is a, c, g, or t
  misc_feature (104)..(104): n is a, c, g, or t
  misc_feature (286)..(286): n is a, c, g, or t
taatttcacaaaccaaatnatataaaattaagtagtacacatttcaaacataataattgtgctctgtacaattcaaggcacacttggattttttgtnggttttntgtttgctttttaacaacggaaaacttatactccattcaagatttttccatcagaactttaatcatgtttatttgggttcacaggtgaaaatattgtgaaagttcatttacaccacaatgaaggataacatcttcagccccatttatttactaacaactttattgaggatataattcacatnccatatagttcacccgcttaaaatatacaactcaatggggtttttaa

SEQ ID NO: 261183 - DNA, 372 bp, Homo Sapiens
  misc_feature (240)..(267): n is a, c, g, or t
  misc_feature (349)..(349): n is a, c, g, or t
gtggtaatggtcacataacaatatattaaaaacccattgagttgtatattttaagtgggtgaattatatggtatgtgaattatatctcaataaagttgttagtaaataaatggggctgaagatgttatccttcattgtggtgtaaatgaactttcacaatattttcacctgtgaacccaaataaaatgattaaagttctgatggaaaaatcttgaatggagtataagttttccgttgttnnnnnnnnnnnnnnnnnnnnnnnnnnnntccaagtgtgccttgaattgtacagagcacaattattatgtttgaaatgtgtactacttaattttatataatttggtttgtnaattaaagacatcaataaaaatg

SEQ ID NO: 261184 - DNA, 733 bp, Homo Sapiens
  misc_feature (23)..(23): n is a, c, g, or t
  misc_feature (29)..(29): n is a, c, g, or t
  misc_feature (37)..(37): n is a, c, g, or t
  misc_feature (43)..(43): n is a, c, g, or t
  misc_feature (71)..(71): n is a, c, g, or t
  misc_feature (110)..(110): n is a, c, g, or t
  misc_feature (183)..(183): n is a, c, g, or t
  misc_feature (214)..(214): n is a, c, g, or t
  misc_feature (228)..(228): n is a, c, g, or t
  misc_feature (585)..(612): n is a, c, g, or t
atggcctatgaacctattgaatnggatanccccaaanccgggnataccccatacaatgggcctatattatncagcccataaaaagaaataaaaggccccaggcacagtgnctcacaccctgtaaaccccagcactttggggaggctgaggcaggaggattggtttgaggccagaaatttgagnccaccctgggcaacatagcaaaaccctgtcnctacaaaaaatacnttcccgtacattagtggttcctaaggctagaattgggggtgatgaatggggagtacaggattcatctaatgggtacaggatttctttatggttcatgaaaatggtctaaacttattgtggtaatggtcacataacaatatattaaaaaccattgagttgtatattttaagtgggtgaattatatggtatgtgaattatatcctcaataaagttgttagtaaataaatggggctgaagatgttatcccttcattgtggtgtaaatgaactttcacaatattttcacctgtgaacccaaataaaatgattaaagttctgatggaaaaatcttgaatggagtataagttttccgttgttnnnnnnnnnnnnnnnnnnnnnnnnnnnntccaagtgtgccttgaattgtacagagcacaattattatgtttgaaatgtgtactacttaattttatataatttggtttgtgaaattaaagacatcaataaaaatgattcctgaaagtagt

SEQ ID NO: 261185 - DNA, 1426 bp, Homo Sapiens
  misc_feature (46)..(51): n is a, c, g, or t
  misc_feature (53)..(53): n is a, c, g, or t
  misc_feature (212)..(212): n is a, c, g, or t
  misc_feature (440)..(440): n is a, c, g, or t
aaatgtaatccatgacaaattgcctctccaagaaagtgaagaagannnnnngnaggagaggtctggcctccaactaagtcttgaacaaggaactggtgaaaactcttttcgaagcctgacttggccaccttcgggttccccatctcatgctggtacaaccccacctgaaaatggactctcagagcacccctgtgaaacagaacagataaatncaaagagaaaagatacaaccagtgacaaagatgattcgctaggaagccaacaaacaaatgaacaatgtgctcaaaaggctgagccaacagagtcctgcgaacaaattgctgtccaagtgaataatcggggatgctggaagggagatgccctgcccgttgccctgtgatgaagaaagcccagaggcagagctacacaaccatggaatccaaattaattcctgttctgtngcgactggtggatataaaaaaggaaaagccattttctaattcaaaagttgagtgccaagcccaagcaagaactcatcataaccaggcatctgacataatagtcatcagcagtgaggactctgaaggatccactgacgttgatgagcccttagaagtcttcatctcagcaccgagaagtgagcctgtgatcaataatgacaaccctttagaatcaaatgatgaaaaggagggccaagaagccacttgctcacgacccagattgtaccagagcccatggatttcagaaaattatctacattcagagaaagttttaagaaaagagtgataggacaagaccacgacttttcagaatccagtgaggaggaggcgcccgcagaagcctcgagcggggcactgagaagcaagcatggtgagaaggctcctatgacttctagaagtacatctacttggagaatacccagcaggaagagacgtttcagcagtagtgacttttcagacctgagtaatggagaagagcttcaggaaacctgcagctcatccctaagaagagggtcaggtaaagaagattaggatgccaagacttggcctgcagaatgtcaggaatgtgaattaaaagctgctgtttccagacgctttttattctgagcaccttcactaccttgtatccagttcatctgggaactcctttttgcattttagaaaatggaaagaggcaggaaattatgataaactcatgtttaacagaaagagtttcactgactaaatgtatgtaattatattttgttgttgtagaagaaataaatagcaaatttgtggtattcttttttttaaacctgctctcattcctattaacactaagatcttagatttttatagtgataaatgggttgacatcattgtcatttgtaattgtaaagcctcaaaagacaactgttcctactatgtaattatagacagaaataaaaacttcagatcaaacactctca

SEQ ID NO: 261186 - DNA, 805 bp, Homo Sapiens
  misc_feature (521)..(521): n is a, c, g, or t
  misc_feature (581)..(581): n is a, c, g, or t
  misc_feature (726)..(727): n is a, c, g, or t
  misc_feature (784)..(784): n is a, c, g, or t
gcagtccacgaaggaagccgtctgccttcggttatgattttaggaacaagtccaacgagggtgttcaagcagttaatggttgtgctaactcttgtttctactgaagcgggttttgcaaagctgacatcccttaaagataacttgggctttcggaagcggcaaggaaatggcacccgtagttgccaggacaggtggtgtcctcggccaggactaagagccagctcatctttgtaacattcataatacgggaaactgaggaccaggtggctcggaaaagagatgagttccagcttttacctaacacagggttctctcgtcgtcccccaacccctccagctcggcttctttgtgtccagggttgtagatttttggatagaggtgtttctgattctagtgagtctgagaactggaaaagaccaaggaggggttgatgatttacaaggtccatagaaaaactttttgtgtggtcggaagttggccaagcagaggcccacagcctgatgctactgccccccaccccnccaaagatctgaattccctaaagatcaagagggttcagctggccttgggagatgtttgcntggagaatgacttcagttttctcctaaggcaatcagattgcaaccattagcattgtatcttatctgcaaatcagtttactccgaggttccccaaggatagttttattaggaccacaggactttactaaccactgaggtaacgacnngcttgtgcagcaattattttgaggtggaggtatttatgggacaagtttataattccnatttattaaagggactaacct

SEQ ID NO: 261187 - DNA, 572 bp, Homo Sapiens
caaggatcccagactagcttgggaagttttctttggaccatgtactccttatcagtaccgcctcatgggccctggaaaatgggatggagccagaaatgccatcctgacccagtgggacagaacattgaaacctttaaaaactcgaattgtccctgattcctccaagcctgcctccatgtcacattatttaaaagcctggggggcacctgtcctacttgcctctcttctacttatctgtaaatcttcacttttcttgaaattggtgagagataaactacaggacagaatgtccccttacctagtaagtctttggcgaggatgaacctgattgttacaagggttacaccaagtcatgctaattctatctccaagtatcttgtgcatccctcctctgctctccatcataactgctattagccaaattcaggcccagtcatctcctatctgaattattgtattatcttcttctttgttttcagtaccctctttcttgccaccctttccaatgcatcttctaccctgctacctcagtgattattctaaaataaatatatatgatatggtttaaaaaa

SEQ ID NO: 261188 - DNA, 770 bp, Homo Sapiens
tgcaatcttaactttgttaaactattattattgatcacattttgatttttttctctccacatcaggatagtttactgaagcacaatctcttatactagtgggacaaaagggagaaaaaggaagcaagataaatgggtatgtaggatgaagggttatttaaaatggaactaaagatagaaggaggactgtaggaagaaatggaataatttaaatgtgaggaaagatatctgtggtagacatgtccttccatgactaatttctaattgtaactcaacacacattgaggtatgggccctcctcagtgactttaactagctcagaaacgtactcccccaccaaccccacctcaccgccccctatcccggttctgggagagcattgttattaaggatgcatgacaggaatgttggcagaactggaaagtattaaaaaagcattatcagacagtcttgatattatacattttcagaaatatattaaaaataataaactaaaacccatgatttcaaaagctcactcccacccattttcccctaccttataccctgttgggccgcctccggcctctgaaaaacttttctaaaaccattctgtttgggccccgcggggcccaattagggaaagccgaacatgggtccataacccggttttcctaaggagaaaacccctggtcttggaattaaccgccttgggatttcctcccccatataaaaaatacgccccggtgcggggaaacccgaatgcggttcccgcaacaaattctccccaat

SEQ ID NO: 261189 - DNA, 763 bp, Homo Sapiens
  misc_feature (676)..(676): n is a, c, g, or t
  misc_feature (680)..(681): n is a, c, g, or t
ttttttccctcattcagtcagttattttcagtggtgaatacatgttgttagaagatgtcttgtatggtcttaatctttgttgtgtactatttttttatagtcttaagttataatgaaaaaacaaaaagtaggaaccaaacataaaaggtctagtaaagccaaaaattaatttcatattgattttaaagtgatctagctgagtttttacactgaaagcaaagattatagcaattgtagtccatggtatttattttcagtcaaaccaaagttacatataattctgcctctgcttatacgggatattaacactaacaatacactcccctcaaagacttgcacaggccaaattggtggaatgctggttttcctgacaaacccaaaccccaaaactatgataatgagttatgatgtagttgaaaatagcatagtcagatgtttgcattaaaacctagaaacttaacatgttgcttttcatgtgctgtgccaagtcttgataatactttttcccccaaccaagggacctcataacctgattatggttattgctttacaaacagttttgacagaaggtgggctggctagagcttaacatacgttcccgttccatgtgatggaaccggtcttgcaaactaagctcatcattgattctttgctgaagtcagcaaatagagttagngagnncccagtcatctatcacaccaaataaaaggacataacggctttcaaaagggttttcccacttacccaaaaggctttctgaaag

SEQ ID NO: 261190 - DNA, 978 bp, Homo Sapiens
  misc_feature (102)..(208): n is a, c, g, or t
catagtaataagcctgtcctcccttgactcctcagccgagctgactagcctagctaggaaagagccagtcaggctgacagttaataagaactcaagctcatnnnnnnnnnnnnnnnnnnnnnnnnnnnnnnnnnnnnnnnnnnnnnnnnnnnnnnnnnnnnnnnnnnnnnnnnnnnnnnnnnnnnnnnnnnnnnnnnnnnnnnnnnnncaacaataacaaaaattagcagggggtggtaggaggctgaggcaggaggatcacttgaacccaggagttcaaggttgcagtgagctatgatcacaccaccgcaatacagcctgtgcaacagcctgtacaaccctgtctccaaaaaaagaacccaagttttcaatatgcatagccacatataaactagaacttaagctgtaaggagtcctgtggaagcagaaactctaagtagaagccctagggtagagaagggcatagaaagtcaaacaagagagcaaaacaacctgaggcaagaggatgacaaagcaaaaatgcagagcaaacatgaacatgttggtgggcacacacacatagtttctccagatgccttgatttcctaatagctttctagttccccttactgagaggcatagctacataccagttcctttggtggatttccagtaaaatccctatctcccttactgctcacaatcccttgcagccttgcataattacagccccctcatttgatctggcatttgtgttcttcacaacaaaaactttactaaaaccagaggcaaaatataaaaatgtatctgtcatataatgaagaataaatctagtctttgtctcctgttcctggtacagagcttagagaggcttggaatttcctgattaatggaagtgtctttgttattcataagaagcccctttggactatatctgagtttatacttgggggtgactcaaggtaggccctcacatagtttgaaaggacgcagtgccat

SEQ ID NO: 261191 - DNA, 311 bp, Homo Sapiens
tctggttcaggtttgagcattgataaacactctttaaagagaaacattttaatgttttggaagtgcattccatagtaataagcctgtcctcccttgactcctcagccgagctgactagcctagctaggaaagagccagtcaggctgacagttaataagaactcaagctcatgcctgaaattcacagtgctttaggaggctgaggtgggaggatcacttgaggcccttaggtcaagaccaacctgggcaacatagccagaccccattctctaacaacaacaacaataacaaaaattaggcagggggtgggta

SEQ ID NO: 261192 - DNA, 899 bp, Homo Sapiens
aattatgactgcatagtttgtggaaacaaagatcttgaggaagatgagggaagccctcccctcttcatagtccccatctcttctcctttgtacctgtcaacaccagagttcagtgtttaaacagacaaaatataaagtattgagtaggtggttcatatgccgaatccacttggtaggaagaaaccaccagctttatagtgtgcctgatagattttaaacattcctgggcacccactcaagagtgctctttttatcaccttctggaaatccgcaaagttgcaggggcctctggagtgtctcttctctagagagaattggtgggacccccctcagtgcagtggccccaactagtggagggagagaggacttaagtcagatggactcaacagaaatgggtttccagaagaataatgaaaagttgtgggtaggaaaatgaatcatttggactcttcaatgaaatggagtgagcccaggagagctcagccaacagaggcactctgggaacctgttagtaaagccaggctggccaaatgccatttgattttgaacctcgtaggtccccactcaccctctgccaggagctaagtaaggcaggagagctgacttgggactcctggctcggccccaacagggagcccccttcccaccatccctcggcaagctcaccacctcatccttctgccaaggcagctttcctttcttttgtgtgttttctgtgttcttagcctccaccctcctcctgccacccttgtggactaggaccaggtcctgaccccagtcagaaaatgatgatatgtacagtggcacaccttaaccagtcactaattttcactgttgtgaaagtgatttgatttagaattaaacaaatggttttacattaacacaacacaaacacaaaa

SEQ ID NO: 261193 - DNA, 259 bp, Homo Sapiens
ctgaatctacacacagattttactgtgacttctgaagctgtatagactctgctgtggataaattggaattttttatgttgtctctctgtgttcttagcctccaccctcctcctgccacccttgtggacttaggaccaggtcctgaccccagtcagaaaatgatgatatgtacagtggcacaccttaaccagtcactaattttcactgttgtgaaagtgatttgatttagaattaaacaaatggttttacattactatga

SEQ ID NO: 261194 - DNA, 762 bp, Homo Sapiens
aagcagctctcgtatcgtaaaattggtccagggtggccaagacatcttgaaccacatctgccaccaaaggaagcaggttagcatctgagttccgcagcatgacttccaggacctttggggtatgaggatgcagagccagatgacgcagatttaaagagatcccattcactaaatagtctgaattttgattgatcaggtgctgcagggagtcgtagccacaagcacggcaaacgtccatcatggtgctggtagccacctgactaatgagtagggtttggtctccagccttctccagtactggataaagggctgacatcaagagcaaacagaagtcttttcctagtgcatatgcaaactggccaattccttccaactgaatgcatatttgccagatgttactgttcatggagcaaatagtgggacttggctttgagaaggctagaaaagatgtaacttggcaggtgtgttcaccagacgtgatggcttggaggcctgggtgctccatcatcagctcctctcccatttcctcagtttcaagacaggtaaccaaataccaattttcttgacttgtgtattcttcaagtatagatgtcacaatctctctcagttcttctgggtttgttttaatatgtttttcgtgaagatcctcaacctccagcccagcagcccctgtaaccagttcattaaggatcatggcagcttgcttccggtaaaccacagattgatggtaaagttccataaagtgatccacaagcaaataaa

SEQ ID NO: 261195 - DNA, 1085 bp, Homo Sapiens
cccggatatacccgatccgaaacaggtcgaggtcccgaggcctgggtggcgaattcggcacgaggctggagaccaaaccctactcattagtcaggtggctaccagcaccatgatggacgtttgccgtgcttgtggctacgactccctgcagcacctgatcaatcaaaattcagactatttagtgaatgggatctctttaaatctgcgtcatctggctctgcatcctcataccccaaaggtcctggaagtcatgctgcggaactcagatgctaacctgcttcctttggtggcagatgtggttcaagatgtcttggccaccctggaccaattttacgataagagagctgcttcctttgtcagcgttctgcatgctctgatggcagcattagcccagtggttcccagacacaggtaatcttgggcacctccaagagcaaagtttaggagaagagggaagtcatttgaaccaaagaccagcagctcttgagaagagcaccaccacagctgaagacatcgaacagtttttgctgaactacctcaaagagaaggatgtggcagatggaaatgtctcggattttgataatgaagaagaggaacagtcagtccctcccaaagtggatgagaatgacacccgtccagatgtggagccaccactgccattgcagatccaaatagccatggacgtgatggaacgctgcatccacttgttgtcagataaaaatctgcaaatccgcctgaaggtcttggatgtgctggatctgtgtgtggttgttcttcagtcccacaaaaaccagctgcttcccttggctcatcaggcctggccctcgctcgttcaccgactcacacgggaacgccccccctggcagtgcttaaagccttcaagggtttacgtaccctgggaaagcaagtgtgggtgactttccttcccaaccggtttctgcaaagatgtccctgcccaaagctggcctggcttccctagtcaacccaagccccccatcaattggcaagggctggaacccattttactcccacacggctgggccttccaaatttgccactggggctggtctttaaaggggcctgggg

SEQ ID NO: 261196 - DNA, 1223 bp, Homo Sapiens
tattcgtgttcataaagaacaaatgcaaagtggtggtagtcctcaggattaagtgtaaaggaaaatatgcaaggaaaaagtagcagtgtcagcccttttggactgcttatgatttctgccttagagctacaagacttggaacaagaaataacaatacctcaagaaaatgtctggagagatagcaccactgtccctcaaagacttcagccactgcacattaccaattcaagctgtgaagcatttacaactgtattatctgtgattgtctgcatttcctgtgtacatgcatgtgctggggatatgctttagtgtgtatggactagagtttaaatcctgtctttaactgggctgcaaggatggctatcaatcccaaattctgttttcaactcactggaataattaatctggtgttcctgatataaaacaggtgggttctattcacatgatggctgctctttaccatatatttcacctgaccctcattttgccatgggcctcaacctttatgtgtgctttttatggctctgaaaggactggctcccgtgtgtggaatatacaaggtataaacaccaccctcacatacccctgtaacttaaatgcttccatttaactcacttagattactttccccttagtggtaaacgggttgggggatgggtggtagtgcaaagaaggtagttgaaatattgccatagtaatatgggaactttttattccaaccctttaccctggcttttttttctctcaatatttgcctaaaattctaaaatgagttatagtaaaatcataaaactatggaaaacaactgaactttggtacacaaagttagttcgatgacatcttgttatttgagaacacgaaaaggtgtgtcattgcctcatgatttatccttagtcattcctaacgttcgagagaatcggtgttgaaggactatcctttagaaacctaggcttacttagtggtctctaccttcgttggaatagagtattccatgactttgggtacgtatggatggacttgaaagggaatatttcccacggggcagggaaagtctgtatacctcacaagaggctggagatgtcccagtggcgtcctcccagggagatagtaccatacactatgagtaatcgtagcaaatcgtgggaacattaggcaatacagaagatattgtggcgtgtgatagatgtattttttttctatataacacattatagagtatgttg

SEQ ID NO: 261197 - DNA, 436 bp, Homo Sapiens
  misc_feature (17)..(17): n is a, c, g, or t
  misc_feature (27)..(27): n is a, c, g, or t
  misc_feature (421)..(421): n is a, c, g, or t
acccggccttggccctncccaaagtgnaaaccttttcctttaaaatagagatggggatccttgcctgtattgcccccagacctggtcctcagactcccttgcccttaagcagtccctccccaccctcagccctccctaaagtgcctgggattacaagcgtgaagcattacatccaagtgaaacttcttgagatggttacataatgtctaaatctgctggtgtagaagttaataaagtgtagaactgaataaatattaaatattagatcaagtttctcatgtttatcttaacgtataacgatttatcttaaagcactgattttcacaaaataacatcagtgtgaaattggaaaagaagccaaatattttatttcacgtatctgggaaatgaggtgctttagttcaactggaattctgcccanaactaaaaaagcctt

SEQ ID NO: 261198 - DNA, 941 bp, Homo Sapiens
gcctgggtggcgaattcggcacgaggctgtgcccgggtcctagtggcggccgcagtgtcgcaggccggagggaagatggcggcgccctggtggcgagccgcgctgtgcgagtgtcggagatggcggggcttcagcacctcggccgtcctgggccgccggacacccccgctggggccgatgcccaacagtgacatcgacttgagcaacctggagcggctggagaagtaccggagcttcgaccgctaccggcgccgagcagagcaggaggcgcaggccccgcactggtggcggacctaccgagagtatttcggggagaagacagatcccaaagagaagattgatattgggctgcctccacccaaagtctcccggacccaacagctactggaacggaaacaggccatccaggagcttcgggccaatgtggaagaggagcgggctgcccgcctccgcacagccagtgtcccgctggatgccgtgcgggccgagtgggagaggacctgtggcccctaccacaagcagcgtctggctgagtattacggcctctaccgagacctgttccacggtgccacctttgtgccccgagtccccctgcacgtggcctacgctgtgggtgaggatgacctgatgcctgtgtactgtggcaatgaggtgactccaaccgaggctgcccaagcgccagaggtgacctatgaggcagaagagggctccttgtggacgttgctactcactagctttggatgggcacctgctggagccagatgctgagtacctccactgggctgctaaccaacatcccgggtaacccggtggctgaaggacaggtgacgtgtcctaacttccgccctttcctgacgaagggtccggatccaccgcttggacttcctgcatcttcaaccagaaccggccggatttgactctctgaagaggccattccctta

SEQ ID NO: 261199 - DNA, 274 bp, Homo Sapiens
gaaacaagccagagggaaactgtagccaagaagctttgcgcatgcgacagaggaacagacccccctcccctgctcaccacgagtcttccctccctgtactctcagatctgtcagctatagccagttccctgccaccacgactgtccacctaggacaactctggctgttgcttgtcataatttacacccataactgcttccagcccaccttctccgtcactggctttcatcttccccaacccagcaggaaagttggcctggcagggactcaaaac

SEQ ID NO: 261200 - DNA, 473 bp, Homo Sapiens
ggttcagcgtgggcgaggaaagcatggcgagcgtggccctgtaaaagctttctgaggcgggaggcgctcacttacctctgactgcctgggcgctgcgtgtagcatcttggcctacaggacagattttaggtgacacctggttatgacagtcagaaatttgagaagcttctcacaagtgatgcactttaaataatctgcatgccattgagacacctgcatgtctggtgtttgtggttcaagtgtctcgccgccggccttcggatgtaaacccactgataacggacagaaagagaatgcccacaagtgggtcttctgtggaagatgcagaaggaggaagttagtgcttacattttagtctttttctccctcaaaaaaataggttaagtttcagtgccagctagaaaatactgctttctgccatcgattgggggtggtttttgtcaaatatactgttgataaatatttatttttgt

SEQ ID NO: 261201 - DNA, 509 bp, Homo Sapiens
ggtagtaattgttgttttactagttatacatttagaatataaaggaggcatcagaaaacacactctctaaagccacttccttgtgcacagagtctgcacagggagagcacaggcatctccctggaaaagcacctgccaatgacgaatttcatggaagaacctaggcaagaaaggaagcctctttctgagacacagtctctgagaggtgagcctagctttgctcttcctacagggtatgcttgggccatacacaatgctcgccttactttaaagctattttgccacagtcctgttaaatagtgtggacgtccttttgcagtctggtgtgcatgccatatgatcaggacagcttttccactttactcggtttcctacaagcaagtaggaaatacagtgaatttaccctaaaatgtccaatctgtatttatgtaccttgtcagtgttttgctgttggttttctaaaacaatctgatcaataaatcttatccaaatcaatttggttcaagttc

SEQ ID NO: 261202 - DNA, 927 bp, Homo Sapiens
  misc_feature (778)..(778): n is a, c, g, or t
gagcgaggcctgggtggcgaattcggcacgaggccctgctgtcagacgtccatcctgagaaatcttgccggacttgttggctcaatatgacagcagcaaagacaagcacacaccagagaccagaatgaaagtcggggaagtccttatgcgaatcgtcagggcattaggagacatggtctcaaagtaccgagaacctttgatccataccttcctgaggggagtgagagatcctgatggtgctcacagggccagcagcttggccaaccttggggagctgtgccagaggctggactttctgctgggctccgtggtccatgaggtaacagcttgcctgattgctgtggccaaaacagatggtgaagttcaagtacgcagagctgccatacatgtggttgtgctgctgcttcggggactcagccagaaagctactgaggtgctgagcgccgtcctcaaggatctctaccacctgctgaagcacgtagtgtgtctggagcccgatgacgtggccaagctccatgcccagttggccctagaagagctggatgacatcatgaaaaacttcctgttccctccacagaagctggagaagaagatcatggtcctgccgtagacctggctccaaggacgtggaggaggcaggcagggccaggcacccagagccgtgcccaggtcttccagcaggtggccctgctgcctcttgagtgctggcagcatggctgaccctcggggtggttttatggtgcaggtcactgtggtcttcagggtcccttcccgaggncatgtgttcagaactcccgcgttcagcctggaggggtggtacagtgaaagagaagacacgttaccgaatctcattaatcaacatttttccccggccctctaagccttggaaaaaagggaggccttacctgggcgaaaaagctatttttt

SEQ ID NO: 261203 - DNA, 788 bp, Homo Sapiens
gggaacattttatcctacctgaaagtaaacgagtaattgtgaagcataagacactgaggctaatacaactctgtcttcatgtgttgactgcctggcacatagtattcattctcttccctttaacatagaagtgtccagctgcgtacagtctagtaaccagcaactgtaaacgaacctgtgcctctaacaagcgattctaaaccacctatgagtatttcttttagggctcacttaaatacatgtttgtatatactgtattctagccagaataattttagatctgatcaggtagtagctaaaattagaaaaaaacaaaatagatgcttaaagaatttgcatccatttttgagtctaaatcttttaaaatatactgagatccacatctagtgaaatgtcagtgtcaaaatattatagattatagctaaaatccagattaatactcatttggggttttttatagtggaacttcatagtaatacaaaaagcagattgtcttcctgtctccgctgctcccacagtaggtattgaaactggtaaaatcagttttttgatagtgtgtgtatataagaaaaaatagataccccccttcttttttctcagtcaacacattgattgaacactctggcaaagatgctgtggggggatgaagttggaaattcgaaagaaaaaacaagcgctggccctggccttgaaaagaaccgaagtcttttcccaattccctttctctaggaaagctgcccagacaggaggctgaaagaaaagggatggataaattcttgctcagcaac

SEQ ID NO: 261204 - DNA, 1725 bp, Homo Sapiens
  misc_feature (639)..(639): n is a, c, g, or t
  misc_feature (641)..(641): n is a, c, g, or t
  misc_feature (777)..(890): n is a, c, g, or t
ttttgtttatactggttatttatttatgacttgaaatagtttaaggagctaaacagccataaacggaaacgcctccttcatgcagcggcggtgctgggccccccgaggctgcacctggctctcggctgaggattgtcaccccaagtcttccagctggtggatctgggcccagcaaagactgttctcctcccgagggaaccttcttcccaggcctcccgccagactgcctgggtcctggcgcctggcggtcacctggtgcctactgtccgacaggatgcctcgatcctcgtgcgacccaccctgtgtatcctccctagactgagttctggcagctccccgaggcagccggggtaccctctagattcaaggatgcttgctctccacttttcaagtgggtcttgggtacgagaattccctcatctttctctactgtaaagtgattttgtttgcaggtaagaaaataatagatgactcaccacacctctacggctggggagatcaggcccagccccataaaggagaatctacgctggtcctcaggacgtgttaaagagatctgggcctcatgtagctcaccccggtcacgcatgaaggcaaaagcaggtcagaagctatactctgcattatctcaaaatcttntngagatggggtcttcctctgtgcccaggctgagtgatggtgccacttgggtctgtaacctccgctcccaggtcagtgattcttctgcctcgctcctgatagtgggattacggtgtgcccaccgtacccagctaattnnnnnnnnnnnnnnnnnnnnnnnnnnnnnnnnnnnnnnnnnnnnnnnnnnnnnnnnnnnnnnnnnnnnnnnnnnnnnnnnnnnnnnnnnnnnnnnnnnnnnnnnnnnnnnnnnnatgagccaccgcgcccggcccactctgccattgtctaagccacctctgaaagcaggttttaacaaaaggatgaggccagaactcttccagaaccatcacctttgggaacctgctgtgagagtgctgaggtaccagaagtgtgagaacgagggggcgtgctgggatctttctctctgactatacttagtttgaaatggtgcaggcttagtcttaagcctccaaaggcctggatttgagcagctttagaaatgcaggttctagggcttctcccagccttcagaagccaactaactctgcagatggggctaggactgtgggcttttagcagcccacaggtgatcctaacatatcaggccatggactcaggacctgcccggtgatgctgttgatttctcaaaggtcttccaaaactcaacagagccagaagtagccgcccgctcagcggcttcaggtgccagctctgttctgattcaccaggggtccgtcagtagtcattgccacccgcggggcacctccctggccacacgcctgttcccagcaagtgctgaaactcactagaccgtctgcctgtttcgaaatggggaaagccgtgcgtgcgcgttatttatttaagtgcgcctgtgtgcgcgggtgtgggagcacactttgcaaagccacagcgtttctggttttgggtgtacagtcttgtgtgcctggcgagaagaatattttctatttttttaagtcatttcatgtttctgtctggggaagagcaagttaagttaagtatcactagatgtgggttgagacacaagcactctgtgaaaccttgaaatagagaaataaaggcaagatg

SEQ ID NO: 261205 - DNA, 415 bp, Homo Sapiens
aggtgccccaagcctctgttcctgaatttccccccccagggtccccgtcaagtaagtcaattggcccaccccgcggggcaaccctccccctggcccacacgccctgttccccccagcaagtgcctgaaacctcacctagacccgtctgccctgtttccgaaatggggaaagccgtgcgtgcgcgttatttatttaaagtcgcctgtgtgcgcgggtgtgggagcacactttgcaaagccacagcgtttctggttttgggtgtacagtcttgtgtgcctggcgagaagaatattttctatttttttaagtcatttcatgtttctgtctggggaaggcaagttagttaagtatcactgatgtgggttgagaccaagactctgtgaaaccttgaaatgagaagtaaaggcacaagaaa

SEQ ID NO: 261206 - DNA, 730 bp, Homo Sapiens
  misc_feature (508)..(565): n is a, c, g, or t
  misc_feature (652)..(652): n is a, c, g, or t
  misc_feature (668)..(668): n is a, c, g, or t
  misc_feature (676)..(676): n is a, c, g, or t
  misc_feature (682)..(682): n is a, c, g, or t
  misc_feature (700)..(700): n is a, c, g, or t
  misc_feature (711)..(711): n is a, c, g, or t
tacacccgagaagcgaagaacctccctcattcccaggcccaagtcacccaacatgcaggacctgaagaggaggtttaagcaagccctctctgccaaagtgaggactgtcacctccgtctgaagcaggaggagcactcaagggggtttggtcttcccaggaagagggcctgaggttctcctagtgcaggaacgttgaatattggcaatgattcctggttccagaaagggctggagcagaagggccaagagggcctgtggaactgctacagaaaaggaagtgttgttctgagcagggggacaggattgatgaggcttgaaagagcccactgagccactctctgaatatgtgaaatgtactctgtgtcttttcctttagagtggggagggggcataatcgtttcggtttctgcattcaactaccttgtaaatggtggtccgttgcagtttcaccaaatgtattgatgtgatttacagtgggaatgaaagaacagattaagcattgataggnnnnnnnnnnnnnnnnnnnnnnnnnnnnnnnnnnnnnnnnnnnnnnnnnnnnnnnnnncccaagaggaaggaattgcttttctcttaccagtatggatttgtaactctgggaacactattcttacagaatgcctttctaacctgnaagggataccccaggntttctttnctttangtacaaggatggggaaantcccctaaccnttcaaaaacagggttggag

SEQ ID NO: 261207 - DNA, 604 bp, Homo Sapiens
  misc_feature (12)..(12): n is a, c, g, or t
  misc_feature (46)..(46): n is a, c, g, or t
  misc_feature (52)..(52): n is a, c, g, or t
  misc_feature (64)..(64): n is a, c, g, or t
  misc_feature (87)..(87): n is a, c, g, or t
  misc_feature (97)..(97): n is a, c, g, or t
  misc_feature (110)..(110): n is a, c, g, or t
  misc_feature (145)..(145): n is a, c, g, or t
  misc_feature (166)..(166): n is a, c, g, or t
  misc_feature (415)..(415): n is a, c, g, or t
  misc_feature (419)..(419): n is a, c, g, or t
gccaaatcccantacccccaagtttgatcttgaaagctaaatattntaaacntctaaaaggctntaccaagccaaactttggaaaantacagaattnaaccaatattccntccctttgaaatccccctgggaactttaaatcacngccaccaaggtttaggaaacnagtgaagggcttgcaacccaggctccccccaggtcactgggcacccaggcactagctaggtcagagtgcactgggaaagggatgggggcaggataatgtctacttttctggggcacgatatggacactgggactgaggtctgacactgaagaaggggacatttccaaggggaccagaaatacaggcagaccctaacttaacaccctgctcacgtacccaagctcatcggcccctaaattcaagcccaantagnccaccaccaccacccacccccgacttcctaatatcatggaatgcatttcaagactggaagagccctcaggggtcatctgagccaatcctgtcccctgctagaatctcctctatgcatcctggccatgcttttcatatttcccgtaacaagtaactctttgtctctcaataaatgcttcctgcatt

SEQ ID NO: 261208 - DNA, 851 bp, Homo Sapiens
  misc_feature (28)..(28): n is a, c, g, or t
accataccctctgtccaaacactgtaanagttgggaaagggaggaaggttggtctggggttctcagactctcagggtttccactgaaaggtccattccaatggttaaaccagcctacttatctcagaggatggataatgtggcgctgcgaagtggggaggaagctcctctgccatcattaactcgtttcatgaccagaagccatgggcacaggtgctcggctcttccaggcaggcttcccttgtagctacagctactcttccctcaggcgagcagataaggactgcaggacggcatggaagagacaggaacacgctcccctgggcacatcgaagagtcccggacaggcaaacaagccacatgggacaagggtcacagcagcagcctaggggccagtcctcgacctaaacttgttctttcacctacagacaaaagcttaatcaaggtgcaatcaatgccttgggatctttgcagcaatctggggggcatgtgtcacagaactctggatgtaaacagatacacaaacatcttcagactggatacatttttccaatacttgttgcgggtcggttttaaagcatgtaccctggaaagtgaaggtgcagcagataggtatactgatttgagtcactccacaccaggcagcttccttctccaagtggggcagaagcgccctgggggaacaactctccaagagtatccgcaggaggtgggcggcaccccatctcaccaaggtcctggccgggtcttcgctctgcccaaaccctcctccagcctgtgcaggcctcctcccacctcttagtgctttcagcgagaaaaggtgagtctcattacgcagaacttttgtttgct

SEQ ID NO: 261209 - DNA, 586 bp, Homo Sapiens
  misc_feature (102)..(151): n is a, c, g, or t
  misc_feature (425)..(476): n is a, c, g, or t
aaactgcctcatcccaagtggaccccggcagctgggggaagccaggcaagatctgggaaggctgtgtgtgggtgttttttctacagatctcactcctcgccnnnnnnnnnnnnnnnnnnnnnnnnnnnnnnnnnnnnnnnnnnnnnnnnnnaaaaaaattcttgctgtgttggaactagcgagttggtggagtctctgaagcctcatcagtcaccgggactgtcaggaatagtggtttaagaggaagctcggcctggggcactataccctgttcatccagttccctgcctcggagataaagattccagctacatgggcaaacgcctggatcagccacaaatgtacccccagtacacttactactatcctcattatctccaaaccaagcagtcctatgcaccagctccccgaccccatggctcctnnnnnnnnnnnnnnnnnnnnnnnnnnnnnnnnnnnnnnnnnnnnnnnnnnnnggggaacagttgagtaaaaccaacctgtacattcgaggcctcccaccaggcaccattgaccaggacctaatcaagctgtgccaaccgtatggaacaacatcgtatctaca

SEQ ID NO: 261210 - DNA, 403 bp, Homo Sapiens
  misc_feature (113)..(161): n is a, c, g, or t
ttagtcccccagccgagcttcctcttaaaccactattcctgacagtcccggtgactgatgaggcttcagagactccaccactcgctagttccaacacagcaagaatttttttnnnnnnnnnnnnnnnnnnnnnnnnnnnnnnnnnnnnnnnnnnnnnnnnngggcggaggagtgagatctgtagaaaaaacacccacacacagccttcccagatcttgcctggcttcccccagctgccggggtccacttgggatgaggcagtttgttctctaacccaggctgtctgtagtgatgtcaattgccagcgttcgtaaagggggaaaaaaaatcaaagtccttttagcacaactccgaatccttgcagatcagcttcctgtctcttggttgtctctttccccacctt

SEQ ID NO: 261211 - DNA, 1546 bp, Homo Sapiens
  misc_feature (919)..(964): n is a, c, g, or t
cctcatttacacgtggctgagaaggagacactactggcctgggtgacctccaaattcgagctctatacctgcctcagccctctggtgaccaaggcaggtgcaatcttggtagtgaccaaactcctgcgctgggtgaagaaagaggaggaccggctcttcattcgttacccacccaagtactccacaccaccagccacctctacggaccaagctgcccataatggcttgttcactggactctgatagttggagctcccagaccaggcagtgctgggagcaaccacctttgttttttaccttctgtctaccctggaaatgtgtgtgggggtgtgtctgtggccagtcattgtctccctaagcaatggggcaaggtctgagggcccaccgatgagagagatggtggcagccgccaggcgagcaggctgctttccctgcccagtcatgcacctccccctctggggaaatccttaggcctccctctcccttccctctgtctcatctcctccacttggatgatgctctagcctctgtcagggactgtcccctccaaacttgcttccgtggtctgcctcctagttgaatctcagccctgagtgtccagatctggccaaggtgtctagggtggcccacgggggtgctggaattggcacttcagggccaggctatgcttgggactggcctgagggtattttaaagaaaaaaactacataaaaggcctaaaagtaagacccacaaggatattcctttgcccttcttgtacttttttcatctttaccctgccagaaatgacccgccctcaatgctggctgctgctaacattaatgagaaggtggccttcagtgtccacctgtggaacccaggacacagcacctgactgcacacagtggctgaaatccagcatttttacataggagatgcnnnnnnnnnnnnnnnnnnnnnnnnnnnnnnnnnnnnnnnnnnnnnngtaaccctctctcatgaactctttgatgaggatttgtaaacgaaaacagactcgaactattgtgtaccaccacatagcacatgcacgtctgtcccagactttgacaacctgcacaagacaagcagcctaaagcaggagagacctccctagggttttgtgtgtgtgcacactaccctcactccccaactggccattaccctagttctgcccttgtttgtggagttacagcctcaaggttgtagcatgtgtgctggcaatcaggggccgcagtgtgttctgcgcctgcccagagctgactcctgatttaaccgctggcgtaaccggcgggttgcacgcatgcgtgctgaaaaacctttcaccctcacgtggttttcttttttaaacagtcatcaagcgaggttcccgcgcaggccccgcgtttggaaaatgggggggaaacctgaaacccttctaatggggaggccccccaaacctgcctgaggaggtttaaaggtattgaggggcaaagtgggcttgcactcctttcctctcccaaacaggggcaaaaaaggagggggaggaattcccccccaataacaataa

SEQ ID NO: 261212 - DNA, 882 bp, Homo Sapiens
  misc_feature (226)..(271): n is a, c, g, or t
ggccggaattagggatatgtcgaacccacgcgttcgccataaggatatcctttgcccttcttgtactttcttcagtcttcaccctgccagatatgacccgtcctcaatgctggctgctgctaacattaatgagaaggtggccttcagtgtccacctgtggaacccaggacacagcaactgactgcacacagtggctgaaatccagcatttttacataggagatgcnnnnnnnnnnnnnnnnnnnnnnnnnnnnnnnnnnnnnnnnnnnnnngtaaccctctctcatgaactctttgatgaggatttgtaaacgaaaacagactcgaactattgtgtaccaccacatagcacatgcacgtctgtcccagactttgacaacctgcacaagacaagcagcctaaagcaggagagacctccctagggttttgtgtgtgtgcacacttaccctcactccccaactggccattaccctagttctgcccttgtttgtggagttacagcctcaaggttgtagcatgtgtgctggcaatcagggccgcagtgtgttctgcgcctgcccagagctgactcctgatttaaccgctggcgtaaccgcgggttgcacgcatgcgtgctgaaaagcctttcaccctcacgtggtttcttttttaaccagtcatcaagcgaggctcgcgcgcaggccccgcgttggaaaatggcggggaagctgaaacctctgaatgtggaggcgccagaagctgctgaggaggctgaaggtagtgagggcaagtgggctgcactcctttctctccaaccagggcagaaaggagggaggattcgtcccattacaataatgaaataatgatattctaatttttttaaataaaatgttaagccttaaaa

SEQ ID NO: 261213 - DNA, 858 bp, Homo Sapiens
  misc_feature (650)..(663): n is a, c, g, or t
  misc_feature (716)..(716): n is a, c, g, or t
ggggggtcggagctcggtcctgctggaggccacgggtgccacacactcggtcccgacatgatggcgagcatgcgagtggtgaaggagctggaggatcttcagaagaagcctcccccatacctgcggaacctgtccagcgatgatgccaatgtcctggtgtggcacgctctcctcctacccgaccaacctccctaccacctgaaagccttcaacctgcgcatcagcttcccgccggagtatccgttcaagcctcccatgatcaaattcacaaccaagatctaccaccccaacgtggacgagaacggacagatttgcctgcccatcatcagcagtgagaactggaagccttgcaccaagacttgccaagtcctggaggccctcaatgtgctggtgaatagaccgaatatcagggagcccctgcggatggacctcgctgacctgctgacacagaatccggagctgttcagaaagaatgccgaagagttcaccctccgattcggagtggaccggccctcctaactcatgttctgaccctctgtgcactggatcctcggcatagcggacggacacacctcatggactgaggccagagccccctgtggcccattccccattcatttttcccttcttaggttgttagtcattaattnnnnnnnnnnnnnngtggaaggaaaggagctatgagtgtgtgtgttgtgtatggactcctcccaggntcactggccacaggtgcacccttcccacaccttttacattccccagagcccagggaagtttaggtttgcagttacagggccagttcttcacgctctccatctttaaagagacaagtcccccttggcaaggcctgcttggcac

SEQ ID NO: 261214 - DNA, 607 bp, Homo Sapiens
ggagcggcgccgcgccaccatcaaagcctggcgctccccacgcaccatgcgcgtcctccaggcacctcgcccacggcctcgcaccttcttctcctggcttgccagccagaggcgctgaggtgtgctgggtgcactggagccaccgggaccccttgaggacatcgccaggctctgtggctttttcccgagcgggagaggtggagatgcttatagcagttacgccttaggaaggggacaaccaggccccgccacacgctcacacacaaacctgtcacgcagctgtgatgcttggcacggggtggccagtgcagatggacccaacgccccctcggcctcctgggcaacttggggtacacaggatactgggggtgccgctcctcactcaaccccaggctaggggtacacctgacccagctgcctcggcccggggcaccttcggctggtcctgtggggccctggacggtggcccagtggtggcaggggctgctcctggctgtggttgtgcgcccggggcttgggagcggccggtcacgctgctgtgggcccgagtgtgttgcatgtccacgcaccacccgttcagggccctgaataaacagttggcaacagc

SEQ ID NO: 261215 - DNA, 895 bp, Homo Sapiens
ccttgatgttaaagagaggttaatgagttgcccagttgacatgaaagaattttccctggagttcttgggtcagggtgaatcaatgtggcacaaaggggaaaaaacccagccaagtgattgttttaagtgacttactgtttctacatagttagagtaataaaaacagaattgactagttgtatgcgtgaccttaggtacatagttctcagagggagatgttaatactaaaaaaattccttgaaaatcatacctcaaaactgccaactttgggggtagtggggtgcagctggggcaaggagactagagaagagtaaagcagaattttactgttcccatttgccaggccaaaatagcaaattgatttctcatcatatttgcatttactcaaattgactaattgtatttttacagtattttggaaacttgttcattagcagttagatactgaatttagcttcagacataggtggacctagaatataatcaaaactgccttaatttactaaggctttgtaacagaagaacgtctcttgtgactgttaaggtctaaattgctggagtgagcagacaaggacaaattaatgtatgcagtgggtgttaaatgttgacctaaagaaagaataggtataaataggtgcatatttaagttttcttcctcagatgtttaaaatacactgaacaagtctcaagaacagagttcatttcccaaagtgtcaaattatccaagtcagatctagtaattaaccctagcccaaaagggtgctatataaaacaatttaaactcattcagtattctgaattgttgctttacttacaggagagcaacttctagtcacagagttgagtctagctttccttcatcctgtgatctttccatgagatgaggttttggaaa

SEQ ID NO: 261216 - DNA, 456 bp, Homo Sapiens
  misc_feature (35)..(35): n is a, c, g, or t
  misc_feature (66)..(66): n is a, c, g, or t
  misc_feature (78)..(78): n is a, c, g, or t
  misc_feature (98)..(98): n is a, c, g, or t
  misc_feature (117)..(117): n is a, c, g, or t
  misc_feature (163)..(163): n is a, c, g, or t
  misc_feature (219)..(219): n is a, c, g, or t
attaacaaaacctgaaacagggtgtgggtgtggancattggaaagacataacaaaggtacatttantcctgttttaanaagttgccaatgtctttagnatggaggtttaacatgttntatttgtatcttaatctcaagacagtatttctacggtgaaggtttntccctttctcaccttacaaaaacggagaaaaaagcaaggttttgaaggaagatgcnacacacagtactttaaagttactcctcagaagcattttccctaacgtggatactatgattatgaagaggaggagagttctcactccagtttttctcttcttttttattgagacagggtctttctctgttgcccagggtgaagtggcacaatcatggctcaacacaaataaatgataaatgttcaatgtgatggatatgctaattgttctgatctgatcattatatatgtatcaaaac

SEQ ID NO: 261217 - DNA, 906 bp, Homo Sapiens
gggaccgccccttccgccgtcgcccagcgagcccagctccggtcccagccccggccgtcccggcgtcgcttcggagcgcggcggcagctgactgcgccttcacgatccgctgggacccgcgagccccgccgccgttatgaacatccgcaatgcgaggccagaggacctaatgaacatgcagcactgcaacctcctctgcctgcccgagaactaccagatgaaatactacttctaccatggcctttcctggccccagctctcttacattgctgaggacgagaatgggaagattgtggggtatgtcctggccaaaatggaagaggacccagatgatgtgccccatggacatatcacctcattggctgtgaagcgttcccaccggcgcctcggtctggctcagaaactgatggaccaggcctctcgagccatgatagagaacttcaatgccaaatatgtctccctgcatgtcaggaagagtaaccgggccgccctgcacctctattccaacaccctcaactttcagatcagtgaagtggagcccaaatactatgcagatggggaggacgcctatgccatgaagcgggacctcactcagatggccgacgagctgaggcggcacctggagctgaaagagaagggcaggcacgtggtgctgggtgccatcgagaacaaggtggagagcaaaggcaattcacctccgagctcaggagaggcctgtcgcgaggagaagggcctggctgccgaggatagtggtggggacagcaaggacctcagcgaggtcagcgagaccacagagagcacagatgtcaaggacagctcagaggcctccgactcagcctcctagagcctgccccatcccctcctcaccccacgagctttcacaataaattcgctccgtggcaaaaa

SEQ ID NO: 261218 - DNA, 1043 bp, Homo Sapiens
  misc_feature (935)..(935): n is a, c, g, or t
gtaccggcccggaattcccgggatatcgtcgacccacgcgtccgcgccagcggcggccaacatcaccgccactgccacccctcccagactgtggacgggaggatggagtcgatggccgtcgctaccgacggcggggagaggccgggggtcccagcgggctcaggtctgtcggcttcccagcgtcgggcggagctgcgtcggagaaagctgctcatgaactcggaacagcgcatcaaccggatcatgggctttcacaggcccgggagcggcgcggaagaagaaagtcaaacaaaatcaaagcagcaggacagtgataaactgaactccctcagcgttccttccgtttcaaagcgagtagtgctgggtgattcagtcagtacaggaacaactgaccagcagggtggtgtggccgaggtaaaggggacccaactgggagacaaattggactcgttcattaaaccacctgagtgcagtagtgatgtcaaccttgagctccggcagcggaacagaggggacctgacagcggactcggtccagaggggttcccgccatggcctagagcagtacctttccagattcgaagaagcaatgaagctaaggaaacagctgattagtgaaaaacccagtcaagaggatggaaatacaacagaagaatttgactcttttcgaatatttagattggtgggatgtgctcttcttgctcttggagtttcagagcttttgtttgcaaatacttgtccatatttgctccatttcttactttacaacttgcgtacatgggattatacaaatattttcccccagagtgaaaagaagataaagaacaccgtactaacagctgcacttctattgtcggaattccctgccgaagtgataaatcgaatcatggatacctatcgcaaaaatgggcgaaagtcttcacagaatctcggggncaacttttttcactttttatccttttggcatggaactggcttggattatggggggctctgaaataaccatgaaggcctgtaaaaaccgggaaagggagaagctttacc

SEQ ID NO: 261219 - DNA, 707 bp, Homo Sapiens
  misc_feature (32)..(32): n is a, c, g, or t
  misc_feature (64)..(64): n is a, c, g, or t
  misc_feature (102)..(102): n is a, c, g, or t
  misc_feature (127)..(127): n is a, c, g, or t
cccccttaggactagcacaggcacctaagggnggacccctagtagccttccaaaacatcctacncactagcacactccctcccacgtgcctgggttaataancctcccggttatttttagaacagcntccttgccgggtggtgaactttaattttcctccaagttgcccctgaaacttttccagttccttccctgatggtctgtgccagcaaccatggtacccaagatgagatttcccacaggtcaaaagcactatgttctctttaacatttagaagctcaacatgaccaagaatcatttcagagaaaataatcatttcacagaaaactagagtgcacttttgtcatgaaatacactgcaacactgcaactgtgtttagcaaaagggtaacaggtagctggaaccttcctttagacagaaaacttcaatgtgatgatgcagatgggcccaatcttaagtgcctttcattagctgggtatttgcaaaagctccaacagcctttaaaggaacttcaaatcaaaactgtttgaaaaaaagaaacaaaatcagcgacttactgcgtataaaaaatgatgatagattatctaaaatggagctttgatagaatacaaatctcatcaacagcctgaccaccacctagggagcttccaatttggagatgggacaaggacaatctattgtactataatggacaaagtgaagagagt

SEQ ID NO: 261220 - DNA, 510 bp, Homo Sapiens
  misc_feature (24)..(24): n is a, c, g, or t
  misc_feature (32)..(32): n is a, c, g, or t
  misc_feature (64)..(64): n is a, c, g, or t
  misc_feature (89)..(89): n is a, c, g, or t
  misc_feature (155)..(155): n is a, c, g, or t
  misc_feature (174)..(174): n is a, c, g, or t
  misc_feature (181)..(181): n is a, c, g, or t
  misc_feature (202)..(216): n is a, c, g, or t
agcctcaaaacaggatgtgggtgnaaaattgnaaggtgccacgagtttaaacccctaaagctgnaggagcctaagacctaaaggtgttnctggggattccctcaggcctaagaattttgcccgacctttcctgggacttgggttggctaatgccnaaatggccccctgccttanaatattnacaaggtgcctgattctcccnnnnnnnnnnnnnnnacatacccaatgtgctcaaactttgagctaggtcttgtgagtttgcctagcactcagacctgtttaagtaacgttctttacattgaaacaagtcaaccgaagctttgtggtgcaggagctgagggtgccccagactcagtgggacccctggttgggccccaaactctcccagcagggtcctcggtttcctcatttgtgaaataaatgagtgggccacgacgttaataagcccaagagaactgtgaagggtggtagtcccttgccctaattggtgctcaataaagttgttggcat

SEQ ID NO: 261221 - DNA, 1492 bp, Homo Sapiens
tgttcaataccaggttcttttcatttctctggattattttgcaaatcattggacagagaatttgggaatataaatctgtaacaggtgtttgacaccagtaggtctctttatttctgggaaatgtgtacctgtactttctgatatacagtgttcctaagtaaaaatcaattcaggggatttgtatagtgtctataggaaagtagcccatgtcttgaaatatgaaaaggaatctgaaggtcatgaaaagtccagtggagaaaatctcaatgcttactgttactactaattgattcctactagtttccaggtttggggggatattgtttcaatgacgctccttaagactgttgattgcccataggttccaaatagaaattaagactcatgaacatttttagaaagtagattgttttctcctggttctctaaggaactacttctgcagtcttacatagtctcatccttgtttgttgtggtgcagtcgaactcctcaggcgtttggaaagcatgtggtagaccttcttccacacccacccatacccccgttcactgcgtctggaggtcttcaacagtgaagtagggcagcccacacagcctctcaggagcacctgtccgaggcacccggagcactttgcagagcacgtccagccctcatggggtccctgcatagaaatgtgaacccctgccactgaggaagatgaaggtagaccctgtgtctggaggtgctggagggcagcgggtcacctcttgtattcccaccttagtttgggggtgttttgaagaggttcagagactaaatcttaaaccttatttgaataccaacgatagctattttgggaatttcgatcttaaaaagtgacaaaacacatttcccattttcatttttcagctgaattttagtaacttatttttgatgttttaattttatcatggcctcctctttggaggccaaccttcccatgggtctcaaaagcagtgacatttggtagtaaatcactgcctctcaggagtcggtatgcacaagcactcagcagccactgttgatgccttctagggaaaccctaatttccgttggtaaaggtaggggcctcggaactgttccggatctgctgtagaacttcaccgtgtggaatggtgacagccacacaccgttgaccagtttagaagaggttgcattcaataaaactcttagcttgagcttatgcaatgattggttaagattttggcattgtaagaattaggagatgatcatagaaatatatgtaaagtattcaattttcaatcattttcaaattactgttataaattgtttttgctgagttgtaatacttttgagatacaatgtattccttgtactgaaagaatgaaaaaggactttttcagcatttgaggtaagttctttaacgtttcattaaaaacattttttacaaatattttgtacatgcacttgcagtattgaggttaatcattttaataaattcggaaattaaaac

SEQ ID NO: 261222 - DNA, 427 bp, Homo Sapiens
  misc_feature (354)..(354): n is a, c, g, or t
  misc_feature (373)..(373): n is a, c, g, or t
  misc_feature (416)..(416): n is a, c, g, or t
gacattgcaaccgaaggtcataaggccgctagctccgctgggacagaggcttgagaaaactaacggctcggtgccttctccctggtctcaaaccatcgtctctgcactgcgaaggcatttggtagcctcaccactgagatactaactagacctaaactaagagctttatcaagttctaagaggtcctttaagaagactctcaaaggcaaatccctgatcccccgccccacccttagccctgccctctcaccagagcaaaattcactggggacttttcccaccacacatgggaaatctgtccactcgggaattacccctgtttttccattttcaaattgtaggggggaggggatnggaacaatttccagtgatnggtaagagatcttgtttattgaaaacggaaacaaccccccgtntttaataactt

SEQ ID NO: 261223 - DNA, 1256 bp, Homo Sapiens
ggggcacagccagtacagttcataagggggaaatccagattccaacccacaggacaaattctgtcctaatagatgttaaagcttttaaccgcaaaggtttgtgtcttcaagcacattgcagaggatcaaggatttagaattaaacctgattcattgtcactgaatgtctgtaataccacttgactagagaggtaacatgatatgaagcacagtcaaaactgaatacattaaattgttatagaggcgaatgatatattcaacattgtcttagtactgtagtgtctaaggcactttccgtaatgtcagtttgcttaactaccaaccaaaaacaggatgcctaagtgtttcactgtaacactgtcccaaagggaagggagaaggaaaaatgaaaggagtcacacccactggcatgtcaacattcaggaagatggcatctgttctggaggctccataaacctcattgacaaacttggaacaagcctcggacacaaaaccaatattcccattttgggctcaaagcagcggctgaatttgcaaggtcagcatgagggcccggctggcgacagggaggggccttccaccagctcggcttaagggtcccacggctgcttgctcctgaacgtgaaggaagggcgccggcagacccaggcggttcgggagaccatctggaagtctacatgatccatggctgccacctggggcctcagctgcagtgtggccactatcccttctatgcacagaccagccctcgccaaggccagttcacatgagtagatgcgggacaccatcgactccgaaggcaggggcccccttgggggatggacatggtaaccccaaatgggtgttgcttccgatccagcccacccctcctactctttccaaagcccctttcacagtttgctcactgaaatagcattgatcattatttgaaggaaatgagagagacaagtgcagtttagagtccacagtggtctaggagacttgatgtggctgagtcgtcgggggccacgtgaacacagaactaggttacctgtctgtatgacagagagcatgcagagcgactgagtgacgaccaacgcgctgccccaataacccacgacccgcaaccaagggcctggagtttgttttaaaaagggtcttaccatgttttataaaatggtctcttgatgactatatggaaaatagatgcaatgatgaaacaatctgtttaatatatgtgtcctgtgtgtgtctatatataaaaatggtggagcggc

SEQ ID NO: 261224 - DNA, 530 bp, Homo Sapiens
  misc_feature (24)..(24): n is a, c, g, or t
  misc_feature (46)..(46): n is a, c, g, or t
gcaaaacccggacaattaccgggnaaagggccccctaggacacccnacaggacccaaggaccaatggtggaaatatatccattccggcccctcctataaccaatttaaatggtattccaagttttggacctggtggcctccatatccatggaaccctctctagtcaaagtgggtattacagacattcagtgacaatgaatcagtgttaattcctaaatccttgatcctctgcaatgtgcttgaaaacacaaaccttttgggttaaaagctttaacatctattaggaagaatttgtcctgtgggtttggaatcttggattttccccctttatgaactgtactggctgttgaccaccagacacctgaccgcaaatatcttttcttgtattcccatatttctagacaatgatttttgtaagacaataaatttattcattatagatatttgcgcctgctctgtttacttgaagaaaaaagcacccgtggagaataaagagacctcaataaacaagaataatcatgtgaacgtga

SEQ ID NO: 261225 - DNA, 2409 bp, Homo Sapiens
ggcctgggtggcgaattcggcacgaggaagagatcagtgctcaggtgctgctctccctgcgcattttgctactgatgaagcccagtgtgctatcccgagtcagccaccaggttgcgtatgggctccatgaactcctgaagaccaatgcagccaacatccactcaggtgatgactgggccacactcttcacactgctggagtgcatcggctcaggtgtgaagcctccagctgctctgcaggccacagccagggcagatgcacctgatgccggggcccagtcagatagtgagctcccatcctaccatcagaatgacgtgagcctggatcgagggtacacttccgactcagaggtctacactgaccatggcaggccgggcaagatacaccgatcagccacagatgccgatgtggtcaacagtggttggttagtggttgggaaggatgacgttgataactccaagccagggcccagccgcccaggcccttcacccctgatcaatcaatacagcctaacagtgggactggatttggggccacacgacactaagtctctgcttaagtgtgtggaatcgctgtccttcatcgtgcgtgatgctgcccacatcacacctgacaactttgagctctgcgtcaagactctccggatctttgtggaggccagtctgaatggcggatgcaagtcccaggagaaacgtggcaagagtcacaaatatgacagcaaagggaaccgcttcaagaagaaatccaaagagggatcaatgcttcgccggcctcgaacctccagccaacatgcctctcggggcgggcagagtgatgatgatgaggacgaaggcgtgcctgccagctaccatacggtgtctttacaggtcagtcaggacttgctagacctgatgcacaccctgcacacgcgggcagcctctatctacagctcatggggcggaggagcaacgccacctggagacaggtggccagaagattgaagctgattctcgcaccctctgggcccactgctggtgcccttttactgcagggtattgcctgctgtgctgcgatgcccggcgccaggtacggatgcaggcactgacctatctgcagcgagcactacttgtacatgatctgcaaaagctagatgccctggaatgggacgtcctgttttaaccaaggtgctgtttcctctacttaccaagctcttggagaacatcagccctgcagatgtgggtgggatggaggagacccggatgagggcttccacattgctctcaaaggtcttcctgcagcaactgtctccactgctgtcactctctacctttgcggccctctggctcaccatcttagacttcatggacaagtacatgcacgcaggctccagcgacttactgtcagaggcgatccctgagtctctgaagaacatgcttctggtgatggacacagcggagattttccacagtgcagatgcacggggaggcggcccctcggccctctgggagatcacctgggaacgcattgactgttttctccctcacctacgagatgaactcttcaagcagaccgtcatccaggaccccatgcccatggagcctcaaggccaaaagcctctcgcctcagcccacctgacttccgctgctggcgacactaggacacctggccatccaccgcccccagagataccatcagaaatgggggcctgtgacacagagaagcccgagagcacccgagcccacagcagcagctccccaggatcacagtggccctcaagccccagaaggctgagacccccaacacccgaacgggagccagaccaaccctttggatacagcacaccaatgatacaagccagacacatggccatacccacaaatgaaaggtgggaagtgcaaacctcatgactctgcacccataatcacataccaacactgacactcatcgaggacaacatcaaacaggagacccatacatgaaccaacaccacacgacacacacagaatacaatacgaacatcgaggatacaaggaagcgaaagacaatgaagagatcaagaacacaggcgacaaccgaacaagcaaacacaggaaccaagacatgggaggacagagaggacaaacagacagaaggaaaggaacacgagaggagaaagggccaaagaagggggggacacggacagagagacgagacagccccggcaagaacaacagcacgatgggacgatcacgacagaggacagcacggggatcgcgaaaggaaacagagccaggagaacgatagccgaaaacgggcagaagcagggccaggagagcaggcagaagaaaacaagcagaaggacccaagcggacaaaccaaaaaagagaaaagcagagaaggaggcacgcaagaccagagaggacaaaagcaagaagaacaagggaagaaccc

SEQ ID NO: 261226 - DNA, 566 bp, Homo Sapiens
tgatcatcatcagtaatgtgtgacaacttggaaatttgtactgaaatccacaataatcagtttttgctggatgggttttacagcagtatttgatatacctaacttgttatggaggttgattgatatctgatccctgcaaaatactttgacttgtcattttgttgatgatgcaaagcacgttggactgagaatacttaacattctttttctgtatttctttaaaccctgagaataatttacatgctcataatacaggatatcagcatatttgtgcaccttattaagccccatcttaagaaaacacaaagtctaagtctgctgttacaacttgtcaatggtatacgaatattaggagatgattctgagaaaggaaaggccttgttggcagtactcctgttaagccattagtctctaaattccagctttactgtgaagttctatagagtgttaaatacaaattttcctgtcttgcttcacacagttccttaaaatcagttttgaactttggtcatagagtcttcatatttcagtatttggtggtccctatgacttatacataactttgt

SEQ ID NO: 261227 - DNA, 684 bp, Homo Sapiens
gccattccagaggactctttagtcatatgcagcaacatgacattttagataccctgtgtaggaccattgaatctacaatccatgtcgtcacaaggatatctggcaaaggaaaccaagctgcttcttgacattaggtgtagcatgtctacttttaagtccctcacccccaacccccatgctgtttgtataagttttgcttatttgtttttgtgcttcagtttgtccagtgctctctgcttgaatggcaagatagatttataggcttaattcttggtcaggcagaactcccagaggaaaaaaacttgccaccttcagtaatactccctaaagggccaatcagataatggatatgttttatgtaattaagagttcactttagtggctttcatttaatatggctgtctgggaagaacagggttgcctagccctgtacaatgtaatttaaacttacagcatttttactgtgtatgatatggtgtcctctgtgccagttttgtaccttatagaggcagattgcctccgatcgctgtggttcttattatcaaaattaagtttacttgtatacggaacaaccacaagaaatttgattctgtaaagaatcctctttagctgtggcctggcagtatataaatggtgctttatttaacagaatacctgtggaggaaataaagcacacttgatgta

SEQ ID NO: 261228 - DNA, 1163 bp, Homo Sapiens
  misc_feature (1108)..(1108): n is a, c, g, or t
acaggttatctggcgcgcgctttggaagtaggcgcgaagtagaaagtaggggcgggggccatataacggagggagccggagtatgctgaaaaaaggcaacctgacaagtagtagtaggcggaacagattagtatgggggggcaatagatagggtaacttgagaggggtttaggacgggggcgcttaatagggtgggtaagtatcggccgagtagagtatgcgcgggtagataagcatattgatagggggagctaacatggggaccatgaaggggcaagagtggcgagaagtacgaaggcagcgggaagggtcctgctagataaagatgggtgtgggggtggtgctggtttgcattaggacaataatataggggtaattgaggtgtgtgctgattcaggattgctgggggttaacgccgacaaggaaattatgtgatagggggatcatctggcccccagcgtaggcgcgggcgggcatagtggtatagtggacacattttagggtttgtgacaagaaaatgtatggtaaggaagaagtgtcgtagatgggggggtgtcaggacgagtacgtagtgccgagggggaagcatggaatcgcttgttgtttggggttgtgattgttttatgcgctttttggtgtaatagtttgctttttgaaaagtcatcacaatcagtttaattaagtgcacagaatagcaatcaatcagtcatgtcaataaaaatagaacaattatttttacatcaagtgtgctttatttcctccacaggtattctgttaaataaagcaccatttatatactgccaggccacagctaaagaggattctttacagaatcaaatttcttgtggttgttccgtatacaagtaaacttaattttgataataagaaccacagcgatcggaggcaatctgcctctataaggtacaaaactggcacagaggacaccatatcatacacagtaaaaatgctgtaagtttaaattacattgtacagggctaaggcaaccctgttcttcccaggacagccatatttaaaaggaaagccactaaagtggaactctttaattaccattaaaacatatcccttatctggattgccctttgggggnggtatactggagggtggccaggttttttttcatctggggggttctggcctggccc

SEQ ID NO: 261229 - DNA, 613 bp, Homo Sapiens
tcaggagcaggcccgtggggctggcgtgcatgatggcccagcccaggtagttggctgtgcttccccagtacatggggttgtccaggatgttgaaggggaacacggtcactctcgcctccttgaggatcccgaagtaatcacctaggaaagttccagcgaaccccagtgcaaagaagctggagagcacgagcacgacgcccagtcccaggagcgcgaggcccaggctgtaggccgcgggggtgtccaggctctccatcctgggctggctcagcatggcctgcgtgaagcagtgcgagcgcaggaagttcaggagcaggatggtgacgcttagagagtagcaggccaggtagggggatccgaaggccctgctcagcttgcgggtcttgtgttcccatcgtgcaaccacattccagtagagcggattgaaggtgatggtgatgacggcagccacaaagctgggatccagggggtccacgtagcccagcagccgggtcataacgcagaagtctgccacggccaggaggtctgctgagctgcaggaatagctcgagtcccacaggtcaccgacgaatagcctcagctgttaacaccccaaagcatgggtaaggaagag

SEQ ID NO: 261230 - DNA, 996 bp, Homo Sapiens
gttccgggggcgcgtggctgcagcggggcccgcgtggtgcctcctgaggcggcccccggatgaagagatctgggaacccgggagccgaggtaacgaacagctcggtggcagggcctgactgctgcggaggcctcggcaatattgattttagacaggcagacttctgcgttatgacccggctgctgggctacgtggaccccctggatcccagctttgtggctgccgtcatcaccatcaccttcaatccgctctactggaatgtggttgcacgatgggaacacaagacccgcaagctgagcagggccttcggatccccctacctggcctgctactctctaagcgtcaccatcctgctcctgaacttcctgcgctcgcactgcttcacgcaggccatgctgagccagcccaggatggagagcctggacacccccgcggcctacagcctgggcctcgcgctcctgggactgggcgtcgtgctcgtgctctccagcttctttgcactggggttcgctggaactttcctaggtgattacttcgggatcctcaaggaggcgagagtgaccgtgttccccttcaacatcctggacaaccccatgtactggggaagcacagccaactacctgggctgggccatcatgcacgccagccccacgggcctgctcctgacggtgctggtggccctcacctacatagtggctctcctatacgaagagcccttcaccgctgagatctaccggcagaaagcctccgggtcccacaagaggagctgattgagctgcaacagctttgctgaaggcctggccagccctcctggcctgccccaagtggcaggccctgcgcagggcgagaatggtgcctgctgctcagggcttcccccggcgtgggctgccccagtgccttggaacctgctgccttggggaccctggacgtgccgacatatggccattgagctccaacccacacattcccattcaccaataaaggcaccctgacccc

SEQ ID NO: 261231 - DNA, 545 bp, Homo Sapiens
  misc_feature (490)..(490): n is a, c, g, or t
aagcctcttccttacccatgctttggggtgttaacagctgaggctattcgtcggtgacctgtgggactcgagctattcctgcagctcagcagacctcctggccgtggcagacttctgcgttatgacccggctgctgggctacgtggaccccctggatcccagctttgtggctgccgtcatcaccatcaccttcaatccgctctactggaatgtggttgcacgatgggaacacaagacccgcaagctgagcagggccttcggatccccctacctgggcctgctactctctaagcgtcaccatcctgctcctgaacttcctgcgctcgcactgcttcacgcaggccatgctgagccagcccaggatggagagcttgggacaaccccgcgggcctacagctggggccttcgcggttcttggggaattggggcgttcgttgttcgtgcttttccagcttcttttgcaatgggggtttcgttgggaattttcctnaggtgatttatttggggatcctcaaggaagcgagagtgacctgtttcctttcaac

SEQ ID NO: 261232 - DNA, 425 bp, Homo Sapiens
  misc_feature (380)..(380): n is a, c, g, or t
  misc_feature (403)..(403): n is a, c, g, or t
agagccgtgctcccaagaaccctgcacccctcaatggagtaaattaccataaagcctcttccttacccatgctttggggtgttaacagctgaggctattcgtcggtgacctgtgggactcgagctattcctgcagctcagcagacctcctggccgtggcagaacttctgcgttatgacccggctgctgggctacgtggaccccctggatcccagctttgtggctgccgtcatcaccatcaccttcaatccgctctactggaatgtggttgcacgatgggaacacaagacccgcaagctgagcagggccttcggatccccctacctgggcctgctaatcttctaaagcgtcaccatcctggttcctgaaatttcctggcgntcggaattgctttcaaggtaggnccatggttgaggccagcccagg

SEQ ID NO: 261233 - DNA, 397 bp, Homo Sapiens
  misc_feature (58)..(88): n is a, c, g, or t
catagttgttttcagtggagtcttccattctgtatcttaccctaagatctggttcttnnnnnnnnnnnnnnnnnnnnnnnnnnnnnnncgcctgccagctcacactaatagatgattcttaattgccaaatgtgttagagtttgtatatcctactcctgggccttacatgtcgcctgttggggcttaagaccaggttgataagtaggaactgaaagtcttccagattcacagtagaaaattttatagacatttctgttaaagaaatatatcgattttatgtttttcaattatgttactgtaaataccttgtacctgttcatggattattttattctaaaatattttgtcaaatgtgtatcaaccaaattaaaaagaaaggttttcatgtcagcgaac

SEQ ID NO: 261234 - DNA, 820 bp, Homo Sapiens
cttctcatttcttttaaatatgtatgaataataatacaaggaagtaggcattccatttaataatcaagagcaagttgtactcaaagcattcagttaaagtgtatctgtgtgtggaactaatttcagacaatagaaaatattagttgaaatgtttaagaattaggcatgaaaaataaatttgagaaattttgtttccttacatgtatttttaaatcataagagttattttctatctgatgtaaaattagtttataaatcttaatcagcttctagatgtttattagcttttatgtcatgaaatgttggagtctcagggttgctgattttctgctaatgggaaaaattgactaagtctttaaaatagtttgcagccttctcccacaggagacaagtgaaagataagtgtgattttagatctttcttgtcccatagttgttttcagtggagtcttccattctgtatcttaccctaagatctggttcttccctccccatccccaccccccacccaccgcctgccagctcacactaatagatgattcttaattgccaaatgtgttagagtttgtatatcctactcctgggccttacatgtcgcctgttggggcttaagaccaggttgataagtaggaactgaaagtcttccagattcacagtagaaaattttatagacatttctgttaaagaaatatatcgattttatgtttttcaattatgttactgtaaataccttgtacctgttcatggattattttattctaaaatattttgtcaaatgtgtatcaaccaaattaaaaagaaaggttttcatgtcagcaaaa

SEQ ID NO: 261235 - DNA, 654 bp, Homo Sapiens
aaagatgcgtcttgatttcagaaaggtccggaagtggaaagcaggtttcagggctgctgaggtacagggttctcctgtaggccccagggatggtctcaggggtgctgagtgcgtgcgtggtaaatggatggagcccaggggcgcctcctgccagtgtcctccaggcactcaaacctagcccttctgaagccgacctcacgtgacctcacagcccctcctgaaggcgcctcactgatgacggtgggtggaataacagcccccagagatgtccaggtttggaaccccaggacgtgggaaagtgttaccttgcgtggcaaaagggacccggcgcctgtgcttcagttcaggatttcgtggtggggagatgaccgtggatggttgaggtgggccctgagtaatcatgggggcccttataagggaaggggagtcacgagggtctgcgcatgaagcaaggaagcttctggctgtgaagatggcaagaaagcctggggccaggcgatgaggtggcccctggaggagctggaaaaggcattggattctgccccagagcctccgtggagaaacaaagccgcactgacaagacttcagcctggtgaaaaccattttggactcctgacctctagaactgtaagataataaattggtgtggttttc

SEQ ID NO: 261236 - DNA, 677 bp, Homo Sapiens
  misc_feature (72)..(233): n is a, c, g, or t
  misc_feature (629)..(629): n is a, c, g, or t
agtaagagaaagtggctgctgtagggacagaagagcatagtgtgatgagaacacagattcaagagcaaatcnnnnnnnnnnnnnnnnnnnnnnnnnnnnnnnnnnnnnnnnnnnnnnnnnnnnnnnnnnnnnnnnnnnnnnnnnnnnnnnnnnnnnnnnnnnnnnnnnnnnnnnnnnnnnnnnnnnnnnnnnnnnnnnnnnnnnnnnnnnnnnnnnnnnnnnnnnnnnnnnnngggtttaattttactaccactggtcatctgtcatttattaagaacctactgttggtttgactgtgtgtcaaatactgaaggcttttattattagctctttaatgtcatagtcttaattgaatactttgaggcattgtgaggacactagtttctccagggcttgggttgacattgtaaactaatcgtggcctagggacctgcagcgtcagcatctacttagggatcttgttaaagtttggggtggtgttcttcaattgccaacatgaatggaactaaaaaagtctggtctcccaacctcttgttaagctatttgatggtggccaagcctcactgtgtgtctgttgccttacgtgtcaagaatggggatcctggagcaggtaatgggggttgaaggtnggaagggttgggtagatgttgggtcaaggggatacaaaattaaatcca

SEQ ID NO: 261237 - DNA, 1092 bp, Homo Sapiens
  misc_feature (1039)..(1039): n is a, c, g, or t
  misc_feature (1047)..(1047): n is a, c, g, or t
  misc_feature (1055)..(1055): n is a, c, g, or t
caggaagataaaccaagggcgagggaccaaagagaaagaagtgacagagtatggaaaagggagaaagatagggagaaatattcccaaagagaacaagaaagagatagacaacaaaatgatcagaaccgacccagtgagaaaggagagaaggaagagaaaagcaaagcaaaggaagagcatatgaaagtaaggaaggaaagatatgaaaataatgataaatacagagatagagaaaaacgagaggtaggtgttcagtcttcagaaagaaatcaagacagaaaggaaagcagcccaaattctagggcaaaggataaatttcttgaccaagaaagatccaacaaaatgagaaacatggcaaaggacaaagaaagaaaccaagagaaaccctctaattctgaatcatcactgggagcaaaacacagactcacagaggaagggcaagagaagggtaaagaacaagagagaccacctgaggcagtgagcaagtttgcaaagcggaacaatgaagaaactgtaatgtcagctagagacaggtacttggccaggcagatggcgcgggttaatgcaaagacctatattgagaaagaagatgattgatggctaccccaagagaaagatttaaggaagcacagaaaactgtaattcctggaacctgctgcgtaaaaccataaaggagtgtgttaccagtagtttggagggcatttttaaatttattttcaaaattttaagttaaaagtcagtcttacagcttggatgtttggatgtggatgtttggctgaatttatatatagtgtgtactcatcaataccacattctttgttgtattcaagaaccgttaagagtgtgctaattccctgtaggtacataatgaggaaaatttgctccactacaaccattaaaaaataattttgggccaggatacggtagctcgtgcctgttaatacccaacattttggggagggccaagggcaggaagggatatttgagggctagggccatttcaaggacccagccttagggcaggggttaataaggaccnttgttctnctattttnaaaaaaaccaaaaggccttggcctgggtagttccctt

SEQ ID NO: 261238 - DNA, 931 bp, Homo Sapiens
gaaacatctatggagcatgggacacggggagtggaggcagctaaaagccatctcatctttcaccgtattcaacaagcccattataacaagtctttcacgctcaaccattcaaacaatcccaacaatcccagcctaagaatttcctggcatttgatgaaaatggctgtgggttttgctatctttaagctccctgggaagcaggatataagcccagggctggcaggctctttctagctacctgctcttgcacatagagtttgcctcatggttgcaagaaggctgccatagctccagatggcacatagacattccaggcagcaggaaaaaggaaggagcacttaacagaaggaggtcagggagttggttagtctccacctgaagaagagagccatgaaccagcttcagttgactaacgggctcctgtgagtgcatctttggacttttctggaggttgaaatctagatgtggtatgtgtcttaaagcagccaccaactcctcccattaccttccaagtgagcccaactacacgatggagcctcttccctgcccttggatctgggctgagcctctgacttgcgttgaccaacagaatgcagtgaaagtgatgccgatactaccctccctgccctagacttgggatacctggcagctatattcttccattcctcaggacttgcaaaaacgggtctcaacatgccttcccagagccatgaggtgtttctttgcccattcattgatctgagaagtgagtgtaaggagtttaaatcaacctctgttctgtgctagttaaggtaataaagttgctgcagtccagggggtaggtacctgtggacggctctgcgaataggacagttgcatttcttgggaatcaagtgcatccctaggctggcagtgcagcagaaatactgaataaaatgtgacaaatctccaa

SEQ ID NO: 261239 - DNA, 687 bp, Homo Sapiens
aaggcaaaataacaagtattttattaatgcaatgcagaaattaggtttttggtatattaataatttgcttgtgtattggtatatataaaaatcactgacgggatctaggagtatttcaagctcacactggactactgaactttagaatactgtcctaaggaaataggtctgggcagaacttatttgagatagattttaaaactatttaaaagcaatactacaattagttacttacaaaaacatttataaaaattaaatatcagaaagtgagaacatcaatattagagctctgttgtatcattcaatgttataatttataaatacatattaatttaaaacacaggtccacatattttctaccttctaaaataagaaaaatccttcgagttgttttcaaaatatgaacaaaaacaaatccattggattgcttttaaaaaatatatacacagtctctcccctacaacttggtatgctaagtacggaagatgcttgccagcattgttgagaaatgcagttccaaattagtaggctaataacatttatgtcaatatcaactctaaatggtgttgtacagtcagtttaaataaattatgattttaccctacatatgtctgcaatagtaaatcattctttctactcttttgaactaagtacagtaaaattctttcacaaaataatctgagatca

SEQ ID NO: 261240 - DNA, 699 bp, Homo Sapiens
  misc_feature (631)..(631): n is a, c, g, or t
aaggaatttctttattggaattccactttacctcgccacaaggagctggctttcatgacaaagagagagtgagccctgaacaaagtattcgttaacattttacaacagacaaacatatacatgtcctgcatgacatctttacaataacacattccaaaaacaatcaaacatttaacaggattattaagaaacattaatttccttctctctagatgactggtactttagctttttagcttctgcaataaaatgcgttccttctcagcatttctattcataggaatccctgaatcacttctgtcatgtaaggtgcgaattcatgttgacggtgtgttccattagttactgaatgtgtcaaaatcctctccacggtagaaccttttattgtagcataatgtgtgaataccacttccaggttatccctcatcacaaattcatcattcattatgggagttcatctgaaactttaaaaaagtttcatccattcaactaatgtatcacaatagtacgttcatcaatttgcattttttatgagtgactctctcctatctcctgttagacttgtaagtctatgccttctacttttcctaaaaggaaatccaaattttgtttcagaagtcatcatcactgnccccctcccaaaccaattacatcaagtttatacttaaagaccactaatattaaataaatttatattcc

SEQ ID NO: 261241 - DNA, 871 bp, Homo Sapiens
  misc_feature (430)..(462): n is a, c, g, or t
  misc_feature (620)..(620): n is a, c, g, or t
  misc_feature (651)..(651): n is a, c, g, or t
  misc_feature (656)..(659): n is a, c, g, or t
ggagcatcagccagtgaatctgtttcaggtttccattctgcagaactcctccaaagcatgtgctagtggcaagacagtggttcttatgatgttttcccttaacttttccttgtatgttcttgggtggttcctaagggaaagggaagcacatgatcatgggaatgatagcccagaacaaaaagaaatcttgtcttaccacagtgttttataggagagattgggagaaatcatcctgttttctctgtgacctgatttcagaagagactgatccaaaaattataacggcagggaacctagtgcatttggcactgagatttaaatgcaaccagaattgtcctcaaggcccagccataaaagcattgtctctctcgaccttctggtatcttgttagagagcttttcactgtgaggaagtgtggaaaaatagctcnnnnnnnnnnnnnnnnnnnnnnnnnnnnnnnnnaatctgttaggttggggataggttttctgctagccaatattaaaagagacctgcaataaaaaaattaccctgaatctgatagaaagctaagtgttttcgtatgtgtgggtgaatgtgtgttcatgcccgtatatgtctacacacagatgacaaattantatttgaaatcgttggaaaataaattcagancaaannnntttcaggcccattacctagaaatctatcttaaaacctgggtatgttcctaaggtcatttctttgcttatgctaaattaattacaattatgaatggaggatattctactgtacttttttaaaaagaaactatttttgtgtttgaaagtgaaaccaacatccagatctatagcagagtccttattcttctcataaatctttttactttggctac

SEQ ID NO: 261242 - DNA, 605 bp, Homo Sapiens
aacatggtacaagctgttcagccacattggggtcttcataagcctaaagtgatccatcctctcttttagccagcgactttgggctctttctgtcagatgatgaccccaaaaagggtatatggctggaggctgggaaagctttggactactacatgctccgaaatggggtaagtatcctttcatcaaggaccaccacatccccttccatcagcttctccctgttccacctcctgttttcagcacttacatctgttgtctcttagccctccccatgctttcttcctattaacagacagtcataattccctgcttttgaacgaaccaccatagtcttcctttcagtgctccactctctcccctcgggctgtgtaaagaggaaataatacccctagctcagagtaggcccctgtctcttcttcctgccctaacaggacactatggagtacaggaagaaacagagacccctgaagatccgtatgctggatggaactgtgaagacgatcatggtggatgactctaagactgtcactgacatgctcatgaccatctgtgcccgcattggcatcaccaatcatgatgaatattcattggttcgagagctgatg

SEQ ID NO: 261243 - DNA, 377 bp, Homo Sapiens
gtgtgagccaccacacccagccttaacctcattaattcacagctttccagaaaaagccaagtcattaggtgtccctaaagttcttaattatatccagtactgtgtcagagaggaaattcagtaacaatataaaatatctgcttttcagaagcatatattcttgttgaagaaaacagtagacactaggcagcttattaagcaacataatgtgtgacctgaaaatataggtgctattgaaagtaatgaaacaatgagatcaagatgggtggggacagttaagaagggggttttctctcatcacctctttcttctttacaatctaattccggtctttactcaattgcaattgtaccttgaagaatactactgacttaatt

SEQ ID NO: 261244 - DNA, 774 bp, Homo Sapiens
ccttttaagacagaaaaggttggctggatttaaaagcaaaaatgaattcaaattgtgacttttatgaagcaaatcctactttcaactgcacaaatcactcctttgttagattttcagagtagatggtaatgtcactaaaagctgtttacagcccagccaggtgtgttttggtttaaaaggatgtgctttccttttaaactcgagtattcaattaccttcccagccgcagggaaagtgtgagctagggaccaagcgagcttcagaggcagctctgaaaatgcaggcaggagggagtggggcatggggatctccacaaggaagagcaacaggggagccaatgccttggactacgcgggatcagtctccttgctctcttcagaactgggaattctcacgacagatgcaccctcgccaatcacgcaggactgaccggggcgtcggaatcgccgtcattctagatgatctacaccttcccggtgccagacgcgccctcgccacaatcacgcaggactgactggggcgtcggaattgctgtcattctagacaatctacacctttcccagtgccagacactcacggagcagaacaatgtgccgcctggtcatcagttatttgccttttgaacgttaaacgctggtttagagtgacaggctcaaaaaccaaatatttcaaaattgatgggcctgtcacagatgtttctgaaaaaagacacacagatctctgggaaggaaacatccctattttcctggcatggcactgattaagaaacagtca

SEQ ID NO: 261245 - DNA, 832 bp, Homo Sapiens
  misc_feature (632)..(632): n is a, c, g, or t
gggaatcaaacaatagttagggaatgttctattttcttaaattccctactagctttctcaccctcctgtagtgattgccaggtccctctagcctcagtagtgggaaagggagtcatttactgaacacctaccctgtgccattttacatacagctcacttaaatttcaccaagtaggcagccttcaacatcacaggtgattcaatcaaagtaatttgccaggggccgccagcttcagccgagctaaagctggtgcctaggcctattaacccgagcccatgctttcatgtatcactgcatagtacagaatggcagcacatactgtgtgtagacatttttctacacacatggtcagccaagagtaaaagcctctgcatcagaaagcaagaatctcctatagcaagtagaagtggtgatgagggaagaggccagagttgtttaaggctcccaaagtccttatggtctaaaggctaagatcctaaaagtgctagtttagtacctggaaatcggaaaactcaatggttttcccatactgagacccttcctttagcaggatatagcctgggcccatctcttcctctgcctatccttgtaggacatgctcactccaagctctggaataggtctgtctttnggaaccactcaaactaagatgtcactgactgccagagcatggaccccatttccaatgagaaaacttgtcctgctctccccacccagccctgcccttccaccatgttatgcaagtcttcggtttccagacaattcatggcactttccttctccctaacagttccaggcctgggtgaggtgtggttgacaagatgatccccc

SEQ ID NO: 261246 - DNA, 1553 bp, Homo Sapiens
  misc_feature (250)..(270): n is a, c, g, or t
ggggcttgcagggggttctacgcacccgggaccatcttcacctgcagtggcctggcccggcctgggccatgtgggctctgagtggccaactgcctgaagctcttgctctctgtccccgccttctaggcagtcacccgcagggccaaggtggctcccgctgagaggatgagcaagttcttaaggcacttcacggtcgtgggagacgactaccatgcctggaacatcaactacaagaaatgggagaatgaannnnnnnnnnnnnnnnnnnnncagccaccacccacaccagtctcaggcgaggaaggcagagctgcagcccctgacgttgcccctgcccctggccccgcacccagggccccccttgacttcaggggcatgttgaggaaactgttcagctcccacaggtttcaggtcatcatcatctgcttggtggttctggatgccctcctggtgcttgctgagctcatcctggacctgaagatcatccagcccgacaagaataactatgctgccatggtattccactacatgagcatcaccatcttggtcttttttatgatggagatcatctttaaattatttgtcttccgcctggagttctttcaccacaagtttgagatcctggatgccgtcgtggtggtggtctcattcatcctcgacattgtcctcctgttccaggagcaccagtttgaggctctgggcctgctgattctgctccggctgtggcgggtggcccggatcatcaatgggattatcatctcagttaagacacgttcagaacggcaactcttaaggttaaaacagatgaatgtacaattggccgccaagattcaacaccttgagttcagctgctctgagaaggaacaagaaattgaaagacttaacaaactattgcgacagcatggacttcttggtgaagtgaactagacccggaccagctcccctcaaaaagaagacactgtctcatgggcctgtgctgtcacgagaggaacagctgcccctcctgggccgcttggtgagaggtttggtttgatacctctgcctccctcctgccagcatggattctgggtggacacagccttgtggaaggtccagtaccaccaagagctgcccatccactcccaccccacactgtatcaaatgtatcacattttctcatgttgaacactttagccttaattgaaaatgagcaacaaagctggacaattgctagttgtatataaaatttaatctcaccgaatgtacagttttcaaatttcacgtgtatattaaggaactgatgcatctgagcattctgaaagaaagaaaaagaagctactttagctgccaccccattctagaaaagtctcttattttcaagctgttctaaatagcttcgtctcagtttccccaaaaggggtacccaggcccctcctctgtgtgccccagctgcatcagccagcttctaggtggctccattgttttctgccacctgacaacatttttcctcaattactgtacaactactgtataaaataaaacaactactgtataaaataaactctcttttcccg

SEQ ID NO: 261247 - DNA, 596 bp, Homo Sapiens
tgctagttgtatataaaatttaatctcaccgaatgtacagttttcaaatttcacgtgtatattaaggaactgatgcatctgagcattgtcaaacaaacgggaagaagaagttaaagggcagcctggcattgatggctggtggagctctgaagcctgcctctgcaggtgcagacacatccacaaaagtaaccgcagtggaaataagaatcgtcctttcatttcctgagttggcctcaggaaaggaggatgaaattagatttgcagttacattgactattttggcctgtggattcagcagggatccgtatttagtccacttcacttctataaccaaagcccctgggagctggcaggaatccttcctgttgaatgactgggtgatgaagtggatgggcacccagtccagcatgtcctgggcctgggaatttccaaaaggggccacgtaatctgggaagccctggccccacagcaggctcttcaccttctgtgctacgagctgacacgggagagctccacccttatggaggctggaatccagcagctaatgggagccccacgacataaccaggggttccactgagaagggactggctggg

SEQ ID NO: 261248 - DNA, 763 bp, Homo Sapiens
  misc_feature (585)..(585): n is a, c, g, or t
  misc_feature (641)..(641): n is a, c, g, or t
gaggctggagtgatctgggaccaaagacatctaggcttgctgtcaaggcttctgatcaacatgagatgaccgccgtgtggtaaactgatgaaccccgacgctgatcaacatgagatgaccgccgtgtggtaaactgatgaaccctgaccctgatcaacatgagatgaccgccgtgtggtaaactgatgaaccccgaccctgatgaacgtgagatgaccgccgtgtggtaaactgatgaaccccgaccctcatgaacatgagatgaccgccgtgtggtaaactgatgaaccccgaccctgatcaacatgagatgaccgccgtgtggtaaactgatgaaccccgaccctgatgaacatgagatgaccgccgtgtggtaaactgatgaaccccgaccctgatcaacatgagatgaccgccgtgtggtaaactgatgaaccccgaccctgatcaacatgagatgaccgccgtgtggtaaactgatgaaccctgacccattaggctttggctacagaatgtggaaataaattgtgttactacatgtgtgtaatcctagggtgcaagacacccgccggggaggttccatanaagtgaggggttctgcaggtaacctcatcctctagttcctctggaaagctccctanaagggaggaaattatgtccctttaaaacctaataaaaattcccttccaaaaccaaaattaccggcaaccctaactggtgaaaggacccccaaaggattacttttttttagaaataaggtaaa

SEQ ID NO: 261249 - DNA, 697 bp, Homo Sapiens
agttttaaaagctacaaaatccaagattacaaaagtaaataaagcaagcatattagccttcattccatttcattgaaaatgcataaaggacaatagggtttaaaatgtaaaatttcttattctaaatacaattttcaaattttacccacagctctcggtaccagccaatcagatggtagatatgttttaaagtaataacaattaacataaaattacattgttctatacacagtgtacaggatttcacacgactttcaccagcagctcactagtcacatggaggcagctagaaacatgggcactgacagtgagcgttagtgaatggaacgcactgcacctgaagactatcacacccacctcaacaatctgataggatgcaattaaagtttcttctctggcttacaaacaagtgccttcttataaggtctaccaatttgcacagcagctatgagttactgaaatgtgtaaccataatttaaaaaccaaatcttttgtagaagtgtgctttttaattgaaaatgtacctttgtacttcaatgctttgccaaactacctgtaatctccccaataagaaataattgtacttttagaacgttgtcctggaaatactcatctataatcaccagtaacagcttttcatcatctatgctaatagatgtaggtaatggcaagagtgattaaaacatttccaataatc

SEQ ID NO: 261250 - DNA, 1066 bp, Homo Sapiens
  misc_feature (53)..(186): n is a, c, g, or t
  misc_feature (706)..(843): n is a, c, g, or t
  misc_feature (899)..(1022): n is a, c, g, or t
cttccctcttcgctcggctctcattctctctcccgctaccctgtgaagaggannnnnnnnnnnnnnnnnnnnnnnnnnnnnnnnnnnnnnnnnnnnnnnnnnnnnnnnnnnnnnnnnnnnnnnnnnnnnnnnnnnnnnnnnnnnnnnnnnnnnnnnnnnnnnnnnnnnnnnnnnnnnnnnnnnnnnctggccctgcctgggtttcagaaccagccttgaacctttcacagtggccagaggatggggaggcagaggcccaggttgcacacttcttgcctgagtgttggggactatctgacccaaaacaggtgcacagagggcagggagaggatgttcccaaaggaaaattagagtttagaatcaaaagaaggggaaggtgcgtgtttgggaggtaaatagcaaatactcttcataggttcactagagtcttgctactccaagtacgatccctgggccagcagaatgggcacagctggagctgattggataggtcccatgagcctcaggcccacccaggctcaatgagtcagagtctgcgtcttaagaagaccccctggtgatctgtgcacattcaagcatgctgcccgttttccaaagcacttgcaacactccaggatgcttgcacggtcatgttgccaccatccaacctgcagaccccattcttgagattgactgggagttcctatcatgtcctccatagcaaggnnnnnnnnnnnnnnnnnnnnnnnnnnnnnnnnnnnnnnnnnnnnnnnnnnnnnnnnnnnnnnnnnnnnnnnnnnnnnnnnnnnnnnnnnnnnnnnnnnnnnnnnnnnnnnnnnnnnnnnnnnnnnnnnnnnnnnnnnnctgcccagtgcatcctatcagaaggcatgtgatttcaacttctcccataccaacannnnnnnnnnnnnnnnnnnnnnnnnnnnnnnnnnnnnnnnnnnnnnnnnnnnnnnnnnnnnnnnnnnnnnnnnnnnnnnnnnnnnnnnnnnnnnnnnnnnnnnnnnnnnnnnnnnnnnnnnnnntgtaaactttccatttatgcattttaaaattttgattgatgtaa

SEQ ID NO: 261251 - DNA, 779 bp, Homo Sapiens
  misc_feature (657)..(657): n is a, c, g, or t
  misc_feature (676)..(676): n is a, c, g, or t
  misc_feature (715)..(715): n is a, c, g, or t
  misc_feature (723)..(723): n is a, c, g, or t
  misc_feature (752)..(752): n is a, c, g, or t
  misc_feature (762)..(762): n is a, c, g, or t
tttgtatactctataactgtataataactttatgtataatatcaagagcgcttacaagtcaataagaaagtcacaatttattcaaccattccctgattgattgtcatttgattgtcattttggttgcttccatcatttttcttgtataaacaaggctgcaatgaatatctttatttattggtatggtagaaagttcacactagaatatgaactcttttaaaaagcaggacacaaaattgtatacgaagtaagcagaaaacatgtatggcatgtattagcatattcatattctgtgaacatttggaattctgtattcaaaatctattttgaccattcccaagtgattttgaaggtctttggcatgtcataatttgttattttgtcaaggccagtgtttgggtgtgagagtggtgcacagggcaggagtgtgtaactttgttaggaagtgagcctagccacaccctcctgagtcactggttctttactatcctgggggtagggcaatatcttttgttcagctgataaaagctttgtcattgtgaagattggctcccagtgatagggaaactgctgggtgatgaaaataaaggggtcttaaagattattctcagccaggaaaaaattaagtgtttaggacaaatttaaatgggaaaatanttaatatttttaggtagtncttttaccatttgggaggtcctaaggctccgttcagccnggggttcntttaaggtccagggtcctggggtacaccnggcaccgggnaaaaggctgggagtatg

SEQ ID NO: 261252 - DNA, 620 bp, Homo Sapiens
tccatgacgaactcggcgactggcggctgatcgttcattccccttacgggcttggggttcacgcaccgtgggcactgatcgtgaatgctcgactgcgcgaacgctacggagttgaagcgcaggcgttggccagcgacgacggacttgtactgcggattcccgagacggaccaggacccaccgggcgcagaactgatcggcttcgaggtcgacgagatcgaagagcttgtcacccgggaggtcggcggatcggctctgttcgctgctcgattccgcgaatgcgcagcgcgcgcactgcttctcccccggagagatcccggcaaacggtcacccctgtggcagcaacgccaacgcagttcccagttgcttgaggtcgccgcacgcttccccagtttccctatcgtgctcgaggcgatccgtgaggtgctgcaggacgtctacgacgtgcccgcactcattgacatccaacgccggatctcctcacgcgcaataacggttgccgaggttacgaccgaacgcccatcgcccttcgcccaatcgcttctcttcggatacgtcgctgcgttcatctatgaaggcgactctccctggcggaacgacgagctgcagccctcacgctcg

SEQ ID NO: 261253 - DNA, 687 bp, Homo Sapiens
  misc_feature (87)..(130): n is a, c, g, or t
ttaatgcaaggccatgatttaatgtccatttttatactcttgtaatgtcatgtcattacaaaaattttttagaacatggatctgacnnnnnnnnnnnnnnnnnnnnnnnnnnnnnnnnnnnnnnnnnnnncatgtaaaaatgtaattttatataacaagccatggaagtccaaagtaccagggattgcttgatagcactatatattaaataatcattcaattactgaatcatttaggaaaaaaaatctttgtagcaatatgtcacatgcttttcagtaatcttccttctcatagagtgggttttagctcaatcattcccatttttactgatttttaaaccctgcaaacataaattgtttttcacagcagtttctaagagaatgcagaagcgtggctcattcatgagggtcatcaccactgtgccttttttttccttttaggaaaccgagcagaaatagtagtgattacactgcacaaatacaatatagctgaacctcttgagctgaaaggaagttccaaaatttatggttcatttctggggaagtctgagcatttctaatacaatcatataaacaaaaccttgtttggtaataaaaggtgggcatgcacggaatcaacatctgcccagtgtatgttcttaaacctcttgattttatagtaagatttgttattacctctagtaattca

SEQ ID NO: 261254 - DNA, 852 bp, Homo Sapiens
  misc_feature (60)..(80): n is a, c, g, or t
  misc_feature (84)..(198): n is a, c, g, or t
  misc_feature (458)..(471): n is a, c, g, or t
  misc_feature (766)..(766): n is a, c, g, or t
tggagcggccgccgctccaccatcagaatggtaacattgttgcttatgcagagagattannnnnnnnnnnnnnnnnnnnnatannnnnnnnnnnnnnnnnnnnnnnnnnnnnnnnnnnnnnnnnnnnnnnnnnnnnnnnnnnnnnnnnnnnnnnnnnnnnnnnnnnnnnnnnnnnnnnnnnnnnnnnnnnnnnnnnnnactgagcccagccaagacttcagtgttgactgctttggaggcacaaacccatgcaagcgttagttccaaagttcagtgtgtacccttaaatgaacaatgaagcaggtaaaattacccttgaaaaaaatcccttggaccacccataaatgacagtgactttttcaatatggactcatcatagccagttttccttttgaagttggaactgatcacccttttgtcatctgtaccaaatcagtagttggcttgtgttacatttnnnnnnnnnnnnnncgtgttttaaaccagtgcatataaattgtatgttaaatgtaagtaactttaagttgacttatctcttcacagtaatcaagcctcacgtaattcatgctttttaaattcagccagccccccctctctgaaattttattatgtaaataatttgtgttccctgatccactcgtttaagttcttagttgtatgtcattctcttcttctagcagggaattgggcaaacttttttgttaaagggggtagaaagtgaagattttagggcttgcaggccatatagcctctgctgcaaatgctngccctgctgttgtaatgtaaaagctgccacagacacctacatgaacacgaatgagtgtggctggtgttccaataaaactttattta

SEQ ID NO: 261255 - DNA, 790 bp, Homo Sapiens
  misc_feature (394)..(444): n is a, c, g, or t
  misc_feature (500)..(500): n is a, c, g, or t
aaaacgaagtggcaaagatgtaaaaaaaataataaggcagaattgaactgtttgggaatggaaccagtacagacagctaactctagaaatgggaaaaagggtcatcacactgaaacggtgttcaaccgggttttgccagggcctattgcaccagagagcagcaagaagcgggcccgtaggatgcgaccagacctttctaagatgatggccctcatgcagggtggaagcactgggtctctatctctgcataacacgttccaacacagcagtagtggcctacagtctgtgtcatctttgggtcacagcagtgccacttctgcatctttgccttttatgccatttgtgatgggtggtgcaccatcatcccctcatgtagactccagcaccatgcttnnnnnnnnnnnnnnnnnnnnnnnnnnnnnnnnnnnnnnnnnnnnnnnnnnnggcttgagagcccctggctaccccctcttcaccaagtgactaccgcctctgggtanctaccttgcggtgcccacccactgcaacctgaggaggatgacgatgaggatgaagaagatgatgatgacttatctcagggctatgatagctcagaaagggacttctcactcattgatgatcctatgatgccagctaactcagactccagtgaagatgctgatgactgaagccccagacatgggccccattgcttgggcggctgctgtattttcatttactctggcccttggactatggaaacgtgggaggggcaggggagatgtggggaagtccaggactccaggaggtg

SEQ ID NO: 261256 - DNA, 861 bp, Homo Sapiens
accaatgagatcgtgaagctacatgagattcgggtccgagtccgctaccagaagcgacagaagctgcagtttgaaactaagctgggcatgaactctcccttctgagccactggtgtggtggctgtagttgcccccgtccctggggctaaagccagacccatttctgaacaggggagtttgtatcatgaatgtttccaggtttgctcctgcacccgtggcactggaaacccagctccccgtgtcagaccccgctgtcttcctgagccctggggtcactggtggaggagctgacggcctgggccttggcaagtcctggctcttccctgggcctcaccagggacactcttgaatgtatggcctcaggcgcttccctagaggggccctaaaccccctcacctgtgagctaccccctttagggatcccttgcccccttggagatcccttgccccccagtgcctctgctcgtgggtccctggacacggccttgaagccaaccttctttggaggagcaacagcagcagccttggccgacgcgtccaactcccaaggctgccgtggagggcaggggggtggtgcttgccctggatgtggccccgagtgcctcccctccctccctctgtgggggagtctcccgcctgaacctgaagatggagcagggcccccccttcgccctggagcctcttcctgtgcctggctcaagctggctgcctgtcagtcttggggaatctggcccaggtctcctcagcctctgccccagttctgggagaagtttctactggtgtatattttttactggaaatgagccttttaggaatgaatgtagactggtttgtattaaaatgtgtcaattgctaaagaaaa

SEQ ID NO: 261257 - DNA, 1045 bp, Homo Sapiens
  misc_feature (47)..(65): n is a, c, g, or t
  misc_feature (96)..(97): n is a, c, g, or t
  misc_feature (987)..(1000): n is a, c, g, or t
gcagcaactccctcagcaacagcagacatggggctgaggaacggggnnnnnnnnnnnnnnnnnnngaggctgcagactcttcccacgggaagatgnncaagagacagcgagcgcaatcaccggaccacagaggccgagcccaagcctctggaagagccaaaacacgagaccaaaaagctgaagaatctttcagagtacgctcagacactacagctgggttggaatgggcttctggtgttgaaaaacagctgcttccccacgtctatgcatatcctagagggggaccagggggtgatcagcagtctcctcaaagaccacacttctgggagcaagctgacccagctgaagatcgcccagcgccttcgactggaccagcccaagcttgacgaggtcacacgacgcatcaagcaggggagccccaacggctatgcggtcctcttagccacccaggcaacccccagtgggcttggcactgaggggatgcccacagtagagcccggtctgcagaggcggcttctcaggaacctggtctcctacttgaaacagaagcaggccgcaggggtgatcagcttgccagtgggggggtccaagggcagagacggcacaggcatgctctacgccttcccaccctgcgacttttcccagcagtacctccagtcagcactaaggacattgggcaagctagaagaagaacacatggtgatagtcatcgtcagagacactgcctagcccaagcctgtctttcccagcgtcatgtttgtgtcacaaaagcagttattttaaaatctgatcccctctctaccctaccactttggtttgaattatctcctgggttattttggttcatttgggtggggatcaaagtcctgtccaccaccaaaactaagttcttagattttgggggatattattttttaaaacgatgagaagggaatccggttatgttgatttctagtgtacaagatactgtctgctgtggttctgtannnnnnnnnnnnnngaccacctgtatggaaagttgcacgtgcacacctttggcagagaa

SEQ ID NO: 261258 - DNA, 575 bp, Homo Sapiens
  misc_feature (344)..(344): n is a, c, g, or t
gatttctagaaaaagctgactccatttttgtccctggcgggtaaattaggaatctgcactattttggaggacaagtagcacaaactgtataacggtttatgtccgtagttttatagtcctatttgtagcattcaatagctttattccttagatggttctagggtgggtttacagctttttgtacttttacctccaataaagggaaaatgaagctttttatgtaaattggttgaaaggtctagttttgggaggaaaaaagccgtagtaagaaatggatcatatatattacaactaacttcttcaacctatggactttttaagcctaatgaaatcttaagtgtcgntatatgtaatcctgtaggttggtacttcccccaaactgattataggtaacagtttaatcatctcacttgctaacatgtttttatttttcactgtaaatatgtttatgttttatttataaaaattctgaaatcaatccatttgggttggtggtgtacagaacacacttaagtgtgttaacttgtgacttctttcaagtctaaatgatttaataaaactttttttaaattaag

SEQ ID NO: 261259 - DNA, 492 bp, Homo Sapiens
  misc_feature (84)..(84): n is a, c, g, or t
  misc_feature (110)..(110): n is a, c, g, or t
ggtttaataacctttgataaatttgaaaaatttgtctttaaacagagcctgttagtattaatgaagaaaaagagggatttgaancataacacacaagttaggaaatcaanggaattatagctttgagttacccgtgactgggaggtaaagctctgccctgttgcccctgcatagttcctgactctgccttcacttgcagtaagccccagtgccctaaatgttcattattgtctgcccaggagattgtgaagacctttgagatttcagagcctgtgattactccaagtcagaggcagcagaagccaagtgcttgatgctagctgaaggactcaaatggatagtgaagtccaaaacggaaagcggcatgtattgtacatattgtatgattcaacatttttaaaggcagattgtttttagtaaaatgtagcttttgatagttaataaatttgtcatggttgtctttgattaaaggaaactcaccgccatattcac

SEQ ID NO: 261260 - DNA, 1855 bp, Homo Sapiens
  misc_feature (578)..(578): n is a, c, g, or t
  misc_feature (1139)..(1178): n is a, c, g, or t
  misc_feature (1284)..(1344): n is a, c, g, or t
  misc_feature (1365)..(1555): n is a, c, g, or t
ttttagagaaaatatatttgttagtagaatttaagtattttactaaatgtaaatgaattttcaatgtagattaacttttacaatattgtatcttgctcaactacctgaagatactgaaaacatggccagcgtctaaaattttgatggattcatctatatcattgattcaacatctgctgtaaatattaacaaagaaatgatataatttccctcagatcttaatttagaaagttggtgattgcagtcatttttgtagtatccctctttctaatcacgttttgtcagatgccggcaccttcttttctctttgaggttctatgaatctttcattcttacctgaataatttcacactctccattactcatgtcctcctaaggtctcctgtggagagtgaatatttccatcgcacttacttgctactttcaatgttctcaatgtcctattggactcactagggcttagctctgtggttgacacatagatatgcagatttttcaaatgtctggaatgtgttactctactacatgttttttgaaatgggaaacagatggaatggactgtgctactgttaataatnactacagcagctccataatgcatgaaatcctaaaaagtatgtaatattataagtatcttttcaatacaggtttcattgctattattcatcagtttccgtttagattacctgttccgatttaataacctttgataaatttgaaaaatttgtctttcaaacagagcctgttagtattaatgaagaaaatgagggatttgaacataacacacaagttagaaatcaaggaattatagctttgagttaccgtgactgggaggagattgtgaagacctttgagatttcagagcctgtgattactccaagtcagaggcagcagaagccaagtgcttgatgctagctgaaggactcaaatggatagtgaagtccaaaacggaaagcggcatgtattgtacatattgtatgattcaacatttttaaaggcagattgtttttagtaaaatgtagcttttgatagttaataaatttgtcatggttgtctttgattaaaggaaactcaccgccatattcgcggggaagaggaccgggggacgggcggcggacccgctgagtgggtcggcggannnnnnnnnnnnnnnnnnnnnnnnnnnnnnnnnnnnnnnnaaatgtatcttgtggcggcccggcgttggggcctcaggaaggtttttgcaagagcctcccggtgtgggggggcggccgggccccggtgaggggagaggggaaacannnnnnnnnnnnnnnnnnnnnnnnnnnnnnnnnnnnnnnnnnnnnnnnnnnnnnnnnnnnnggattccgccgccgacggtannnnnnnnnnnnnnnnnnnnnnnnnnnnnnnnnnnnnnnnnnnnnnnnnnnnnnnnnnnnnnnnnnnnnnnnnnnnnnnnnnnnnnnnnnnnnnnnnnnnnnnnnnnnnnnnnnnnnnnnnnnnnnnnnnnnnnnnnnnnnnnnnnnnnnnnnnnnnnnnnnnnnnnnnnnnnnnnnnnnnnnnnnnnnnntggtgggcaggtgggccgggagggcatctccggccgccacgagggtgaggggtagagtcgggcggggggcgcgcgggaggcggagggcgggatggtgtgtgtcgctcggaggccgcgcccacccctctggtgcgcgcggacgggaagcctagggtgttgacggggtacaggctgccgagaggagaggcgtgcgcggcacgacgaatatctcgtatggcgtgcgacgcgcgcaccgtgggcgatggcgcgaggtgcgggcgggctagtagattctcccgccggtcgcgtccgtcggctctc

SEQ ID NO: 261261 - DNA, 507 bp, Homo Sapiens
aaagtcatattccaacttaatgatcttctgaaatataagatactcgtttccagctcggaatggtgggagtcctgccacaagctggtatattatgcatccaagagcccaaaggtctgaactcttacaggcggacttctccgtgagcagctctggagaaacgtactgcgctgttcccacgaatgagttggccctggcttgtttgctctctggggataagacttttgctgttccaaaatctgtgatctggatgtgcatatcttcatttaacaaaatgttttccggtttaaggtccctgtgaatgatgcccttgccgtgcaagtactctaaagcagacacaatctcagccgtgtaaaatcgggtacaggtataaaagaatgaaccgattttgcgaatatatttaagtagttctccatttttggcataactaaggccgaaatacagcttctcgtcgtcctgaaatgtgaagtaaagcttaacaaagaaggggtgatccaggcgcgacatgac

SEQ ID NO: 261262 - DNA, 1052 bp, Homo Sapiens
  misc_feature (97)..(160): n is a, c, g, or t
  misc_feature (504)..(516): n is a, c, g, or t
ggggcacattggggctcggtggtctggtggtcccttcggtcttggccctatctgtcctttgtttttgtgatttactatcaatcatcacgaaccagtnnnnnnnnnnnnnnnnnnnnnnnnnnnnnnnnnnnnnnnnnnnnnnnnnnnnnnnnnnnnnnnntctcactgcttttcagtcttctctgtacttcatttttgtgaaaaagtgaaaatcacatataatctttatttaaaaatgctcaccaagcactgcagactttggagttagggattcagcagcttgttccagtgaaaaggaggagtgaagctggggaagttagtatctaagaggggcaagctgattgcatgtgcatttatacctatgcctttaaaacattcccataaaaagtattaataaagaaatttccattccacactagtactgatgaaaaggtggttgattttgccttgtgataattatcaaaggatagtttttcatccttagattttattcacatgagagannnnnnnnnnnnnctctgttgacttaggaacacatcataaattcacaccaactgacacgttgctgacgtctgtacttgacataaccatttttattcatacaggaagcattaaatataaaagatggtcagttttgaagagcaaagggtgctgaaatgacttgtacggttggctggtgctttctcaaatggattgccatagttcattactagtaaagaaaaggaaaatgtgatttacgttgtcatttttcctattaaaaaaaacccttaagaatggggcacttgagctgtccctgcaatgttttcatatctagtagtcattttagggaaagtgataatctgtagaatgaatagttatgttttgatatgactgatactttctttgttaaaaggttgtattaagtcttcaatttcaagtgtagcttaaaagtgtaaacattatgtgattcatttgaatacaagaatgcctatgaaatacccactataacagcattccttttgtgtttagaactatagaagaaaatgtcttcaaataaagtagttttcagtcaa

SEQ ID NO: 261263 - DNA, 489 bp, Homo Sapiens
tatttctcttctcccgttaaaggctaagaaagcctctgactgaacagaatagcttggaaatcaacttcaaatcactgataccaatatcaatcccaatattttataatccttcttccccctacattttgcttctctttattcaaattcaggttcaatctaaaccaatctggggatatttccaaagggtaagggccataagctcccatctttgccttgggttttgttgagctttattggcttggaccatgtactctgtaggtgccgtgtctgcctacatgcatcactgtagcttgtggagggagggaggatggaagagatgctcatgccagaaatcacctcttttgaaattcagagtccttcctagtcttcccaggaaaaactacagcatcaaaagaacctcattatccttttctctcttttcgtgtgggacaaccctttcaggcgtgtccaagttattgaagtgaaaactgcaggagagctccttgagaa

SEQ ID NO: 261264 - DNA, 646 bp, Homo Sapiens
atccaaacatgacaccaacagcaaacaattacactgtgatcccattgtggtccccaagatatatcttgagatacttcagagagaagctatattcttcataaatcaaaatacagagggtttttatgattcttgctttttataaaatgaaatacacttctatagtattaaaataagtgaacaaaagaactacagcacttactcccctacccccaaatgtttgcttctttgcatttcacaattcatatgcatatctggacgacagttaacctccagtggcaaagataagaaaatgtgaaagaaaaatcatacagattgttcccagacctttcttgtttatggacattaaaataacctcaacaccaatctattaagatgccatctgaaagcacatggaagtggcttagaatctatgccgctgagaaagttaaggaaattccaaagttataacattaatcaaatccatatcaatgacttcctcccaagcattggagtcacagggacttgaatataatttggggtactacgcaagtggttgaagaacttgttctttttgactaacaatactgacactgtttcagactttcagatgcccaaattattaagatcattaagaatgtcaaaacaggccgggtgcggtggctctcac

SEQ ID NO: 261265 - DNA, 1744 bp, Homo Sapiens
  misc_feature (850)..(911): n is a, c, g, or t
  misc_feature (1434)..(1524): n is a, c, g, or t
  misc_feature (1526)..(1526): n is a, c, g, or t
  misc_feature (1528)..(1532): n is a, c, g, or t
  misc_feature (1537)..(1537): n is a, c, g, or t
  misc_feature (1539)..(1540): n is a, c, g, or t
  misc_feature (1543)..(1546): n is a, c, g, or t
  misc_feature (1548)..(1550): n is a, c, g, or t
  misc_feature (1552)..(1553): n is a, c, g, or t
  misc_feature (1557)..(1564): n is a, c, g, or t
tagggaatggctgggcccacggaaggtcggcctgggatgtggcctgggactgctgctctgctggctgctgtgtggatgcttttcctggagcactttccaaggcatcccccagccccaagcctgcgcgcatctgtcactcagggactttctatgggtctttgtgggggaaggccctggctttgtattccccacaagtagcactgagtttcttaggaaatttgtcttcagtattaggtctccaactcttgtaaaaagtttatatgtaggataaaaaccttttagaggacacgtaggcggtaccactaaggttttggtaatgagccattcaaacccgacagcagtgtgaaggtgtgtcaaggtgtatattctcgtggctcggcattctcagtgcaaaggcctgtttggagactctatgggaattgtttttcatctgtttctatggttgtcaaatgaattcttcacccaacctacagtttgctaactccttgaagctatcaaattagtaagacaaggctgcccgcacccagggggcaccatcgcccacttattatttagttttgcggatactcatggaccatctatcacatccagcattgtcccagtgctttgagttggacgggaatgggactctgcagccaaggcaggataagaaaatcttgcaatcccgtcctgcagtgatagaaacaggtcgttctgcattataagccataggtggagcattcggtagcgtattcagactgcatgggccggcctaggagtctttgccttcataaattttaagaaccccgcccacaacagggagttaaactggaggactttgcatgattagttcagggatgagtggtttctnnnnnnnnnnnnnnnnnnnnnnnnnnnnnnnnnnnnnnnnnnnnnnnnnnnnnnnnnnnnnnccgttctggagaacaggtcacgcctgtcctggagacagtgtgccgggaaaagggaacgtggtactcactggatgcacccaggccggcccgagcctcccaccgcagacagtgtggaacagagtgagcctgagctgcccaaggcgatgccctttgtgctgtatgactggaggcctctccgcgtgggtacttgggggtggggccacaaatctggcgaaaaacttcatgctggccgccgtgaggttttactccagcgttcccgccattgtcatggcgggtcttcgtcctaaactgagaagaaaagcattcctgtttgatcaccgccttagttaccagttctggatcagtcagtgtttctgcatggaataacaaccattaaaaaaagcactgggttctgccctttcatctttgtaagagattcttgcctctagcaatgacaacctgtgatgtctcacagtagagcacttagtgcagaatcaggtccccacggctgttgctcaataaaagtggcggaataaagtgcaannnnnnnnnnnnnnnnnnnnnnnnnnnnnnnnnnnnnnnnnnnnnnnnnnnnnnnnnnnnnnnnnnnnnnnnnnnnnnnnnnnnnnnnnnncncnnnnnccccncnnaannnntnnnannacannnnnnnnaaaaatgggggggcccccctgcggcccccaaaaaaagttttctaaaaaccatttcctttggggcgcgcgggggcccaaaaggaagaaagggagaaagtgggccacatacgttggttccccaaaagagaaacaccggggccccgaacaaaaagggggctggggggcttcccccccgcaaat

SEQ ID NO: 261266 - DNA, 777 bp, Homo Sapiens
  misc_feature (39)..(39): n is a, c, g, or t
  misc_feature (120)..(120): n is a, c, g, or t
cccttcaagtagttggcactgagacaaaacatggccttnctggtgcattccccaacaatgtcaaaagtctcaggggatgagctcacagttgggagtcctttggaagtccaattccaaatncctctggactcaaaataaaaactacatttcccagtctcccttgtagcttgcagtagccatgtgacaatactccagccaatgggaagtgagtggaaaagtcctgtgcagcttctgagttgcgtccaccatgggcatgggtgtgcttctacctccactcttccttcttctggctggagggcatgtggacaaagcggggccatggtgagcctcacaatcaaaggcatcattttagggatagagaaaaggaagatagaaggatcctgagccccaacatcataaaccatcgtaacagccagactagcgtgggagagaaaaataaaattctatcatgttgaagtcactgtatttggtctcttgttagagcaggctgactgatactctgttgaatacagaatgccttggtgagcctctgaggatgcaggatgctgcaatccaaccaaagtccagggtgactttcgaggagaaggatgtgaaagggcagggcttcctttgagggagaaatggagagaagggaggagatccagagaagagagagcgagatcagctcagtgctcttcagtgtcctccagggtcaacaccctcctgggcagacctctcaccacccatttttgggggggcaagaggcttggggccaggtcataaaaagtcagatgtaac

SEQ ID NO: 261267 - DNA, 658 bp, Homo Sapiens
  misc_feature (190)..(190): n is a, c, g, or t
ttgaagtccactagtggagaatgtcaagacaagatacttattaccatgacatctgatgcatgtgcagcagtggggagttctagattgatctctgaatgtgatcgacgcccagcaaggacaagctttaaaatgtctgcggtctgcccttgttgaaagcaggactggctcactctgtcaattgggagctgtncagctgcgactgcaggttctctaggaggcattccagaatagagtagcacactgtgtctgcagttctcgatgaccgaaagttatcaaaaatatttaaaatatttaaattgtgaacctattgataaagaatatttataaaaactgatctgtaggcctgtactaatctctacgcattagcaatattgactgtaaacccacattaaggaaaccactacgggtctggcagtgcgtgtcccgtggggtgtgcattttaaaactcgattcatagacacaggtaccatgttccatttccgtcatggtgaagcaaatgaattggcctggctaccactgtggtcgcgtgctacaggtttgacaaaaagatatcatgtttcgatttttttgtgtgtggacaacaatatggaagctaaaattgacatatttttatgtaaagtttttctattctttgatttttaataaactttggaaacca

SEQ ID NO: 261268 - DNA, 402 bp, Homo Sapiens
  misc_feature (342)..(342): n is a, c, g, or t
  misc_feature (386)..(386): n is a, c, g, or t
gatcatttgtgcaagttcagaaacaatcttctttcttttcctttgtctttttttccactttaaaggaaaatgaaatttactggcttctctttctaaagagaaggggcaaggaataaaaataccagttatgtaatagtcatttgccttagtcatgcagccctgccggagtgctgttcgaacagaaagatgattaagttaaacactgcatatttattcccctgcggtcaccctaattggttctgccgctgtaattgatttgacaggttaatttttactcagaatgagctgggttcctctgctggcttgcagatttgctcttgctcctcgagtccaaggccgggnaaatgtcccagaatgggcagaagtggctgaattctacctgaggnaaggggaaggggggcc

SEQ ID NO: 261269 - DNA, 880 bp, Homo Sapiens
caagtcggtgagtgaaggaacttctacctaagcccctgctattttgtgagttctgttctacctgcctcccaggctatccacaggaactgaggaggtgggctctggactcttacagaatagtcctgagagtgagatagaccctgaggagaaagctggcaaggagagcgatgagaaagaacaagaacaggacaaggacagggagctccaacaggcagagctccctaaccgttccccaggctttggaatcaagatggagaaggtgaggggcaggggccctaggccagtcagcacgctggtcaagcttccacggcccttagtgcaggctaagggtgaactgtgcctttgctccaacagacaggctgggacacgtcagaaagtgagctgagtgagggtgagctggagaggcggcggcggacactcctacagcagctggatgatcaccagtgacccaatgagctgttctctgcctcgggtctgtgtgaggccatggctcctgggccaccctcaccgtctgcctcagacttcttccttagtctggtctgtgtccactttttctaaagtaaccccacccccagcacaccattgttggcacctctcaaggttgctcttggtgttcaagggtcccctactccctggactagtgcagtccttgccctcagccccagaccagagatgggtggtatatgccatgtggggtgggtgatgccagtagataaaagtgtgagagaaggggtctccagggaagagtcacaggctgttggacgcagcctgggtggcagagggcagggtcatcaccctctagcatcagtgcctgctcctgcctgccctggccctgaggctccaccacttcttcctccacccaggacctaatgtacgtgtg

SEQ ID NO: 261270 - DNA, 770 bp, Homo Sapiens
gatttatgatgaccccgtttcctatccatggataagcacctcagaaaaagaatacatcatatcctccttgaaacaacaggtcgggtcttctaagcagcctcttcccatcaaagctatgctcagatctctacccatttggtccatatgtttaggctgtttcagccatcaatggttagttagcacaatggttgtatacataccaacttacatcagctctgtgtaccatgttaacatcagagacaatggacttctatctgcccttccttttattgttgcctgggtcataggcatggtgggaggctatctggcagatttccttctaaccaaaaagtttagactcatcactgtgaggaaaattgccacaattttaggaagtctcccctcttcagcactcattgtgtctctgccttacctcaattccggctatatcacagcaactgccttgctgacgctctcttgcggattaagcacatagtgtcagtcagggatttatatcaatgtcgtagatattgctcacaaggtattccagttttctcatgggagcatcaagaggattttcgagcatagcacctgtcattgtacccactgtcagcggatttcttcttagtcaggaccctgagtttgggtggaggaatgtcttcttcttgttgtttgccgttaacctgttaggactactcttctaccttttatttggagaagcagatgtccaagaatgggctaaagagagaaaactcactcgtttatgaagttatcccaccttggatggaaaa

SEQ ID NO: 261271 - DNA, 639 bp, Homo Sapiens
gagaattgggtgaacaatcttgctcttcctatttcgggatacctgcttcattgatgggtggtctctaggacttcagagggaaaggctgaggatagacttagaccttggggagggtctgagccaatcagtgacttacattcactcagttgccatctaataggtggtcctcccttagaaaattggcggctttctggcagtgtttggccctctctttggggaagtgtggattactagagtgcaggcgacagagatggcctgggatggacagcttagtcatcatgaaagaatgtgtaaggcatcgggtggcccctgaattctgtctgacacatttgttttcccagaaatagaattgcattggagagttggggcccagttattagaaatatggggatggggtgcttgtacttgttgcagtcttgtggcttctcataatcttttctctcctaatccttcctcttgcctacatgttgcaattctgatgactttttgcagcgcacagttcatttttcttcagcatcccgctcagcacactggcttcctttatgtcttaatgggcatccgtctttccttttcatgtcattgattctcactcgtggcccccatcttccctgtatgcttattgaataggtgcttaaaaaa

SEQ ID NO: 261272 - DNA, 594 bp, Homo Sapiens
  misc_feature (484)..(493): n is a, c, g, or t
aggatcgcatgagactgtctttgcttttatttaacaagaggcgaaatgagtatatgctgtaattctgcacctgttctatgtatcttgcctgcggggagatactctctataaaactatgcactccatagctcctgtgatgaacagcattcaaattctgcctgttatgaggtgtaattcaataagcaccttttgctgagcagctctttgcaggatacgtgaagggctgagctaagaataaaagcccttttggcaatctgatacttcgccttctcttccactcagttctcagtcgatctcaccatcagataccctgccaaaggcatcactctctcaccagtcacttgctcacatatttatgccagtaacagtgctgggtggggaaatatgatggtaaagtacaatcctattttaagtttcttatctaccacttaggaagggtccccagatggcaagctagctaaaattattattatgctactgaggnnnnnnnnnntagatgactcctctgtggaatcttaccagctcacagtgagtgaggctagtcttacgttaaaaaaaccaactcaagattatcaaaagaatgtcatcaaactc

SEQ ID NO: 261273 - DNA, 812 bp, Homo Sapiens
  misc_feature (67)..(68): n is a, c, g, or t
  misc_feature (129)..(188): n is a, c, g, or t
  misc_feature (728)..(728): n is a, c, g, or t
gcttcctgcccgcagagttgtccttgcagcatcctgaaacacagatccatgcagaatgagccctgcnngcaatagagttgaagcagcctctgctggacagtggactgttctatttttttcaataaccannnnnnnnnnnnnnnnnnnnnnnnnnnnnnnnnnnnnnnnnnnnnnnnnnnnnnnnnnnngtaaacaaatcagcatctttttccccttccctgcttcattaccccctcttccatctatagactttgtcatttttgtctttagaaaagatctgaaggatggtaaagccccgtgctgaaacccagtagagaaacctgtctcaggacacacttgccatctagggctagcttgaaagagcctgaggactgcctttaactgaatttgaattcagcattgtcctttcttcttagtatttgctgcataattgagagcagttcacatcgatttcctggtaggcgtctgcattccctgttgtgttcctgcttctccttcagtagctgcacaacttgcgcagatcgacacactgttgtcacttcattctccccgtctgagaaggatcttgtgttcagttagagtcgtggaaaaatccctgatccttcaaggtcagtcagacagttggcaacattataattaaaaataagaaattaagactttaaattaaacatttggtagagtcatcataaaacaccagaccacttagactcaggctgaaccatactctntctattcttatttttcatccttgttcctcacggttcagtcaacaggctcatatcatgacagaatggacttttaaaagttagtac

SEQ ID NO: 261274 - DNA, 684 bp, Homo Sapiens
  misc_feature (523)..(561): n is a, c, g, or t
aggcatatgtagtaatattagaaacatttaatttgggaaactttgattcttgaaagagaaaacaaaagcatgtgaataaactttgaagtgttcacctcagtttgggaccaaactgcttggatctttgtaaaaaccggttttgtatgtcaaggaggagtttaaggcctttccgaccaccttgtgttccccttttctgcgcagccatgtatcacgtggagttgctccttaccacacctcacgtgcccctgagccctatttcctgatttcttctgggctggacttccccgttctccaccagcagctccagtatcccaaactttctagtcctgctgatcctcccagcaacggggtggaaactggagggcagtgtctgggtctgttttctaaggaaacttatggaattctattatctttacaaatatgagaaaattttttcaatattttttattaatctttttataaaatgaaaagaaactcctatgatcgattaaggaaagtggttatggctgggtgggttcagggnnnnnnnnnnnnnnnnnnnnnnnnnnnnnnnnnnnnnnnaaccttaagctgttttagtttgaacccttttcaaatgtttggggggaaacattccccttaaaaagggtcctttggtgctttccttttgggggaaggtgtccttgaccagtgaattctttaagg

SEQ ID NO: 261275 - DNA, 1103 bp, Homo Sapiens
  misc_feature (165)..(201): n is a, c, g, or t
  misc_feature (625)..(653): n is a, c, g, or t
  misc_feature (952)..(953): n is a, c, g, or t
actggagggcagtgtctggtctgttttctaagaaacttatgaattctattatctttacaaatatgagaaaattttttcaatattttttattaatctttttataaaatgaaaagaaactcctatgatcgattaaggaaggtggttatggctgggtggttcaggggnnnnnnnnnnnnnnnnnnnnnnnnnnnnnnnnnnnnnaaccttaagctgtttaagttgaagcattctcagatgtttggggggaaacatcctcttaaaatgggtccttgtgcttgccttctggggaggcggtcctgagcaggtgaatcataaggcatttatgcatatgttatatgcggactgcacccacctctcccccccagcctttgcctcttgggttgttgtgctgctttccccttactttgctacatttctatagttaagttggttttacttgaatgattcatgtttagggggaaaatgaaaatctcccttaaaatttgtttcaactcctcctgcaaataaaataaatgaagtggcagatgtaaaaaaacccacccaccgaaacccacaagagcccccaagatataaccatgcccgcacaccacgccaaaaaagagcaacgctcatatcctataatatnnnnnnnnnnnnnnnnnnnnnnnnnnnnngccatcgccacacccgcacacattctacttatcccgtttactattccccccaaaatataacccacctctttctggccctgtacttcctctcccccgctaaagcacaccctccctctatattaacaacagtttttctccggtgtgggtccccgcagttcgcctccccaaaatatatttctgaacgatcccccggccgcaccaccagccgtcgttctctttccccgccacccgcaaaggtcggagcgaacaatacataccgccgccgctgcttcttttttcttctaatgagtaaaaacccnnccccctctccgagcggcgagcgaaatgtgtaaggccgcccccatcaaaagaaaaccgcccccgcgcaagtatcccctagaacatttcaaaattggaaagccccacccttcaccccgcgcgcgccttccttacccgtgcattctttatacc

SEQ ID NO: 261276 - DNA, 567 bp, Homo Sapiens
ggaacatggggcaggtggctggtgtggggtcccagcctaagagccacctgctgcagttaccatggcatgctgagttgatgcaccaggtgcagccgccatccgttattatttccaatggagacctagcccaggccaaggtaaagttagttaatagcattgggatatagtcactgtaatggtgctattaacaaacagtcaacaccattgtattttttaacttcgtgttctgtatctcctcagccatgtatcttaaatatattttgtcatcataatctttatggtgggggcagactttgcacttactgcagtgcaacacttgcactttaattttcctccaactgtctaaaattagagcaaatacattggcaatacagctgcttttgctctgagctacaatcatggcttttcatgttacttaccaagtggtgtttctggttaggaatcacagctgtaaaattgatttcagttcatcacacttcttcatgatgttgcccctaaattttgcacactatattcttgtatattatttcaaataaatggaaaaaaaagttgcttatttttttataa

SEQ ID NO: 261277 - DNA, 592 bp, Homo Sapiens
tgggtcagtgacctgcacggtgattctccacctccaaaggtaggggtgggactggaggcgtccctaggtcaggccgttgagttcgagctccgatgggccaccttgaatccaggactgaccgcccgtgtgtgcacagtttgttcttggacgaggactcgtgaggatcgagggctggggaccccggtgtgagcaggatggggccctgccctcccgtgggagttgtggactcgagcccaggggctgcccgtcacagcggtgtcccaggtccctgccatccgattttacctgggatgtcttctctggagtttggaattgcttgaggaaccctgcgtgtgcttggagaggccagagggcttgctgagaaccccatggacagtggagagcgggattcgaaccaagggctggactcccacacctctggcctgcgtcgcccagttctttgtggctctgaagaattggccgctgtggaaaagagcaaatgtccgagacccccaacaggaagagtctaaaaatccagtttgcaaccacttctgacctacaaaaaaatggaaatttagtgtttttcagcctaagacattaaatttcatatcag

SEQ ID NO: 261278 - DNA, 1565 bp, Homo Sapiens
  misc_feature (49)..(58): n is a, c, g, or t
  misc_feature (60)..(64): n is a, c, g, or t
  misc_feature (66)..(68): n is a, c, g, or t
  misc_feature (70)..(75): n is a, c, g, or t
  misc_feature (77)..(79): n is a, c, g, or t
  misc_feature (134)..(134): n is a, c, g, or t
gttctaggaaaagctttcttgcaggggcccgaggccggcccgacaaggnnnnnnnnnntnnnnntnnntnnnnnntnnnaagtgtttgccttttaggttatttatttgcccagggaatctttgactttcccganatatgtactgtttgagggtacgatgcatgcagagccttttaaaatgcctttgtacaatttcatctcaaaatgatttcattcacagcatacacagaaatctaaaaagagacatggtatttacaagatttaataagtttttgctgctttaatgaagaaactgatcaattcttttacagtagggaaagaaacatggacattgggtatcataaataattcagaattgttcagtctcaaagtaacttttcatggctttagaattaaaattgagtcatcattctattaatctctgaatgcccaagccatgcagaatctacttgtattaaatatttggggatgcaaataatacaggaaaaaaagtctggtgaatgtgaaaacgtcatcagaattaacctttacaataggcaaatactgttaattctttcgaaaagatacagtagtggtgcaacacagacagtgcccaatttattctgatttttaaaagtaacatttcagttgtcatttttctttctctacagatagatatacagacacacacggtaacatggactcattcaaggtctaacaatggtacaatattaaaataattcaatttttaactataaagggacatcttcacattccaggatacatcattgatatttttagaggacaattcttctatgccttatattctttttgtttatactgtcagaaatacattacaattacctcttaaaagactatataaaattgaattgccacagaaggttggatatgaaccctagacaactgtgacaaagcaatgacaaaatttaaggaaacattgatttatttgcataattaaaaagtactaaaattgagaccagctccttaaaaattaaactgcttatcacacttcccatttcttccagggaaataaacaaattagcaacactttccccaccatcattattaatttgctctaaaactacatttttacaatgcatttctttgtttctttaaagccccctgcctctactctcttccaaacaaagtcaatatcaattcaaaacattttacaatgcttaaaaagtttctggctcctctattaccattttaaacttttaaaaactactccaaaatttaaggggcaatgtactttaacaaaatggcaaacgtgctttctaaaatcccagtttacaaaatagcgaaataatgtaaaatgtatagtcaggcctatatgttaccagatacatcaaactagtcattttaaagaaacctcttacaagaaacaagaagtgcaccagctgatccagctggcacctcagcagccaggagtcatccgatttatatcctaccacttccatgccaattgtctgtacataccaactgactacaagatccttttgaaaaggcatcttgaaagttgggtgaattcttgttcaaactggtcataggcaaaaagcagtctac

SEQ ID NO: 261279 - DNA, 1203 bp, Homo Sapiens
gattttgaatagtttattaaaggaaaggtgaagcatcagtttcaaattgtacaaaaggaaaaaaaacctcatattgcaaatgtacaatttacagaattactagcaaaaccaatcaaggagacaccgaaaaatacaaaaatttgattgacttcaaactgaactggaaacccattggagtagatatttagcctttttgtgtggcatggtagtctacaattctgtcagcatctgttttccatacaagactgtcacgcaaaggatcaatttgtgcatgtgccagggcacctcatggcttgctccctggccaaaaccacaggcaggcagggctggggtggacagtccagtcattcctgcaccttcacttccagtgaagcccacaattctgggagaaagtgaggccccagctcccctaactggagcccaagaattgctgaattagcagagaagatatttttggtgaccaggtttttttcagaactgtacaaatgttgagaaaaatgttttgtgtctttactaaaaggatgaataaaatcatccatcatcatcttgctttcccgcacaaaagatgatcactgggtgtgcagaattttaaaaaatgtttttcgtatttgataaaaagggaaagcctcatgattctgttgcagctactttaaaaaccagcccagaaacagctgtggatgaattggtttggaaattctgaggcttactttagaaatcagaaaggaagagactaagtggggtttttaaaacaatagcagcaagtcataaaagtctaggcagaatgtaactctaaaccattgtagactgtcctgaagattcataatttctttccccaaaagaattattcttaatatgcacatttaacactgaaatgtagctgtaattcaaggtaagcttaggaacttcaccctctaagcacagacttctatgcagcacatacttctataatcagtaaacttaattcacaaaattagcgcataagggtattaagtgcatgggaagtaaacacagttatgttacacttaaaattacttttgaatgattgataaaggatttcttcatgattgattatcttaagaaaatggaagtctgtgtaacttgaatttggcagggcatgaaataagtggtaaaaacagcaaactgataacttgagaatcattttcgttttactgagaatactttatttgctggtagaagttgcta

SEQ ID NO: 261280 - DNA, 610 bp, Homo Sapiens
  misc_feature (59)..(71): n is a, c, g, or t
gaggcacaggtaaggctgattgctagacactgccgtccttctttattactaatctgttnnnnnnnnnnnnnttctttgttgtagtgttttgttagtgatggtcccgagactgctaacctaatgaaaaactatatccagtgtctgctagtgtccagacaaaagaaaatcaacagttacaagcttttcataacgtgaggggaaagtgtgcggatattttgacccataagggaatttatggtgtatggaaagcatgttatagaatttgttgcctttagatttttattcttgtcttttcaaggctgcaggactgtctcagaagggaaataatatttaccttccaaactgagatctaaaacccgaacaaagcctcaggaaacatactccaccaccatcttacaagtttgtgctacgggtggagggaaaatgaatctaatgtaggaggcctcccgctgtgcgtctagcaggaaagaccatacggtgcaagtctccaggatcactagaggggtggattgttcatttcagtccaggtagcaacaggaagcccgtgcaaatgttcctctctcactgcggggctaaggagtgtgggtcctttcccgcgactacctgcttg

SEQ ID NO: 261281 - DNA, 620 bp, Homo Sapiens
agttgctgctgatgctagaaggactagtagatgaacggagtcggctcaatgaggccttacaagcagagagacagctctatagcagtctggtgaagttccatgcccatccagagagctctgagagagaccgaactctgcaggtggaactggaaggggctcaggtgttacgcagtcggctagaagaagttcttggaagaagcttggagcgcttaaacaggctggagaccctggccgccattggaggtggggaactggaaagtgtgcgaattcatcacaagcatgcctactgagcactggcgggtcagactgcagcccaggatggaaaaccttgtttgcactaaccagaaagatccttgtctgattttggcagaattaaacggtgacttactaatgatagaactggtacaagtagcatcaactacaaagtgaaactcactttagcctacatggatctcactgtacatacatatcaatccctaaattgaatggtggaggttgcaaagtgtatttgcacattttaaatcattctgttttagtttttccacttttattcattcttatccctagccccttctcgttccctcatcccttctgtgggccaataaagtttattcttcccc

SEQ ID NO: 261282 - DNA, 636 bp, Homo Sapiens
  misc_feature (531)..(531): n is a, c, g, or t
  misc_feature (585)..(593): n is a, c, g, or t
ggggttgatgggtacagggtctctactttgcataattttggggccactgttcacatagaacatttgcgatggagtggtgctcctcgattcgtttaatggagagggtttggatgtgcttttgctttttatttaacacatgggtatattacttttctttttctgcaaagagcacttattaattttatagttttttaaattggctttgcccgcttcagtagtcacaggtagctacctgaccgagaagccgacttgggaattactgttactcgtgggtgatactgtcataaaggggttgaaagtacttgttagctgtatatgtcagaattgattaaagagaaccaactattcttgtgcaagggatggtattgtagttaattatgacatttggagaaactaatttctgtctgtcgacactatctctgttccatttagacttagagacttacatgggcaatgcttgactttttgcattcagcacagaaagttaagtaatccactgtggtaaaatattaactaaatttatatgacttncttgactgctgtaagtaggagaatatttatcatataagcaccattttcctgaannnnnnnnnactacatattttatcttactgtcactattgtgtaaaatctttg

SEQ ID NO: 261283 - DNA, 504 bp, Homo Sapiens
caagttctgttcattcttatgggaggctatataattttgtcagatactttatttcatgcctgagcaagaatgcttcctactcattggtcattagctctgcccatacatatatgttatttaattgaaccctcacagtaaccctgaaagtttagtagaattatttcccattttgaagactagttgaagcatggagtggtcactgaactaagttgtcatgtagtacagagacagcttgaccctagcacatattgtagttcaccaggatgactttgaagtttttctgaaatagaacaatatgatgtgttttgttgtgtagacaagctgaagtcccagttttctagttgttttctttgttttaaagcagagattctaggagctgtagggcaggcagctcttaagaaaattgggatgaaaaggattagcagttcttttacctgctttgtagattgagagccctgtaagattttgcctgacaaggggctcttatgcttctaaactggaaaa

SEQ ID NO: 261284 - DNA, 1305 bp, Homo Sapiens
gggtacaggtccggaattcccgggatatcgtcgacccacgcgtccgattacattctccttgatcgttcttgttattacgctgtttggtgaacctgtagaaaacaagtgctttttatcttgaaattcaaccaacggaaagaatatgcatagaataatgcattctatgtagccatgtcactgtgaataacgatttcttgcatatttagccatttgattcctgttgatttatacttctctgttgctacgcaaaaccgatcaaagaaaagtgaacttcagttttacaatctgtatgcctaaaagcgggtactaccgtttattttactgacttgtttaaatgattcgcttttgtaagaatcagatggcattatgcttgttgtacaatgccatattggtatatgacataacaggaaacagtattgtatgatatatttataaatgctataaagaaatattgtgtttcatgcattcagaaatgattgttaaaattctcccaactggttcgacctttgcagatacccataacctatgttgagccttgcttaccagcaaagaatatttttaatgtggatatctaattctaaagtctgttccattagaagcaattggcacatctttctatactttatatacttttctccagtaatacatgtttactttaaaaattgttgcagtgaagaaaaacctttaactgagaaatatggaaaccgtcttaattttccattggctatgatggaattaatattgtattttaaaaatgcatattgatcactataattctaaaacaatttttttaaataaaccagcaggttgctaaaagaaggcattttatctaaagttattttaataggtggtatagcagtaattttaaatttaagagttgcttttacagttaacaatggaatatgccttctctgctatgtctgaaaatagaagctatttattatgagcttctacaggtatttttaaatagagcaagcatgttgaatttaaaatatgaataaccccacccaacaattttcagtttattttttgctttggtcgaacttggtgtgtgttcatcacccatcagttatttgtgagggtgtttattctatatgaatattgtttcatgtttgtatgggaaaattgtagctaaacatttcattgtccccagtctgcaaaagaagcacaattctattgctttgtcttgcttatagtcattaaatcattacttttacatatattgctgttacttctgctttctttaaaaatatagtaaaggatgttttatgaagtcacaagatacatatatttttattttgacct

SEQ ID NO: 261285 - DNA, 635 bp, Homo Sapiens
  misc_feature (540)..(540): n is a, c, g, or t
  misc_feature (620)..(620): n is a, c, g, or t
acaggcatgagccaccatcttcagccagatgatttttttattgagagagtgaaatgctattttgttccccaaatggcgctagtgaatcactaggagggtcccactgataggccatgtttagcactggttgccagggattctctttttgagagagggaaagcaaaatgaatggaagtacccagctggaggtttcagggcttctggaggatgctctcgcatagctcgaggtcctctgcccacctcttctctccaaggaaaatgaggactgccccttccccctgcaggattggcccccagcctgcgcatgcaccctcctcttgcccaagtggggagcacagaggcggagaggaatcccttaccacacccacggcccagcttgctcacgagtgtcacctctgtgacggtcaccactgctcccttggagggccacttgagttactgttgcttcctcgcctgctggcttgatgagcaccgatggtgggatctgaccccgaggggcagagctgtcggtgactgaggactggactgtggtgaccatgnccgatttgctcagggagaacgttgcaatgcacccagcagctcctgggtcttcaggcggcacagtgggggccctgtgatcngtggtttcttccatt

SEQ ID NO: 261286 - DNA, 773 bp, Homo Sapiens
gtcattctgaaggtaagtttaacatgcagggctttttggctgtgacgtaggttttagaagacaatattcccttcaatggaattctcaagactgccaagatcttaaattaaggaatggtttataaaatcatgtgtcacattactgctatcttcttacctctatttggaatgaatttccttctctactgtctttcctatgccctatgtggtcctccctgtccatttctcatcctcttctcttaaattccaataggacttacctactctaagtaaaaagatcattttgcttttgcagcatctccccttaatgcaaagttgtttaagggaattattatgaaaaagaacactggtagtcagctcactaaattgctactattcctgcttagacactgttcctgaatgttttctataaccattctgactggattttgatgtttagaagaacaaaagttatataatacttctattcttttttaaaaaatatttctcttcttgattctttatcctcctgagtgtccttgttaaaattagctgggattagggcattagtgcttagtctttatttaattacttgtatacctaactctgttgctctaagaagaggaacaaatgtgaacagatgatggaactggttaagctggtcaggcaagaataagaagatacctgggaggtaccaactggccatagggagtaataggctaaggaaattaatgtgcctattttctgtggttttagaatcctaggcatattcaaataactgatttggtattttca

SEQ ID NO: 261287 - DNA, 562 bp, Homo Sapiens
agaatcacttccagtgacacctttcaatggccactgtgaattctcccctccctttctccctgtctgtctggtttcaacgtattccatatgggtaggaaccaatttctgctgtggaataaatggctaggtagagaggtgtcggtgggccttttttcttttcaactcttgtgtcaacgtcaagcccctcctaaatgggcagagcctcgatcaccctcttgccaaaaacacacaggaacccataacaatcctcaatccggagcaataggacttctgcaacacttttcccccaaattcaaatctcctttgaagagcctaaagcttaaaggcataagcttaaccctgggctatgtgggaagaggcagtctgagaaaaacttcacacgccagcgagcaaaggccatcggaagttacgtacgccagactcaaaactcagggttctactttgttctataagaacgcccagaaaggagaactcccatcaaggtagaaatgtaaagccgagaacagcgctgagcacttgggtgtaactcagggactgatcctgcggtggcccgtctctcctg

SEQ ID NO: 261288 - DNA, 763 bp, Homo Sapiens
  misc_feature (564)..(655): n is a, c, g, or t
  misc_feature (658)..(658): n is a, c, g, or t
  misc_feature (719)..(719): n is a, c, g, or t
  misc_feature (737)..(737): n is a, c, g, or t
caaaaataaattcgtgtttgccaactagtagtaacagactgatttatttgaaactgttagtggagctagttatattttagtgaaaattccgcatgggggaaaataacccaaaagaaaatggtaagagattttagcaggtaagtccattttatcatgtaatatttacatggatttgctcattgtttaggagagagtggcagtggaactaaaacactcccttctcattaggacctggctgtggataaaaatttctccccaggtccatcccatcttatgcagtgacaatgacctgtaatgctatcctgacaccaactggtaacatactgcagtataattcccgggctaaccacccagagtcagcacagaccacacaagttccagggcatagtcctcaaaaagatgcccttacttcatacgccaactgctttttgggtgaccccaggccactcatactttggaccaaataggtacaaattcaggggttaccatcatcccttcagtttgataattcactagaatgactcacagaattcacaggagcacagtacttgccattacagtttnnnnnnnnnnnnnnnnnnnnnnnnnnnnnnnnnnnnnnnnnnnnnnnnnnnnnnnnnnnnnnnnnnnnnnnnnnnnnnnnnnnnnnnnnnnngtnctttgtgggatctggggtacattcacccttctggttacggttatgtgtttaccaaccgggnagctccattgagcttcanttgtccaagtttttcacaggggtttc

SEQ ID NO: 261289 - DNA, 635 bp, Homo Sapiens
  misc_feature (250)..(250): n is a, c, g, or t
gttttgaatttatgatttaggatattccaaaataataatattataatcacaattcctctatttaaaaatatacaaacagaaaatacgcaaataggagggcctaaagttcagtgctagtacacagttcattattactgaacaaaagaaacactgttattaacttatacctggtatttactatcttcatttttctatagtattgtacatttttcaagaaaattgttgctaaatctagaaatacaccatacantccctcatggggtagagtttgtatatctaaccaaaatggaggtagaatcaaactcctaaaaaatgtttgtgtagcgatgaaaataaatataaaaagataaacaatgaaaaaggtaagaatggtacctgagtggtaaaattatagccagagctgtgttccttttgctttgttttatacacttaactactgtgcaatgaacatatagtttgtttaatgaaaacaataagaattccacgcaacagaaaagatactaaaattgacagacttcagtacattgttaggactctcaccaataacaatccttaattatgaacctatactatcctatagtaggacaagctatcctagagtagaaaacctccaattttctacacaataacaaatt

SEQ ID NO: 261290 - DNA, 948 bp, Homo Sapiens
cttgatggtaactatagtgtaattatctttttgtctcactggattttatagttagtggaaaatgcctttacaaaatgtatttaaaatagctgtcatctcatttgtaaattttgtcgtgtattgtgatatagtgaaccttattgtccttatgaaatggtagctttgtgaaatacattcaccaaaaatcaaaatttgaacatctttatgattccttaccagctgaagccagatagacaggtattaattgagctgatgccccacttgagtttatagactgtttgataactgcctgtcctccaaattgtgtatgtatatgttacgatggtttaattcttgagtcagggccagcacgcatttatattttctaccaattaccttgatagaaatatcttagaaattgctgacctggaacggttgtgagaagactcctggcttctttcttgcctcacttaacaaatattttaaggtcaaagcaatatctgtgcacggctttccttttgctcctccagacaagtgaggctgttggtatagtcctcttcaccctctgcatgtagcttcaccctagatcagacttttgtctcttgggtcccagatggcacaggagcactgcatgcttgttttctagagcccagccagtcatgggtgctagcctagtctccacacaccagcaagtagaacccaagtgtattgtataaatatttcctgagtaccagtaagagaatgcattcttttctcatctaggccaggaatgttgaaaatgctcagccttacatagaaactcctagattttcactaacgcatttcacaaaagtaaataagtatttcatataattcagaggatgtttaaattgtcagcattttaataaatacttgcattataattttgtctcttttttaaagaaagtcatacttgaatataatttattaaacgttcaatggagtaaaaaa

SEQ ID NO: 261291 - DNA, 777 bp, Homo Sapiens
  misc_feature (100)..(181): n is a, c, g, or t
caaagggtcaggaaatagggatgggtgctctgaagacttcgataatattatgttaaaggaattatagttatgggcaaatgataattaaacatatagcaannnnnnnnnnnnnnnnnnnnnnnnnnnnnnnnnnnnnnnnnnnnnnnnnnnnnnnnnnnnnnnnnnnnnnnnnnnnnnnnnngagagagagacggtcttctctcttaggcaaaggtagttgagtattaaggggcatagatcctaaaaaaacatatacctagccaggcagggggcttgtgcctgaggtcccagctactcaggaggctgagggtgtgaaagtactttcctgtgtgctatgtaagtgaaagggattatcctcaattatgtcatttttaaagaggtaaataatgctgcaggtagacacagttgggctgcatttaatctaccagtgggactgtggaccctttagttattttctccagctcactgcctgcctttggttttctttcaaataccatcattatattcatttacttgctttctatcatactgtatgtgaaaataacagcaaattgctcattttctctaactctagtatgaacggctccattggccatcagaacagaaactgttctacagtcacagggacattgctgtgaatgctgctcttgtcatgagggcgaaggctctgacacttaggagaatcacgtcttgtctctctgtaggggagaacatgaaggaagcctgcggatgaagacagagttactggtgcagatggatgggctggcacgctcagaa

SEQ ID NO: 261292 - DNA, 977 bp, Homo Sapiens
attcggcacgaggctcatcatctaagtaacttccagttccgttggagctgggaagattggtcagattgtcttagtcaagatcctgaaagtcccaaaccgaagtttgtaagagaagttctagaaaaatgtatgaggttgtcttaccatcagcgtatattagatattgttcctcctaccttctcagctctgtgtcctgcaaacccaacctgcatttacaagtatggagatgaaagtagcaattctcttcctggacattctgttgccctctgtttagctgttgcctttaaaagtaaggcaaccaatgatgaaatcttcagcattctgaaagatgtaccaaatcctaaccaggatgatgacgacgatgaaggattcagttttaacccattgaaaatagaagtctttgtacagactctgctacacttggcagccaaatcattcagccactccttcagtgctcttgcaaagtttcatgaagtcttcaaaaccctagctgaaagtgatgaaggaaagttacatgtgctaagagttatgtttgaggtctggaggaaccatccacagatgattgctgtactagtggataagatgattcgtacacaaatagttgattgtgctgccgtaacaaattggatcttctcttcagaactatctcgtgactttaccagattgtttgtttgggaaattttgcactctacaattcgtaagatgaacaaacatgtccctgaagatccagaaagagctggaagaagctaaagagaaacttgctaggcaaacacaaacggcgaaatgatgattgacgacagaaccagtggacaggaaaaacgggggtcttgagggacaaatagaacgacttcaggaaaaaagtggaatctgctcagagtgaacaaaagaatcttttccgtcggtatatttcagcgggttaatcatgatcttggaccgagccaccctagtaccatggcgaaactggatggggaccagtt

SEQ ID NO: 261293 - DNA, 602 bp, Homo Sapiens
cagcttccccatatccctcatcatgctggtggtcagctggttctggatgcactggctgttcctgggctgcaagtgagttccagggccctttcagcaaagcactgaagcccccctgttgatccaaaggccatggcatgggccctggatggctctgtgcaagggggactgccaagtaaccacagaggatgcccaaggagaatgcagtggtctggtctgagagtcaggtgctgtctcttctagacattctaaacatttgtgaactctgcacttcactctcagctctacaacgaaatgttcttaattccaactaaatggttagagagcctgtccagtttatacaaagtctgaggtgaagagtatttaatgtcgttttattgctctcaaagcatacagagcacttccaattactccaagaaataggaaataaaaaatatgactctaagtagaatttgcattaggtttaactttataggcatgggtgatttatacttagtagcctgaataaaatatgctcatatgcctcaaaataacaagtcagtctactccaaatttgatcagtttcaaacacataagggaagataatataatgttttgctattagt

SEQ ID NO: 261294 - DNA, 692 bp, Homo Sapiens
  misc_feature (599)..(608): n is a, c, g, or t
ttaatatcgactcggccaacatttacatttacatggatggacaggacgatccccaaacagtgaaggtttacagactggtcaaggaaggacgaacagagagaatggggtctgagggtgcacatcccgtggagggtggcggggctcctggcctcgtctgggtgaggttgggagcctcgctggggctgcggtcccagagcttcggcaaagccaccaggccttggggagcagggctgtggcaagcaggccgcctcggagaaaaacaatgactaactcatcctgacaggcagtggggagactgagacaggatcaacatcagatggctggaaccgcctccttccatgcgccaaagaaccgcgggcgaaggggaaaagcaatgcaacccttaagaaatgcaatatcccagctctgcctctcatcacatacattcagaggtcaactcggacgcggccttcctcatgcccacagagaggggatggacttggggagggggcccagggtctgtggggcatccacttctgtcctgcagttcctgtctgagcagtctccctcgggaagctgcctcggggtctcaaattttaggcttgactgttgtttctttnnnnnnnnnntagtcttaacgttttccttccatatctgaaaaaggagcagcaacctgcatttagaaaaacagcttaaagtgttgttgttcagat

SEQ ID NO: 261295 - DNA, 974 bp, Homo Sapiens
ggtccttaaatgggcacttcatttctgatgagtgcacaccaattattgctattttaatatcattgagaatactacagaagctaaggctatgtttctttggtaactacttcaaatttctctagaattatgtagcatacttacattttgctgcatgaacaatgaaaattaacctctgcctttaaatggaaaaataactttctgtagattgttatacagctactatgaagagctcttaatgaagaggaagtggcagtggtctatatgtagactgaaaaaatatcattaataaagttcaaagactgatggaatttcattgcccttaaagatatgaaccagatctgttttatgcttttctccaattatactaactagcagttgaaaagaatttgttttgaagagtgttattttcttaccaaaagaccagatcaaaaatccctatacttttccaccaaaaaaagattaaaatgaagccatttctataaatttaatggcactttatattttatatagagaaatagcttctgtttgattttctggacaccatgtcagtcaagatctactttctgtgtaaaaatgaataagtcttgcacataatccattcgtgttgcataaggttgcaaaaacaattaagtgggaaatgactcctaacttatgtgtctactctgcctagaaagaaagttttgaaggcatctatatatatttcataacaatgtctgttctttatggatttgatccataaatatttatctatctgaaaactttgatacttggaatgttttccttagagcatttggtgctccaagaaaaaacatttggtgctaagagttgcagcactgatgcctttccctaagttaattctattttaaaaatttatatttccttcccaatgagatgcagagtaaaatttgagaccctccattgactagggagcagcatctgtcatctatggttaattactattttgacaaaaatat

SEQ ID NO: 261296 - DNA, 766 bp, Homo Sapiens
  misc_feature (30)..(30): n is a, c, g, or t
  misc_feature (39)..(39): n is a, c, g, or t
  misc_feature (76)..(77): n is a, c, g, or t
  misc_feature (123)..(123): n is a, c, g, or t
  misc_feature (125)..(125): n is a, c, g, or t
  misc_feature (142)..(142): n is a, c, g, or t
  misc_feature (161)..(162): n is a, c, g, or t
  misc_feature (181)..(181): n is a, c, g, or t
  misc_feature (530)..(594): n is a, c, g, or t
agaacatgccgtgtctatacacatatcccntgacacacngtataatcccgttttaaactatgccaccagtactgannatatcaagcccagtaaacataatgctacacagcacccattctttancnttgatttctaaaattancaccttcctttgatattannaaaatgttatgaacttgcnggagaaggaaggagttgaaagaaggaaaatataaagggtgatccacagtgaaaatcagacctacacaagccacaaaaaaattgtctcattttcccaaggaattcaaagtcctgtgatacacattacaaaagatgacactttgtaaatattttgaacttctatgatccaatttcaacttcattggtccaatttgtcaaactattttcctctgagcactagattcatgggcaatttaatctctgaatattttctgtgtcataagtgtgcttgaaaagaggcttgtagtaaacagatatttttacaaaatttgatgcttctgcaaccataataattttatctataaatgcgnnnnnnnnnnnnnnnnnnnnnnnnnnnnnnnnnnnnnnnnnnnnnnnnnnnnnnnnnnnnnnnnntctcttttccttttataaaatcaaagtctaggctcaattggaaaatggaaatatttgcaccaaaagaaaaaagtgccattgttgtgatcaatggagtaaagctggggtatagtagaggctggggaagccctgcccatgttctctccaggccacagcttgcacaccgtgaatg

SEQ ID NO: 261297 - DNA, 741 bp, Homo Sapiens
  misc_feature (179)..(245): n is a, c, g, or t
ttcaacttcattggtccaatttgtcaaactattttcctctgagcactagattcatgggcaatttaatctctgaatattttctgtgtcataagtgtgcttgaaaagaggcttgtagtaaacagatatttttacaaaatttgatgcttctgcaaccataataattttatctataaatgcgnnnnnnnnnnnnnnnnnnnnnnnnnnnnnnnnnnnnnnnnnnnnnnnnnnnnnnnnnnnnnnnnnnntctcttttccttttataaaatcaaagtctaggctcaattggaaaatggaaatatttgcaccaaaagaaaaaagtgccattgttgtgatcaatggagtaaagctggggtatagtagaggctggggaatccctgcccatgttctctccaaggccacagcttgcacaccgtgaaatggtggccccactggctcccatggagtgtgccttcacgcgggggaatgtccttgtccaacacgctgtaatctactccatgggaactgactgtcctgcttttcacaacattgagaaacaggcccagagcctgtctcatgtgccaggtgcagtcacattattgttaaaataaagtggcttctgacaaatcagtttttcaaaatagcatcctatgtacttttcatttcttccaacaaccctcaggcccccttttgccagtttatctccccaggggagattttcaagactactggagaaaaatctgttaataaaacatttgctctgaa

SEQ ID NO: 261298 - DNA, 294 bp, Homo Sapiens
cagctgggctcttaatgttacttattgtaactcacttcctgtaagactcaatctactcttcaagttgatgtaccctctatgactgtaattcctgaaatctgcagttatgctgtggtgatcttaagcgtgtcttgagttccatgcaaattcaattctgttgataatgtgtccataatcaaatcatcatcttgcaatgcaagggctaccccataattatcagacattaaaatagtttatttctttttccattctgtaatcttaaaataacatcagcttcagtgcctgttcacaata

SEQ ID NO: 261299 - DNA, 656 bp, Homo Sapiens
tacaaacgcactcatcagatgagtagtgcctatttagagcaacagatggagaatcttgttgtttgcgttaagtacggtaccaaaattaaggaggaacccccttctgaagcagatccctgtataaagaaagaagaaaatagaagctgtgaatcagagcgcacagaacacagccattccccgggtgacagtagtgcacccatccagaacactgattgctgtcattcaagtgaaagggatggaggtcagaaagggtgcatagaaagcagctcagtatttgatgcagatactctgctctacaggggaactttgaaatgtaatcatagttccaaaaccacttccctagaacagtgtaatatagttcagcctcctcctccttgtaaaatagaaaattccatacctaatcccaatgggactgaaagtgggacttatttcacaagtttccagctgcctttaccaaggatcaaagaatcagaaactaggcagcatagttcagggcaagaaaacactgtaaaaaatccaacccatgtcccaaaagagaattttaggaaacattcacagccccggtcatttgatttgaagacttacaaacctatgggatttgaatcttcatttctgaaatttattcaggaaagtgaagagaaagaagatgattttga

SEQ ID NO: 261300 - DNA, 572 bp, Homo Sapiens
gggtgagggcagcgtgtcctccagtgtgcatggtgtgtgggcttgggccccatccctggaccaagcatttcatcctgtgggggaggggtgctgacctagtgggaggagccccactgtgatccatgagctgccctgcccacgcctcccctccctgtagcaacacctctgggtgtttggagtttagcttttgtgggtttgctctccctatcccatctcctgtactacacagttcatggcagggtggggaggggtggggttggttcgggtgggtgagggtctttttcctctgtgtgcgatgttgttatctgacagttctccgtccctactggcctttctcctcgtcttcatatttgtacggtacaagcaataaagacactctatttcagaccagggcccagcctgcactcacgccagcccaaccactctgggctttgccttggtgatggagtcagacccctgggccccagctcctcctgtactagccgttcccttcagcaaggagggcactgagctcagggagaggcgcagctggggtgtgtgcagatgctcaggcatgagagggtgggtggagc

SEQ ID NO: 261301 - DNA, 898 bp, Homo Sapiens
gggggtggtgcttgctcccctagagttccttctgacccagaaggaacagacagaccctgaggccactagcccccatgaatctcagcctctgggaggcagggaggactgagcatgctcccttacacccctcccctccttccctgccttcctgccatcttgctgagtccaaaccccaagcacagaggggcatgatcagacagctctggggcacagactgagaggaggaactcagcacacccttcctttccaaggccagtgacattgtctgacagtggttgccttcaagcaggcagcatcttggttgcttccagcggcagaaagctggccagtgcttacacacgtgtttccagttggagtgttatcagccatggttctgacaatattctagggtccttagatgagcacacttcctgtatctgcattatttttatagcattagtggggttgatccccaggctcacctttccttaccaaataccatcccatcagactgggattaatgggaggagaagctttgaagtcacatgctcaatttcttgagttgattttccccgacctcatcctttgatgctaagcaagaagggctctgaaattctcattcctatttcttacatgaatgagtagtgaagaggggagatgctggttttggtgcagggcaaaattagtctttctggtttaaacacgaatcacgataacccaaacccaggaaggtccatgctgcgattccctggcacttcttctttgtagtcacttcggtgaccggcttgtgctgcaccctccattgactagccttggcatattgacaagagcaggatgcccctccatccatcccatcctcaccatctctccttccaaccttctcactacggggtgggggaggggaaagccccaaatctta

SEQ ID NO: 261302 - DNA, 452 bp, Homo Sapiens
  misc_feature (206)..(206): n is a, c, g, or t
  misc_feature (226)..(226): n is a, c, g, or t
  misc_feature (365)..(365): n is a, c, g, or t
ggcacgagcttgctgagtccaaaccccaagcacagaggggcatgatcagacagctctggggcacagactgagaggaggaactcagcacacccttcctttccaaggccagtgacattgtctgacagtggttgccttcaagcaggcagcatcttggttgcttccagcggcagaaagctggccagtgcttacacacgtgtttccagttnggagtgttatcagccatggnttctgacaatattctaggggtccttaggatgaggcacacttcctggtatctggcattatttttatagcattagtggggttgatccccagggctcacctttccttaccaaataccatcccatcagactggggatttaatngggaggagaagctttgaaagtcacatggctcaattttcttgagtttgatttttccccgacctcattcctttggatggttaagcaaga

SEQ ID NO: 261303 - DNA, 718 bp, Homo Sapiens
  misc_feature (69)..(69): n is a, c, g, or t
  misc_feature (78)..(78): n is a, c, g, or t
  misc_feature (136)..(136): n is a, c, g, or t
  misc_feature (234)..(234): n is a, c, g, or t
  misc_feature (244)..(244): n is a, c, g, or t
gggctcagggactgttgcttcaagtacagccaaaggaagattcccgccaaggttgtccgcagctaccgnaagcagganccaagcttaggctgctccatcccagctatcctgttcttgcccgcaaagcgctctcagncagagctatgtgcagacccaaaggagctctgggtgcagcagctgatgcagcatctggacaagacaccatccccacagaaaccagcccagggctgcagnaaggacaggngggcctccaagactggcaagaaaggaaagggctccaaaggctgcaagaggactgagcggtcacagacccctaaagggccatagcccagtgagcagcctggagccctggagaccccaccagcctcaccagcgcttgaagcctgaacccaagatgcaagaaggaggctatgctcaggggccctggagcagccaccccatgctggccttgccacactctttctcctgctttaaccaccccatctgcattcccagctctaccctgcatggctgagctgcccacagcaggccaggtccagagagaccgaggagggagagtctcccagggagcatgagaggaggcagcaggactgtccccttgaaggagaatcatcaggaccctggacctgatacggctccccagtacaccccacctcttccttgtaaatatgatttatacctaactgaataaaaagctgttctgtcttcccacccaaaa

SEQ ID NO: 261304 - DNA, 912 bp, Homo Sapiens
aagaaatctgtttctaccaaacatttccagaaacgtatttatagcatgaagaaacacacatgggtagtgtgacctgtttggatgtgattacttaaaaatggaatgctctgaataggcactctctacattaaaggtatggaaggcgataggggtcagaattttaaaaatttaattttgaaaaaggtgactcacccctcatttccagagtgtaggcaattatgtcctgctttgataaaactgctagaggatggctatgcaaaagcataacgattcaaggaaacaaagtacaggtagtttttgagctgacagcagcaaaggcaccataagtcaaaatattggttttggtggagatgatcgatgtgtgtgtgtgagagagagctatgtttctaaccaagggcctaatgtttgttacagaaatgatcccagagacctacaagatgtgggaatcagcataacagggcaatgcagcaattaaccccacatcgttttctgtagttcctttttgtttcattttcttctgtctcacctcgttagaaaattcctcccagtcaggggtcgtccagtgcaggacgggggacccaagggtctcaagcctgcaagtccagaaggtgacaaacccaggagcactgggagttaagctttccttggggagggaagagccttgatgtccagcacacagcctggctataaagacacgaagcgacctacccactgtacagtccacttcacaggatcagctgaatcatgacctttaaaagttccgagttgaaactgaaggctctcctcagacctggctttttcctcagtccctgttcataccatctctgcacccacaatcacactgatttttcaaattcattttgtttttgctgtttcatttctggcattaataaaagtcttataaggagaaaa

SEQ ID NO: 261305 - DNA, 1016 bp, Homo Sapiens
aggtatttcaaagagtagtttctcatctctctgatttcaggaagaggagaagagagggagagaaaagtggaattattaaagtcatctaactcattggtcttgttcaacaagaaagaattctggtttgtggctgaatctgatttaacagctgccaatagctcattacttctaagatgtatatctaattcaaaactagatgctcccccctccctcttttttccctaaaagctgggaacttgtaagtaaatggcctagtgaaatagacactggctattttagaaaaagggtcagaaggtagaccaggaactatgtatcaaggagaagtaagtgaggctcaagcccaggccacctaggctgtgtttattcagtccacccaatccaatgtcaaagccccaagtgggccagtgttacctttatcttcccatctttgtatttctgaaagctttgtcacctcagtggactactttggctgatgaacagttcaaatagaagattgttttggaaaaagtcccaagggctttccccttcctgggtagctccctataagtcaaattcaagttctggtagccttgtttaccccttgtaggcgagtgaagaatgcccacacagagttcagatgtggtgaaatgctgggcattgattcctcaggatttaaactgcatattattagagaaaaagagcatcatatggcaagggtagtctatataaaaacttggtttactcaatgtttttaattaggcgagtgaacacttatgtacataatattaaataatattaaactaataaaaagagaggtaaaattcctatccattgttattgtaaaattatatcatcagcaaattctatagtcacatgggctcaaagatctgcctcatccaatcttgttccctaggtcaaggaacccagagccagggtacctgggaggcatggtcagcatcgccagtgtacatatattctgtgcccatactaccactaacgcttccagctgaagaggaggcagaaaaccgttacattca

SEQ ID NO: 261306 - DNA, 672 bp, Homo Sapiens
  misc_feature (149)..(231): n is a, c, g, or t
cacggcgctgctgaggacagcacggcagcagacaagtcaggcccatgaggaagaagaggctttgcactgctctccagacaacttttcaaacaacaagagaggatatttgagcacattaggttttgtgtcttcattctggccgtgtgaannnnnnnnnnnnnnnnnnnnnnnnnnnnnnnnnnnnnnnnnnnnnnnnnnnnnnnnnnnnnnnnnnnnnnnnnnnnnnnnnnncggctgcctccaatcctgaggtcatcactcatcaagaggggataatcccagggacagcaggatctgcttcgttacttggatttaggagccagaaacccatcaggcaactaaacagtaacaatgacccgccattaaacacactgagagaagagcatgatgaagagtttgtacaagaagaagccaggagcacttgctgacaatgcttacagagacgcaggcttctatgagctctgcctgttgaactgcagtaaaaatagatctccttccccagagaggcttggatgtgggcacaatatcagttcagacgatggtcaatgcatgtacttaatagagtgaaaagactttggactgtgaagtcagattacctgggtctgaattgttattcttctacttctttgtagtatgctttcaccacattaaaaattgtctgagcctcaaaaa

SEQ ID NO: 261307 - DNA, 397 bp, Homo Sapiens
ctgctcaggtaattttctaaaccagacactcttaaatatgcaaaacatcagtaacttcaaatgttttatcgtaacattattttctccattcttaaataagtgtctccaattctgtgttcaatactttctagctttgacggttaaaaatttaaaaccttttaactataatatacaaattatgctttaaaatgtgctgattcctaaacaaagcaagtttgaatttataacgttgccaaagttgttttccagaaattttacagcccaaactatactgagacaataatatatcactgtaaaatacagtattatccatgtctcaacaatagtctcaatagcattttattaaaagtgcagctatattaaaaacaaaacatgtgtttaatattacccatttatg

SEQ ID NO: 261308 - DNA, 785 bp, Homo Sapiens
tttagagctatggctaggctacataagaaaactgatgatagtttggaaaaatatttgtacgcattcatgtccatgtgtcggagggtttgtcgtcttccttccaaagaaggtatgtataaaatttctttttcctggtttcggtcaaagaagcaaaaatcactaaaattcggaaatttccaatttgtctcttttatgtgaaatttcaatactatctaattcaacttgtcagtaattttttagaattataaataaactagcttaaagatcgcgtatttgttaatcctgctattaaaacgagatctaaagagaataaaggtatacactgagtcttaagaaaacaggtagagtttagtgatagatttatgattaggaggtggtggaagataaaggattgcttttgttaaacagaactaacctatattttcagtccatcttataggaattgtgctagagggtttatttacctgaataattttgcaaggaatgaagcccccactcataagacattttaaagaattttctagaaaagatctcccagggccatcttcacaaaagactactaagcagaggcattgatgcaactcaactaaggaattgttctgggatgcatttcattgtcttcaaagcccagagacatagctcatcctgtcaacagttcctctcagtaatgctatgtcatgaacagttgtctccattctttgttgtatatgatttctcactgctaaacccaatggcctgctattcctgttttatagtaaaaagatttccttacttgttttaaatgt

SEQ ID NO: 261309 - DNA, 885 bp, Homo Sapiens
catcagacaacctcaaatcctcctgttggatgaagctacatcagctctggatactgaaagtgaaaaggttgtccaagaagccctggacaaagccagagaaggccgcacctgcattgtgattgctcaccgcctgtccaccatccagaatgcagacttaatagtggtgtttcagaatgccagagtcaaggagcatggcacgcatcagcagctgctggcacagaaaggcatctatttttcaatggtcagtgtccaggctagaacaaagcgccagtgaactctgactgtatgagatgttaaatactttttaatatttgtttagatatgacatttattcaaagttaaaagcaaacacttacagaattatgaagaggtatctgtttaacatttcctcagtcaagttcagagtcttcagagacttcgtaattaaaggaacagagtgagagacatcatcaagtggagagaaatcatagtttaaactgcattataaattttataacagaattaaagtagattttaaaagataaaatgtgtaattttgtttatattttcccatttggactgtaactgactgccttgctaaaagattatagaagtagcaaaaagtattgaaatgtttgcataaagtgtctataataaaactaaactttcatgtgactggagtcatcttgtccaaactgcctgtgaatatatcttctctcaattggaatattgtagataacttctgctttaaaaaagttttctttaaatatacctactcatttttgtgggaatggttaagcagtttaaataattcctgttgtatatgtctattcacattgggtcttacagaaccatctggcttcattcttcttggacttgatcctgctgattcttgcatttccacat

SEQ ID NO: 261310 - DNA, 1062 bp, Homo Sapiens
attaaatacttgatcacttgcaaacatatatacatgtagatgtacatatacatgtacacatacacataaatattattgcaattaagtgatcaagtacagacacaataggggccagttttgtttaaggatcaaagagacaaccactttggggaattagtatcaacttacaatccaagtccaagtatcatcttataatcacttttttctactatattaagatctaatgaatttgatttcttttttgaagtttttttcttgtaacatctgagattagaagtttaagatgacttgaccccaaacctttgtttatgtaagaatttttaaacataaaagtgtttgtttctgttatgttaccataatttgatgtatatagtgtccagatccatttagaaatttaatatttattaataactgaaactgtttgtcttcctttggtatatagtctcgcatattatattatagcaggccaagataaaattttgacagctctttaagcccacatgcagcagtgggtcagataaccctgtggcagtgacacgggcaaattggcatttgaataaagccctgggaccacctcaacatgcgtagcctcttgtcttaaatgtactccccatggcagcatggaggaggcaagacctgtgggtcaattttgaactggccttactttgatttttaaaacaagagactcagggaaagtactaaaccaaaatctctgattttactttgcgttttctgtagtttttgttttactgagatgcttttgtaaaggaaaataatactgtgacagtttagtaattctacagattcttaatatttctccatcatggccttttacttcacaattttctgaagtctgaattcaattacaattcttttttaccaatttaatctcaaatgttgtttaactgctttaaattcatatacgtagagtattataaactgcagagatgaaaaatgtgttttcacgggatttatattgtgaactaaactaagcctactttttgtgacttatttgtgatgccttgttgataaatatgtgtaataagtatgtttaccgtcgaa

SEQ ID NO: 261311 - DNA, 506 bp, Homo Sapiens
  misc_feature (216)..(245): n is a, c, g, or t
atatgtaccttatcccagtggagtttacagtagcataattaaatgggaagtaaaagtcataacattactgcttcaagtatttcaggatattgaagcattactttgctgccagaaatacataaccttggaaaaaaatgttcggcagagtctcagtccaatgtctcagaggcctgttctgaaagtttgtaaccatgcaagcaataaaggagaatatcnnnnnnnnnnnnnnnnnnnnnnnnnnnnnncgtgtcagaatagctaaagaattagcagagcgagaaagactcgaacgccaacaaaagaaaaagcgtttattagaaatgaagactgagggtgatgagacaggagtgatggataatctgctggaggccttgcagtccggggctgccttccgcgacagaagaaaaaggacaccgatgccaaaagatgttcggcagagtctcagtccaatgtctcagaggcctgttctgaaagtttgtaaccatgcaagcaataaaggagaatac

SEQ ID NO: 261312 - DNA, 258 bp, Homo Sapiens
ggatctagacctccttcttcatccataagtggactgtgccagtacaatacatgcctcagcccccaaccctagaaggacctctagtctccttcctgtgtggaatcttccccactccatccctcccaagttgcctgtattgataatgtactcactcatgctgtactaggtgctgaagcctggacacccttggtgggtgggcctgtggtgatggtttgcatccttcctcctttgtcccaataaagtatgggagttgaaaaa

SEQ ID NO: 261313 - DNA, 736 bp, Homo Sapiens
  misc_feature (80)..(97): n is a, c, g, or t
  misc_feature (147)..(166): n is a, c, g, or t
  misc_feature (609)..(686): n is a, c, g, or t
ggggcctgctgcctgagggtgccctgcaggggctcaatcttttttccagagcttcctcctcattcataccgccccaccgnnnnnnnnnnnnnnnnnnagcagccatgtgagtttggaccagtcacccaagctcacgaggcctcgacnnnnnnnnnnnnnnnnnnnncttctccgaagacagggtctccttatatagccctggctagcatggaatctgtgttgaccaggctggcctccacgaagacccacatgtctcgtctccccagagctgggatagaaactttgtgctgaacctgggaaaagacagcaacaacctgtgcctacacttcaatcctcgcttcaatgcccatggagacgccaacaccactgtgtgtaacaccaaggaagatgggacctggggaaccgaacaccgggaacctgccttccccttcccgcccgggagcatcacagaggcgtgcatcacctttgaccagcctgacctgaacatcaagctgccacaccgacctgaactcaaagtcccccaaccgcctcaaacctggacgcccccaatttacccggcggcccccgccaaactcccgaattaaccgccctggccctttcatatacagnnnnnnnnnnnnnnnnnnnnnnnnnnnnnnnnnnnnnnnnnnnnnnnnnnnnnnnnnnnnnnnnnnnnnnnnnnnnnngccgcacgccccacattgggcgcaatttcccttctcaaaaacattcactt

SEQ ID NO: 261314 - DNA, 814 bp, Homo Sapiens
  misc_feature (104)..(112): n is a, c, g, or t
  misc_feature (143)..(163): n is a, c, g, or t
taaatcattgctctctatactaggatagactttatctacttcatctgttcctaagtcagcatgttagttctggggaaggatcataagaaaggaaatactttttnnnnnnnnntttggaaacatgtaacaaagcaagggtaaannnnnnnnnnnnnnnnnnnnnagtgctgtgactgtaaaagtgtactttccattaattattagccgagttaagagaatggtcacattgaagtactgtgtggactagaaatgtaccctgtcatcatgcaatgaaatattgttatcgtttaacatagctcatttatgtagaatgaattctggtggtttaccccaagtcacagttaggaccggtagatggtgagaatcccagatgcgctattatctagatccagtgttacattttcgatgtttatcactcagtgggtttttattaatatgctgattaagttatttactgggccagtccattgtgctaaatagttgctcttttgtgtttcattgccttgatgtttgagtgtaatctagcattttaatacagtgtttattttgcatgatctttaacaaatgttttaagcaattttaaaaaggcaggatgttattgacattatacactgaagtcttaacattttaacatttatagtgcttatttgcaaaattgtataattaggaattatttcagagacaatgttttctttttcaggtgagtagttgccgcgtaatatcattggagtacattctttatactgtttgtgaaattaatactagcatattaagtgtacaaatagatttagaaaacaataaaaaattgcatgct

SEQ ID NO: 261315 - DNA, 1280 bp, Homo Sapiens
acacattggtgcttctgtccatctggagagttttgcattaacagtaaagaggaagtttggcttgtgtttaaaatgatgtcactgcaatgaagtatctcaagttgatgctggcataacagactgccactgtcacagctgttagcagtaatgcattacaaccctgaagttaatcactatttcctgcttccttaggaatatgtgtgtcttctgatcaaaatcatttccgaggagaaattgaggaaaccatcactgaaagctttggtaatgatcatagcaccttggatgggtattccagaagaaccaccttgtcttcaaaaatgtatcacaccaaaggtaaggatgttaagactcattcttagcacatcagaagtgtcttttgaattattttagtgaaacgatgcaggtttagcagtaactatgtacttttttcctactgtcttctccttcgtaggacaagaaggttctgtttgtctccggtcatcagactgtgcctcaggattgtgttgtgctagacacttctggtccaagatctgtaaacctgtcctgaaagaaggtcaagtgtgtaccaagcataggagaaaaggctctcatggactagaaatattccagcgttgttactgtggagaaggtctgtcttgccggatacagaaagatcaccatcaagccagtaattcttctaggcttcacacttgtcagagacactaaaccagctatccaaatgcagtgaactccttttatataatagatgctatgaaaaccttttatgaccttcatcaactcaatcctaaggatataccaagttctgtgggtttcagttaagcattccaataacaccttccaaaaacctggagtgtaagagctttgtttctttatggaactcccctgtgattgcagtaaattactgtattgtaaattctcagtgtggcacttacctgtaaatgcaatgaaacttttaattatttttctaaaggtgctgcactgcctatttttcctcttgttatgtaaatttttgtacacattgattgttatcttgactgacaaatattctatattgaactgaagtaaatcatttcagcttatagttcttaaaagcataaccctttaccccatttaattctagagtctagaacgcaaggatctcttggaatgacaaatgataggtacctaaaatgtaacatgaaaatactagcttattttctgaaatgtactatcttaatgcttaaattatatttccctttaagctgtgatagtttttgaaataaaatttaacatttaatatc

SEQ ID NO: 261316 - DNA, 956 bp, Homo Sapiens
agagctctgtgctccctgcagtcaggactctgggaccgcagggggctcccggaccctgactctgcagccgaaccggcacggtttcgtggggacccaggcttgcaaagtgacggtcattttctctttctttctccctcttgagtccttctgagatgatggctctgggcgcagcgggagctacccgggtctttgtcgcgatggtagcggcggctctcggcggccaccctctgctgggagtgagcgccaccttgaactcggttctcaattccaacgctatcaagaacctgcccccaccgctgggcggcgctgcggggcacccaggctctgcagtcagcgccgcgccgggaatcctgtacccgggcgggaataagtaccagaccattgacaactaccagccgtacccgtgcgcagaggacgaggagtgcggcactgatgagtactgcgctagtcccacccgcggaggggacgcaggcgtgcaaatctgtctcgcctgcaggaagcgccgaaaacgctgcatgcgtcacgctatgtgctgccccgggaattactgcaaaaatggaatatgtgtgtcttctgatcaaaatcatttccgaggagaaattgaggaaaccatcactgaaagctttggtaatgatcatagcaccttggatgggtattccagaagaaccaccttgtcttcaaaaatgtatcacaccaaaggacaagaaggttctgtttgtctccggtcatcagactgtgcctcaaggattgtgttgtgctagacacttctgggccaagatctgtaaacctgtcctgaaagaaggtcaagtgtgtaccaagcataggagaaaaaggctctcatggactagaaatattccagcgttgttaactgtgggagaaagtctgtcttgccgggatacaggaaagaatcacccatcaagcccagtaatttcttctagggcctccccctctctcgg

SEQ ID NO: 261317 - DNA, 1126 bp, Homo Sapiens
ggtttcgtggggacccaggcttgcaaagtgacggtcattttctctttctttctccctcttgagtccttctgagatgatggctctgggcgcagcgggagctacccgggtctttgtcgcgatggtagcggcggctctcggcggccaccctctgctgggagtgagcgccaccttgaactcggttctcaattccaacgctatcaagaacctgcccccaccgctgggcggcgctgcggggcacccaggctctgcagtcagcgccgcgccgggaatcctgtacccgggcgggaataagtaccagaccattgacaactaccagccgtacccgtgcgcagaggacgaggagtgcggcactgatgagtactgcgctagtcccacccgcggaggggacgcgggcgtgcaaatctgtctcgcctgcaggaagcgccgaaaacgctgcatgcgtcacgctatgtgctgccccgggaattactgcaaaaatggaatatgtgtgtcttctgatcaaaatcatttccgaggagaaattgaggaaaccatcactgaaagctttggtaatgatcatagcaccttggatgggtattccagaagaaccaccttgtcttcaaaaatgtatcacaccaaaggacaagaaggttctgtttgtctccggtcatcagactgtgcctcaggattgtgttgtgctagacacttctggtccaagatctgtaaacctgtcctgaaagaaggtcaagtgtgtaccaagcataggagaaaaggctctcatggactagaaatattccagcgttgttactgtggagaaggtctgtcttgccggatacagaaagatcaccatcaagccagtaattcttctaggcttcacacttgtcagagacactaaaccagctatccaaatgcagtgaactccttttatataatagatgctatgaaaaccttttatgaccttcatcaactcaatcctaaggatatacaagttcctgtgggttccgcttaagcattccaataacaccttccaaaaatcctggagtgtacagagctttgttttctttatgggactcctcctggcgattgcagtaaaattactggtattggaaaatttctcaggggtgggcaccttaccctggtaaatggc

SEQ ID NO: 261318 - DNA, 945 bp, Homo Sapiens
aggactctgggaccgcagggggctcccggaccctgactctgcagccgaaccggcacggtttcgtggggacccaggcttgcaaagtgacggtcattttctctttctttctccctcttgagtccttctgagatgatggctctgggcgcagcgggagctacccgggtctttgtcgcgatggtagcggcggctctcggcggccaccctctgctgggagtgagcgccaccttgaactcggttctcaattccaacgctatcaagaacctgcccccaccgctgggcggcgctgcggggcacccaggctctgcagtcagcgccgcgccgggaatcctgtacccgggcgggaataagtaccagaccattgacaactaccagccgtacccgtgcgcagaggacgaggagtgcggcactgatgagtactgcgctagtcccacccgcggaggggacgcgggcgtgcaaatctgtctcgcctgcaggaagcgccgaaaacgctgcatgcgtcacgctatgtgctgccccgggaattactgcaaaaatggaatatgtgtgtcttctgatcaaaatcatttccgaggagaaattgaggaaaccatcactgaaagctttggtaatgatcatagcaccttggatgggtattccagaagaaccaccttgtcttcaaaaatgtatcacaccaaaggacaagaaggttctgtttgtctccggtcatcagactgtgcccccagggattgtgtttgtgctagacacttcctgggtccaagatctgtaaacctgtccctgaaagaaaggtccagtggtgtacccagcaatagggagaaaaaggctctcatgggactagaaaatattcccagcggttggtaacctggggggaaaaagggcctgtccttgcccggaattccggaaaggaacccccctttcagggcccaggaaattccttctaagggcttt

SEQ ID NO: 261319 - DNA, 494 bp, Homo Sapiens
caagcagggaggtatatcatacaaagagaatgcaacatgttatctgtgtaaaatggacttctgacagcaagtatattatgtgtggatctgatgaaatgaacattcgcctgtagaaagctaatgcttctgaaaaattgggtgtgcttacatcacgagaaaaagcagccaaggattataaccagaaattgaaggagaaatttcagcattatcctcatataaaacgtatagctcgtcatcgacatctaccaaaatctatctatagccagattcaggaacagcgcatcatgaaagaagctcgtcgacgaaaggaagtgaatcgtattaaacacagcaagcctggatctgtgccacttgtgtcagagaagaagaaacacgtagtggcagttgtaaaataattggtattcctaacaatcctgatgtataattatttgttacttttgatttgagaactctacaaataaaagtgctgggactagattaattgcaaacaaaaa

SEQ ID NO: 261320 - DNA, 538 bp, Homo Sapiens
cttgtatattgacatatttttcttttcttgaacacatgcaggtgagtagcatattaatggctggctgtaaattaattttgattcctctgtcaagtagacctaaaactcactgtaagatatttcagttttttccttaaagtgatgatttcaaacctcctgaatatttgcgcgagacttttttcttaggaaagaaaaaaggctcaccttggctactgttgtcagcttacagtcatcacataccctctgaaatatttgacacttggaaatgaagttcttcctgaaaatatcactgcaataaaatacgtactacgtcagcatttctcactcatttcttatcttgtaaacctctttcatgaaaatatttccaaaaatccttggaatttttaaataatttttcttgtggcatataattaagtaattttggccaggcatgatgcttatgcctgtaatcacaacactttgggagacaataaagccggtattttacgaggcccgtggaatcaaaaactgcaattagtaataaaatatgatgatatct

SEQ ID NO: 261321 - DNA, 1091 bp, Homo Sapiens
cagctgctggtataaaaacagttgatcctctgcctttgcgggaagattctgaagacaatatccacaaatttgctgaggcaactcttccagtttcaaaaattccaaaatacccaacaaatccccctggacagttgccttctccaccacatgttccatcctactggcatccctctcgacgaattcagggctctcttagagatccagagtttcagcacaatgtgggaaaagcaaggatgaacaatttgcagttacctcaacatgaagcctttaatgatgaagatgaggacagattgtctgagatttctgctcgctctgcagcttctagtctccgggcttttcaaactctgggcacgagctaaaggaaaaggaagggagaatttctgggggtaaaacataaacctagctgagttgcccttatctaaggaaacattgggcataatttttctttattgcttactgtgttaaaattttttgagtgaagtttttcctaacattttctactttgaaatatttaatttccaatagaacagtttacttggaaattgttaacataggcttatacaaatttaacttttaaagaattctttttacatctatcccagagtacaaagacctagattattgaattcttcacatgtaactttcgtaataggtgtcatggatagattttcacctatccagagagtattctaaaaaaataaacaaagtgaagtaaaagttaagatcccagtgtgaagtatatattcccctaagatttgatatatgtatctttataattgatgatgtggtaaaatgaatttggtggtccccttaacccttgctgtagtgtttctttttattttagttccttctatacatgtttgcagtgttaagataattgtactttgaaaacaccagctgtatatatttttcttatttatgtaacaaagtttgctgaaagatatgtatatttttgatctttgagtgtattctatttgtgtaaggactttggcttacatttgaataatgtctagattttgaaaaattacctgtataatggagaattaaaactttgtagacattttgaaataaaaatggatcaagtgcaaaaa

SEQ ID NO: 261322 - DNA, 1018 bp, Homo Sapiens
  misc_feature (66)..(66): n is a, c, g, or t
  misc_feature (69)..(69): n is a, c, g, or t
  misc_feature (74)..(74): n is a, c, g, or t
gcagactgaagcagtgctccacctctccttctttagctcaggggttgctggtctgtggcaggcgcngangttgnccctgtggctgttctcagtggcagtctcttaagttcccaccacaggcagctctttatcccctctccctacttgactctttctcttgcctgtgcttttggcctcaaacaggcctgctggtagcgctcagggcgtgaggctacactcctgccctgcctttcctgtcttcatggtctgccagggcataccttggggaggtggaccaaagacccaggactttttgcagtagccagtcctaccccccagtttgtctttttaccaatttcagggtgggagagaaaactgcagcaccccagcatgtgagttactcaggtgttgggggctagaagggacagtgcgtttaaacaacactcagagctctggccttaaacctgtggccccccaagtctaggagcctcatctcttcctggcagtcatgcgggcaggaggtcctgaaagggaaaacccattcagacaactgttccccaatctaccagccatctgcaggggtcagtgaccgtggccctctccctcctctagaatgtgccacttatgaagagtgccccatggggaaaaggagactcagctgtcccttggcagcttgtgccagtatcccagggcagaagtttccacaggagcctcttgcccttgcgcagagccactgtgagaggcggtgggagccaacacccttgggggagggggcagtactgctcggcacatcccagcatcaggtcagatcattgaaattaaaaaatgtgaattaagttcatatccaccttttggggaagcaggacaaaccaccaccccaccaagtgtgtgacttctccatatcccactgcagtttccattttttaaatgggaattttcaatcccctgtgcttgtctaacgtctgctttaaaaagtttgagaccctgttactgtttgaaaatgcatgcatgttacgatgaatctccaacctgaggaaaa

SEQ ID NO: 261323 - DNA, 1008 bp, Homo Sapiens
tttttttaacttgttttcatctgtttatcatgacttttttatttctggtgtagagtccacattatttagtttgttgtacttttaaatttcaaagttcaaatctgaagaattagcgtttgtgatttcgggataccatgcagtggttttaatcccaggaaaaaaactatcaccaaaagttcgtttgattctcattatgtaactttgtagaaccatcctttctagatgggtccaccacagtgaatttgtaactttgaagtcaggatagaatatcattagattatctgtgagatagcattactatgttaggaccagcagagtttgggttggtaaaaataatgtttgctctattactgggttacagacatttcagcatttttaggttggttttaaatcactaaaaatatttattcggatttgaaggatttaagtgctaaaaatcaatccatttcttgcccttcaataattgtccatgcctgccttttgttgtttacatgctcttctgcccagactgttagtaatctagggaccccctttggagctgataagtacagttcagccttttctcctcaaatatataatgactttaacattcctaagaatataggtatttctgaatgatttaaatttgaggaattttaatacataaaatacaatgtacaaactttctgcccactcagatctcttctccatcatgtacttagtatttcccattaacctacacactgatttttatgctactccttgtagaaacaaaattctggtttgactcagtttttgtgtttataaacttttggaatgtgtaccccgtttatgtgaagaattatgacctatcagtcatagctaaatagtgaacctcaaaagtgttaacttttgactattcatgtgaggtttggtatcttgcatttatgtacatggctgtaaattatgtgcatttactctgtatttatgttatctagctgacttttacttgaattgttcaaattttaaaaattaaaatacgctcatgaa

SEQ ID NO: 261324 - DNA, 808 bp, Homo Sapiens
  misc_feature (664)..(664): n is a, c, g, or t
  misc_feature (669)..(669): n is a, c, g, or t
taccgagccattcaactagccaaggaaaaaaagcagagaggagcggggagcaatgcaggtgaggccgtgtgtgctgcagccggacgagcaagggcctgagggttctctgtcactgttactggcagaagaaacacagcaggtgtttctgtgctcttggttttacgtttctgttcagaatacccttttatcaactccttagttttatttgaacttaagggaaaaaattagtaacaaaattcccagcatcagtatgaacatattttatttgcctaaacaagctttgtgaaagttaagcgttcaaacaccagtgtcagttacctggaaggctactaaggtaaataagcaaagcaggccagttgtcaggaaagcagagattgtgcctggtgctgaatggccttggggcctgatcttggcatggcagagacctggggactgccactgtccccaggtacgtgtacatggagccaaactgtgtgtcctgtggcattgtcagagttatgttgaaatcttatttgaaaatgttagcaacttacttgcatttttaaagaccaaacaagagctggtaacctatggcctcaagcatctgtccttcctaaaaatggaatagtgggatgtagtgcttaatggaaactgctaaatctttttctaaaaactaacagtgganttttnaaatatattgttttttgtgtatttcatttgtcctttgtatttatctaaaagggttgatatgattttatatcttgctctctattcctaatagtattatgacttcttatttaaaataaataacaattgccggttttctgtt

SEQ ID NO: 261325 - DNA, 747 bp, Homo Sapiens
tcggcacaggcaaagtaatagtaatgtgggccaatgcattttggaaatgtcctcattatgtagaatggaatgtgaaaattatttttgttaaaacaggattttgccacaattatttaaatattatgtttgtgaactatctaagcatgagaaaatacaaagctttctttgtatctggctgatactcatttggatgattctgtgactcatagaacatgatgttaaatgagaccagactcaactgccaccagtccccagctgcagaccttcatccccttcatctcccactaggggctcgtggtctggaagaaacatgtatcaagcaacacagccccttatcccagatagaaaagtgtctcaaatgcattctactgcgggacagtcagtaggatcattttcataaagcaaggacatcatatgtttctagaaattacaagcatataactttagcctacaatctcttattaaaaatttttaacaaaattgtattacaaatgcatttcatcagaactcaaatttaaatggtgtttgttttgggtttttaataatgctgaagttattccatataagtatcaagttaaacacaattcattttgattataaactatttgactttttaaaatcttctgacacagtaaatatatatatcaagattgatgtatcaaaatttattgcacactttaaagtgtaaaatcattttttaaaatcttgaatccacaaataaagttctattctgattttaaaatttaa

SEQ ID NO: 261326 - DNA, 595 bp, Homo Sapiens
  misc_feature (271)..(285): n is a, c, g, or t
tatatttgaacaaactgtcccaggcaggggctgggcagggctgtgtgcttgctcagcctcctgacaggacacttttgttgcacttagaatttacattttaatggatgtaaaaacaactgtgatagatgtctgggcctgcagaagtccagcattgctcaaaaaagcgtgtgttctagtgaacattttcatatatatttattggttatagcctgttaaaatattttcttttttgtattatttatccccctacattatgtatttatatgagggnnnnnnnnnnnnnnnttgtacttttttagtatttacctgttacaaaggacattgtgtttcctgtcatgtaaaactagctattttagttactattgtactctagaaaagagctgtagatttatgttaaactcgtacttacgaacaattgtaattagttctaaaaggcatgaactcagctcctaatcgtcactgtatagtcctgaatttgtagaactagagttaattccctcttggaactttctttgttcttcagtagttacttttttccttacctaaaagggttgtctgtcaaacaattcttgaataaactttctgttatcaaaaa

SEQ ID NO: 261327 - DNA, 587 bp, Homo Sapiens
atatattttcccttgggtaaacctacacatcctaatccctgtttatagaattttaacataatttaattgtgtttggagatgaggtggttttcagtttatttttcatattataatgctgtgacgagtatccttatctgtacacttctgaacattgtggagttctttcatgtggatgcctggagataaaattgtgtcgagatatatatgtatttttaaatgtttgatctgcattgctagattgccatccagaaaagttaatcaatttgtattcacagcagcagtgtacaagagggctggttttctgaagataacatttttttcagtcctgttcagaggtttggtcaatcttacctgtagatgacttcagccaccaggctggatgggagcccacagacaaaaggacattggtgtatgttatggtgaaaaccatcagtaccatgcctagctcaagaatgtgaaattgaacctgaaaaaaactttgaacctacaattttatgttctgaaaatagttattctaatgtgagggcattaataagaatatgtaccatcaaagcttcagaagattttccatacaaactaaaatcact

SEQ ID NO: 261328 - DNA, 688 bp, Homo Sapiens
ccacctgcaccatggaggccaccaggctgccaacaccagccacgacctggctcagcgccacgggctggagtcggcctccgaccaccatggcaacttctccatcaccatgcgcaacctgaccctgctggatagcggcctctactgctgcctggtggtggagatcaggcaccaccactcggagcacagggtccatggtgccatggagctgcaggtgcagacaggcaaagatgcaccatccaactgtgtggtgtacccatcctcctcccaggagagtgaaaacatcacggctgcagccctggctacgggtgcctgcatcgtaagaatcctctgcctccccctcatcctgctcctggtctacaagcaaaggcaggcagcctccaaccgccgtgcccaggagctggtgcggatggacagcaacattcaagggattgaaaaccccggctttgaagcctcaccacctgcccaggggatacccgaggccaaagtcaggcaccccctgtcctatgtggcccagcggcagccttctgagtctgggcggcatctgctttcggagcccagcacccccctgtctcctccaggccccggagacgtcttcttcccatccctggaccctgtccctgactctccaaactttgaggtcatctagcccagctgggggacagtgggctgttgtggctgggtctggggc

SEQ ID NO: 261329 - DNA, 348 bp, Homo Sapiens
attaattcgttagaagaagaaacctaaccgtttcaatgcaaaaagtcatctcccgttccaaagatgagaggtgagagaaatgatgatcattttcaaaaagtgttactaaatgtaacctagaaaaaaatgaagaatcatattaaaataagaacaagtttcaaaactaacagtaaaataaacaataagaaagccataaaaaagaaaacaataaattgttataatattaattttataatttgcttactaacttgtatgtttttcggcatttataatccagtatggcacacacctgaaattccttaactcagtggtttttaagcttaattgtggccgggtacgttggctcat

SEQ ID NO: 261330 - DNA, 1888 bp, Homo Sapiens
tgggtggcgaattcggcacgagggagctaaagagctctggtttttcctacagagtgaattgaagaaattaaagaacttagaaggaaatgaactccaaagacatgcagatgaatttcttttggatttaggacatcatgaaaggtctataatgacggatctatactacctcagtcagacagatggagcaggtgattggcgggaaaaagaggccaaagatctgacagaactggttcagcggagaataacatatcttcagaatcccaaggactgcagcaaagccaaaaagctggtgtgtaatatcaacaaaggctgtggctatggctgtcagctccatcatgtggtctactgcttcatgattgcatatggcacccagcgaacactcatcttggaatctcagaattggcgctatgctactggtggatgggagactgtatttaggcctgtaagtgagacatgcacagacagatctggcatctccactggacactggtcaggtgaagtgaaggacaaaaatgttcaagtggtcgagcttcccattgtagacagtcttcatccccgtcctccatatttacccttggctgtaccagaagacctcgcagatcgacttgtacgagtgcatggtgaccctgcagtgtggtgggtgtctcagtttgtcaaatacttgatccgcccacagccttggctagaaaaagaaatagaagaagccaccaagaagcttggcttcaaacatccagttattggagtccatgtcagacgcacagacaaagtgggaacagaagctgccttccatcccattgaagagtacatggtgcatgttgaagaacattttcagcttcttgcacgcagaatgcaagtggacaaaaaaagagtgtatttggccacagatgaccctttctttattaaaggaggcaaaaacaaagtaccccaattatgaatttaattaatgataactctatttccctggtcagcgggactgcacaatcgatacacagaaaattcacttcgtggagtgatcctggatatacattttctctctcaggcagacttcctagtgtgtactttttcatcccaggtctgtcgagttgcttatgaaattatgcaaacactacatcctgatgcctctgcaaacttccattctttagatgacatctactattttgggggccagaatgcccacaatcaaattgccatttatgctcaccaaccccgaactgcagatgaaattcccatggaacctggagatatcattggtgtggctggaaatcattgggatggctattctaaaggtgtcaacaggaaaattgggaaggacgggcctatatccctcctacaaagttcgagagaagatagaaacggtcaagtaccccacatatcctgaggctgagaaataaagctcagatggaagagataaacgaccaaactcagttcgaccaaactcagttcaaaccatttgagccaaactgtagatgaagagggctctgatctaacaaaataaggttatatgagtagatactctcagcaccaagagcagctgggaactgacataggcttcaattggtggaattcctctttaacaagggctgcaatgccctcatacccatgcacagtacaataatgtactcacatataacatgcaaacaggttgttttctactttgcccctttcagtatgtccccataagacaaacactgccatattgtgtaatttacagtgacaccagaacatcttgtgtgagacttacaacatggtgccatatatctgagagacctgtgtgaactattgagaagatcggaacagctccttactctgaggaaagtgattcttatttgatggtgggattgtgaccactgaattcactccagtcaacagattcagaatgagaatggac

SEQ ID NO: 261331 - DNA, 1263 bp, Homo Sapiens
  misc_feature (883)..(885): n is a, c, g, or t
  misc_feature (887)..(887): n is a, c, g, or t
tgtaccggccggaattacgggatatcgtcgacccacgcgtcggctggaggcgcgggagggcagcgagaggttcgcgggtgcagcgcacaggagaccatgtccgggggcagcagctgcagccagaccccaagccgggccatccccgccactcgccgggtggtgctcggcgacggcgtgcagctcccgcccggggactacagcacgacccccggcggcacgctcttcagcaccaccccgggaggtaccaggatcatctatgaccggaaattcctgatggagtgtcggaactcacctgtgaccaaaacacccccaagggatctgcccaccattccgggggtcaccagcccttccagtgatgagccccccatggaagccagccagagccacctgcgcaatagcccagaagataagcgggcgggcggtgaagagtcacagtttgagatggacatttaaagcaccagccatcgtgtggagcactaccaaggggcccctcagggccttcctgggaggagtcccaccagccaggccttatgaaagtgatcatactgggcaggcgttggcgtggggtcggacaccccagccctttctccctcactcagggcacctgccccctcctcttcgtgaacaccagcagatacctccttgtgcctccactgatgcaggagctgccaccccaaggggagtgacccctgccagcacaccctgcagccaagggccaggaagtggacaagaacgaacccttccttccgaatgatcagcagttccagcccctcgctgctgggggcgcaaccaccccttccttaggttgatgtgcttgggaaagctccctccccctccttccccaagagaggaaataaaagccaccttcgccctagggcccggnnngngggttggggcggggggccggggccccccgggcgccccggaaggcgaaaaacaacatggcgcgcccccctcgcccccgaaaaaactttttaaacctttcgtttggggcccgggcccataggggaagggaaccagggcattaggtggtttccaaagaaacccctggacatgacaagggggttggattcctcccataaaaaacacgccggggggggaaccgaagcggttcggaacaaatcccaaaggagattctgagggccattatctggagtcctttcacggggaggtccaagcgggcgctccaatttcaagattaccccccagccggggccattcttggggaaaagctggtggaatctccttaaggaattgcggccg

SEQ ID NO: 261332 - DNA, 311 bp, Homo Sapiens
tttttagaatttgcccacaagatgccttgtggagattttattatatagagtgtaaaatgaattgtcagtcaaataaaaagaacactttgttttcttaaaaaccccatgcataacattttccaattgtcttttttaatagttagacatttcaagcattataagaaaaataaggagaaaaaaccagaaactgtaacttcagtacatttcaaacggaatgtccctcaggccaattagaaatgcaagaaaaaatagcttcaattccgttttttttcctttaaaaatacatgttatctgtacaagatacactaccc

SEQ ID NO: 261333 - DNA, 1133 bp, Homo Sapiens
  misc_feature (126)..(176): n is a, c, g, or t
atgcaaaaagctgttcaaaaatgagcagcttgcaaatctatcataaatgagacattgaataaaatattcttacagtgaggtctaagaagtagttcagtctgagaatttgcttcagatactttttgnnnnnnnnnnnnnnnnnnnnnnnnnnnnnnnnnnnnnnnnnnnnnnnnnnngatacatactgatatttttatcctagtcatttcccagagtttttatgtgtctctgtgctctgctgattaaaataaacaacaaaagcagtaggcatcttctaactaaaagttaatttactagtcttcaaccaaaaagtcacagtggaagaacatatataaggtgaagaaagctttttaacctttcagatttaaataatacgccatttcaactttaaagaaaggttccaccatatatgtttgccactgacattttaaaatacaagaacaagtctttgtaatacaatatatacttcaatatacccaatataccttatatgaattaaaaacatgtcaactggataactgtagtaaggcatttaagtattcagcagaagccataaagaaatttcttaatgagtggtgtccatttaatattaactggatttagtaggtttccttaaaatgaacaggaaacaaaagatgtgaaaaacaggcagtgatgccattatactgaattccagaaaaagcacagtacaatgtgttttctagcagggagaccagcaaactggaagtggatgagcggccccagcttacatggtctattgtatttgatcaactgctgagagaagtattagtagcccagtaggtttgggtaaaggtaccagaatccttagtgctagtctcacagccaaaaacagagcaggtactccagatatacttcctgaactgacctggatgaagaagctttaaaatcaacagagctggacagtataaagttcacggaaaaactcaatttttcattttattttggtatattagtgaatgtctactgatctagtatttcaagtgtggatcacgtaaacaccatgtagaatgtagtaaacggagttaaataagaaaacacactggctcggacgcgtgggtcgacgatatcccgggattccgggaccgtaccgctgctttttacacacttatata

SEQ ID NO: 261334 - DNA, 129 bp, Homo Sapiens
cagctcaggggtgaaaacaggatgtgggcaacaaaacaacacaggaaggaaacagcaagaggaaagggaaggaagaagatgcatccaagaactggttagagtgcaaggaattgggaaggaaagaaaaag

SEQ ID NO: 261335 - DNA, 1014 bp, Homo Sapiens
  misc_feature (37)..(37): n is a, c, g, or t
aaaaaatattttaattatagttttgttataaatatanacttatgaagaaaaaaatttgataggaataatactgtatattactaatttttaactatccctaaggcaaaccttatgacccacagttttctcatatacagtattcagtgcacagaaatcttatgattggctcaagtacagtaagttacttctcagtaaaactctcaagtctgagtccatatttgtagctctgcttttggctgtacgttcctaggatcggggctgcttatgcctttcgtttatccttggggtttgagagcgctgtatttgggagagagtttaaaaatacattaggagagagaaaccattaaaagtttcactgtcagagatattgtaggtgctaatactggatttcgtctcagatttaatttcttttatgggtctgttagtcattcaacaaatcccataagtatgtgttaatattttaattgtgtaaaactcatttgttactttacagcctgtaatagtgtgtctgcattttcaacctgttgcaataactttgctgaaatattaacacattaataaaacttttcttaaacggagtaagacgtaaccctcataagaggccatccttgtctggccgccctcggaacctcaaagaagctttccaaaaccctttctatttggcagccgcggacccccgccagggcaagggggaaacttggcgccttagagtgatttccctaaggaagatcccctggcaccatggaacttaggggctttgggaatttcctccaccaattaacagaaagcgcccgggcggggcgaaaaccgtaaggggttcctgggaacacaatcccctaaatgtggatcttctttaagggctcttttactgtggaatcgcattctgaaacgggaagatccccaaacctgggcgtcctaattttcggaatttagacagccccccgagagccggaaacaattcaattggacaaaaaatggagttggcaaattctcatttaatacgcatttctgggc

SEQ ID NO: 261336 - DNA, 907 bp, Homo Sapiens
ggggaccctgccggagcctccgctgccagcgacatgttcaaggtaattcagaggtccgtggggccagccagcctgagcttgctcaccttcaaagtctatgcagcaccaaaaaaggactcacctcccaaaaattccgtgaaggttgatgagctttcactctactcagttcctgagggtcaatcgaagtatgtggaggaggcaaggagccagcttgaagaaagcatctcacagctccgacactattgcgagccatacacaacctggtgtcaggaaacgtactcccaaactaagcccaagatgcaaagtttggttcaatgggggttagacagctatgactatctccaaaatgcacctcctggattttttccgagacttggtgttattggttttgctggccttattggactccttttggctagaggttcaaaaataaagaagctagtgtatccgcctggtttcatgggattagctgcctccctctattatccacaacaagccatcgtgtttgcccaggtcagtggggagagattatatgactggggtttacgaggatatatagtcatagaagatttgtggaaggagaactttcaaaagccaggaaatgtgaagaattcacctggaactaagtagaaaactccatgctctgccatcttaatcagttataggtaaacattggaaactccatagaataaatcagtatttctacagaaaaatggcatagaagtcagtattgaatgtattaaattggctttcttcttcaggaaaaactagaccagacctctgttatcttctgtgaaatcatcctacaagcaaactaacctggaatcccttcacctagagataatgtacaagccttagaactcctcattctcatgttgctatttatgtacctaattaaaacccaagt

SEQ ID NO: 261337 - DNA, 535 bp, Homo Sapiens
gggtactcccaaactaagcccaagatgcaaagtttggttcaatgggggttagacagctatgactatctccaaaatgcacctcctggattttttccgagacttggtgttattggttttgctggccttattggactccttttggctagaggttcaaaaataaagaagctagtgtatccgcctggtttcatgggattagctgcctccctctattatccacaacaagccatcgtgtttgcccaggtcagtggggagagattatatgactggggtttacgaggatatatagtcatagaagatttgtggaaggagaactttcaaaagccaggaaatgtgaagaattcacctggaactaagtagaaaacttcatgctctgccatcttaatcaggaaaaactagaccagacctctgttatcttctgtgaaatcatcctacaagcaaactaacctggaatcccttcacctagagataatgtacaagccttagaactcctcattctcatgttgctatttatgtacctaattaaaacccaagttaa

SEQ ID NO: 261338 - DNA, 699 bp, Homo Sapiens
tgatactgttgaaccagaaacttgaaatcctgatttatctgcttcgaggaacaaaatcaattcctcaaaaccttataagacaaaatatattttaatgtcatagtagttaggaggtatcaaactcagttataaatagggggctttaattcccatagtgatagaactttttaggcacttcaggattataatacggtaacagttttcttccctgccactctggggtgctctctgaagcggcatctccggcagagaactccatagtgtgtgatgagcctgctgcttgctcagtattggcatttacctcttaatatactgtcctatgcccatctggagtataagcctcccagaggagactgggcagagattaacttggcagtaaagattatctgacaagtctaatattttatgtctttgtaattccccattttcaagtatatatctcaattagtttatcttgatatgtgctcaaagatataaactattgtcatcccatgtttatgctattacacatagctttttatttaaagttctggtcataaaattctggttcaaacattctagaattcccagcttctatttctggagctgtgactctcagtcagtcaatgcttaggccatgcctttgaggcactaggtattgaaagttaccacttcttcattatcttaggattctcagttctttcttcaaaacttatactt

SEQ ID NO: 261339 - DNA, 1694 bp, Homo Sapiens
  misc_feature (638)..(660): n is a, c, g, or t
cctgtgtgtgtggcctttgcatcatttatcttgtggaaaagaagattcaggccctgagaggtctcagctcttggaggagggctaaggctttagcattgtgaagcgctgcacccccaccaaccttaccctcaccggggaaccctcactagcaggactggtggtggagtctcacctggggcctagagtggaagtgggggtgggttaacctcacacaagcacagatcccagactttgccagaggcaaacagccttccaattgcccctccacccccagctgaggcccggtcacctggtcaggacagagcaactgcatctaaaagcacaagaagacagaaacctgtaagctctgaccccacccccaccccttgagaggtcagcggaccacctccttagggacagaccctggcaggtcgctgcccaccgagatttcctcaagtgtgcatagatctgagaggagtcgggagtcgagactcgagattccatcatagcgtaggtgtgtggggttgggagccccctgatgggcttgtctgtgtttgcaccttgtcctgtgtctgaggtcctgtgactgtaccctcctttgccctgggacatctgtatctcttggctttgtaataaatgctgcatactttcgccgccgnnnnnnnnnnnnnnnnnnnnnnngacgaaaggaggcggggggggagacaggggaaaaaacgtgggcggccggcgaccggcctgtggcaggcttctccccccctcagagggggtccggggccgccgggcggcctgggacccccccgtgggccgcctgccaggggggggtcggcttttcccccagcgcgcccgggggttcgggcgcataagggtgggcgctgggacggcgaacatggagagtggtccccgggaccgaaccccaggggcgggtgccgcatcggaggacctcctcaaagggggaggccctctcagacgcgaaatgcgccaccggagcagctgtcacccccccgccggggtatccccaccaccagcggccgccgcccgcagtaggtgccgcgaatgtaaagcggggctggccgcgcgaccgacgggggcggaagcccgcctgggtgggggaggcgatgcgctttcggcgggaggtgggaagaccgggcccttgtggtgggcgcgcgcgccccccttatctccctctggggcgacagggggggaggctgtggcgaggtctagaggggcgcgtccggcccgcgcgagagaacacccccgccccgcactaatgggggtgtgggggcccgacgcgcgtcgacgtaactttatttgcccaccccccgcggccggctgtagggtgtcaccccgcgacccgagccgcgcctgtggagtcgatcgcccccggcgcgtgccggcgcacagaaataaaattagggggtgtctggcgcccgcccacttcgtggagacgcggtggagtagcctccgggggtgtgtggggccagcgcaccgaactggacgagttgctgctagaagccctaccgatattttgctggggccccggcgccggggacggggcctggatgaggcgcccacatgagcgcgcggcccggccgcccgtattcctttcacaagcgcgctcgtggcgggatagcgtcttatggttgcggcgagagtaggactgagcgtcactgtgtgcggggccgggacgcccccagacgcgccaagcagcgggg

SEQ ID NO: 261340 - DNA, 459 bp, Homo Sapiens
ttttgcttggtctgtcaattttatttatcatatcaatctacctcccattaccaccatccgagtccaagttaccatcacctcagacctggacaaccacagaagcctcctcactggtctctctgtttccatcttggccctccttcagtcaattttctatatggtagccagagcaatttggaaaaagcactgtgtctttcactctaaaataaccgatgtcctgtgtatagttgcttaatagtcacgtgagacagttcaaagaaactctcattttgcaaataacgaaacccgaggccaaaacatactgaaacttcaattccagaactgaggtcaggaatttgggaattcataattgccacagatgagcctcatttcaatggggccatgctgcttctcccaaacagggtatttcattttcggttatcaatgaaagacaaatgaaataatttgaattgatctaga

SEQ ID NO: 261341 - DNA, 1285 bp, Homo Sapiens
gggacagcgcgtcgcggcagcccccaaggaagaccagcctgcctctggtcggttcctggcgctctgcgtttcgtgaccttgtccagtagaaggctatttaattttcacaactgcttgaattttgacatacaagatgaagcaagatgcctcaagaaatgctgcctacactgtggattgtgaagattatgtgcatgtggtagaatttaatccctttgagaatggggattcaggaaacctaattgcatatggtggcaataattatgtggtcattggcacgtgtacgtttcaggaagaagaagcagacgttgaaggcattcagtataaaacacttcgaacatttcaccatggagtcagggttgatggcatagcttggagcccagagactagacttgattcattgcctccagtaatcaaattttgtacttcagctgctgatatgaaaattagattatttacttcagatcttcaggataaaaatgaatataaggttttagagggccataccgatttcattaatggtttggtgtttgatcccaaagaaggccaagaaattgcaagtgtgagtgacgatcacacctgcaggatttggaacttggaaggagtgcaaacagctcattttgttcttcattctcctggcatgagtgtgtgctggcatcctgaggagacttttaagctaatggttgcagagaagaatggaacaatccggttttatgatcttttggcccaacaggctattttatctcttgaatcagaacaagtgccattaatgtcagcacactggtgcttaaaaaacaccttcaaagttggagccgttgcaggaaatgattggttaatttgggatattactcggtccagttatcctcaaaataagagacctgttcacatggatcgagcctgcttattcaggtggtccacaattagtgaaaatctgtttgcaaccactggttatcctggcaaaatggcaagccagtttcaaattcatcatttaggacaccctcagcccatcctcatgggttctgtagccgttggatctggactgtcctggcatcgaactctccctctgtgtgtaattggaggagaccacaagctgttgttttgggtgactgaagtataaagtgttttctgtaccttagattcacaaactttgtatttttagtacatattttgaagaatttctatagtacatattttgaagaatttttatatcaaatataccgtatactttagaaaatgtctcagttgcttttattaaataaaatgttgatggtttgaaaaattaaaaaaa

SEQ ID NO: 261342 - DNA, 410 bp, Homo Sapiens
  misc_feature (205)..(205): n is a, c, g, or t
  misc_feature (239)..(239): n is a, c, g, or t
gtgttagccactgcgcctggcctcattgtactccttaacacaagaagaattcaacaatgataagtagttgtttataaggaagcaggatcattaccaaaataaatcctgctaaaacaacaggaatcatgttttaaagcctagtttgctaatttttgctagtaggataagagtgatcgtaatatctcgaacattacataggacactntaaaacctttagttgtatttcattcaaaaatctngttgcataccccacgttggtttcaaaacatactatgctttttcttcgtgttatttcctatattcatttttgtgtgtatgtgtatgtcacaaatattgatatgcctggttgtttatttttgttttctattatatctttttcaaaatataaaaataaacttgtaatttctaac

SEQ ID NO: 261343 - DNA, 480 bp, Homo Sapiens
cgagatgaacaaaggagacgccaccaggatgaactggactccatggagaactactataaggaccagttttcattgctggcagaagccatatcacaggaacatcaagaacttaaagccagagagaaatctcaggcccagacattacataaggtgaagagggagctgagatctaagatggagaaggaaattcagcagctgcaggacatgataacacagaatgatgatgatgttttcttccgggaactggaagctgagcgcttcagatctcggcttcagctggcttcctttcagtacagtaaaagtccctccctatgaggccagacttgataatagtaggtgaaggttctggaggcctttaccaggacagagctagaatcgagccagtaaacagtctaagccagaaaaataattttcaaatgctttacctgtattttcattccagtactttttatgattttttaaataaaaattgttttctaa

SEQ ID NO: 261344 - DNA, 819 bp, Homo Sapiens
  misc_feature (757)..(757): n is a, c, g, or t
  misc_feature (774)..(774): n is a, c, g, or t
  misc_feature (784)..(784): n is a, c, g, or t
  misc_feature (797)..(797): n is a, c, g, or t
tcaattcctagcctggatcccaaaaaggtacaggcagcagttgcacatagggttggaaaatttcttttgggaaggggaagccatcccagcctttaccacccaatgtgtctcccatgctgggcatcctaggccactttgcttagagggcattaaaggtgccatgaaaggtagactctgaaccactttgatccctctgaagtaggtgactgatgcctccttatgcccaggctctggcaacagtcttactgaagaacattcccagtgcccctggctaggggcagagggcactgccaggctgtgttcagttagcacagctcacctcattaggagctcagcctctctcctcactctgcctctttgtgtctctttttctcctctctgagcctttgtctattgtgttcctgtcacccaccctttcatcatctttttgccaggcattcctggctgtcacttggagccaacagtaacttgccaccttaaggcagggtcatccccgggccaggaggatgaggttgtcctgaggggctccaaagaagacaatagttcccactcatgattttccgttacaaacaggcagctggggcatggttggcctccaatgatttcattcaaggccaaagtcctgagccccctccgctggtcccagtccagctcttatcaactccccaaaggaaaacccactggttcttagctctgtgggggaggaaggggccctagaaagggcttagttactattcctgttcagttctaaacagtnagtgggaacagggagantctggggccntagggagcctgtnaattcccagggagagaccattg

SEQ ID NO: 261345 - DNA, 1108 bp, Homo Sapiens
  misc_feature (901)..(901): n is a, c, g, or t
ggaaggatgattacattgaacttcgaatcaatgaccagcttgctcgtttgtacatcattccaggaattccaaaagacacaaaatttaacccaaaaactagaagagaaattcggaacattgagtggttctctattgagaaattgccttgtcatagaaatgatatgacccccaaatccaaacttggtttggcacctaacaaattttttatggccattccctttatcagaccattaagggactggctttctcgaagatttggcgattcctcagacagtgacaatggattttcctcaactggtagcacgccggctaaacccactgtggaaaaattgagtcgaaccaaattccgccacagtcagcagttatttcctgacggttctcctggtgaccagtgggtaaagcacaggcaaccactgcagcaaaagccatataataatcattctgaaatgtctgaccttttaaaaggaaagaatcaaagtatgaggggaaatggcagaaaacagtatcaagattcacctaatcaaaagaaaagaacaaatgggcttcagccagcaaagcagcagaattctttgatgaagtgtgaaaagaaacttcatccacggaaacttcaggataattttgaaacagatgctgtatatgacttgcctagctccagtgaagaccagttgctagaacatgccgagggacagcccgtggcatgtaatggacattgcaagttccccttttcatccagagcctttttgagtttcaagtttgaccataatgctataatgaaaatcttggacctttgatagcagcacatgtattgtaaatgtcccaggatcagagacctgttggaattgagtgggtgtctcctcaagccttacctttctcaggtgttttaaagaaatgcagggaggcnatgtttctgaagacattttctgtttataagagagtagaaaggaaccacgagtttgcactgtaaatgcagttataaccttttataacgatttacccttttccgggttccgagacaaggttaagttggcttcttttggagggaattttattcctgggggactgcgggggttttaaattttgggattccgggtttagaaaaaatattgtc

SEQ ID NO: 261346 - DNA, 731 bp, Homo Sapiens
  misc_feature (492)..(558): n is a, c, g, or t
ctggatttacaccggaactgtaaacattaagaagcctcagccctgcttcaaatcataagtaaggaacatacaggctttgatcagtaactcagagctctctgtaactattaagatgtaattctccaattgagaaaaatttcaaagccaaatgatctaaatttctgaaaagactgtaattgtgtatcactcacctttccttttaaaaggtcagacatttcagaatgattattatatggcttttgctgcagtggttgcctgtgctttacccactggtcaccaggaggaaccgtcaggaaataactgctgactgtgggcggaatttggttcgactacaccaaggatttaaaaaataatccaaatcaggaaaatgttccactttatagttctttttaacaccttaatagttaaatttatagactacatattttcttatttactgtctatcttccccactggaatgtaagttctatgagagcagagattttaatctgnnnnnnnnnnnnnnnnnnnnnnnnnnnnnnnnnnnnnnnnnnnnnnnnnnnnnnnnnnnnnnnnnnnacactactattttttttcatcctagacttaaaaaaattatccaggccatctcctccctataagtgattatagtgtactcttaaaaaatatgcagactataaatctaaatttagatgaaacgaatgtacattttcctgctttttgagactgggtttccctctgtcatccaggcc

SEQ ID NO: 261347 - DNA, 888 bp, Homo Sapiens; identical to SEQ ID NO: 10595
  misc_feature (155)..(267): n is a, c, g, or t
  misc_feature (277)..(277): n is a, c, g, or t
  misc_feature (401)..(409): n is a, c, g, or t
  misc_feature (810)..(848): n is a, c, g, or t

SEQ ID NO: 261348 - DNA, 358 bp, Homo Sapiens
ttcccctgtctaaattgtgtgtgggcttccccagttttaaactcctatctttttctttagtgataccttacttgataatggacttgggaataggtttaacccagtttgcattctccaaatgtttccagtgatatgttttcctggggaaaagcaaatctgcctgtaataaatatttttaatctaaataaccaaatctgggtgcccaactttttgttgggaatttatgctgctaggtaatacattccataatatcttttgaaaaggaaaaattaccattgtggtattgtggcttgtgcattaacttggtccttttccccctgtttctctcacatttaaggatgggggtaattcatatttt

SEQ ID NO: 261349 - DNA, 477 bp, Homo Sapiens
cactattagtataccatcatgtccggaaaacttttaatcttctcaaatatctgatgtaactaccagaaagtcccttacttcctatgaccaatcaggaccaagtcctggaggtgatgtgttacattaccgtgcagcacaatagtacccgatcagttaacctcagccgcctgaagggccttgttttatgaaaggtacctattcccttctttcacattaactggaaacctctttttttacctgttgttcacaactagttttcttattgactgtattggactgtctcttcttgtagagactgattttggccaacatattaatgcatgttttatgcaaaacacaaatatgatattagttgcttttaaggagttctggcattgtatgtgcatttttgtagaaattgttactggacttataattacatacttaactctgatcaggtttctgtaaaatttaaataaaaccaatacaaaataaaaa

SEQ ID NO: 261350 - DNA, 2007 bp, Homo Sapiens
  misc_feature (190)..(190): n is a, c, g, or t
  misc_feature (301)..(301): n is a, c, g, or t
  misc_feature (444)..(453): n is a, c, g, or t
  misc_feature (532)..(532): n is a, c, g, or t
  misc_feature (755)..(770): n is a, c, g, or t
  misc_feature (1161)..(1183): n is a, c, g, or t
ggggcgcgatatgtagatatggcgcggggtgcgtcggcagcgccaatggctaagcggcgaggggggccggacttcacacggacgtcacagtatcatgtacgtgcgttgtgcgtgcccgcgcacatttttaagctctctcttctgcgctcggctctacctctgtcgggcgcgcgtacggcggattccaacncaacaagcctcttctgcattaccagccaccggcgcgtcgtgcgcgtcaaacagagaagttgaggggcggggacgtgttgaggcggccggcggctaaagcggcggcgtaagnggcggcgggagtatcataagatacgctcggaccggctctagagaatcaggccggcccattctcaccccgatgacgagacggggcgggcgcgtcaaaccccgaccgacggcaggtattattccggaccgcggttttaggggaannnnnnnnnntaggatgtaggtgtgcgtggggggcttcgagtataagggcggcggggcccactcgcggctgagcgaagggccttcatcntcattacacgcccggcgggggcgaggagcgagggtcgtgctctagagtgcgcctccgtcgaactaccggggcgccgcgcagcgggacgcttccatgggccggcgcacaggcgggggagaagctccacacagacgcgggcgggcgcacccggtgggagcccaggttggggctgcaaagcggcgccaaggacgctcctataggcggccacgcggggccactggtnnnnnnnnnnnnnnnncccgcggggctccggcgggcccgcgcgcggtgggcgggaaccggggttcattggcggcgcttggtcacgggccgcgggacgcgggggtcttccgatccggggtatcgtggggagatcgattcgagtcccccgtgccggctgccgggtgtgaaggtaaaaggctttattattcaggatcagctcaaagtctgacatggacacaggcagggataattatctcattacagttgacctttggcacccatttaaaagtactagctttccaagtgagacatgttatacccagtagactcggtataatttctgacagccaaatgtatcccaatttcactcagtagggctgccaggagatgggtagggatacaaacaaaatcatctactttatcaatcnnnnnnnnnnnnnnnnnnnnnnncccccattggctttcaaagcaagtgagataaacagcgttactggcagatattggtcataaataacatcttcccaaagcccaacagtcaaaaaaccaaacaccaaatataagcagattaggcagatttcctaaatattcagttaaggctatggtgtgcttggttttgaccagagcaattctatggcttccttttatttttctccctggataaaactatgcttacttgatccatgcaatttcagttgttacagctttaacttataagatcaaaggaattaaaaagttgtcagaatagattttcaaataatgacaaaaactgacataaagtctacacagaactgacataaagtctacacagtcctcagggatatggataaaacaaatgaagtttcatgactggaagggggctcccttctaagtaaatagtacatagaaagtatgtaaagcctctttccatgaggttacaaaggtgaaaaatataaaacaatggttcaagatcactgatacataattgttgaataaggggagggatgtttaagatattttgcacattattaacttagagtcagtctatacactctctgtattaaatatctagagaaaattctattactttttggctcagggctatctatactaaaacgctattgctttttatgtacatgaaaagaaactcaagatttatgtttctggttctggattttcagttaagagctatattctgttacaaaaatatcaataagaaatcatcacttttttcttaaaatctgatgacttattttttttaaaacattgcagcccctaaagaactgatgactgcacct

SEQ ID NO: 261351 - DNA, 580 bp, Homo Sapiens
  misc_feature (176)..(190): n is a, c, g, or t
  misc_feature (365)..(365): n is a, c, g, or t
  misc_feature (472)..(472): n is a, c, g, or t
  misc_feature (502)..(502): n is a, c, g, or t
  misc_feature (517)..(517): n is a, c, g, or t
  misc_feature (550)..(550): n is a, c, g, or t
  misc_feature (567)..(567): n is a, c, g, or t
attgattactattgctgcatacccggggtgggatggggtggttggagaaccagaactatttttaaaacattaggtttcaatataaatacaactcacaactgctagctttggggggtgggggaacattgtgtgggttttgttttgtttaatttattgattagtctttaaagtaggcnnnnnnnnnnnnnnngagaatactggaccatcattaaatgtgtactgtgaagagattaatatgtatgaagggctttaccaaagtccactaaataaacactactcaagtacagactgcaaaccaaaatgtatctgtgttacgacattaattgcaaatagcaagtatggtgctaaagtctacaccaatgganttagatgagtgctatgcctttaattttaaaataaaactagttttcagtaaaatggcttcggtatttttgttttaaatacaaacttgtatatttgcagctctagtganccatctcatcatgtaattcagacttgggantcatgattttatttnctaaaagccatcaaggatgtaggatataggccnttaggtgggcataaaancatccgttccatt

SEQ ID NO: 261352 - DNA, 691 bp, Homo Sapiens
  misc_feature (407)..(413): n is a, c, g, or t
  misc_feature (418)..(418): n is a, c, g, or t
  misc_feature (420)..(504): n is a, c, g, or t
  misc_feature (533)..(533): n is a, c, g, or t
ggggggcagtctgggacgcgccgccgccatgatcatccctgtacgctgcttcacttgtggcaagatcgtcggcaacaagtgggaggcttacctggggctgctgcaggccgagtacaccgagggggacgcgctggatgccctgggcctgaagcgctactgctgccgccggatgctgctggcccacgtggacctgatcgagaagctgctcaattatgcacccctggagaagtgaccacgctggaacccacccacccgctgtgctgaccatgggccctgagcgtcctaccccgaattcacgaggctgaggcatccgggagctggcgtaatgcctggccgcagtgtgtgtgtatcccataccccactctggaaggaaccatccagtaaaggtctttcagaaccaaaaaaannnnnnnaaaanannnnnnnnnnnnnnnnnnnnnnnnnnnnnnnnnnnnnnnnnnnnnnnnnnnnnnnnnnnnnnnnnnnnnnnnnnnnnnnnnnnnncatttcccccctaacctaaacaaaataanaaaattctttggcgggccccctccgcccctcaaaaaaatttttcaaaaacaatttctgtggggcccccgggccccccaaaggggaaaggaaaatggggtaaaacttggttctccagggaaaaccggggcccaaaccaagggggtgggaattccccccc

SEQ ID NO: 261353 - DNA, 518 bp, Homo Sapiens
  misc_feature (34)..(34): n is a, c, g, or t
ccagcgggcttgggcacttcccacacatactggncaatgagcgaggagttgctccccaaaaagcgggcatgggcttgatgccgaggtccccaaggacaaggaaggaggcgtgtttgacctggggcccttcattgtagatctgattaccttcacggaaggaagcggacgctcaccacgctatgccctctggttctgtgtgggggagtcatggccccaggaccagccgtggaccaagaggctcgtgatggtcaaggttgtgcccacgtgcctcagggccttggtagaaatggcccgggtagggggtgcctcctccctggagaatactgtggacctgcacatttccaacagccacccactctccctcacctccgaccgagtacaaggcctacctgcaggacttggtggagggcatggatttccagggccctggggagacctgagccctcgctcctcatggtgtgcctccaacccccctgttccccaccacctcaaccaataaactggttcctgctatgatc

SEQ ID NO: 261354 - DNA, 580 bp, Homo Sapiens
  misc_feature (376)..(421): n is a, c, g, or t
  misc_feature (473)..(504): n is a, c, g, or t
caggggggttggaggcacaccatgaggagcgagggctcaggtctccccagggccctggaaatccatgccctccaccaagtcctgcaggtaggccttgtactggtcggaggtgagggagagtgggtggctgttggaaatgtgcaggtccacagtattctccagggaggaggcaccccctacccgggccatttctaccaaggccctgaggcacgtgggcacaacctgcaggggaagtggggacaggagtcagggaaaaaaccccagccactgtccaccaaggtaggagtcagggcttggaggactacaactcccttgcagcccctgctgtaacctaggatgaaccataggcctagggctgctgggagttgtagttttnnnnnnnnnnnnnnnnnnnnnnnnnnnnnnnnnnnnnnnnnnnnnncccctgctgtaactgaaccataggcctagggctgctgggagttgtagttttnnnnnnnnnnnnnnnnnnnnnnnnnnnnnnnngtcagggctgagcagtctgtgatcttgactcctgggagccacagccatggcctcacaatggcagctaaaacttgag

SEQ ID NO: 261355 - DNA, 321 bp, Homo Sapiens
ggtgtaatatttattactaaatatctcaaagtattacaataaatgttaccatgtgagctactttgaatcaggcttcttgcacaccaatttaaaaatgttaactcttgatatatacactagttataccactcatgtcagtcaataaattttaaggtttaagtgcaggcctttgtttacagaaatcctaattttttgaaaccataactctgacctgacactaaattcctgtagacatgctaaggaaaatctgcttagtatcgagatcaagaacttccattcaaaaagattattcagttatgttatttgcatattaccattgtt

SEQ ID NO: 261356 - DNA, 787 bp, Homo Sapiens
cttttttatccatggcaggactgggcacttggagtcctgcatgccaaaatcattgcagctataacattgatgggtcctcagtggtggttgaaaactgtaattgaacaggtttacgcaaatggcatccggaacattgaccttcactatattgttcgtaaactggcagctcccgtgatctctgtgctgttgctttccctgtgtgtaccttatgtcatagcttctggtgttgttcctttactaggtgttactgcggaaatgcaaaacttagtccatcggcggatttatccatttttactgatggtcgtggtattgatggcaattttgtccttccaagtccgccagtttaagcgcctttatgaacatattaaaaatgacaagtaccttgtgggtcaacgactcgtgaactacgaacggaaatctggcaaacaaggctcatctccaccacctccacagtcatcccaagaataaagtagttgtctcaacaacttgaccttcccctttacatgtccttttttgtggacttctctctttggagatttttcccagtgatctctcagcgttgtttttaagttaaatgtatttgacttgtgttctcagcattcagagagcagcggtgtaagattctgctgttctccctggatcttctgacattactgctgtctgagatttgtatatgtgtaaatacaagttccttgataccctaaaaccttggattaaacagaatgtgcattgtacatctttaaacaaaatgtatattaatttattaaatctagttgtcactttaaaa

SEQ ID NO: 261357 - DNA, 1334 bp, Homo Sapiens
  misc_feature (1217)..(1228): n is a, c, g, or t
  misc_feature (1259)..(1259): n is a, c, g, or t
ttgtgccttaaatgtgccttataggtaaatccaggatgactgaggaatccctcgtcactgggagattttgtatatattcttttattattagattgagttgggtgtggggaaaaatttttttctgaaggctcaaaagtggtttcctaaaagtgagccactatcagatttgcacatcaggagaaaagaaatagggttacgtccattaggaaaatcccagtttgcaggagtgcaatcacatcaaaaaaacaaccagccaggattaaaggtattataaatcctcatagcggaacatttctcagggcaaaggaacctggctcatttgaagattaatgttccatgcctttgtggtcaaagggtcagcacttaacacaggaaaaaactaggtgttgttttgttttgttattttggacaacataaaattcaggaatgttttatttagccttggtttctagaaggaagggaaataatatttcttgagcatttactagggtgttgcgtgctgtgctaagtaaattttaagtctttcagttttatagatacggaaaacaagggtgactctttaccacaggatgaataaagaactaagtaatatgggaaatgcagcaatttctggactagctgagccgattccttcctgtgagcacactgtaagctttcaagttctctgggcaagaattacagcacctgtcccctgcaatggccctgctgtgtgatgctcatcgcttcccttcgtgctggagcagtcccccaggtgtccatctcctatctttttgttccaatcttctgtgagttccagctagcaggctttacatctggggaaaggaaaaccagggggttttaagctctgttctctgctcccattccttcgcttcaccagctgagtgagaaacatggaacttttttgcaccatgtacccctgggcttacactacttaagaaaatcaccttttcagataaaacagtttatgagttcatagagaacaccagcactctttgacaaaactgtgagtggaccctttttaaacaatgctgagcaggccctgagctataatcaacggtgagctttaatgtctatgctgacagttaggttttgctctcttttgtaacaggttacgtagaccagcagtgtttaaatctaaatacgttgtgagtctgttatctgtcctatcgcgttttttaaatgactttttattctttatcatagctaagtaaataccnnnnnnnnnnnngctttgtaggacacttgtacttagtttgggnaaaaaaaataaattgaaattgttatgcttttgtatttccatttcttgcaaataaatattttttcttaaatagtaa

SEQ ID NO: 261358 - DNA, 507 bp, Homo Sapiens; identical to SEQ ID NO: 70952
  misc_feature (477)..(477): n is a, c, g, or t

SEQ ID NO: 261359 - DNA, 768 bp, Homo Sapiens; identical to SEQ ID NO: 175742
  misc_feature (580)..(581): n is a, c, g, or t
  misc_feature (586)..(586): n is a, c, g, or t
  misc_feature (588)..(589): n is a, c, g, or t
  misc_feature (595)..(596): n is a, c, g, or t

SEQ ID NO: 261360 - DNA, 670 bp, Homo Sapiens
gccagtgtagacagacccagagactcggccagtgtagacagagccaggctgggcagcccggcgacgctggccccacgcacacgggccaccctggtgctggtgatcgatacggcagggagggggtgggcagggagggtcttgaacacatgtgggctgctgggctgctgggccggggtgcttacactgtaactagcagcatagtgcttaactagttaacaagaaatgctgcttccctttgaattgtttcgggggtgtagaaattgcacttatttctatgaaccccatggagggatgcccacagctgagcctccaggcgaggcatggcaggtcagtgcctggccgctgagcatccacgggccacagggcgggatcctcccggcccccagggactgcagcctctgcggctacgggtgcagcgaggaccggaacccacagggggaacctgagcaacgtctgaggtgccctgaagtggctccaggcgagaccggagccacacagtcccggggagcacgaggcggcccagccccaggtcccggtgcagagggagtggcctgatggtgactgggcggaggcctctgcccctcacaggacgtcgtcaaagtccagcagcttcgagtgctggcggctcttccacaggcgatacaaccggaagtcaaagtacgtctcgatc

SEQ ID NO: 261361 - DNA, 571 bp, Homo Sapiens
actcgaggggatctccctaggtcctggggcctctctcaagaggaaggaccctaaggaccatgagaaggagaacctgaggcggatcagggagattcagaagcgcttcagagaacaggagcgcagccgggagcagggccagcccaggcccctgaaagctctgtggcgctcacccaagtacgacaaggtggagtcccgggtcaaggcccagctccaggagcctggccctgcctctgggacagagtctgcccacttcctgcgggcgcactcccgctgcggccctggcctcccaccaccccatgtatctagtccccagccaaccccaccaggtcccgaagctaaggagccaggcctgggggtggacttcattcgtcacaatgcacgagctgccaagagagccccccggaggcattcctgctcactgcaggtcctggcacaagtgctagagcagcagcggcaggcccaggagcactacaatgccacgcagaagggccatgtgccacattacttgttggagcgcagggacctgtggcggcgggaggccgatgcccgcaagcagagccagccggaccct

SEQ ID NO: 261362 - DNA, 683 bp, Homo Sapiens
ggtaaccggtccggaatttcgggatatgtcgaccacgcgctcgcaatagccaagggtacaagtactaccgacagaagctggaggagttccggaaagccaaggccagctccacaggcagcttcacagcacctgatcccggcctgaagcgcaagtcccctcctgaggccctgtcagggtccttacccccagccaccacctgccccgcctcgtccacgcctgcgcccactatcatccctgctccagctgcccccgggaagccagcctccgcagccaccgtgaagaggaagcggaagagccggtgggggcctgaagaggataaggtagagctcccacctgctgaaactggtgcagagggacgtggatgcctctccctcgcctctgtcagttcaggacctcaaggggctcggctatgagaaggggaagcctgtgggtctagtgggcgtcacagagctttcagacgcccagaagaagcagctgaaggagcagcaggagatgcagcagatgtacgacatgatcatgcagcacaagcgggccatgcaggacatgcagctgctgtgggagaaggcagtccaacagcaccagcacggctatgacagtgatgaggaggtggacagcgagctgggcacctgggagcaccagctgcggcgcatggagatggataagaccagggaatgggccgagca

SEQ ID NO: 261363 - DNA, 1071 bp, Homo Sapiens
tccgcggccttctcccgcccgtccttttgttatcagcgcccctgggtttggggcagtttcccatccacggtttgtgggcccgtggtgaccaatctggcccgcggggagccttccgtggggcccttttcgccttaggggggggtggaaaggctttgccccacgcgggggtttctccttaggggcggggtgttcccccaaggcttttttcggccaggggggagcccccaagggttcaggaaaggtaggctttttttccctcgccgcctcccttgttgcccgggaacgggggcggttgaaagccccatcccagggaaatgggggcgtatgcggggcccagttttcggccatcgttaaagggggcagggtggtttttcccgcccccctcttccggatttcccccagccccgggttggacccccactcagccaccattttgccccaagcgggaagcccatgactgattggacgcccccgggtcaatacggacttggtttggtccacgccgctatgcacagcaccgcgggtcgcgtccaccgcctccgacaattgggtggccaccggtgtccttggcgctagacaccatctcttgggcccccgacaccttagacgacacaagctccttggtgtccgccaggaccttctccgtgggctgctgcaggatggggaggttctcctccaacttgtccagccccctgtgggcgtattcgctggctgatgcaatctggggctccagcttggagaggatcggctgagccccgctgacagcagccgccgtgagggtcctcactcccttctctgctgcgtcgcagacagtcttgacgtgcgggtagctctccttggtggaggcataggctgcggacaccatgtcgcaggtggagctgatcagaggcatgctggccacacggtccaccacactgggctgctgtaccggttcttccactgtcacctgggtgctgccatcagcctctgccccgtcggcagacatggtctctgcagcagacgcgcggtcaaccggacgtcccaggaacagcggccgcgacttcaaaaccagctggaaaccgtcccctcgtg

SEQ ID NO: 261364 - DNA, 1021 bp, Homo Sapiens
ttttcctggcccttcccacaaggttttggtataaccccccttgctttggccagtttccatccaggtttaaggcctggcgccaggctccagcaggagccctctggtgcccttctgctgggtggcttgaagctttgcccagggagtggtcataggggtgctgccgcagccttttcgacaaggggagcccagacgtacgaaagtagctctgttcctgccgctgctgctgcacggacgcgacgtcgaagcccatccagggatgtggcgatgcgggccagttcggcatccgtaaggggcaggtggttgtccgcccactcctccgacttccccagcaccgtgtcgaccccactcagcaccatctggcccaagcgggagcccatgactgattggacgccgccggtcactacggactttgtcttgtccacgccgctctgcacagcaccgcgggtcgcgtccaccgcctccgacaattgggtggccaccgtgtccttggcgctagacaccatctcttgggcccccgacaccttagacgacacaagctccttggtgtccgccaggaccttctccgtgggctgctgcaggatggggaggttctcctccaacttgtccagccccctgtgggcgtattcgctggctgatgcaatctggggctccagcttggagaggatcggctgagccccgctgacagcagccgccgtgagggtcctcactcccttctctgctgcgtcgcagacagtcttgacgtgcgggtagctctccttggtggaggcataggctgcggacaccatgtcgcaggtggagctgatcagaggcatgctggccacacggtccaccacactgggctgctgtaccggttcttccactgtcacctgggtgctgccatcagcctctgccccgtcggcagacatggtctctgcagcagacgcgcggtcaaccggacgtcccaggaacagcggccgcgacttcaaaaccagcttggaaaccgtcccctcgtgccgaattcgccacccaggcctcgctacct

SEQ ID NO: 261365 - DNA, 957 bp, Homo Sapiens
ggacttggccctccaggtttagggcctgggaccagtgcaagcagagcctcctgtcccctctgcttgggggttggagctttgcccagcgagtgctcataggcgtggttcggcagcctttccgaccagggagcccagacgtacgaagtagctctgttcctgccgctgctgttgcagggacgcgacgtggaagccatccagggattgtggcgatgcgggccagttcggcatccgtaagggggcaggtggttgtccgcccactcctccgacttccccaaccaccgtgtcgaccccactcagcaccatctggcccaagcgggagcccatgactgattggacgccgccggtcactacggactttgtcttgtccacgccgctctgcacagcaccgcgggtcgcgtccaccgcctccgacaattgggtggccaccgtgtccttggcgctagacaccatctcttgggcccccgacaccttagacgacacaagctccttggtgtccgccaggaccttctccgtgggctgctgcaggatggggaggttctcctccaacttgtccagccccctgtgggcgtattcgctggctgatgcaatctggggctccagcttggagaggatcggctgagccccgctgacagcagccgccgtgagggtcctcactcccttctctgctgcgtcgcagacagtcttgacgtgcgggtagctctccttggtggaggcataggctgcggacaccatgtcgcaggtggagctgatcagaggcatgctggccacacggtccaccacactgggctgctgtaccggttcttccactgtcacctgggtgctgccatcagcctctgccccgtcggcagacatggtctctgcagcagacgcgcggtcaaccggacgtcccaggaacagcggccgcgacttcaaaaccagcttggaaaccgtcccctcgtgccgaattcgccacccagc

SEQ ID NO: 261366 - DNA, 2852 bp, Homo Sapiens
  misc_feature (1667)..(1985): n is a, c, g, or t
gagcgaggcctgggtggcgaattcggcacgagggggacgtccggttgaccgcgcgtctgctgcagagaccatgtctgccgacggggcagaggctgatggcagcacccaggtgacagtggaagaaccggtacagcagcccagtgtggtggaccgtgtggccagcatgcctctgatcagctccacctgcgacatggtgtccgcagcctatgcctccaccaaggagagctacccgcacgtcaagactgtctgcgacgcagcagagaagggagtgaggaccctcacggcggctgctgtcagcggggctcagccgatcctctccaagctggagccccagattgcatcagccagcgaatacgcccacagggggctggacaagttggaggagaacctccccatcctgcagcagcccacggagaaggtcctggcggacaccaaggagcttgtgtcgtctaaggtgtcgggggcccaagagatggtgtctagcgccaaggacacggtggccacccaattgtcggaggcggtggacgcgacccgcggtgctgtgcagagcggcgtggacaagacaaagtccgtagtgaccggcggcgtccaatcagtcatgggctcccgcttgggccagatggtgctgagtggggtcgacacggtgctggggaagtcggaggagtgggcggacaaccacctgccccttacggatgccgaactggcccgcatcgccacatccctggatggcttcgacgtcgcgtccgtgcagcagcagcggcaggaacagagctacttcgtacgtctgggctccctgtcggagaggctgcggcagcacgcctatgagcactcgctgggcaagcttcgagccaccaagcagagggcacaggaggctctgctgcagctgtcgcaggccctaagcctgatggaaactgtcaagcaaggcgttgatcagaagctggtggaaggccaggagaagctgcaccagatgtggctcagctggaaccagaagcagctccagggccccgagaaggagccgcccaagccagagcaggtcgagtcccgggcgctcaccatgttccgggacattgcccagcaactgcaggccacctgtacctccctggggtccagcattcagggcctccccaccaatgtgaaggaccaggtgcagcaggcccgccgccaggtggaggacctccaggccacgttttccagcatccactccttccaggacctgtccagcagcattctggcccagagccgtgagcgtgtcgccagcgcccgcgaggccctggaccacatggtggaatatgtggcccagaacacacctgtcacgtggctcgtgggaaccctttgcccctggaatcactgagaaagccccggaggagaagaagtaagggggagaggagaggactcagcgggccccgtctctataatgcagctgtggctctggagtcctcaacccaggggctcatttcaaacttattttctagccactcctcccagctcttctgtgctgtccacttgggaagctaaggctctcaaaacgggcatcacccagttgacccatctctcagcctctctgagcttggaagaagcctgttctgagcctcaccctatcagtcagtagagagagatgtccagaaaaaatatctttcaggaaagttctcccctgcagaatttttttnnnnnnnnnnnnnnnnnnnnnnnnnnnnnnnnnnnnnnnnnnnnnnnnnnnnnnnnnnnnnnnnnnnnnnnnnnnnnnnnnnnnnnnnnnnnnnnnnnnnnnnnnnnnnnnnnnnnnnnnnnnnnnnnnnnnnnnnnnnnnnnnnnnnnnnnnnnnnnnnnnnnnnnnnnnnnnnnnnnnnnnnnnnnnnnnnnnnnnnnnnnnnnnnnnnnnnnnnnnnnnnnnnnnnnnnnnnnnnnnnnnnnnnnnnnnnnnnnnnnnnnnnnnnnnnnnnnnnnnnnnnnnnnnnnnnnnnnnnnnnnnnnnnnnnnnnnnnnnncaaaaacgacagaacaacaaaaagaggggagacacgaacagaagagtttcccctgcgagagggggccccataggataacgcggataccccaggtttacgtggttcccaaagtgtggcccccctataagggaagctgcggaatatataaaacgccataggcacagaggcacccaagacgttttacaaacacacatccagtgaaccgggggaacaacagcgtgacaacgctatggaggagaacactacgtgcacaacagggaaaccccataaccaacgcgggtgaggtggttgaacctatcaatgtgaggccagacagacatacagcctacaacgacgaagtttgaaacagccacccagacggcgaaacaagttaataacaccgtgtgacacacagcgtggtccacaccaaccggtggtacacacacaaaagcagcgcacacaataacgacccggcacaccgcgtggcgagaaagatcaccaggctaaacacggggagaccacatcgacgacatcgacaacaaaagattatttaagcaccacgggagccagatcacgaatgaaatacactgagaacaggcacccaactcacacaacacaaccaaccccacaccgacggagggaagccgcgtgcggcaagggggacgagacgagggacacgcgacccagccgggcacgcagatgaacgtagacttgcgcgggcgcagccggcgacgagagcgtgattggagcccctcaaagaccgaagggagcaggcatagtggacagaagggaaagctcggggaccgcagaagcgacagacgagctgggggcgcatgcagagtgagagacagtggacgtcgagcacggcggcgcgcgtcggggagcgcc

SEQ ID NO: 261367 - DNA, 767 bp, Homo Sapiens
ctcagcctgggacgatggggaggaaaaaaatccagatctcccgcatcctggaccaaaggaatcggcaggtgacgttcaccaagcggaagttcgggctgatgaagaaggcctatgagctgagcgtgctctgtgactgtgagatagccctcatcatcttcaacagcgccaaccgcctcttccagtatgccagcacggacatggaccgtgtgctgctgaagtacacagagtacagcgagccccacgagagccgcaccaacactgacatcctcgagacgctgaagcggaggggcattggcctcgatgggccagagctggagccggatgaagggcctgaggagccaggagagaagtttcggaggctggcaggcgaagggggtgatccggccttgccccgaccccggctgtatcctgcagctcctgctatgcccagcccagatgtggtatacggggccttaccgccaccaggctgtgaccccagtgggcttggggaagcactgcccgcccagagccgcccatctcccttccgaccagcagcccccaaagccgggcccccaggcctggtgcaccctctcttctcaccaagccacctcaccagcaagacaccacccccactgtacctgccgacggaagggcggaggtcagacctgcctggtggcctggctgggccccgagggggactaaacacctccagaagcctctacagtggcctgcagaacccctgctccactgcaactcccggacccccactggggagcttccccttcctc

SEQ ID NO: 261368 - DNA, 424 bp, Homo Sapiens
  misc_feature (242)..(272): n is a, c, g, or t
taagcagcaacttaccacaggcttggtggctttaagtaatatagcattaagcaaatggtcagttattttttaatgttgaaaacttccaagtgtgaataatacggacatagtttactaccttttgcttttaatatacctggttatctatttccatttgaaataaaatgaaaggagacctcaaactgatgctgagaagtagacaaaatcagctctcagacttaactctccccaattaaaatagnnnnnnnnnnnnnnnnnnnnnnnnnnnnnnnaagagatagggtcttgctgtgttgcccaggctagagtgcagcagtgacatgaccatagctcactgcagcctggaactcctgggctcaagatccttctgcttcggcctcctgagtagctaagaccacaggtgtgtgccaccacacctggctaa

SEQ ID NO: 261369 - DNA, 1153 bp, Homo Sapiens
ccagtcccgctccgtcctcctcgcctgccaccggtgcacccagtccgctcacccagcccagtccgtccggtcctcaccgcctgccggccggcccaccccccaccgcagccatggacgccatcaagaagaagatgcagatgctgaagctggacaaggagaacgccatcgaccgcgccgagcaggccgaagccgacaagaagcaagctgaggaccgctgcaagcagctggaggaggagcagcaggccctccagaagaagctgaaggggacagaggatgaggtggaaaagtattctgaatccgtgaaggaggcccaggagaaactggagcaggccgagaagaaggccactgatgctgaggcagatgtggcctccctgaaccgccgcattcagctggttgaggaggagctggaccgggcccaggagcgcctggctacagccctgcagaagctggaggaggccgagaaggcggctgatgagagcgagagaggaatgaaggtcatcgaaaaccgggccatgaaggatgaggagaagatggaactgcaggagatgcagctgaaggaggccaagcacatcgctgaggattcagaccgcaaatatgaagaggtggccaggaagctggtgatcctggaaggagagctggagcgctcggaggagagggctgaggtggccgagagccgagccagacagctggaggaggaacttcgaaccatggaccaggccctcaagtccctgatggcctcagaggaggagtattccaccaaagaagataaatatgaagaggagatcaaactgttggaggagaagctgaaggaggctgagacccgagcagagtttgccgagaggtctgtggcaaagttggagaaaaccatcgatgacctagaagagaccttggccagtgccaaggaggagaacgtcgagattcaccagaccttggaccagaccctgctggaactcaacaacctgtgagggccagccccgaccccgcagccaggctatggttgccaccgccagatcccaataaaactgatgttactagcgctaaaataacaagagtcaatacgaataggagataaaacatcaaaacaaaatggaaaaaagaacaatcaacaggcaaaaaacgagcatcagaggatcaacaagaaaataaataaagg

SEQ ID NO: 261370 - DNA, 676 bp, Homo Sapiens
ttaagtgttccctcttcagctgagtcagaaaagcaaacaagacaggctccaaaacggaagtctgtaagaagaggaagaaaaccacctttactgaaaaagaaacttcggagctctgtagctgcccctgaaaaatcatcttccaatgattcagtagatgaagaaacagcagaatctgacacatcacctgtgttagaaaaagagcaccaaccagatgtagacagtagtaacatttgtactgtgcagactcatgtagaaaaccagtctgctaattgcttgaaaagttgcaatgagcaaatagaagaaagtgagaagcatactgcaaattatgatacagaggaaagagtaggatcttcatcttctgagtcttgtgctcaagatcttcctgtgctagttggtgacgaaggggaagttaaaaaactcgagaatacaggtatagaggctaatgttttgtgtttggaaagtgagatttctgaaaatattcttgaaaaaggaggtgatccattggaaaagcaagaccagatatctggactttcacaatcagaggtaaagacagatgtatgtacagttcatcttccaaatgattttcctacatgtttaacatctgaaagcaaagtgtaccaacctgtatcttgtcccctaagtgacttatctgagaatgtagagtcagtggttaatg

SEQ ID NO: 261371 - DNA, 821 bp, Homo Sapiens
ggtgagtcagtctgccccttggacctttcgtcctacttctgcccctttcagtgcgcgggataaggggtcagctgtggttcattcagaccacttccccgttttagaaccagaaggtgcctggcattcgaagtggctgagggcacaggttttagaaggctgtagttgaatatgggctcctaagggaagccccatctccaacagaaacccgatcaaaaggaatctgtctttggggatttctccttcctgttcaatatgcaacaggcacttgaaggaaagagggaacatcccagctactgaacctcaggagccccacagggcctgaaaatggggagaggaaatacatgttgacttggaggaagcacttggatatatctttggttgcttcagggaaagctttggccccttaaaattacttttttcctcccttttctccccctacgggtctgttggggttggcatcaaagaaggcaggtaggaaggaaagaaaaagaaggtgggcagcaggcagaaagagttaatcggaccagtcgtcctcatcaaattcagaggagtcatcttctgagtcactgtactcaacagcaatgcgacgagacaagatggtggccacgtcattgcccacaacatcccgcttctcttgttcccgctgctcctcaaccctgcgcagctgaaaaccttgacggatggctgaaagcaggtcgctacgggcatcgctcacggcaggcaaggaggacttgggcttggtggtatcagaaagcggtggtggtatagcaggctggccatctgcaccagagaatagcctgtcttcagtctttaagaactca

SEQ ID NO: 261372 - DNA, 1001 bp, Homo Sapiens
  misc_feature (298)..(384): n is a, c, g, or t
  misc_feature (659)..(660): n is a, c, g, or t
  misc_feature (662)..(662): n is a, c, g, or t
  misc_feature (664)..(664): n is a, c, g, or t
  misc_feature (666)..(666): n is a, c, g, or t
  misc_feature (670)..(670): n is a, c, g, or t
  misc_feature (699)..(720): n is a, c, g, or t
gcctgggtggcgaattcggcacgaggggcgcatcaccggcgcggaggcaggaggagcagtctcattgttccgggagccgtcaccacagtaggtccctcggctcagtcggcccagcccctctcagtcctccccaacccccacaaccgcccgcggctctgagacgcggccccggcggcggcggcagcagctgcagcatcatctccaccctccagccatggaagacctggaccagtctcctctggtctcgtcctcggacagcccaccccggccgcagcccgcgttcaagtaccagttcgtnnnnnnnnnnnnnnnnnnnnnnnnnnnnnnnnnnnnnnnnnnnnnnnnnnnnnnnnnnnnnnnnnnnnnnnnnnnnnnnnnnnnnnngaagcccgccgccgggctgtccgcggccccagtgcccaccgcccctgccgccggcgcgcccctgatggacttcggaaatgacttcgtgccgccggcgccccggggacccctgccggccgctccccccgtcgccccggagcggcagccgtcttgggacccgagcccggtgtcgtcgaccgtgcccgcgccatccccgctgtctgctgccgcagtctcgccctccaagctccctgaggacgacgagcctccggcccggcctccccctcctcccccgnncngngngttntcccgcgccctcgccgtgcggttccgcgnnnnnnnnnnnnnnnnnnnnnngactgggggttttccgcgcgcctcccgggccgccgcttctcgccgggccgccggccgtcccttcccctttcgcccgccccgtctttacgcgccccggcccccctcttcgcgccgcaccccgtgtctggtggcgcggccgctgtctcgcaccgcgccttgttgtgccgcagcaggcgttcgtctcttcttcccgcgccgcgcccctctataccgtgctcacgaaagagccgaggcgacgcccgcgtcaacccgaaattcccccgcgcctcgggccgtagccc

SEQ ID NO: 261373 - DNA, 1199 bp, Homo Sapiens
  misc_feature (304)..(380): n is a, c, g, or t
  misc_feature (677)..(768): n is a, c, g, or t
  misc_feature (866)..(927): n is a, c, g, or t
ggcatgtctatagacagtcgcttaaagcaggctggtccggtcggaattctcagggatatcgtcgacccacgcgtacggggagccgtcaccacagtaggtccctcggctcagtcggcccagcccctctcagtcctccccaacccccacaaccgcccgcggctctgagacgcggccccggcggcggcggcagcagctgcagcatcatctccaccctccagccatggaagacctggaccagtctcctctggtctcgtcctcggacagcccaccccggccgcagcccgcgttcaagtaccagttcgtnnnnnnnnnnnnnnnnnnnnnnnnnnnnnnnnnnnnnnnnnnnnnnnnnnnnnnnnnnnnnnnnnnnnnnnnnnnnntgctggagaggaagcccgccgccgggctgtccgcggacccagtgcccaccgcccctgccgccggcgcgcccctgatggacttcggaaatgacttcgtgccgccggcgccccggggacccctgccggccgctccccccgtcgccccgggagcggcagccgtcttgggacccgagcccggtgtcgtcgaccgtgcccgcgccatccccgctgtctgctgccgcagtctcgccctccaagctccctgaggacgaccgagaccctccgggcccaggaactaacacaatacgcacaacacgnnnnnnnnnnnnnnnnnnnnnnnnnnnnnnnnnnnnnnnnnnnnnnnnnnnnnnnnnnnnnnnnnnnnnnnnnnnnnnnnnnnnnnnnnnnncaaaaccaaggcccacagcccacgccaagcatgcacaccaacagaccacacgaaccgcgcaacagaagaacagagagcgagcaccgccagcgaagacnnnnnnnnnnnnnnnnnnnnnnnnnnnnnnnnnnnnnnnnnnnnnnnnnnnnnnnnnnnnnntacacaagaaaagaaggaaggctcaactccaacgacacacaacaaactcagggcgcgaaacacacgcaactcaacagcggccaccaacgacaacaacaaacgcaagcacacagagaactcgaacgacaggccccgccgccaaccaccaacacacagacaacaagcatgaaagacaaacaaccgaccgcgaccacacaccacgacgccccagaccccacgcaccgacagcccaacgaccaacacacacacgcgcgcagacaacaacaacagcc

SEQ ID NO: 261374 - DNA, 608 bp, Homo Sapiens
attcagggccattctcaaaaaccagactcctgggtctaatctagtttcccaacagttccagaagaagaaggagggaagaaaatttttcaaggaacttcttgctcatgtgttgctgtttcccaacacatcagccttatggaagatgtcatgaggctgcttgcctgggaggctacactttcctttccagaagacttcaaagctgactgccaaagcttctggtaaatccaccccacccttcacaccctttcctgaaaggcatttataccacccattttatttattggctttgctcccaaccccctgccctagagcaattgagtttttgaatttttgaccctctctctgtcttcagcaaaactgcatgacaagctgcatattcagcctcagtttttccaaggagaatggaaagcacttgccttcctgtcttgaagaatggcacaaagagtaggactagcaagcctggggggattgaaatctgcccttgcctaagtctttgacagagaacttttaataattctggaacagataagattagcaaacttacaaggaatagcttcttatttcccattccctacgggtaaaatcagtcctttaacaccccagcatgg

SEQ ID NO: 261375 - DNA, 1435 bp, Homo Sapiens
ggtaccggtccggaattcgggatatcgtcgacccacgcgtcgccgtcacagcacttgtgaggaagttcctggggccagtgccaggtgtaccctgctgtgggtaaccatgaaagcacacctgtcaatagcttccctccccccttcattgagggcaaccactcctcccgctggctctatgaagcgatggccaaggcttgggagccctggctgcctgccgaagccctgcgcaccctcagaattggggggttctatgctctttccccataccccggtctccgcctcatctctctcaatatgaatttttgttcccgtgagaacttctggctcttgatcaactccacggatcccgcaggacagctccagtggctggtgggggagcttcaggctgctgaggatcgaggagacaaagtgcatataattggccacattcccccagggcactgtctgaagagctggagctggaattattaccgaattgtagccaggtatgagaacaccctggctgctcagttctttggccacactcatgtggatgaatttgaggtcttctatgatgaagagactctgagccggccgctggctgtagccttcctggcacccagtgcaactacctacatcggccttaatcctggttaccgtgtgtaccaaatagatggaaactactccgggagctctcacgtggtcctggaccatgagacctacatcctgaatctgacccaggcaaacataccgggagccataccgcactggcagcttctctacagggctcgagaaacctatgggctgcccaacacactgcctaccgcctggcacaacctggtatatcgcatgcggggcgacatgcaacttttccagaccttctggtttctctaccataagggccacccaccctcggagccctgtggcacgccctgccgtctggctactctttgtgcccagctctctgcccgtgctgacagccctgctctgtgccgccacctgaatgccagatgggagcctcccagaggcccagagcctgtggccaaggccactgttttgctagggccccagggcccacatttgggaaagttcttgatgtaggaaaggatgaaaaagcccaaatgctgctgtggttcaaccaggcaagatcatccggtgaaagaaccagtccctgggccccaaggatgccggggaaacaggaccttctcctttcctggagctggtttagctggatatgggagggggtttggctgcctgtgcccaggagctagactgccttgaggctgctgtcctttcacagccatggagtagaggcctaagttgacactgccctgggcagacaagacaggagctgtcgccccaggcctgtgctgcccagccaggaaccctgtactgctgctgcgacctgatgctgccagtctgttaaaataaagataagagacttggactccaaaaa

SEQ ID NO: 261376 - DNA, 1309 bp, Homo Sapiens; identical to SEQ ID NO: 5056
  misc_feature (458)..(603): n is a, c, g, or t
  misc_feature (615)..(627): n is a, c, g, or t
  misc_feature (665)..(724): n is a, c, g, or t
  misc_feature (882)..(894): n is a, c, g, or t

SEQ ID NO: 261377 - DNA, 248 bp, Homo Sapiens
  misc_feature (71)..(90): n is a, c, g, or t
ttaataagggtactccatctgccacagaatccaggattctatagttttttagtttcacttccctatgttcnnnnnnnnnnnnnnnnnnnnaacaatgagatgataccatgttacagcggtattacattaagatacatttaatatagccacaattaaagtatgtattatgtatttatgctggtgttctttcatgttatttcttctagtgaaaatttccaagtaaactgttattgagcatatacattttt

SEQ ID NO: 261378 - DNA, 669 bp, Homo Sapiens
  misc_feature (255)..(265): n is a, c, g, or t
ggggatcgaaaacatttcaaattgctctatctgggctgatagacatttcgtcatttaagtaagggatcgaagacatttcaaattgctatctccatctgggctgatccaaaattctgagattgttggctacctatattttgttgcagcttttaaatgtactctgaacttccaaaccacattcattccagcctggtagaacaaatattcttggatctttgatcaaagcctggaatgatagctttaataaaagaaggnnnnnnnnnnngcaccctctcttgatctcaactgtaacaaggctgtaattccatcaagcgattctactgacatctagtacagtgttgaagcccaagtggttggctggttccagtattagaactcaagttgaaattatatgattaactgaaatttggggcatgcattatttattatacatggcctacaacggttctgtctgcgctgttacgtattacctacacttctgggtttttttgttcttgttctcagcctctctttaagagttcttgggccttccttttccctctttctattttaacagttttaattttagaaccatttacattccagtaggtaattcactatgcgctttatatgccttagggcatccaaataaaaaaaaatagggtaaacatccccaaaacccacctttaa

SEQ ID NO: 261379 - DNA, 587 bp, Homo Sapiens
atgagccaccgtgcccggcttcacacccatttctttaaaaaggatcccgtagcaggcagaaaagccccttccatcctgctcctctgatactgtgcccccttggagatatttccgtcctccacccacgtgtctgtggctggaactgcccagcctgctcctggccccctggaagcctccccacagctggtaatctggacttaaggattgctgggccaccgcctctctgcctaccaccattccatatttaagtggagcccctacgtagaaaggccccggggctttattttagtctccttttcagggatgtcgtgggcgggggagggggttcttggtgctacagccctctccccacccctaaagggacgccgacgctgtttgctgccttcaccacatattagtgcttgaccctggcaggggaccccatggaaaagatggggaagagcaaaatacatggagacgacgcaccctccaggatgctcgctgggattcccacgcccaccactgtcccccaccccatggctgggaggggcctctgaacggaacagtgtccccacagagcgaataaagccaaggcttcttaccaaacc

SEQ ID NO: 261380 - DNA, 554 bp, Homo Sapiens
tacatctatatacatatatatatacgcgcacacacttgttcagaagttatgttgtggccttggatttgtttttccccttggaaatggttcttaactctgggattttagaaggttagaatattttttcaagagaacagtggtactcaaaagaatgaaaggtggtccctacattttctgtattcatcacttaaaatttttaatttttccgagaactacaagtaacatttgaaccatgctgctgttgtaccttaaacaaaaactcagtgataaccagtatttagtctattaaaaatgctctttttgaagaaaaaagtttggaagtctctgattagccagagtatagtatgagtcttcactgagaaatatggtgacccattttctttgtgaaaacctgggaaaatgcaagtgtgggtatgaagtgtgtgttctgtttgcattgaaacaatgtaattttgtgtcttctttttgctttaactgacttatttcagaaattgtacagtgttgagggggaaagtcttttctgttaatatatttgcaattcattaaaggatatg

SEQ ID NO: 261381 - DNA, 929 bp, Homo Sapiens
tgttacacttggcgaagatcgaattcgcattgtgttcaaagtcacctgccctcagggtgttgcaaatcatggtatatgactcccccgagtatcacctagtcggtcatctggttccgcagcgtgagagccttcaacacgcctcgatcgcaatacaacagtgggccacctgtggacttggtccaccttctgtggtccgtctcaaggcccctggggtcacagtcacaggctcggcacttccatcgttcggggtcttccccatgaagagttcctggcacttcgctgcaggtgcggcgctccaaacccatggcatgcactggcactgcccgccgtgaactcattgcaagatggcccgaaggaatgagcagcattgcagttgcatgggtcaacagccagtgccactggccagctgccaggtattgggcgcacagcggtcacagttctgcccgatcacattaggaagacacaagcactgaccagtggctttgtcgcactggcagtcagagccgttacagtgctcttgcacggtgcccaggtaattacagacacactttcgacagtcctgccggagggcatcaccatagtatccaaaccggcagaactgacagtgttccccttccgtgtggtacaggcacttgagacacctcccagtctccttgtcacaggcttctgggtctgtcgtgtcaatgttgttgtgacactggcaaggctgacacgaccccccaacttctgatggattgccaaagtatcctgaggcacagtcgtcacatctggaaccaatgtatccaggatcacaaacacaggcaagctgtaaagtaacaggatcttggtagcagctcctggcaaactggcgtccactgtcgggaccatctgggcaagggcaagggcggcagtgatctcctgcctcgtgccgaattcgccacccaggcctc

SEQ ID NO: 261382 - DNA, 548 bp, Homo Sapiens
cttgggcttccggagccaaaaggccccggaagtggtcggccgcttgcgacgctccggaagtgacgtgctttcccgagccggggccatggcacctgcaaggtgtttctcagcaagattgaggaccgtgtttcagggcgtggggcattgggctttgtccacatgggctggcctgaagcccagccggctactgccacagcgggcttctcccaggctgctctcggtcggccgtgcggacctcgccaagcatcaggaactcccggggaagaagctgctctctgagaaaaagctgaaaaggtactttgtggactatcggagagtgcttgtctgtggaggaaacggaggcgctggggcaagctgcttccacagtgagccccgcaaggagtttggaggccctgatggaggggacggaggcaacggtggacacgtcattctgagagttgaccagcaagtcaagtccctgtcgtcggtcctgtcgcggtaccagggtttcagtggagaagatggagggagtaaaaactgcttcgggcgcagtggcgccgtcctctaca

SEQ ID NO: 261383 - DNA, 1581 bp, Homo Sapiens
  misc_feature (1351)..(1352): n is a, c, g, or t
  misc_feature (1357)..(1366): n is a, c, g, or t
tgtgtggacggtcaaagaggttcagcagctcctcccggagcctgtgttgggtgccaccgagccgctgacctcaggccagctcctcatgaagcactacggcctcacagaggctggtaacatcagccccagtcatgaccccaatggggagctgcagggccagaatgtgctgaccgtccggtactcgctggaggctgactgctgcccgctttggcttggatgtggaggccgtgcggaccttgctcaattcaggggctggagaagctcttccaggcccggaagcatcggcccaagccgcacctggacagcaagatgctggctgcctggaatggcttgatggtgtcaggctatgctgtgactggggctgtcctgggccaagacaggctgatcaactatgccaccaatggtgccaagttcctgaagcggcacatgtttgatgtggccagtggccgcctgatgcggacctgctacaccggccctggggggactgtggagcacagcaacccaccctgctggggcttcctggaggactacgccttcgtggtgcggggcctgctggacctgtatgaggcctcacaggagagtgcgtggctcgagtgggctctgcggctgcaggacacacaggacaggctcttttgggactcccagggtggcggctacttctgcagtgaggctgagctgggggctggcctgcccctgcgtctgaaggacgaccaggatggagcagagcccagcgccaattccgtgtcagcccacaacctgctccggctgcatggcttcacgggccacaaggactggatggacaagtgtgtgtgcctattgaccgccttttccgagcgcatgcgtcgtgtcccggtggcgttgcccgagatggtccgcgccctctcagcccagcagcagaccctcaagcagatcgtgatctgtggagaccgtcaggccaaggacaccaaggccctggtgcagtgcgtccactctgtctacattcctaacaaggtgctgattctggctgatggggacccctcgagcttcctgtcccgccagctgcctttcctgagtaccctccgacggttggaagaccaggccactgcatatgtgtgtgagaatcaagcctgctcagtgcccatcactgatccctgcgaattacgaaaactactacatccatgactgccccaacccccttggggtggggcagaaggtgaagcatcccaactgactagagactcaggccctgcagggccctatagaacctgtggccatccctgagcaccctgccaccaggtgacctcggccatactcactgccccccttgggcacccactcaccctagaataaacttaacagtgtcccggtggtnnccctnnnnnnnnnnacccaaatttgatcctctcaccctgtggaacgtgacccccgcctttgaccaaaaaaccttgtccggccgccttcggccctaaaaaaattttctaaaacaatttcctttgggcgcccggggcccccgtcgaggaaaggtgaccggtggctcatgccgggtttcccaaagaaaaaacccgggctcatgaacataagggttttggaattttccccccc

SEQ ID NO: 261384 - DNA, 1021 bp, Homo Sapiens
tggatcggcatgcaaatacaatcagattatttgttttgctacctgaacaatccccagtatcttattccaaaaggacagcataccagaaagctggaggcgattctggtaatgtggatgatgactgtgaaagagtcaaaggacctgtaggaagcctaaagtctgtggaagctattctagaagaaagcactgaaaaactcaaaagcttgtcactgcagcaacagcaggatggagataatggggacagcagcaaaagtactgagacaagtgactttgaaaacatcgaatcacctctcaatgagagggactcttcagcatcagtggataatagagaacttgaacagcatattcagacttctgatccagaaaattttcagtctgaagaacgatcagactcagatgtgaataatgacaggagtacaagtccagtggacacggatattcttagctccagtcatagcaatgatacttcggtgcaatgcacacaatgctcagatccctttggctaatggacttgactctcacaggatcacaaggtaggaccgccctgcaacacacggctcccaccccctcctgtcgggccgcttctggaccttcaaaaaagttttctaaaacccatccgctttgggccgccccgcgtccccatccaggtaaacttggacacctgggaccaataaggcctggttggtccctaggggaagaatccccgggggcgcattggggcgtacggggggcgtggcgcatttcccccacccccattcatagcccgccgttcgcgcggtgggcgcaagcccggcagggggctcgttaaaacccaattccccgttagggcaagtttctgtaggggacctattcaccgggaaaccgtcctgacacgcgtgccgtcccaaacggggaggcaccatatacgcaatattgtaggcgcgcgcgcgctggagaagagccatggacagaaaaggggggggcacattctctttaccggtattccgcgccgagaattgggtggccccctcacccaacgggg

SEQ ID NO: 261385 - DNA, 209 bp, Homo Sapiens
gataaagactttttatgccaggaatggattaattaccaacaaaatttatactaatcaggctgatgtcaatctatttttgtaatgtatcattaacaaatttattttggaaaagataaaaatattgccccttgataataaatctttttttcctttgatgcaaacagctagacacctttttctttttcttttgatattctaagacaaaaaaa

SEQ ID NO: 261386 - DNA, 881 bp, Homo Sapiens; identical to SEQ ID NO: 15366
  misc_feature (631)..(650): n is a, c, g, or t

SEQ ID NO: 261387 - DNA, 816 bp, Homo Sapiens
  misc_feature (674)..(720): n is a, c, g, or t
  misc_feature (768)..(768): n is a, c, g, or t
gggcttattgctggcggcctgaggtaaaggccgcgcttgggtgtccctgggtggtcgggtccccgagttgggaggggcggaaggctgaacctccagcttgagccggacaagccgattcccagcgttgagagggtagagatgaactgtgtgtgaggccaaactggatcggtcaacatggtcttccccctccccactccccaggagcccatcatggcgacgccccctaagcggcgggcggtggaggccacgggggagaaagtgctgcgctacgagaccttcatcagtgacgtgctgcagcgggacttgcgaaaggtgctggaccatcgagacaaggtatatgagcagctggccaaataccttcaactgagaaatgtcattgagcgactccaggaagctaagcactcggagttatatatgcaggtggatttgggctgtaacttcttcgttgacacagtggtcccagatacttcacgcatctatgtggccctgggatatggttttttcctggagttgacactggcagaagctctcaagttcattgatcgtaagagctctctcctcacagagctcagcaacagccttcaccaagggactccatgaaatatcaaaagccccatattcccaatggttgcctaaaaggggctttaaaaaaacttccagggccttgccgaaannnnnnnnnnnnnnnnnnnnnnnnnnnnnnnnnnnnnnnnnnnnnnnttctcttggggcatttttaaacgacaccctgaaatggcctctttgggngagcaacatatatctcgacgacgtacagtaggggtcccgccgttgtcc

SEQ ID NO: 261388 - DNA, 462 bp, Homo Sapiens
ggatggggggaagaagtcaatggtgaggcttctctgggaaattctgcaggccttgtagttctctaagccctctagcaacatgtggataagggccttggatattccatggagtccttggtgaggctgttgctgaaccctagagaaaagaaacaagaaagggcaaaatgggcccccacatgattatgatgacccttccttatcacttcaagatctacttatatccctggatgatttccaccttggctcattcctatgtggaaatgccaagccaccatctggttttcactgattcaaagattattaaatgcctactgtatgccaggcaattttaggcactgggagatagcagcaaacacaacaaacaaaactcccggcctgatggacttcaaattcttgtaaagaaagacataacaaaaaaccaatggaataaaagctatgtgtcagatggttctaactacaata

SEQ ID NO: 261389 - DNA, 475 bp, Homo Sapiens
  misc_feature (16)..(16): n is a, c, g, or t
  misc_feature (121)..(121): n is a, c, g, or t
  misc_feature (130)..(130): n is a, c, g, or t
ccccggggaaaatcanccccggatataaagtagatcttgaaagtgataaggaagggtcatccataatcatgtggggccccattttgcccctttccttgtttcttttcctcctaggctcagnaaaagcctnacccaaggactcccatgaatatcaaagccccatatcccacatgttgcctagaggtgagagcagctcacccccactacccagactctgtgtttagggtggtgacctgaagaaggaagagagcgaaagaagggaaggaccatctttccctctaaactggagtcaagggagggaggtcagagcaagcctgggggcgtaacccagacccagtctttgttcaatctcttctgtcctctttttcaggggcttagagaactacaaggcctgcagaatttcccagagaagcctcaccattgacttcttccccccatcctcagacattaaagagcctgaatgcctttgaaaaaa

SEQ ID NO: 261390 - DNA, 1381 bp, Homo Sapiens
  misc_feature (1252)..(1308): n is a, c, g, or t
tatgactttacagagaacaatgaagctatacagacttccagatgttacaaagacttcaggtttgagaccaatggaaccaaaagatatcaaatcagttcgagaattaatcaacacttacctgaagcagtttcatctggctccagtgatggatgaagaggaagtagcccactggttcctcccccgggagcacattattgacacgtttgtagtggagagccccaacggtaaactgactgatttcctgagcttctatacgctcccctccacggtgatgcaccaccctgctcacaagagcctcaaagccgcctactcattctacaacatccacacagagacgcccctgctggacctcatgagcgacgcgctcatactggctaaatcgaaaggatttgatgtattcaatgcactggatttgatggaaaataagacattcttggaaaaactcaagtttggtataggagatggcaatttgcagtattacctgtacaattggaggtgtccaggtacagattctgaaaaggttggactagtactacaatagatggatatttttatttctagaactctgacatcatcatttgttaatatttaatgatttctggaactgccattccaaagaagaataaaagcacaactcaagtgaaattgaagtagtcgataatcagaaaagatgacaaaagtccacatgtgacatttgtacgtttctagctagaatgttaaacttcatcctttttttactgttgacctatttgtgggagggatgaaaggctacaaagagcacattcttgtaatgttcaaatttttgcctgtctcttgaagaggtattttttcacccttagaaaagggactgtttttctatggactaagtagaagttacagagtcatgtaagaaaatcttgcctatgtgtggagagaaattgctgcatttctgtttcttaagtgatggtacatttgtccatgtaacagaacaaaagatccatttggaaattttttttactggtatcaccttacatggtatcactgggaacatttatggaatcaacacttctgtagctcagtgacaggtggtggttgtttaagtgcagagcaatattaaaatgtactggtgactagtacatgtatctctccataagcagagttgccgaatcaataaacatgcaagtttgtacttttgatctttaccaggtcagtggattgcttcaaaagcagagtttgtgcaagcactcactgtgctctctgaaagagctgaggnnnnnnnnnnnnnnnnnnnnnnnnnnnnnnnnnnnnnnnnnnnnnnnnnnnnnnnnntgacgtccggagatcgggaccattctggcaatggtgaacccatttttatggaatcaaaataccgggtgggggg

SEQ ID NO: 261391 - DNA, 815 bp, Homo Sapiens
  misc_feature (605)..(605): n is a, c, g, or t
  misc_feature (620)..(620): n is a, c, g, or t
  misc_feature (622)..(717): n is a, c, g, or t
gtgctcgcggctataaggggcggaggctgggcggcgttgctctgcgctctgcggctgacggcgcttttgtctccggtgagttttgtggcgggaagcttctgcgctggtgcttagtaaccgactttcctccggactcctgcacgacctgctcctacagccggcgatccactcccggctgttcccccggagggtccagaggcctttcagaaggagaaggcagctctgtttctctgcagaggagtagggtcctttcagccatgaagcatgtgttgaacctctacctgttaggtgtggtactgaccctactctccatcttcgttagagtgatggagtccctagagggcttactagagagcccatcgcctgggacctcctggaccaccagaagccaactagccaacacagagcccaccaagggccttccagaccatccatcccagaagcatgtgataagacctccttccatactggccatattttggaacactgacctagacatgtccagatgggagtcccattcctagcagacaagctgagcaccgttgtaaccagagaactattactaggccttgaagaacctgtctaactggatgctcattgcctgngcaaggcctgtttangnnnnnnnnnnnnnnnnnnnnnnnnnnnnnnnnnnnnnnnnnnnnnnnnnnnnnnnnnnnnnnnnnnnnnnnnnnnnnnnnnnnnnnnnnnnnnnnnctcgcccaacatgggcgaaaacccccatcttctaactaaaaaataccaaaagttaaaccctggggtggcggggtgggcaaaaaagggccttgccaaaa

SEQ ID NO: 261392 - DNA, 379 bp, Homo Sapiens
atccgcacaggagcattgagtgctgagaaaatggactgagtgcaaaggcagcaaggcaacaaacactacagtaaccacctctcggttcacagtcctctcccaagggaccagaaacgcatcttccaccttgaatcctgggactcccaattgtcctgctagggtctcaaaagcctctgcttcccaagctctcaagctgcctgcccacctccctggggaagaagcgcgcagtgctttgccctggtaacacccactgcacccctgccccgcggcagcctgcggtccctaactgctctccgagggcctcaagagttcctgacagcaggcatgtcaattacgggaggagggagggtgagacgccaaaatcaggttgaagaggtcc

SEQ ID NO: 261393 - DNA, 828 bp, Homo Sapiens
  misc_feature (419)..(476): n is a, c, g, or t
tggcctactggactgagaagattcaaaacctacaaaagcctgccactgacattgaagaaccaatatatacaatggacaaacaatccagtgccggcggggtgaagaggagcgtcccctgtgattccaacgaggccaacgagatgatgccggagaccccaactggggactcagacccgcaacctgctcctaaaaaaatgaaaacatctgagtcctcgaccatactagtggttcgctacaggaggaactttaaaagaacatctccagaggaactgctgaatgaccacgcccgagagaacagaatcaaccccctccaaatggaggaggaggaattcatggaaataatggttgaaatacctgcaaagtagcaagaagctacatctctcaaccttgggcaatgaaaataaagtttgagaagctgnnnnnnnnnnnnnnnnnnnnnnnnnnnnnnnnnnnnnnnnnnnnnnnnnnnnnnnnnnccccctagaccaaaccaccccgcccgtatccagaccacagaacaaccccgccacacacccagctaacccccacaccacccacctgcacgggcggctcccgcggccacagactccacgcaatcggcctctgccactccatacgtctacaccacgaagagaaaaattccgcttcctgcggggggccatcccgcgcgccgccctaacaaagaatgttgtctgcagccaccctccttctttaatacacaacccgctgcactcccacgcacgcgttcgaaaggacaacaatgctgggcgcgcgcgagaccgcggagggacgccgaaagaaacaacaggcgcgagtctggctgtacac

SEQ ID NO: 261394 - DNA, 407 bp, Homo Sapiens
ggggaatgtgtttaaaggattgattctagaacctttgtatatttgatagtatttctaactttcatttctttactgtttgcagttaatgttcatgttctgctatgcaatcgtttatatgcacgtttctttaatttttttagattttcctggatgtatagtttaaacaacaaaaagtctatttaaaactgtagcagtagtttacagttctagcaaagaggaaagttgtggggttaaactttgtattttctttcttatagaggcttctaaaaaggtatttttatatgttctttttaacaaatattgtgtacaacctttaaaacatcaatgtttggatcaaaacaagacccagcttattttctgcttgctgtaaattaagcaaacatgctataataaaaacaaaatgaagg

SEQ ID NO: 261395 - DNA, 949 bp, Homo Sapiens
aattcgagtgctccggcgcacagacccgcgccccgccgtctgcgagcctcccgagagccgtcccttcgtccggccctggagcattgcgtttgtcgccggtgtcgcagtgcgaggatggcgccgcgggtgtagcggctctctgcgcaggccgagtgggcccagagaagcgaggaactccgcagctcgtcgacacgtctcgtctcctgtcccaattcagggcttggtgaggtgactcgcggtcgcgggtgactcgccggcaggacactgcctggaacgcctggagcgcctcccactgcagacgtctgtccgcctccagccgctctcctctgacgggtcctgcctcagttggcggaatggcggccacgggagccaatgcagagaaagctgaaagtcacaagtctggagcccggcactgtggtcataacagagcaggcagtggatacctgcttcaaggcagagtttgagcagattgtcctggggaagcgggtcatccggaaaacggaccttaacaagaagctggtgcaggagctgttgctgtgttctgcagagctgagcaagttcaccacagtggtggggaacaccatgtgcaccttggacttctatgaagggcaaggccgtctggatggggctctctgctcctacacggagaaggacaagcaggcgtatctggaggcagcctatgcagccgcgtccgcaatatcgagatggagtcctcggtgtttgccgccatgtgcagcgctggcctccaagcggccgtggtgtgtgtcaccctcctgaaccgcctggaaggggaccagatcagcagccctcgcaatgtgctcagcgagtaccagcaggaggcgcagcggctggtgagctacttcatcaagaagaaactgagcaaggcctgagcgctgccctgcacctccgcagacctgctgtgatgacttgccattaaaagcattgtcca

SEQ ID NO: 261396 - DNA, 402 bp, Homo Sapiens
  misc_feature (375)..(376): n is a, c, g, or t
ggtgatgctgaggtcatgtgctggaatgctgtatttggaccacacatttcaaagttgccctatggaaatgaatcctacttagtgacaagtcatcaaatgtttgtcacatgtgatgaagacaaatatgtatacctggcatagagaaaaatatatacctggtacattggagaaaaataattacactttcaaagagaattccctttgcaattttatgtttggatcaccactgtaagcacactttatttgcatttgatctgtatttgtatatgctgatgcaatgataaaaatcactgtaatacttcattgtgttgtactggatgcaaagctagaaaatatcgcaataaatgagaccgatgaaagacttctccaaaaccnnaacccctctccaacccctaatcttgt

SEQ ID NO: 261397 - DNA, 763 bp, Homo Sapiens
tgtgtgtgaaagagcgagagaatgatgtcatctaaagttttttgaagaattatttggttttcattgcattaaaattctatcactcccagctttgttttcatttaaaaaaatatacaaagagctttgtaaatacaacacattttatttctcccccttctttcaatgtacagcttttttgccacttatatatacttaaaatattcccatgaattatgtccagttcttcttggaaaaaaatttggttttgaatgaacctgcaaagcatcctgcagcgtgagcagctcctccacctggagctccgaagcatcttctcaggccaaagcggcattacccgtgaatctgtcttctccgccacagcatggtttgaggcgcagtctgttaatatagctgggccatgtcagtgactgttgtgtttgtggggtcaggtggggggcatggtatttgcaaaaaaaacaaattatggctaatttattattttgttgcagtggggttaactgtaaactcatgtaagagtctgtgatttcctcattggttgatctctctctctgtaatcctcattgcaaattttccccaggacagcgttttttgattagaggggagctctggcacagtatgctttaatttagcaggaacttccagatgatttaaattctcgatgctgtgatgacacacatatgatctttcgtgtttctgagcgactctactttcattgtttgccagcgtggctcgttgctgttgcccaataaagcttgtgtacgttcaa

SEQ ID NO: 261398 - DNA, 959 bp, Homo Sapiens
  misc_feature (893)..(893): n is a, c, g, or t
ggcctgggtggcgaattcggcacgagggagaagcgggtgaaactgcagatctgggacacagctgggcaggagcggtaccggaccatcacaacagcctattaccgtggggccatgggcttcattctgatgtatgacatcaccaatgaagagtccttcaatgctgtccaagactgggctactcagatcaagacctactcctgggacaatgcacaagttattctggtggggaacaagtgtgacatggaggaagagagggttgttcccactgagaagggccagctccttgcagagcagcttgggtttgatttctttgaagccagtgcaaaggagaacatcagtgtaaggcaggcctttgagcgcctggtggatgccatttgtgacaagatgtctgattcgctggacacagacccgtcgatgctgggctcctccaagaacacgcgtctctcggacaccccaccgctgctgcagcagaactgctcatgctaggcaaggcccaccttcctgacctcccctcattgtggccccacacccagtctgcttctccctgttacacactgtccgctctcagcccactctccctgttacacactgcccacactcagagcaagatgagttgctgctattctttgcctgcccctggggttctctgcagatggtcccagtaatagatactcagcactagactaacataacaggtcactacacgggtgcagaatcactttacaaaagaagactctgttttacgaaagggattcactacagggaccttaaaaaacagtctcttttctgcccttaaaatgagagttcctccatttaccaaaattgacacgcacacattcttcaggggcatgccaatttgcgtaagtgaggctcgcctgcatagctaatcctgntaaagacacttctcaaagcacaacgtggctggtttcctatcggggctccctgccggggctttctct

SEQ ID NO: 261399 - DNA, 531 bp, Homo Sapiens
gaaatgctttcggtaggcactccacggctgtgaagatggcggcggctgcgtggcttcaggtgttgcctgtcatccttctgcttctgggagctcacccgtcaccactgtcgtttttcagtgcgggaccggcaaccgtagctgctgccgaccggtccaaatggcacattccgataccgtcggggaaaaattattttagttttggaaagatcctcttcagaaataccactatcttcctgaagtttgatggagaaccttgtgacctgtctttgaatataacctggtatctgaaaagcgctgattgttacaatgaaatctataacttcaaggcagaagaagtagagttgtatttggaaaaacttaaggaaaaaagaggcttgtctgggaaatatcaaacatcatcaaaattgttccagaactgcagtgaactctttaaaacacagaccttttctggagattttatgcatcgactgcctcttttaggagaaaaacaggaggctaaggagaatggaacaaaccttacctttattggag

SEQ ID NO: 261400 - DNA, 358 bp, Homo Sapiens
aagggatggttgaatgaacttcagcatccaagtttatgaatgacagtagtcacacatagtgctgtttatatagtttaggggtaagagtcttgttttttattcagattgggaaatccattccattttgtgaattgtgacataataacagcagtggaataagtatttgcttaaaattgtgaacgaattagcagtaaaatacatgagataactaaagaaatcaaaagatagttaattcttgccttatacctcagtctattctgtaaaatttttaaacaaatatgcaaaccaggatttccttgacttctttgagaatgcaagagaaattaaatctgaataaagaattcttcctgttcataaa

SEQ ID NO: 261401 - DNA, 490 bp, Homo Sapiens
gtataatttatgaaattcaaaattattcttttttcaagttgaaacttgcctcttctactttaaaaaagtatatagaacagttacttctaataatcagaaagagatgttttatagaacatttctttaatataaagttagagatgtcttcataggcagtatggctatctttgccacagaaacataagtaaaattttagagttctgttttccatgaggtcaaaaatataatttattcctcagtcatggttttctaaatatctgtactccacattccattttaattgatatgagggtgttaaagtacctacttaatgggttgattactatcaaaatgaccaaattataccaaagaacttaagaggaagcactttcagaactattcacttgccaggtattttctaaaattccacctgaaagccaaaagataaaataaataagttgattttaatgatataagcatcacacaattttacattaagaaatactgtgca

SEQ ID NO: 261402 - DNA, 806 bp, Homo Sapiens
ggggaggatgtgggccacgcaggggctggcggtggcgctggctctgagcgtgctgccgggcagccgggcgctgcggccgggcgactgcgaagtttgtatttcttatctgggaagattttaccaggacctcaaagacagagatgtcacattctcaccagccactattgaaaacgaacttataaagttctgccgggaagcaagaggcaaagagaatcggttgtgctactatatcggggccacagatgatgcagccaccaaaatcatcaatgaggtatcaaagcctctggcccaccacatccctgtggagaagatctgtgagaagcttaagaagaaggacagccagatatgtgagcttaagtatgacaagcagatcgacctgagcacagtggacctgaagaagctccgagttaaagagctgaagaagattctggatgactggggggagacatgcaaaggctgtgcagaaaagtctgactacatccggaagataaatgaactgatgcctaaatatgcccccaaggcagccagtgcacggaccgatttgtagtctgctcaatctctgttgcacctgagggggaaaaaacagttcaactgcttactcccaaaacagcctttttgtaatttattttttaagtgggctcctgacaatactgtatcagatgtgaagcctggagctttcctgatgatgctggccctacagtacccccatgaggggattcccttccttctgttgctggtgtactctaggacttcaaagtgtgtctgggatttttttattaaagaaaaaaaccctctagctgtcaaaa

SEQ ID NO: 261403 - DNA, 956 bp, Homo Sapiens
ggcgaattcggcacgagggcatgtcagctgagctgaagatgcgggccatccaggccgaggagcgcctggacatggagaagagaagatgcagacagagcctggaggactccgaaagcctgcgcatcaaggaggtggagcatatgacccgtcacctggaggagagtgagaaggccatgcaggagcgggtgcagaggctggaggcggcgcggctgtccctggaggaggagctgagccgagtgaaagcagcggcactcagcgagcgtggccaggctgaggaggagctgatcaaggccaagagccaggcccgcctggaggagcaacagcgcctggctcacctggaggacaagctgagactgctggcgcaggcacgggacgaggcgcagggcgcttgcctacagcagaagcaggtggtggccgaggcccagacccgggtcagccagctgggcctgcaagttgagggcctgcggcggcgcctggaagagctgcagcaggagctgagcctcaaggaccaggaaagggtggccgaggtgagcagggtgcgcgtggagctgcaggagcagaacggccggctgcaggcggagctggcggctcaagaggcgctgagggagaaggcggcggccctggagcgccagctgaaagtgatggcgagcgaccaccgaaaggcgctgctgggaccaggaagagccgaaaacgcgtctctccgggagaaactgcggctcccggggaaggcggagatcgccccgcatccgggacgaagaaggcccaaagggcgagctttcctggaaaacccccgtcctgggtttacctggcaggccgtcccccgggggggaccctggaaccccccacaagggaaaacaggccgggaaggaacccgggcgccataaagaaaggcgttccgggggggcccccaagaagggcgaccggggggttgggttccccacccccggccgctcttt

SEQ ID NO: 261404 - DNA, 545 bp, Homo Sapiens
cccaacagcctgggccttgggacagggcgggggcagtgatggcccctggagccctactgggggtggtagatgtggtcttggtcttcctccggtcccaggagcacctggtgatttggcatcacccacaaccggggcctctcctcgccctggtcctcctcaggcggagggtggtacaggctgtcatggtcgggctcggaactcaaggaacacggccccagggtgtcctcggtctccatcccaggccttggtgcctcgtggcttctcctcggtggtcaagagtttcggcttctggacagggaacagcaccaccagctggtcgtccttctccggaggctccaccacacgggcgccccaggccttctctgggtcctgctctgagggccagtgtttgacttgcatcttgatagggaccttgggtgctgggactgcacctgcctcccacagcagcacaaccaccaggctggtgaccaggaggagcctcctcatgtctggggtccgcgtctctgtagagagggctcagggagcttgaagtggctgctcgtgcc

SEQ ID NO: 261405 - DNA, 608 bp, Homo Sapiens
atgcgaggcctgggtggcgaattcggcacgaggggaccccagacatgaggaggctcctcctggtcaccagcctggtggttgtgctgctgtgggaggcaggtgcagtcccagcacccaaggtccctatcaagatgcaagtcaaacactggccctcagagcaggacccagagaaggcctgggcgcccgtgtggtggagcctccggagaaggacgaccagctggtggtgctgttccctgtccagaagccgaaactcttgaccaccgaggagaagccacgaggtcagggcaggggcccattccttccagggcaccaaggctgggatggagaccgaggacaccctgggccgtgtccttaagttcccgagcccgaccatgacagcctgttaccaccctccgcctgaggaggaccagggcgaggagaggccccggttgtgggtgatgccaaatcaccaggtgctcctgggaccggaggaagaccaagaccacatctaccacccccagtagggctccaggggccatcactgcccccgccctgtcccaaggcccaggctgttgggactgggaccctccctaccctgccccagctagacaaataaaccccagcaggcc

SEQ ID NO: 261406 - DNA, 558 bp, Homo Sapiens
  misc_feature (532)..(532): n is a, c, g, or t
  misc_feature (534)..(534): n is a, c, g, or t
gtcaccctttacggcaggcgtccgcgtcgctagctagtcgttctgaagcggcggccagagaagagtcaagggcacgagcatcggccatgcctttcttggacatccagaaaaggttcggccttaacatagatcgatggttgacaatccagagtggtgaacagccctacaagatggctggtcgatgccatgcttttgaaaaagaatggatagaatgtgcacatggaatcggttatactcgggcagagaaagagtgcaagatagaatatgatgatttcgtagagtgtttgcttcggcagaaaacgatgagacgtgcaggtaccatcaggaagcagcgggataagctgataaaggaaggaaagtacacccctccacctcaccacattggcaagggggagcctcggccctgaacagagcagctgctgatgtctggaggctgattttcctgttctctgttctccactggaaaggttgtttacgacaaacctccttgtcaaagtgtgtaaaaataaaggattgctccatcctacccgcncnctctcgtcaaaaaccaaaccttgt

SEQ ID NO: 261407 - DNA, 753 bp, Homo Sapiens
  misc_feature (712)..(712): n is a, c, g, or t
caaagagaaaagagacttgatggcttgtgcccaaacagggtctggaaaaactgcagcatttctgttgcccatcttgagtcagatttattcagatggtccaggcgaggctttgagggccatgaaggaaaatggaaggtatgggcgccgcaaacaatacccaatctccttggtattagcaccaacgagagagttggcagtacagatctacgaggaagccagaaaattttcataccgatctagagttcgtccttgcgtggtttatggtggtgccgatattggtcagcagattcgagacttggaacgtggatgccatttgttagtagccactccaggacgtctagtggatatgatggaaagaggaaagattggattacacttttgcaaatacttggtgttagatgaagctgatcggatgttggatatggggtttgagcctcagattcgtagaatagtcgaacaagatactatgcctccaaagggtgtccgccacactatgatgtttagtgctacttttcctaaggaaatacagatgctggctcgtgatttcttaggatgaatatatcttcttgggctgtagggaaggagttgggctctacctctggaaaacatcacacaggaaagtagttggggtgggaaggaatcaggacaaacgggtcatttctggcttgaacctccctaaatggcaacaggggcaagggatttcacttgaccnttaggtgttttgtgggggagaccccaaaagggggtgccagg

SEQ ID NO: 261408 - DNA, 440 bp, Homo Sapiens
  misc_feature (397)..(397): n is a, c, g, or t
  misc_feature (409)..(409): n is a, c, g, or t
atttttttgaaagattgtgtcttacttggatgttttttttcatgatgtgtgtggcagagagaacatataaacagagatttttatttgcaaaactcttcagccatattacttctgccaggaaagctaggaaatatgaaatacctcatttcagacttaagaaggtggagaatattaaaatatggttatcactgcgttcctatctaaagagacgggggccacagcgttcagttgatgtggttgtatcctcggttttcctactgacactttcgattgctttcatttgttgtgctcaggttctccaagggacataaaactttcctggaatgatgcttattaactggggagtttttgatctgggggaaacagctttactactttttttattgcgtctgggccntcacgggggtcntgaaacccaataaggaaatacagccaatgtt

SEQ ID NO: 261409 - DNA, 705 bp, Homo Sapiens
ggagacttaaaatatttcccatattatgggaaaaaactgcatgttgggtatctacagccattggttgctgttcaggtcagctttgctcctaacaacactgggaaagaagtaacagttgagtgcaagattgatggatcagccaacctaaaaagtcaggatgatcgtgacaagtttttgggacgagttatgttcaaaatcacagcacgtgcatagtatgagtaggatatctccacagagtaaatgttgtgttgtctgtcttcattttgtaacagctggaccctcccaattctagaattatgagacccaccttggagaaaggtgtgtggtacatgacattgggttacatcataacgtgcttcccagatcatagtgttcagtgtcctctgaagtaactgcctgttgcctctgctgccctttgaacccagtgtacagtcgccagatagggaccggtgaacacctgattccaaacacgtaggatgggggtcttgtcctctttttatgtggtttaattgccaagtgtctaaagcttaatatgccgtgctatgtaaatattttatggatataactgtcatattttgatgtcaacagagttttagggataaaatggtacccggccaacatcaagtgactttatagctgcaagaaatgtggtatgtggagaagttctgtatgtgaggaaggaaaacaaagaaaataaaagtgtgt

SEQ ID NO: 261410 - DNA, 1203 bp, Homo Sapiens
  misc_feature (1140)..(1140): n is a, c, g, or t
ggggtcggctcgagtactccccgtaacgaggaggtgttctcggcggtcccacccttcactgccgtctccgggctgcgccgccggagccgggacgcgcctccgcagccctcgccgcctccatccccgcggccgcagctcctctcgccgtccgcgcgcacaccatgacgaagaacgagaagaagtccctcaaccagagcctggccgagtggaagctcttcatctacaacccgaccaccggagaattcctggggcgcaccgccaagagctggggtttgatcttgctcttctacctagttttttatgggttcctggctgcactcttctcattcacgatgtgggttatgcttcagactctcaacgatgaggttccaaaataccgtgaccagattcctagcccaggactcatggtttttccaaaaccagtgaccgcattggaatatacattcagtaggtctgatccaacttcgtatgcagggtacattgaagaccttaagaagtttctaaaaccatatactttagaagaacagaagaacctcacagtctgtcctgatggagcactttttgaacagaagggtccagtttatgttgcatgtcagtttcctatttcattacttcaagcatgcagtggtatgaatgatcctgattttggctattctcaaggaaacccttgtattcttgtgaaaatgaacagaataattgggattaaagcctgaaggagtgccaaggatagattgtgtttcaaagaatgaagatataccaaatgtagcagtttatcctcataatggaatgatagacttaaaatatttcccatattatgggaaaaaactgcatgttgggtatctacagccattggttgctgttcaggtcagctttgctcctaacaacactgggaaagaagtaacagttgagtgcaagattgatggatcagccaacctaaaaagtcaggatgatcgtgacaagtttttgggacgagttatgttcaaaatcacagcacgtgcatagtatgagtaggatatctccacagagtaaatgttgtgttgtctgtcttcattttgtaacagctggaccttccattctaggattatgagaccaccttgggaggaaaggtgtgtgggtacatggacattggggttacatcantaacgttgcttcccagattcatagtggttcagtggtcctctggaagtaactggcctgtttgcc

SEQ ID NO: 261411 - DNA, 492 bp, Homo Sapiens
  misc_feature (385)..(385): n is a, c, g, or t
  misc_feature (403)..(403): n is a, c, g, or t
  misc_feature (422)..(422): n is a, c, g, or t
  misc_feature (439)..(439): n is a, c, g, or t
  misc_feature (449)..(449): n is a, c, g, or t
  misc_feature (454)..(454): n is a, c, g, or t
  misc_feature (471)..(471): n is a, c, g, or t
ggcacgagattaaaccacataaaaagaggacaagacccccatcctacgtgtttggaatcaggtgttcaccggtccctatctggcgactgtacactggttcaaagggcagcagaggcaacaggcagttacttcagaggacactgaacactatgatctggaagcacgttatgatgtaacccaatgtcatgtaccacacacctttctccaaggtggtctcataattctagaatggaaggtccagctgttacaaaatgaagacagacaacacaacatttactctgtgggagatatcctacttcatactatggcacgtgctgtgattttggaacataactcgtcccaaaaacttgttcacggttcatcctggacttttttggggtggggntgatcccttcattcttgncacttcatttgtttacttnttttcccggtgttgttnggggggccangtggnacccggaacgggcaccntgggttgttgggttaccccat

SEQ ID NO: 261412 - DNA, 655 bp, Homo Sapiens
  misc_feature (78)..(169): n is a, c, g, or t
ttcatgctgcctgtggtccctggtgacagcaggtgtgctctgccggccaggccctgcttccgaggctccctcctgcannnnnnnnnnnnnnnnnnnnnnnnnnnnnnnnnnnnnnnnnnnnnnnnnnnnnnnnnnnnnnnnnnnnnnnnnnnnnnnnnnnnnnnnnnnntgaagtcacatgtgtaggtcacacctgagcatcttggctcgtaggcatcgggatcctcagggacccgtccccgcaccttcttcccaccaggtctggacccgtcggtgagggcgcgggggcgcgcggtgcatccgggatccccgtcaatctgcagcccggaatgcctggggccccggacccccggcagcctaggccgtcccggggcaccgcgcgcggacggactcacccgaggagccggcacaggctacgtgtgaacggcccgcgaatccagaaacccagaacccagcactttgcacccagcaaccagggagcagccagcagcactgcggacgcggcccggaccattcgcgcccgcggatggggggagtccgcccaggggcgggcgccacgctcctgaggcccaggaggtccctaaacatggagagggtcctctggtgccactcactcaggtgcgtgtgtactaggccgccgagggccgcaggcact

SEQ ID NO: 261413 - DNA, 336 bp, Homo Sapiens
  misc_feature (279)..(279): n is a, c, g, or t
  misc_feature (285)..(285): n is a, c, g, or t
  misc_feature (306)..(306): n is a, c, g, or t
  misc_feature (322)..(322): n is a, c, g, or t
taaaagcctaaaatcagagaggtctaccatgtgttttgaaaatccaggagccaaaaaattttgtttttctttttggtggtggtggtgatttttaactaaaaagcaaacataaaacacacagaacattgctggttacaactaagacttgcgtaatggttgctgaagaaaaatccaccagagtactggggaggggctcagttggtctttgttcagaaagtccagggttaaccacatagaaaaaatccctaatccttcctgtttaaatgtcccgctaggttnaatttntgggatttaaaaaattagggntccccttttcaatttntttccctccccact

SEQ ID NO: 261414 - DNA, 962 bp, Homo Sapiens
cggtccggaatacgggatatcgtcgacccacgcgtcggcctgggagacgctgcctcggcccggacgcgcccgcgcccccgcggctggagggtggtcgccactgggacactgtgaaccaggagtgagtcggagctgccgcgctgcccaggccatggactgtgaggtcaacaacggttccagcctcagggatgagtgcatcacaaacctactggtgtttggcttcctccaaagctgttctgacaacagcttccgcagagagctggacgcactgggccacgagctgccagtgctggctccccagtgggagggctacgatgagctgcagactgatggcaaacgcagcagccactcccgcttgggaagaatagaggcagattctgaaagtcaagaagacatcatccggaatattgccaggcacctcgcccaggtcggggacagcatggaccgtagcatccctccgggcctggtgaacggcctggccctgcagctcaggaacaccagccggtcggaggaggaccggaacagggacctggccactgccctggagcagctgctgcaggcctaccctagagacatggagaaggagaagaccatgctggtgctggccctgctgctggccaagaaggtggccagtcacacgccgtccttgctccgtgatgtctttcacacaacagtgaattttattaaccagaacctacgcacctacgtgaggagcttagccagaaatgtaagaacccttgaggggatggactgaacggacagttccagaagtgtgactggctaaagctcgatgtggtcacagctgtatagctgcttccagtgtagacggagccctggcatgtcaacagcgttcctaaagaagacaggctggaagatagctgtgacttctattttaaagacaatgttaaacttataacccactttaaaatatctacattaatatacttgaatgaaaatgtctc

SEQ ID NO: 261415 - DNA, 538 bp, Homo Sapiens
cccgagtctggacagagctgctggaggaaggtgtacgtggccacttccaaggatgctgagctggacaggccaccccccaggggcactgagctgaccaccactgcactgaagccagggaggggggcagctgggtagtactgaatcactcccttgacatagttggcccaccgaggagtcccaggctccagcgagcgctgggctgtgggcagtggaaactgcagccgctggggctcatcggcaccctcagaggtggtgaggagagacaccagcccatccttgcgggggctgcccaccagcaccgtcatgagctccagagccataggcagcaccaggcactggttgtagtccgtgtgttccccgatgaggttgacgcggcccggcgctgacacggccagctcgggctcggccccgaactcctcccggaaggctcgccgggcctcggccagcagctccgcgacctggggctgtctcaaagcagccatgacgcgcgcctgcagctctgcacagctgctccggcacagccccgtcggcgcgggat

SEQ ID NO: 261416 - DNA, 1331 bp, Homo Sapiens
  misc_feature (1129)..(1266): n is a, c, g, or t
  misc_feature (1274)..(1287): n is a, c, g, or t
gggggcctttttgacagcttccgccgggactgcctggccgacgtggacaccaagccagcttaccaaaacctgaggcagaaagtggataattttgtgtcaacacatctggacaagcaggaatggaatcctacgatgaacaaaaaccagttgcgaaatggtctgaggcagagtgtggttcagtcagggatgttggaagctggagtagacaggattatttctcaggtggtggatccaaaacttaaccacatcttcaggccacaaatagaacgagcaattcatgagttcctggcggcccagaaaaaagcagctgtgccagcaccccctccagagcccgaaggccaggaccctccagctccatctcaggacacttcctaagaatacgccagacaccttttgaaagctaatttttggtgaagaaatggattcggttacataagagtgcaacttcagactgaagataggccaaggtcgtcactgatctcaagatttcaaccttgaccatgggcagtgaccagattgaaaggggagcaagttcggcagtgggagagttgaccgtgtcaccccctgcattgtgctgccatttggccagcctgtccaagggcatgacaccaagtagacactacagagagagaaacactacagcaacccagggttgtcctgaaacagacttttatacttgaacatggagactgcacatggactttagggtttgtgctgtgggataaacggaagctacagtgagaacatagccagtcccaaagacaatttcaaagaaaaatgacagtaaagattagctgggagtagtctttgacagtgcttatttgatactgtctctcagagtttgcaaaccagattgtacaagtcattagcgtcagatagctttaaagttgtgaccttcttgtacatgaatcttctagccagtttcctttcctttgtaacgaaacatgaaatcctagaatgtatgagaagttcagacattaggcataaggaaactcgtttgcaggctctctgtccagggctgcttcctgtcctggaggggccagtgagtcttaggtatgtttattttattctcacatttgtgtttttttagaaaagtgaatggtcaataaatggcttatctttcataatnnnnnnnnnnnnnnnnnnnnnnnnnnnnnnnnnnnnnnnnnnnnnnnnnnnnnnnnnnnnnnnnnnnnnnnnnnnnnnnnnnnnnnnnnnnnnnnnnnnnnnnnnnnnnnnnnnnnnnnnnnnnnnnnnnnnnnnnnntttggggnnnnnnnnnnnnnnacaaaaaatttctttaaaacctctttttggggcccgcggccccc

SEQ ID NO: 261417 - DNA, 1039 bp, Homo Sapiens
  misc_feature (109)..(136): n is a, c, g, or t
taatggcgtgtggttgaaaaaggagggggcagagagtggggtcgccttaccggggggccaagccgtgttgggcacgtatgttgttccaggcctcccgtcccccaaggannnnnnnnnnnnnnnnnnnnnnnnnnnncatttccagggcacctcctcgggacctggtgtggttcttggggagctggatttccccgtccctttccttccgggcgaaatctggcgcccgacttgggccccccttccgggggctgctacattcaagggttatcccgttaataaataagcccgcgcagctgccctcagccagggccctgtcggttggtgtctccatcggccggtgacccccaatgtgcccggccccaacccgtccttcttttcagggtctgtctggctcctctctcgcctgtcgtctcctgcttggttcccggcgtggggacagtctggtcaccagtgcgttgcgctgcgcggcccccgctcagcgcgaggctcaggggcgggggtcctccggttacggccctctctccgcgactccaggggcagtgactgcagcgcaggctgcgggcggcacatgcgcagggagttcgcgctgccacctccgcccggctccaccagctgcagaaagtcccggtaccagagtttggggcccggcggcgcggcgggcgcagcctcctcggcccgcgccagtcgttcggcctgcgtagcactcaacacgtgcagcgacaggcgacgcagcggttgcgtaaagccctgctcgacggcggcgcacaagtacacgcccgagtcccggcgccgcagcctgcgcagcagtagtccccgggcggtgcgctcggtgcgctcctctgccagcacctgggtgtgggctgtcacccctgcgcgctggaaagtccactccacgcgcgcctgcagcgagcggggctcacactccagaaaggcgctgctgccctccacgccgaacaccttgtgttccagcctcgtgccgaattcgccacccaggctcgggggtttgggtgttggcagtttgcgggcgcgcgccttcttg

SEQ ID NO: 261418 - DNA, 842 bp, Homo Sapiens
  misc_feature (505)..(517): n is a, c, g, or t
  misc_feature (600)..(600): n is a, c, g, or t
  misc_feature (769)..(769): n is a, c, g, or t
ggaagagtggtatcaacgcagagtgcattacggccggggattctggggttcgtttagaggtttgaattttctcggagaaagacaggccggccacgaggaaaacagaaacaagccgcagcaacatctaagcccttgaaaggatcctgagagaggggggaaagggaaaacagcagccaccagcccaaccacttgtgtcttctgccccttcccacctatcttgcccaccccaccagcccacgctgcttgggacttgaaatctgtggccgaaggaccgtcactacataacttcaaaaataatcaaccaccctcccttcccaaaccacccaaattcactcatccagcgtttacttttttgaatccactcagaacttttttctgcgacccccctccctaaatggagttgggtgggggggaaatgaatactgagttggcctttattttttaaaagactttttgatccaatgaggccccctaaataattgagttttgggtcctggttggttgnnnnnnnnnnnnncctccaaaattttaccccctcccccctgagcccgaggtgctgacgtcgcaaaaaaattggataaaaccaccatcatgggttcngggtcccatagaccccaaagaacttctcaagggcctggacagcttccttaaccgagatggggaagtccaaaagtgtggatgggattttccaagatctttcgttttgatgaaagaagcacgaaaggatggtggaagtcgatgcaccttacttggaacatttctcctgcanaacccgtttcaccagaaaatattgggccaaaatttaattgacggtttggcgggctaacaaactttctttaaca

SEQ ID NO: 261419 - DNA, 1023 bp, Homo Sapiens
gggattctggggttcgtttagaggtttgaattttctcggagaaagacaggccggccacgaggaaaacagaaacaagccgcagcaacataaaccaccatcatgggttcgggtcccatagaccccaaagaacttctcaagggcctggacagcttccttaaccgagatggggaagtcaaaagtgtggatgggatttccaagatcttcagtttgatgaaggaagcacgaaagatggtgagtcgatgcacttacttgaacattctcctgcagacccgttcaccagaaatattggtcaaatttattgacgttggcggctacaaacttcttaacaattggctgacgtattcaaagacaaccaacaacattcccctcctccagcaaattctactgaccctgcagcatctaccgctcactgtagaccatctcaagcagaacaacacagctaaactggtgaagcagctgagcaagtcaagtgaggatgaagagctccggaaattggcctcagtccttgtcagcgactggatggctgtcatccgctctcagagcagtacccagcctgctgagaaagataagaagaaacgtaaagatgaaggaaaaagtcgaactacccttcctgagcgacctttgacagaggtgaaggctgagacccgggctgaggaggccccagagaagaagagggagaagcccaagtctcttcgcaccacagcaccccagtcatgccaagttccgttccactggactagagctggagacaccatccttggtgcctgtgaagaagaatgccagcacagtggtggtttctgacaagtacaaccttaaacccatccccctcaaacgtcagagcaacgtagctgctccaggagatgccactccccctgcagagaagaaatacaagccactcaacacaacacctaatgccaccaaagagatcaaagtgaagatcatcccgccacagcctatggagggcctgggctttctggatgctcttaattcagcccctgttccaggcatcaaaattaagaagaa

SEQ ID NO: 261420 - DNA, 1713 bp, Homo Sapiens
  misc_feature (895)..(924): n is a, c, g, or t
gggggtcttgctgtgccctcccaggcttagtgttccctccctcaaagactgacagccatcgttctgcacggggctttctgcatgtgacgccagctaagcatagtaagaagtccagcctaggaagggaaggattttggaggtaggtggctttggtgacacactcacttctttctcagcctccaggacactatggcctgttttaagagacatcttatttttctaaaggtgaattctcagatgataggtgaacctgagttgcagatataccaacttctgcttgtatttcttaaatgacaaagattacctagctaagaaacttcctagggaactagggaacctatgtgttccctcagtgtggtttcctgaagccagtgatatgggggttaggataggaagaactttctcggtaatgataaggagaatctcttgtttcctcccacctgtgttgtaaagataaactgacgatatacaggcacattatgtaaacatacacacgcaatgaaaccgaagcttggcggcctgggcgtggtcttgcaaaatgcttccaaagccaccttagcctgttctattcagcggcaaccccaaagcacctgttaagactcctgacccccaagtggcatgcagcccccatgcccaccgggacctggtcagcacagatcttgatgacttccctttctagggcagactgggagggtatccaggaatcggcccctgccccacgggcgttttcatgctgtacagtgacctaaagttggtaagatgtcataatggaccagtccatgtgatttcagtatatacaactccaccagacccctccaacccatataacaccccacccctgttcgcttcctgtatggtgatatcatatgtaacatttactcctgtttctgctgannnnnnnnnnnnnnnnnnnnnnnnnnnnnnacatcagctgtaatcattcctgtgctgtgttttttattacccttggtaggtattagacttgcacttttttaaaaaaaggtttctgcatcgtggaagcatttgacccagagtggaacgcgtggcctatgcaggtggattccttcaggtctttcctttggttctttgagcatctttgctttcattcgtctcccgtctttggttctccagttcaaattattgcaaagtaaaggatctttgagtaggttcggtctgaaaggtgtggcctttatatttgatccacacacgttggtcttttaaccgtgctgagcagaaaacaaaacaggttaagaagagccgggtggcagctgacagaggaagccgctcaaataccttcacaataaatagtggcaatatatatatagtttaagaaggctctccatttggcatcgtttaatttatatgttatgttctaagcacagctctcttctcctattttcatcctgcaagcaactcaaaatatttaaaataaagtttacattgtagttattttcaaatctttgcttgataagtattaagaaatattggacttgctgccgtaatttaaagctctgttgattttgtttccgtttggatttttgggggaggggagcactgtgtttatgctggaatatgaagtctgagaccttccggtgctgggaacacacaagagttgttgaaagttgacaagcagactgcgcatgtctctgatgctttgtatcattcttgagcaatcgctcggtccgtggacaataaacagtattatcaaatgat

SEQ ID NO: 261421 - DNA, 839 bp, Homo Sapiens
  misc_feature (690)..(702): n is a, c, g, or t
gggagtgtcagctcgcgagccctggcgtcgcgtaggagggaggatggagagcggcgacgaagcggccatcgagaggcaccgcgtccacttgcgctccgccacattgcgcgacgccgtacccgccacactgcatctgctgccctgcgaggttgcggtggacgggcccgccccggtggggcgcttcttcacgcccgccatccgccagggccccgagggactcgaagtgtcgtttcggggccgctgtctacggggagaggaggtggcggtgccgcctggcctcgtgggatacgtgatggtgacagaagagaagaaggtgtcgatggggaagccagaccccttgcgggattccgggactgacgaccaagaggaggagccgctggagcgggacttcgaccgcttcattggagccactgccaacttcagccgcttcaccctgtggggtctggagaccatccctggcccggatgccaaagtgcgtggggccttaacttggcccagccttgcggcagcgattcacgcacaggtgcccgaggactgagaaccagagctttgaaattcaaagctgcgatcccttcacagcagtaaaccagctctttggaaccgattccatcaccccaataaaggagctcttcacagcaccctgtgagtctgggcgcctttaaagcccctaagccagcatgggcccttttnnnnnnnnnnnnnaaagaactttgcattgcctcttggcctatagaaacaatttttattgcccgggggtcaattaggggtaaaaagaaaccccgaaaattttttggccgcaagaaacgcaacctccaccccccaactttctaatttttacg

SEQ ID NO: 261422 - DNA, 1094 bp, Homo Sapiens
  misc_feature (789)..(1009): n is a, c, g, or t
  misc_feature (1018)..(1050): n is a, c, g, or t
gaaacgcagccagccagctaccaagacagaggactatggaatgggcccgggtcggagcggcccttatggtgtgacagtgcctccggacctcctgcaccacccaaaccctggttctataacacaccttaactacaggcaaggctccataggcctgtacacccagaaccagccactacctgcaggtggccctcgtgtggacccataccgtcctgtgcgcttaccaatgcagaagctgcccacccgaacaacttaccctggagtgctgcccacaaccatgactggcgtcatgggtttagaaccctcctcttataagacctctgtgtaccggcagcagcaacctgcggtgccccaaggacagcgccttcgccaacagctccaggcaaagatacagagtcagggcatgttgggacagtcatctgtccatcagatgactcccagctcttcctacggtttgcagacttcccagggctatactccttatgtttctcatgtgggattgcagcaacacacaggccctgcaggtaccatggtgccccccagctactccagccagccttaccagagcacccacccttctaccaatcctactcttgtagatcctacccgccacctgcaacagcggcccagtggctatgtgcaccagcaggcccccacctatggacatggactgacctccactcaaaggttttcacaccagacactgcagcagacacccatgataagtaccatgactccaatgagtgcccagggcgtccaggcaggcgtccgttcaacagccatcctacctgnnnnnnnnnnnnnnnnnnnnnnnnnnnnnnnnnnnnnnnnnnnnnnnnnnnnnnnnnnnnnnnnnnnnnnnnnnnnnnnnnnnnnnnnnnnnnnnnnnnnnnnnnnnnnnnnnnnnnnnnnnnnnnnnnnnnnnnnnnnnnnnnnnnnnnnnnnnnnnnnnnnnnnnnnnnnnnnnnnnnnnnnnnnnnnnnnnnnnnnnnnnnnnnnnnnnnnnnnnnnngcgggctcnnnnnnnnnnnnnnnnnnnnnnnnnnnnnnnnntttccagcgccaaggggctttcagcagaacccagccagcagcaa

SEQ ID NO: 261423 - DNA, 526 bp, Homo Sapiens
  misc_feature (81)..(81): n is a, c, g, or t
agctgcatccagaaaccggccactacccagcccatctctgcctgtgcttatccagataagaagaccaaaataccgctgganaaacccaggccttgacattgttattcaaatggcccctcctgaaagtttaatgatttccatttgtatttgtgttgatgatggaccacttgaccatcacatttcagtattcatagatgactgtcacattttaaaatgttcccacttgagcaggtacacaactggtcataattcctgtctgtgtaattcgatgtatatttttccaaacatgtagctattgtttgctttgatttttgcttggcctcctttatgatgtgcatgtccttgaaggctgaatgaacagtccctttcagttcagcagatcaacaggatggagctcttcatgactgtctccagcaataggatgatttactataaatttcatccaactacttgtgatctctctcacctacatcaattatgtatgttaatttcagcaattaaaagaattgattttaaaaaaaactcc

SEQ ID NO: 261424 - DNA, 216 bp, Homo Sapiens
agctaatttgcatataggaatgaggtgcggctcggcttccatgggcctaatttacagatagggcggtatttctgccccttaaccgaaagtgggatacagaggacgacggtgttaggcgcctgtgtaggagtaaaatgtgtttattttgcattcaacgagagctcctgcattgcagctattttgcatatgatttgcatcttacgaagaatttgtggc

SEQ ID NO: 261425 - DNA, 974 bp, Homo Sapiens
  misc_feature (47)..(166): n is a, c, g, or t
  misc_feature (768)..(768): n is a, c, g, or t
  misc_feature (781)..(781): n is a, c, g, or t
  misc_feature (798)..(798): n is a, c, g, or t
  misc_feature (800)..(800): n is a, c, g, or t
  misc_feature (807)..(807): n is a, c, g, or t
  misc_feature (810)..(810): n is a, c, g, or t
  misc_feature (842)..(842): n is a, c, g, or t
  misc_feature (852)..(852): n is a, c, g, or t
  misc_feature (878)..(878): n is a, c, g, or t
  misc_feature (891)..(891): n is a, c, g, or t
  misc_feature (907)..(907): n is a, c, g, or t
  misc_feature (913)..(913): n is a, c, g, or t
  misc_feature (926)..(926): n is a, c, g, or t
  misc_feature (948)..(948): n is a, c, g, or t
cctcaagctccctaagtggctgggattacaggcgcctgctaccatgnnnnnnnnnnnnnnnnnnnnnnnnnnnnnnnnnnnnnnnnnnnnnnnnnnnnnnnnnnnnnnnnnnnnnnnnnnnnnnnnnnnnnnnnnnnnnnnnnnnnnnnnnnnnnnnnnnnnnnnngtgtgagccacccgtgcctggccaattccaacattcttaaattctctcatccctccagggctccccgtgctatgttctctttaccccttccccctcttctcttgctcaggcctgcaccactgcagccacccgttcatttattcattcattaaacactgagcactcactctgtgctgggtcccgggaaagggtgagggggtcagacacaggccctgcccctgccctcagtgactggccagtccagcccaggcggggagagatgtgtacataggttttaaagcagacccagagctcatgggggcctgtgttctgggtgttcaggtgcagctggtcctccattacccactgctccccaaggctggtgggacggggtcccggtggcaggggcaggtatctccttcccgttcctcatccacctgcccagtgctcattcgttacagcaaaccccagggggccttggcaaggtcaagggttctgtgaggagaggacccaggagtgtgggggcatttggggggtgaagtggcccccgaagaatggaacccacacccatagctctccccacagctgatacggcatcctgcgagaagacctgccctcctcantgggttccccttnctgcctcctcccagggntntgcaggngcnttgttcagtcccttccaccaaagtcatctgancttccgtttncccagggcctccagctgccctcaganactgatgtctgtncccagggtgctctctncccctnatgcccctttcancggcccagtgtcccgatttttncagggctttatcaaggtggctaaggg

SEQ ID NO: 261426 - DNA, 882 bp, Homo Sapiens
tgagggggagggcccacccaaaggggttgttggcccccccggctttcttatacatcgttttttaaggaagcggggaagtgttttcctttttcacctagacagcccccagcccgggcccccctggggaccctagagagggggtcctttcggtttatcattctgcttgctccagaatggctgcgctctttaggggccggatttgtgtgtggtggaaccgggtccccttccagcaaggaggggcggcccactgctctgctggtgctggaaggaggaccccgggtagtggccgatgacctcgctgtaggtgggcggcggcccctccatgcgcccgccgctgccgtagcacgtggcgctgatgcccgagttactgctgggggggcaggggccgcccagcctggcactatccatcaggtcactgtcgaagatggttctgtttgggggtgcgcgcaccgactcccggttcagttccagctgctgctcgggctcccgaagctggagggtgcaggggcactggtagggtgggggctcctccccgtccgacagcgagatggtgggcggcaggtcgatctcgtgctgcaggtacggataggtgggctggaagcggtggaagcgctcccgctgggcgaagggcggcacggccaggcggtcggtgggccgaggcggggcgtagacctgcggctctgggattccgttgcctgacactgtgctctccgagggccacaggcatccttctgaggacagggcatcttctctcctccgcccctggctgtgccggctgatgaaggaccgtgcagacagcttgtagtggctcagcaggcacgtgatcaccaccaccatcaccatcatcaccaccacgatgatgatgatctgaacaaactccag

SEQ ID NO: 261427 - DNA, 985 bp, Homo Sapiens
aagccgggagggcgagcgagagagcaagcaggcagcaggctgccggcgggcgggcggacggcacagagggagggagcgagcgagcagtgagtaagccagcaagggcggtcgggtcccgaggtcagccgagatttctcaggtccctccggccccctccctggagtccacagcgcctccggtgtccagaggatcggacacggcccggcccggccatggcctcgttgctgaaggtggatcaggaagtgaagctcaaggttgattctttcagggagcggatcacaagtgagcccacttataagaagcgaaggttggatgagtgtgaagaagccttccaaggaaccaaggtgtttgtgatgcccaatgggatgctgaaaagcaaccagcagctggtggacattattgagaaagtgaaacctgagatccggctgttgattgagaaatgtaacacggtcaaaatgtgggtacagctcctgattcccaggatagaagatggaaacaactttggggtgtccattcaggaggaaacagttgcagagctaagaactgttgagagtgaagctgcatcttatctggaccagatttctagatattatattacaagagccaaattggtttctaaaatagctaaatatccccatgtggaggactatcgccgcaccgtgacagagattgatgagaaagaatatatcagccttcggctcatcatatcagagctgaggaatcaatatgtcactctacatgacatgatcctgaaaaatatcgagaagatcaaacggccccggagcagcaatgcagagactctgtactgaggccagggccaagggccagggggactctgttgaagtctggctcaagaccggacatctgccttgggtttgttacatggactatcgcgaatgggggaaaactgactagtgggcttggaaattagcaactccccaccctcttttgggtttttagccttaggagcccctattgtgacaca

SEQ ID NO: 261428 - DNA, 903 bp, Homo Sapiens
  misc_feature (596)..(596): n is a, c, g, or t
acacggttgatctcgggtttgtgctgggttccggggctagatgagagtttcattagactctaactaaaaacagagaggtgtgattactatttccagccagtttccccatcacgatagtcatgtaacaaaccaaggcaatgtcggtcttgagccagactcacagagtcccctggccctggccctggcctcagtacagagtctctgcattgctgctccggggccgtttgatcttctcgatatttttcaggatcatgtcatgtagagtgacatattgattccctcagctctgatatgatgagccgaaggcatgataaatctttctcatcaatctctgtcacgggtgcggcgatagtcctccacatggggatatttagctatttgagaaaccaatttggctcctgtaatataagatccagaaatctggtccagataagaggcagcttcacgctcaacagttcttagctctgcaactgtttcctcctgaatggacaccccaaagttgtttccatcttctatcctgggaatcaggagctgtacccacattttgaccgtgttacatttctcaatcaacagccggatctacaggtttcactttnctcaataatgtaccaccagctgctggttgcttttcagcatcccattgggcatcacaaacaccttggttccttggaaggcttcttcacactcatccaaccttcgcttcttataagtgggaccatccagtccatcatggctattggtgagaagaatggggtcagggactgggagattcatgtcagagtggatctgagttaggtcatggatgtttaagattggttccttcagaaaactatcaagttctaataacttctttgggaaaaaatttgccaccaagtcttctgcctcacttgtgatccgctcccc

SEQ ID NO: 261429 - DNA, 775 bp, Homo Sapiens
  misc_feature (56)..(57): n is a, c, g, or t
  misc_feature (80)..(80): n is a, c, g, or t
tgtctcccccaagaatgatgatgtcaggggcatcaggaaaggtaagggccgggaannccgggcccttggagaaccctgcncaggggaggcccagcctactcacaggatccgacactcccaggcagagcagagggcaggagaggcccaaagagctaggtcaagcagctggctcccctgggaggggagccgggagacagggaggtcctcacactgcccccgtggccacgcatggctgtctgcacactccatcaggaggaagggcaggggagaagtcacatgcagtacagtgaaactcatcagtgtcacacacgcccagcaggaggggagagctctgctccacacgctggcggccttggctgctccagagcaatccgctgctccagcttcagccatgggaccaagagggtaaaggagcagcttctggaggccccaggcagaggccaccttgcagcagtgactggcgactttgcagtacatctctgctcacttgctgtcccttgggagtgagcaccgtctataacacatcgccatctacaaaagcctggtcacagtgttcaccagcacattcatgaaaatttaaatcaacattaaccaaagtacctgcaagtaacactgcttactcttgctgtttgcctcatctgactggaaaccttagcccccaaatatgaaatgccttctctagattaaaaggattcagagatgttgcactattgcactatatttctgcttcccgatctcgtttctgagtcctagtgaaatcgtaaacaagagaccc

SEQ ID NO: 261430 - DNA, 899 bp, Homo Sapiens
gtggtacggccggaatttcgggatatcgtcgacccacgcgtcggacagcggcctggctaactcctgccaggcagtgccctgcccgaagcgtgccctcgccgctgagctcccctgaacagcagctgcagcagccatggccccgccctgggtgcccgccatgggcttcacgctggcgcccagctggggtgcttcgtgggctcccgctttgtccacggcgagggtctccgctggtacgccggcctgcagaagccctcgtggcacccgccccactgggtgctgggccctgtctggggcacgctctactcagccatggggtacggctcctacctggtctggaaagagctgggaggcttcacagagaaggctgtggttcccctgggcctctacactgggcagctggccctgaactgggcatggccccccatcttctttggtgcccgacaaatgggctgggccttggtggatctcctgctggtcagtggggcggcggcagccactaccgtggcctggtaccaggtgagcccgctggccgcccgcctgctctacccctacctggcctggctggccttcgcgaccacactcaactactgcgtatggcgggacaaccatggctggcatgggggacggcggctgccagagtgagtgcccggcccaccagggactgcagctgcaccagcaggtgccatcacgcttgtgatgtggtggccgtcacgctttcatgaccactgggcctgctagtctgtcagggccttggcccaggggtcagcagagcttcagaggtggccccacctgagcccccacccgggagcagtgtcctgtgctttctgcatgcttagagcatgttcttggaacatggaattttataagctgaataaagtttttgacttccttttcaaaaa

SEQ ID NO: 261431 - DNA, 635 bp, Homo Sapiens
  misc_feature (422)..(439): n is a, c, g, or t
  misc_feature (441)..(455): n is a, c, g, or t
  misc_feature (459)..(475): n is a, c, g, or t
  misc_feature (477)..(485): n is a, c, g, or t
gggagtacatgaccaactagaattaaagtaagtgtaaacagtgaacatactgtatgctgtacaagatataatgtaacttgctgttttagcatctgtattttggttagaagatattattaaatgcagatgttaaggattggaaaagtctaattttatttttagaaataatggatataaatttgtttttgcttgattaaaataacttattcctacattaagtctctttttaaatgttttcatgttatttcttttgtgcagctatttcatctgtgtgagtcacagctttgtttccacgtattattcagtttatttctgtttccttacttgtttacattccgtggtacctacttacatgcttaggagtcaaatggattatgacattaggaaaaaagcagaataaaagagattgaagtcttctgaannnnnnnnnnnnnnnnnnannnnnnnnnnnnnnncgcnnnnnnnnnnnnnnnnnannnnnnnnnaaaattgtgtggcccgctctcgcccttaaaaaaatttttcataaacattctcttttggcgcgcggcgcccaaaaaggaaaggaaacttgggcaataccgtgtttccaaaggaaacccgggccaaggactaggggcttggaatcccccccc

SEQ ID NO: 261432 - DNA, 623 bp, Homo Sapiens
  misc_feature (206)..(221): n is a, c, g, or t
cacattgccaaacttgcagcagcgattgcagcagttgctgccgctgcgccgcgcctgaagccgcgccgcgcgggccgagggctcctgcagctgctcgcgcgcagtcggaggcggagaaggacgaagactgagactgacacttctgctcccggccgcccggcacttacgcgggggccccccaacccgccccagagcaacgcgatttnnnnnnnnnnnnnnnngcgggccctttagcccccttcttcccctttcctgctactgcgagaaactcgcggacatgcgatagcatcagcagcagcccgacaacagacacagagtggccgacctagagcccggaaaagaccagcagcaggggagaacacaaccaaaactagagaacccccaacgaccaaccagacggacacagtgcgggagagaacaacaaggaaaacataaataaggggcgaagaagaagcccagaccacaaagggaagatcacgccatgggggcagggacagactatcccgcacggaacagcaaacacccacgagagacaaagtggaacagggagcatcaacacagtaccacccgcgacaacgccgcgacgcccaccgcacgcgcaacacgcggggacgcacaaccaa

SEQ ID NO: 261433 - DNA, 611 bp, Homo Sapiens
cgtttgcgcttgagcgccgataatttggtggcggcgtccggagggtgctggtttgttctcggtgaacggcgcgcggggtctctcctgagtgcgagctacgggaccttcgccatgccggggatggtactcttcggccggcgctgggccatcgccagcgacgacttggtcttcccagtgttcttcgagctggtcgtgcgagtgctgtgaggaaagctggactgtgctggtggagccttgctcagcagttacttgatcgtcctcatgattctcctggcagttgtcatatgtactgtgtcagccatcatgtgtgtcagcatgagaggaacgatttgtaaccctggaccgcggaagtctatgtctaagctgctttacatccgcctggcgctgttttttccagagatggtctgggcctctctgggggctgcctgggtggcagatggtgttcagtgcgacaggacagttgtaaacggcatcatcgcaaccgtcgtggtcagttggatcatcatcgctgccacagtggtttccattatcattgtctttgaccctcttggggggaaaatggctccatattcctctgccggccccagccacctggatagtcatgattcaag

SEQ ID NO: 261434 - DNA, 940 bp, Homo Sapiens
gcaggtccccgccctcgctgcgtttgcgcttgagcgccgataatttggtggcggcgtccggagggtgctggtttgttctcggtgaacggcgcgcggggtctctcctgagtgcgagctacgggaccttcgccatgccggggatggtactcttcggccggcgctgggccatcgccagcgacgacttggtcttcccagggttcttcgagctggtcgtgcgagtgctgtggtggattggcattctgacgttgtatctcatgcacagaggaaagctggactgtgctggtggagccttgctcagcagttacttgatcgtcctcatgattctcctggcagttgtcatatgtactgtgtcagccatcatgtgtgtcagcatgagaggaacgatttgtaaccctggaccgcggaagtctatgtctaagctgctttacatccgcctggcgctgttttttccagagatggtctgggcctctctgggggctgcctgggtggcagatggtgttcagtgcgacaggacagttgtaaacggcatcatcgcaaccgtcgtggtcagttggatcatcatcgctgccacagtggtttccattatcattgtctttgaccctcttggggggaaaatggctccatattcctctgccggccccagccacctggatagtcatgattcaagccagttacttaatggcctcaagacagcagctacaagcgtgtggggaaaccagaatcaagctcttgtgctgttgcattggggaaagacgaccatacttccgggttgctttttccgagtacgggcagagctttttctccaccctacttttttcggaccccagatcctgggtggcccagccgaacatttgcgggcgggtccctcgaccctgggctttcattcagcaacaggggacaattattcggggaaccaacccaagaaacctttgccccaggg

SEQ ID NO: 261435 - DNA, 1031 bp, Homo Sapiens
  misc_feature (791)..(799): n is a, c, g, or t
cccaacatgtataaggtcacagcaagtggtagccaggaaaagctgtgggacccctcatttgagtcacatccatatggcatggagaaagaaaacctctctgccagaaggaactgaactctggaagtcctaaggaaggtcaccatgctcagcagataggaaagcattgtcaagggctgtccctcaagagcttagttttctttagggagaccagaaagacatcagatcctgactggccctgttttgctcaagttctgaaatgagtggcatgatgaagagctggtggagctgagggaaagagtcaaaccatgtgggctgggctagtgaggaaggtgtatgaggaaacaaactgggccctgacgaaacaggcggattggggaaggagaaagaaggaagggagagaaacctaaccaaagaaacatgggaagctggaaagtcgagggcacagccggaataaaggcacagatgggcaccccacaggaggggccttggccaggttgggatgcagagaaaaacaggcaggagggtgtcaatctatagcatcctgaaccccaaaaggtctgtaactggattctctaagccttgagaagttcacaccaaagcttcagaccagggaaaatattttggaaagatcagtctttccaagagtgagctcctttccaagaagctggacaggaaacccaataaatgtggatctgaaaaaacaaaatccaagagagaagccaaatgggctgggggtgtgcaataagagaagcaaggaaaatggaaagactgtagctgaggatcttttattnnnnnnnnntggatgggactttggtgatgagagagaaaaagggcaaaagtctgcagttaggaatttaggtgaccgaagactgtcctagacagttgggagggacaggctgatggacagaagagagaaattcctttcaatgacaaccaagctgaactattcgataccagcagaactgggttctttagggattaagccaagacaaagacttgggaatcactcactccgaggatgaagaatgggt

SEQ ID NO: 261436 - DNA, 838 bp, Homo Sapiens
  misc_feature (600)..(600): n is a, c, g, or t
  misc_feature (602)..(657): n is a, c, g, or t
  misc_feature (661)..(689): n is a, c, g, or t
ggggactacgggaagcagcgggcagcggcccgcgggaggcacctcggagatctgggtgcaaaagcccagggttaggaaccgtaggcatgctgcgccccaaggctttgacccaggtgctaagccaagccaacactggaggcgtccagagcaccctgctgctgaataacgagggatcactgctggcctactctggttacggggacactgacgcccgggtcaccgctgccatagccagtaacatctgggccgcctacgaccggaacgggaaccaagcgtttaatgaagacaatctcaaattcatcctcatggactgcatggagggccgtgtagccatcacccgagtggccaaccttctgctgtgtatgtatgccaaggagaccgtgggctttggaatgctcaaggccaaggcccaggctttggtgcagtacctggaggagcccctcacccaagtggcggcatcttaacggcattggtggaagctggggtcagaaaagagaaatgaccatttggaggggcggggcctcctagaagaaccttcttagacaatggggggaggatgggactttgttttttccaagaataaacttcaactcctgtcanannnnnnnnnnnnnnnnnnnnnnnnnnnnnnnnnnnnnnnnnnnnnnnnnnnnnnnngaannnnnnnnnnnnnnnnnnnnnnnnnnnnnaattgtggcccgccccggccccccgaagaaattttctaaaacctttccgttgggcgccccggccccaggaaggaaaggggaacatggggcatagcttgttccccaagggaaaccctgggccagaactaaggggcttgggattcctcccc

SEQ ID NO: 261437 - DNA, 1166 bp, Homo Sapiens
aagggctgctgatgtggctgtcgccggctccgagctgcggcttcccgggccgagcccccgatggaggccgaggccgcggacgctcccccgggcggggttgagtcggcgctcagctgcttctctttcaaccaggactgcacatccctagcaattggaactaaagccgggtataagctgttttctctgagttctgtggagcagctggatcaagtccacggaagcaatgaaatcccggacgtctacatcgtggagcgcctcttctccagcagcctggtggtggtagtcagtcacacaaaaccacggcagatgaacgtgtatcacttcaagaaaggcacagagatctgtaattacagctactccagcaacatcttgtccataaggctgaaccggcaaaggctgctggtttgcctagaagagtccatttatattcacaacattaaagacatgaagctgttgaagaccctcctggatattcctgcaaacccaacaggtctatgtgctctctctatcaaccattccaattcttacctggcctatcctggaagcctgacttcaggggagattgtgctttatgatggaaactccctgaaaacagtctgcactattgctgcccatgagggaacactagctgccatcaccttcaatgcctcaggctccaaactagcaagtgcgtctgaaaaaggcacagtcatccgggtgttctctgtccctgatgggcaaaagctctatgagttccggagagggatgaaaaggtatgtgacaatcagctctctagtgttcagtatggattcacaattcctctgcgcctccagtaacaccgagacggtacacatcttcaagctggaacaggtcaccaacagtcgaccagaagagccttcgacctggagtggctacatgggaaagatgtttatggctgctaccaactacctccctacccaggtgtcagacatgatgcatcaggacagggcttttgccactgcacgcttgaacttctccggacagaggaacatctgtaccctctcaacgatccagaagttgccacggctgctagttgcgtcatccagtggacacctttatatgtacaatttggatcctcaggatggaggagagtgtgtcttaatcaaaacccacagcttgcttggctcaggaacaacagaagagaataa

SEQ ID NO: 261438 - DNA, 1617 bp, Homo Sapiens
  misc_feature (339)..(339): n is a, c, g, or t
  misc_feature (483)..(483): n is a, c, g, or t
  misc_feature (852)..(927): n is a, c, g, or t
  misc_feature (987)..(988): n is a, c, g, or t
  misc_feature (1004)..(1018): n is a, c, g, or t
  misc_feature (1448)..(1456): n is a, c, g, or t
  misc_feature (1478)..(1478): n is a, c, g, or t
tggcttctggctcctcggggcctcgcgagggtcacgcttgcctggtcaccctggggctgcttaggaaacctcacgactggtcaccttgcactcctcacacagaattgctacaatcccaaagcgctcgccccgcagggtccaaaggccagcggtgaccagcctgtcacccagctcctccccgccaaccctgcctgccgctgcacctgcctgccgctgcaggaaacatttctgacaccgtcgaccaggaaagccacacggagaggccactgtgggtgaagcgcctcagttacacaggaaccctaaagcaaatcttgccaccgtgggggaactgacgctggnagatgcaaggtgctggtgggtctgagctggacgtcgcggtgtgtcctctgtgcccacggtctgagctagctagcgcaccgccgagttaaagaggagaaggaaaacatgctgctctggtgcacgcctgagcgtcctccatcttcncaggatggcagcaatggcgctgtgcggcctcaccaggcccacgaggagcagcagcgctcggcccggagcagcaggaaggcccctctgtggagcgcccgccgtctgctccggggtggttcagtcactgcttgttgacatcaacatggcaattgcactcatgtggactgggaccgtgcgagctgccgtgtgggttagtcgggtgccaggacaatgaaatactccagcacgtgtggctgacgaatttgtttctacagaaataacagctggggacaactgcggtgatgatgtaaaaaccttcccataaaatgtaagaaaagctgatgaggctggtgacgttcagcctttgtcaataaacctgtcatgtgcggnnnnnnnnnnnnnnnnnnnnnnnnnnnnnnnnnnnnnnnnnnnnnnnnnnnnnnnnnnnnnnnnnnnnnnnnnnnnccactcaacaccatatcactccctccccaacaacgccccttaaaacccccttttcaaacnntatttttctttgcggnnnnnnnnnnnnnnngcaaaaattttcttaaaaccttcccctttggggcgccgcgcgcccccaaacaagaaaaggaacaacatgggctacaactcgtttccccaaaagcaaaccccccggggaacaagaacaaggggccggtggcatccctccccacaaaaaaaacacccccccgcgggaggacacccgcggggtgtccttaacaaaaaacacccaatagagggccccttcggcggaggtctctttttcggggcaccccttccacaaagggaggtcctcacgagggggccctcccaatattataaataatcgcaccccccgcggcgcgtgtgcacttttcccgcagaagagtgtgggtgagaaattctacaaaaacaattctctcgccccgagagtgcgagaaacccccccacaaaacctgcgtgtttatgatacccctctacannnnnnnnnaggcgcctaccaaaccaacctntgcgcggcttccggcgaaataaataatccctccccacacgaggttaaacccgcgcggttgacaacacaaacgtccctcccttacttttggcccccgctttttcaaaatcccctaacgcggggggcgaacacctactcgc

SEQ ID NO: 261439 - DNA, 1720 bp, Homo Sapiens
cgggagtggtgcatttccaggcagctgtggtggggccatcgcatcccagcctactttgtcactgtcagtgacccagcggtgccccctggggaggaccctgatgggcggtactgggtgagtggacgcaatgaggcggaggcccgggagaaggcagccaaggagttcggagtgtcccctgacaagatcagtctccagcaagatgaggatgtattggatacctggttctcctctggcctcttccccttatccattttgggctggcccaaccagtcagaagacctgagtgtgttctaccccgggacactgctggagaccggtcatgacatcctcttcttctgggtggcccggatggtcatgctgggcctgaagctcacgggcaggctgccctttagagaggtctacctccatgccatcgtgcgagatgctcacggccggaagatgagcaagtctctaggcaatgtcatcgatcccctggacgtcatctatggaatctccctgcagggcctccacaaccagctgctgaacagcaacctggatcccagcgaggtggagaaggccaaagaagggcagaaagctgacttcccagcggggattcctgaatgtggcaccgatgctctccggtttggattatgtgcctacatgtcccagggtcgtgacatcaacctggatgtgaaccggatactgggttaccgccacttctgcaacaagctctggaatgccaccaagtttgcccttcgtggccttgggaagggttttgtgccctcacccacctcccagcccggaggccatgagagcctggtggaccgctggatccgcagccgcctgacagaggctgtgaggctcagcaatcaaggcttccaggcctacgacttcccggccgtcaccactgcccagtacagcttctggctctatgagctctgtgatgtctacttggagtgcctgaaacctgtactgaatggggtggaccaggtggcagctgagtgtgcccgccagaccctgtacacttgcctggacgttggcctgcggctgctctcacccttcatgcccttcgtgacggaggagctgttccagaggctgccccggaggatgccgcaagctccccctagcctctgtgttaccccctacccggagccctcagagtgctcctggaaggaccccgaggcagaagccgcccttgagctggcgctaagcatcacgcgagccgtgcgctccctgcgggccgactacaacctcacccggatccggcctgactgtttcctggaagtggcggatgaggccacgggcgccctggcatcggcggtgtcgggctacgtgcaggccctggccagcgcaggtgtggtggctgttctggccctgggggctcccgccccccagggttgcgctgtggctctggcttctgatcgctgctccatccacctgcagcttcaggggctggtggaccctgcacgggagctgggcaagctgcaagccaagcgagttgaggcccagcggcaggcccagcgtctgcgggaacgccgtgctgcctcgggctatcctgtcaaggtgccgctcgaagtccaggaggcagatgaagccaagctccaacagacagaagcagagctcaggaaggtggatgaggccatcgccctattccagaagatgctgtgatccaccacccagcttcacccctcacccccagcggctcaccatggggatggcagcaataaaatatttttcccac

SEQ ID NO: 261440 - DNA, 804 bp, Homo Sapiens
ggctggtacggtccggaattacgggatatcgtcgacccacgcgtccgggggctttgttcgcgggggtcacagctctcatggctgcagctagcgtgaccccccctggctccctggagttgctacagcccggcttctccaagaccctcctggggaccaagctggaagccaagtacctgtgctccgcctgcagaaacgtcctccgcaggcccttccaggcgcagtgtggccaccggtactgctccttctgcctggccagcatcctcagctctgggcctcagaactgtgctgcctgtgttcacgagggcatatatgaagaaggcatttctattttagaaagcagttcggccttcccagataatgctgcccgcagggaggtggagagcctgccggccgtctgtcccagtgatggatgcacctggaaggggaccctgaaagaatacgagagctgccacgaaggccgctgcccgctcatgctgaccgaatgtcccgcgtgcaaaggcctggtccgccttggtgaaaaggagcgccacctggagcacgagtgcccggagagaagcctgagctgcggcattgccgggcacctgctgcggagcagacgtgaaggcgcaccacgaggtctgccccaagttccccttaacttgtgacggctgcggcaagaagaagatcccccgggagaagtttcaggaccacgtcaagacttgtggcaagtgtcgagtccttgcagattcacgccatcggtggctcgagacggtagacggtgaaaacagcagagccgagttgcagtggtgcgggagcctggcatgc

SEQ ID NO: 261441 - DNA, 761 bp, Homo Sapiens
  misc_feature (573)..(576): n is a, c, g, or t
  misc_feature (580)..(580): n is a, c, g, or t
  misc_feature (584)..(584): n is a, c, g, or t
  misc_feature (586)..(586): n is a, c, g, or t
  misc_feature (597)..(599): n is a, c, g, or t
  misc_feature (601)..(601): n is a, c, g, or t
  misc_feature (657)..(667): n is a, c, g, or t
gggaggcgcaagataagctaggagccgcgcgagtcgtagtgtcgctgtttgcgggtctccgcgcgggaccggggcgcagcggggtcgctgaggcgagggtgtcatgtcagacaacgaggacaattttgatggcgacgactttgatgatgtggaggaggatgaagggctagatgacttggagaatgccgaagaggaaggccaggagaatgtcgagatcctcccctctggggagcgaccgcaggccaaccagaagcgaatcaccacaccatacatgaccaagtacgagcgagcccgcgtgctgggcacccgagcgctccagattgcgatgtgtgcccctgtgatggtggagctggagggggagacagatcctctgctcattgccatgaaggaactcaaggcccgaaagatccccatcatcattcgccgttacctgccagatgggagctatgaagactggggggtggacgagctcatcatcaccgactgagctggagtcatcttcctgcccttgccccatgcccaattttcattctcactttatatgtgtaaataataaaatattcaactttctannnnagcncaananaaaagaaaaannnanccctgtcgggccgccctcggcccttcgagaaacttttctaagaccatttccgtttnnnnnnnnnnncccccgttaggtaaagtggacatgggcccatagcctgttttcctagggagatcctggggccattgactaaggggtttgggtttcctcccccaat

SEQ ID NO: 261442 - DNA, 228 bp, Homo Sapiens
accttagcatgtggtgttgaagtattactgtagatcaagtttgtcttccgcactaagatgtgaggaaattgtgatttgttctctccaccacaaatgaattacacatttattatcttctatcattttgaaacactgcagtttaccatgggacactgtatatatttcttgccataatggtaaaggactgattgatatatttaagagttaataaatttgtgatttctgctg

SEQ ID NO: 261443 - DNA, 1043 bp, Homo Sapiens
gggggacctcggtgagtacaaggtggtggggggtcgccagcaggttccctctccccggccccagctctggacgctcaccccagtgcaacgccctgagtgacggaaagaggtctggcggcttctctgttgacaactcagctggttccacaccctggcaattgtgaagagttggccaaatgtttgtccactgagctgatctcctctctggagcaccggggccaccaggagggagccaagacaatgcaaactccagtgaacattcccgtgcctgtgctccggctgccccggggccctgatggcttcagccgtggctttgcccctgatggacgcagagcccccttgaggccagaggttcctgaaatccaggagtgtcccatagctcaagaatccctggaatcccaggagcagcgggcacgagccgcccttcgggagcgttacctccgcagcctgctggccatggtgggtcatcaggtgagcttcacgttgcacgagggtgtgcgtgtggccgcccactttggagccaccgacctggatgtggccaacttctacgtgtcacagctgcagactcccataggtgtgcaagcagaggcgctgctccgatgtagtgacattatttcatataccttcaagccataaagatattgtgttcacttttctgcttgaggctaaggcactgtatcccaggcctcccaatgttcccgagccaggaactctgggccccatggagttatgagctcccttggaattttgagccaagctttaagcaagtctggactcctgagacctcctgggtctagtcagtaaaattctgcaactctaggaattctaagatcccattggaaggaatgctctacctcacagaactctgaaccctacagaaatatgggcctgctgccatttcctgaagaccggggcatcggggtggggtgataaaggatacaacctgcacagggggaagttattaaagaggctgcaaagtccagccaccctgaagatactccccagtgctcccctcctgctaaagaaccagttaccccgggaaa

SEQ ID NO: 261444 - DNA, 473 bp, Homo Sapiens
  misc_feature (22)..(22): n is a, c, g, or t
ggcggcttctctgttgacaacntcagctggttccacaccctggcaattgtgaagagttggccaaatgtttgtccactgagctgatctcctctctggagcaccggggccaccaggagggaggtctgtgaaacccctgcccctgccattgacctaagtgttgggctcttgaatctaacagactagtttttcaagtcgtgggggatgggcttgggcatttttccctgaaaccttcggaaatccttgccttggagactgaaaggataaaggcctctggggccagggtcaccaggggacaatgggataacgcctgcctctaccctcctggggcacaccctgtgtgaatctttcttaaaccagtttcttatcagggtcacaccttgggctccacagtctgcctttctacatgggggcacgggtgaggacctgagtttgctccctcttcctccaccctccagcttgcaccaaggaaatga

SEQ ID NO: 261445 - DNA, 695 bp, Homo Sapiens
cttaggttgatggcagcggcagctggggctgcagcggcgccgggctctagagagccgcaggatcggccagagtgcggagctggacacccgggtcccagatactacagacacccggagaggtggctccttcgccctgaagccttcctcggccccctacgcactcgggccccttccgcagaggattcgcagcgtgagcgccccgcagcccgctcaggaccagggcgacagcagcattcggtactttgagattaccgacgagccgcctttcgtgcactacctgaacacgttcagcagcaaagagccgcagcgaggcatgggtttcatgccaaaaggggactggatgtcagcaagtgtgagatcgcccggttctacaagctacacgaaagaaagtgtgaacctatcatcatgactgtgccccgcaagtcagacctcttccaggacgatctgtacccggaatacgccaggcccggagccggccctagaagcggacgaatggctatccggccagggacgccgaacccgtgctcattttcgctgaggggacggctatgtgccccccaacgcaccgcgacgctccgggtcacgaagcgcaacatcctggacgtgcgcccgccctccggcccccgccgcaagccaagtcggccagcgacgcccccttgtcgcagcacacccttggagacgctgctggaagagat

SEQ ID NO: 261446 - DNA, 156 bp, Homo Sapiens
tttttaaaattaaatccaaattttattaaggatttcaggttacatacttcaaatttctagaatggaatggaatcattttggaactggaaaaatggcataaacactgacgtcccttaaaacttcaattttataaagaaaattcttctgcaaaccacc

SEQ ID NO: 261447 - DNA, 931 bp, Homo Sapiens
gggagtgtttggggcggtcaacgggctatgctggcttgacagggctgggctcttcagaacagaagcatggatctcggaatccctgacctgctggacgcgtggctggagcccccagaggatatcttctcgacaggatccgtcctggagctgggactccactgcccccctccagaggttccggtaactaggctacaggaacagggactgcaaggctggaagtccggtggggaccgtggctgtggccttcaagagagtgagcctgaagatttcttgaagcttttcattgatcccaatgaggtgtactgctcagaagcatctcctggcagtgacagtggcatctctgaggacccctgccatccagacagtccccctgcccccagggcaaccagttctcctatgctctatgaggttgtctatgaggcaggggccctggagaggatgcagggggaaactgggccaaatgtaggccttatctccatccagctagatcagtggagcccagcatttatggtgcctgattcctgcatggtcagtgagctgccctttgatgctcatgcccacatcctgcccagagcaggcaccgtagccccagtgccctgtacaaccctgctgccctgtcaaacccctgttcctgaccgatgaagagaagcgtctgctgggggcaagaaaggggtttccctggccctctcacctgcccctcaccaagggcaaaaggacagggtcctcaagaaaggccagggaggaaaatccgtaacaagcagtcagctcaggacagtcggcggcgggaagaaagagtacattgatggggctggagagcagggtggcagcctgttctgcacagaaccaagaatttacagaaaaaagtccaggaagctgggagaggcacaaacatcctccttgggtagctcagcttccgccagctgccaaacgc

SEQ ID NO: 261448 - DNA, 921 bp, Homo Sapiens
  misc_feature (776)..(776): n is a, c, g, or t
gctcatgcccacatcctgcccagagcaggcaccgtagccccagtgccctgtacaaccctgctgccctgtcaaaccctgttcctgaccgatgaggagaagcgtctgctggggcaggaaggggtttccctgccctctcacctgcccctcaccaaggtaacatgcttcccctaagggtatcccaacccaggggcctcaccatgacctctgaggggccaatatcccaggagaagcattggggagttgggggcaggtgaaggacccaggactcacacatcctgggcctccaaggcagaggagagggtcctcaagaaggtcaggaggaaaatccgtaacaagcagtcagctcaggacagtcggcggcggaagaaggagtacattgatgggctggagagcagggtggcagcctgttctgcacagaaccaagaattacagaaaaaagtccaggagctggagaggcacaacatctccttggtagctcagctccgccagctgcagacgctaattgctcaaacttccaacaaagctgcccagaccagcacttgtgttttgattcttcttttttccctggctctcatcatcctgcccagcttcagtccattccagagtcgaccagaagctgggtctgaggattaccagcctcacggagtaactttccagaaatatcctgacccacaaggacgtaacagaaaatctggagacccaagtggtagagtccagactgagggagccacctgggagccaaggatgcaaatggctcaacaaagacactgcttganaagaatgggagggaaagccaagacccagtgggcgcatccggttccgtgctgcatgccaaatgaaaatgtggagctggaacagaactttcctggcacactttcctgatcaccaaggaatcctggggcttcccttatggcctttgca

SEQ ID NO: 261449 - DNA, 1158 bp, Homo Sapiens
cagggaaaaaagaggattccaaaaccccaagtgttggtctgggcagctttgttggaagtttgagcaattagcgtctgcagctggcgaagctgagctaccaaggagaatgttgtgcctctccagctccctgaacttttttctgtaattcttggttctgtgcagaacaggctgccaccctgctctccagcccatcaatgtactccttcttccgccgccgactgtcctgagctgactgcttgttacggattttcctcctgaccttcttgaggaccctctcctctgccttggtgaggggcaggtgagagggcagggaaaccccttcctgccccagcagacgcttctcctcatcggtcaggaacagggtttgacagggcagcagggttgtacagggcactggggctacggtgcctgctctgggcaggatgtgggcatgagcatcaaagggcagctcactgaccatgcaggaatcaggcaccataaatgctgggctccactgatctagctggatggagataaggcctacatttggcccagtttccccctgcatcctctccagggcccctgcctcatagacaacctcatagagcataggagaactggttgccctgggggcagggggactgtctggatggcaggagtcctcagagatgccactgtcactgccaggagatgcttctgagcagtacacctcattgggatcaatgaaaagcttcaagaaatcttcaggctcactctcttgaaggcccggaacctctggaggggggcagtggagtcccagctccaggacggatcctgtcgagaagatatcctctgggggctccagccacgcgtccagcaggtcagggattccgagatccatgcttactacaaaagtggatgccaccttgccaggagccacggtagggccgctgtatctgggagtaggggactaagagtctgagggtccacaaacggaatttaagaagtaggtagccgcgccctttctgctgcagttttctcttagctatagtaaatcttcctgagggtttggtgtctcctagctgaagaacagaaaaggctgtgactggagcacaggactcctgaatgcctgttctgtagccctcgcttttgcaagagggagatcatggcagggttgtaaacaaaggcggaaagagtccc

SEQ ID NO: 261450 - DNA, 907 bp, Homo Sapiens
  misc_feature (609)..(609): n is a, c, g, or t
  misc_feature (620)..(620): n is a, c, g, or t
catgatctccctcttgcaaaagcgagggctacagaacaggcattcaggagtcctgtgctccagtcacagccttttctgttcttcagctaggagacaccaaaccctcaggaagatttactatagctaagagaaaactgcagcagaaagggcgcggctacctacttcttaaattccgtttgtggaccctcagactcttagtcccctactcccagatacagcgggccctaccgtggctcctggcaaggtggcatccacttttgtagtaagcatggatctcggaatccctgacctgctggacgcgtggctggagcccccagaggatatcttctcgacaggatccgtcctggagctgggactccactgcccccctccagaggttccggtaactaggctacaggaacagggactgcaaggctggaagtccggtggggaccgtggctgtggcttcaagagagtgagcctgaagatttcttgaagcttttcattgatcgcaatgaggtgtactgctcagaagcatctcctggcagtgacagtggcatctctgaggacccctgcgatcgagacagtccccgtgccccaagggaaccaagttctcctatgctctatgangttgctatgangcagggcctggagaggatcgaggggaaactggccaaatgtagcgttattctatcagctaatagttggctagcattatgtgctgatcttcatgcaatagtgcgttgatctatccaatctttctagagagcgtgcgaatccggtaaaccagggctgtggatgagtactattcagagttggggagctgcttccctaaggagagctagagtgacataacttgatgcgagatttggaggctttcattatgtgcattccgggtctacaatttctccatgggtctataagtcct

SEQ ID NO: 261451 - DNA, 575 bp, Homo Sapiens
cagcccaccaagtgctcgccccactagcagcacaaagtagtcttgagagagtttggttaagcagcatagtgagtaagtcagggagaagaggacacaagaattcttgcgacccagccaatccacaagggaggaggccactaggccaaagaggactgtagaggcaagaccacagacatagaggagggcaatctgaccttccaggaagtagtaatgctggtagagtttacagaggtagggggccagaagccaatcagctgccagggccagcaagtagacctgatagaagtccagctgaaaccgaaggaaggaggggattgccgcaggcccttccagggggtctagcccggcatctagacagttccagccccaggcaggaggccaggagccatacaaaagcaaggtaggcagtcaccagcatggtgggcccccggacgacctgctgccccggtctgcggggacgccccggacacgtccggctccaggccgccaggccaccctccccgctgtggctccggctccggctcgggttccagcagcgctcccgcccctcacagcaagcttccgggagccgggca

SEQ ID NO: 261452 - DNA, 685 bp, Homo Sapiens
  misc_feature (618)..(618): n is a, c, g, or t
  misc_feature (633)..(633): n is a, c, g, or t
  misc_feature (649)..(649): n is a, c, g, or t
  misc_feature (662)..(662): n is a, c, g, or t
gggagccggagccggagccacagcggggagggtggcctggcggcctggagccggacgtgtccggggcgtccccgcagaccggggcagcaggtcgtccgggggcccaccatgctggtgactgcctaccttgcttttgtaggcctcctggcctcctgcctggggctggaactgtcaagatgccgggctaaaccccctacctctataaactctaccagcattactacttcctggaaggtcaaattgccatcctctatgtctgtggccttgcctctacagtcctctttggcctagtggcctcctcccttgtggattggctgggtcgcaagaattcttgtgtcctcttctccctgacttactcactatgctgcttaaccaaactctctcaagactactttgtgctgctagtggggcgagcacttggtgggctgtccacagccctgctcttctcagccttcgaggcctgggtatatccatgaggcacgtgggaacggcatgacttccctgctgagtgggatcccagctacctttgctcgagcttgccttctgggaaccatgttgctgggctgtagtgggcaggtgtgggcagctgaggctgttagccagctgggataggggctnggggcctgtaagcgnccttttgttggcttgnccattccttttcnggggttttggcaaggggctttgc

SEQ ID NO: 261453 - DNA, 1920 bp, Homo Sapiens
actctgtcgccgccgtcagaccggaattgccggtgccgccgccaccgctgtctgtgcgcccacctctgctgctaccatggggatcttagagaagatctcggagatcgagaaggagatcgctcggacacagaagaacaaggccactgagtatcatctgggcctgctgaaagctaagctcgccaagtatcgggcccagctcctggaaccgtccaaatcggcctcgtccaaaggagagggctttgatgtcatgaagtcgggtgatgcccgtgtggcgctgattggatttccctctgtgggtaagtccacattcttgagtctgatgacctccacggccagcgaggcagcgtcctatgagttcaccactctgacgtgtattcctggggtcattgaatacaaaggtgccaacatccagctcctggaccttcctggaatcattgaaggcgcagcccaaggaaaaggccgtggccggcaggtgatcgctgtggcgcgcacggctgacgtcatcatcatgatgctggatgccaccaagggagaggtgcagaggtctctgctggagaaggagctggagtctgtgggcatccgcctcaacaagcacaagcctaacatctacttcaagcccaagaaaggtggtggcatctcctttaactcgacagtcacgctgacccagtgctcggaaaagctggtgcagctcatcctgcacgaatacaagatcttcaatgcagaagtgcttttccgagaagactgctccccggacgagttcatcgatgtgatcgtgggcaaccgggtgtacatgccctgcctgtatgtttataacaaaatcgaccagatctccatggaagaggtggaccgcctggcccgaaaacccaacagtgtggtcatcagctgcggcatgaagctgaacctggactatctgctggagatgctttgggagtacttggccctgacctgcatctacaccaagaagagaggacagaggccagacttcacagacgccatcattctccggaaaggggcctcagtggagcacgtgtgccaccgcatccaccgggtcactcgccagccagttcaagtacgccctggtgtggggcaccagcaccaagtacagtccgcagcgggtgggcctgacccacaccatggagcatgaggacgtcatccagatcgtgaagaagtaacggcgcctgccgggccttcccgcccacctgccttcgtcttccctggggaggtggtcccactgggacacacaaacacccaaacagaaaaatacaaatacacgtaccccaggaaggggtccctcaagtctctgctatttacagaagtttcttcagtaggcagacgaagagtgtgttggggcaaaggggctcggttggaggcatttcccataagactgagccctctcatgggggttttgagtttgtagtgctgagcctgcatctgtgcctcccagccccctgcactgagggagcaagttgcccacatgcccgccagccagggcctaaagcagatggcatgctcagtgccaggctggtagctgggcctgtttgggtccctggaggctgtggctgctgtcatggcacctcactccctcagctcttgccagcttctctgacacttgggttgggggcccttcccaggaggaaacccccttgggtgccccacacagggctctccatgatgggaaccagtggttagtggcttcaaaggcccagctgacaccctccacagcctaaggggtgtcctaaagtgcctccccctgtattcccctttcccagggcagccccctgcccagcacaaaaacccagggaccctgggctctgcacgcctgggggcagggaacttttttgattttagggatctggtatttttctaggtcccccaggttctctgggctctccttttcctgaattaagaggattgaaaacg

SEQ ID NO: 261454 - DNA, 624 bp, Homo Sapiens
gatataccaaggtaataaatgctgtttatgacttctttaaatttacatagtactgtagcatattaataccctgtgaactgcaaaaaaccaaatacatttacagtagtattggtcaccaaaatagaggggaaactttacaattgtgagaatgtgtaaatgttctcattaaggcagtattgacccagacaaccatttagtattcatctatcccctcaatgcctcataattctggaatgcctgttgtgaaacatgtcagtgcacagtgtctcctaaattctcacacgtgcttgattttctgattcatctggtgaactgggagtaggaagttggtcatagacaatatgccctccttctcttgtctgaccaaagcttgaagcaatcacatctactgccaggttagctgtagtcttcgcctcttcctctgaggtggccaactgaggattgacttcaacaagatccagtgctgatagcaaccctgtattgtgtatgtctcagcaatatacatggcttctcgataggttatgtcaccgacaacaggatgttctgtgggctggagcatgtgtagggtcaaatgcatcaatatcataactcaaaatggattggtcgttgtctcttgccaatcag

SEQ ID NO: 261455 - DNA, 257 bp, Homo Sapiens
ggatttcaagttgaaacacgatgatgtggtctgcttgctctctgcttagacaggctttaagaccaattggattttcatggaggccaggacagagagtggtaattgatggcttgtgtacagacaagcatttatccaggttgcgttatccaaactgatttgttaaagctccaggtcacgttcttacactaagaaaatcattcagtaaacatgagacaagtttaggaaaaactaataaaataaacctgtcttaaacttta

SEQ ID NO: 261456 - DNA, 711 bp, Homo Sapiens
  misc_feature (13)..(13): n is a, c, g, or t
caccttaaaaacngtctacctctctcagaagcttctctttggcagtcagggttggtggccagtaggtaggtggcaaaagaaagtgtgttggtgatgatttcatagccagcgatgaggaagatgaaggcctggcccacaatctcatccacagtcaaaggcctggccatagggctgggctggtgttgccgggaagggttcggcttgcacccagtagaggagaaaacgtctctgacgatgtcaaagtcttgcacgcccatgggacttgcagaatgtcgggcatccaggaccatttggaggaagtctctccgcctctcttcggcagcttgctggtcccgcaaggcaatcacattcctaatgagtttgttaaaaaagccattcagttcgtctcggttcttattgggcaaaatccgggccagtgggaccattatggatggaaatgataagagtaaaaccaggataggtctggggatgcagaattcgaagaaacgcttgcagtgtttcacaaagggatcctcaggggcctgccaggagtccaccggggtgccaaaggcgacgctggcaaccacatctgtggtgtaattgcagtagcacctctggatgtcaaatgcgtccccagattccgcatagcgttttaaatgagccaggagaaggtcgcaggcttggctgatgaggggaaccatctcgttcagcttttcaggactgaaagcagac

SEQ ID NO: 261457 - DNA, 781 bp, Homo Sapiens
  misc_feature (701)..(709): n is a, c, g, or t
ggggcgggtgcgcgcgcggacggccgggcggcggcggctcccggaggtggtggcttcactttccaggactcaggggcagccacagcgacagccgcgggcagcagcctcaggagccggagctggaacggccgggggcggcggcagcggcggcgctgagggatctaaaatgtccactgaggcacaaagagttgatgacagtccaagcactagtggaggaagttccgatggagatcaacgtgaaagtgttcagcaagaaccagaaagagaacaagttcagcccaagaaaaaggagggaaaaatatccagcaaaaccgctgctaaattgtcaactagtgctaaaagaattcagaaggaacttgcagaaatcacattggaccctcctcccaactgtagtgctggacccaaaggagacaacatttatgaatggaggtcaactatattgggacccccaggatctgtctatgaaggaggggtgttctttcttgacattaccttttcaccagactatccgtttaaaccccctaaggttaccttccgaacaagaatctatcactgtaatattaacagccaaggtggtgatctgtctggacatcttaaaggacaactggagtccggctttaactatttctaaaggtctcctctccatctggctcacttctacagattgcaaacccctgctgaccctcggggggggcagcatnnnnnnnnnagtacatgacccacacgagcagagcctgaccgcgatgggccagaacagtgggaccaagcggtaccgccacct

SEQ ID NO: 261458 - DNA, 415 bp, Homo Sapiens
  misc_feature (14)..(14): n is a, c, g, or t
tccgagacgaagtnacttctgtcccccaggctggagcaaaataaataaataaaggtgcagctgtgggtcgaaggatggtgtggaagtttggggtagacatccaagactgcagtaatgctatgcccagggtatattttggggcaaaacccccaaaataccctggcaaagaaagaagattgtgtttcagttgcaatcatctaccctaatccctttctgagggcctctggcactgcttgggctcactgcccttgtctgatggggtaggatctcccagaggagacagctaattatactttaatgaggtgacttacagacactggaaaaggagttggctggtacactcccatatatagcagctctctcgaggatacagtctgtgaataaatggtaccagaaccctcttgagcctcgtgcc

SEQ ID NO: 261459 - DNA, 719 bp, Homo Sapiens
atcgtgtctgtccgaacccagacacaagtcttcactccttcctgcgagccctgaggaagccttctttccccagacatggccaacaagggtccttcctatggcatgagccgcgaagtgcagtccaaaatcgagaagaagtatgacgaggagctggaggagcggctggtggagtggatcatagtgcagtgtggccctgatgtgggccgcccagaccgtgggcgcttgggcttccaggtctggctgaagaatggcgtgattctgagcaagctggtgaacagcctgtaccctgatggctccaagccggtgaaggtgcccgagaacccaccctccatggtcttcaagcagatggagcaggtggctcagttcctgaaggcggctgaggactatggggtcatcaagactgacatgttccagactgttgacctctttgaaggcaaagacatggcagcagtgcagaggaccctgatggctttgggcagcttggcagtgaccaagaatgatgggcactaccgtggagatcccaactggtttatgaagaaagcgcaggagcataagagggaattcacagagagccagctgcaggagggaaagcatgtcattggccttcagatggggcagcaacagaggggcctcccaaggccggcatgacaggctacggacgacctcggcagatcatcagttagagcggagagggctagccctgagcccggccctcccac

SEQ ID NO: 261460 - DNA, 879 bp, Homo Sapiens
tccagtcgcaaccagccaggcccgccgggtccaccgggacctcctggtagcgcaggagccagaggagaacctgggcctggggggcggccaggcttcccgggcacaccagggatgcagggaccccctggggaacgaggtttgccaggagagaaaggtgaaaggggtactggatcttcaggacctcgggggctgcctggccccccaggtccacaaggagaatccagaacaggtccaccagggtccacaggttcaagaggtccccctggcccccctggccgtcctggaaactcaggtatccgaggacccccaggtcctcctggatactgtgattcttctcagtgtgccagcatcccatacaacgggcaaagctatccaggttccggctaacacattttctaagtcgccagtgctgcttacagtttgaatacatgaaaatcctgtttctgagatgtttgcgcacgtgcttattaggaaatgagtctgtatggaaatctcaccacagataatggttaacgaaccgggtcgacatcacaaaggagggtggagactctttttactaacttgaatgagacaaaagcagtggtgtcagtttataatcctgatgcatttcagtaataatgtagaaaaacattattttaaaaaagttccaacacacagccatgaggagcctcagttttgaaagaggtgcataataaaactactaaccagaggagtctatgccattcttaagaaaaacaattaacctggttaaagagaaatgtcttatggaaataataacctaatggtggcttgtaaatgatttggatgggatcctgaatgatattatcaggtgagacaccggtccccataatataagtccctaagacaagtgtgttgacc

SEQ ID NO: 261461 - DNA, 1372 bp, Homo Sapiens
  misc_feature (1145)..(1166): n is a, c, g, or t
aaggtagcgaggcctgggtggcgaattcggacgaggccaaggtgtgtgtaagggtgcaggcgccggccggttaggccaaggctctactgtctgttgcccctccaggagaacttccaaggagctttccccagacatggccaacaagggtccttcctatggcatgagccgcgaagtgcagtccaaaatcgagaagaagtatgacgaggagctggaggagcggctggtggagtggatcatagtgcagtgtggccctgatgtgggccgcccagaccgtgggcgcttgggcttccaggtctggctgaagaatggcgtgattctgagcaagctggtgaacagcctgtaccctgatggctccaagccggtgaaggtgcccgagaacccaccctccatggtcttcaagcagatggagcaggtggctcagttcctgaaggcggctgaggactatggggtcatcaagactgacatgttccagactgttgacctctttgaaggcaaagacatggcagcagtgcagaggaccctgatggctttgggcagcttggcagtgaccaagaatgatgggcactaccgtggagatcccaactggtttatgaagaaagcgcaggagcataagagggaattcacagagagccagctgcaggagggaaagcatgtcattggccttcagatgggcagcaacagaggggcctcccaggccggcatgacaggctacggacgacctcggcagatcatcagttagagcggagagggctagccctgagcccggccctcccccagctccttggctgcagccatcccgcttagcctgcctcacccacacccgtgtggtaccttcagccctggccaagctttgaggctctgtcactgagcaatggtaactgcacctgggcagctcctccctgtgcccccagcctcagcccaacttcttacccgaaagcatcactgccttggcccctccctcccggctgcccccatcacctctactgtctcctccctgggctaagcaggggagaagcgggctgggggtagcctggatgtgggccaagtccactgtcctccttggcggcaaaagcccattgaagaagaaccagcccagcctgccccctatcttgtcctggaatatttttggggttggaactcaaaannnnnnnnnnnnnnnnnnnnnnaaactcaaggcatctatgtcgggtgccgaagaaagaggtaatgaaatgccacatggtcataactgtttcctgaccccactttcttgtccaaagggggaaatctgcccggtctccccaataagggagtccgaattaattttcaataaagcccgggttaaacctgcaattaatggaatccgggtggccaatacccgggggaattttaa

SEQ ID NO: 261462 - DNA, 469 bp, Homo Sapiens; identical to SEQ ID NO: 6178
  misc_feature (414)..(423): n is a, c, g, or t

SEQ ID NO: 261463 - DNA, 373 bp, Homo Sapiens
gtaaccggagatagtttttacaagtgaaataacatttcagctaaataaaacatcgctaaataattgatatttgatgaaaatctgctttgtataatttctgtaaattatccttgttctgaaaaaggtgtaatgccctaatatttttaaatccttatcctttgattttttaaaaactgacctattgataaaactataaattttcattttccagtgcagttagttacctttttaaacataaatgcacaacaagcaaatgaatttaagagaactaaactggaataagtgttcataaatgaaacccttggactatttaataaagttgaaatgtgaattaaggaaaacttttgttaataaaaactttcttttaaaaaaa

SEQ ID NO: 261464 - DNA, 596 bp, Homo Sapiens
agaggacacagctcacctgcaacatggtctctgaaagtgttcaaattggttgccaacatttataaatggagagatggcaccaaaaaacatctaggtttcttgtctcttgaaaaatcaaagctgtggccaccctaggcccacttttccacatggcaacaggcgtggagcttgggctactgcccctactgtgtaggcggtgggctccccatagtctcctctgccctgctgccgtgtacctggctcccttcactcatccacatcgaccgccctaggccagggtctgaaccacacacacagaatggctgcagtaagcaggaacgggaagagctttcacattcagaacaagaaggggcttttgagtaactaaaaaacaatctgagcatgttccagcacttcaaccttactctttcagagctttggggtagcaggcagccagctagagcacactctctaaggaactcttgaaagttgatgtctaatttttaagtactcatgaggtgatggaggagaaactaactcagatgactgcgatacgatacatctttccttataagaagtccttaaagatgatgaaaaatgtgaagcaactcatgtga

SEQ ID NO: 261465 - DNA, 337 bp, Homo Sapiens
gccatctggttaagctgagtacaagcaggtggtacggtcggaatgccgggatttcgtcgaccacgcgtccgagcgtttaatgctattgtagtcttgatatacagaaataaaataattagggttggtcttttttattttaggtgttttatgttgaatgttctatatcttattagttaatttgtatattttattagtattttggaaatagcatatctgagactgaagagaaattgacaattcacttatttgtggtttttttctcagctattctgagcttatttatttatttgtatgttctaatggctaaacatttacattaaatgttttttttcccaag

SEQ ID NO: 261466 - DNA, 612 bp, Homo Sapiens
  misc_feature (404)..(429): n is a, c, g, or t
tcgtggcccaggccgggagcagcttgcctcctcagaggtgtgactatctgggtgttcttggtaaccgttaactctgtctttctcagctgcaagccctgagtctccagtagctgaattcacctgacttttcaacaggccaaatctctgaaccttgagtacagggacagctcctccatccctcctcccagctctccccatgtgtgtgatggtgtatttaatgtgtttttttaatgcgacattaaaagattctccacgtcttgctcaacctttgagagaagtttcagattcttgtatttgcttgttttatataaaactatctaatgttctttatatgttcttttctgtacgtaatggggggaggggagggaaatttacatataaatagtcctagttctacaatttgnnnnnnnnnnnnnnnnnnnnnnnnnncgtcattgtgaagttgtccagggactttaaagtccatgttcctttgtggtgaaataacctccaaatagtttgagaagttgccaagacgaagaaaaaagcaaaaccccagtagcagagcatggattctgtgttgtatcccattctgtctttgactgcctcattcaataaatagttaaaaatgtg

SEQ ID NO: 261467 - DNA, 407 bp, Homo Sapiens
  misc_feature (15)..(15): n is a, c, g, or t
  misc_feature (35)..(35): n is a, c, g, or t
  misc_feature (71)..(71): n is a, c, g, or t
ccccaatgtgaaaanaaagcctatgtgcccccccnggtattgcctccccccgagtgtataatgaagtgccnaagtagtattgccagagaatgtgatgagttaatccacctgtccacaactttttcctatagaaaacaggggctgctttttaaaccctcactatgggcactttacccaaaatacttcccatatcaattatttgaactcggtagttgtttgacctagttagatgtggtgtttattcaagtttgtatgaaatcatgtttgacaatactgtaaattaggttaattttgtaagtcttagcatcatcatattgtgctgttttggataacacgtttgttacaagcatttaaactgtttcatttggtagtacctttacattgaaataaattgtgtttgtgcctcc

SEQ ID NO: 261468 - DNA, 1026 bp, Homo Sapiens
  misc_feature (657)..(661): n is a, c, g, or t
  misc_feature (663)..(671): n is a, c, g, or t
  misc_feature (673)..(675): n is a, c, g, or t
  misc_feature (678)..(679): n is a, c, g, or t
ataaaaacctcacagccttccactaacatcccataggagcctctctccctactgctgctacacaagaccctgagactgacctgcaggacgaaaccatgaagagcctgatccttcttgccatcctggccgccttagcggtagtaactttgtgttatgaatcacatgaaagcatggaatcttatgaacttaatcccttcattaacaggagaaatgcaaataccttcatatcccctcagcagagatggagagctaaagtccaagagaggatccgagaacgctctaagcctgtccacgagctcaatagggaagcctgtgatgactacagactttgcgaacgctacgccatggtttatggatacaatgctgcctataatcgctacttcaggaagcgccgaggggccaaatgagactgagggaagaaaaaaaatctctttttttctggaggctggcacctgattttgtatccccctgtagcagcattactgaaatacataggcttatatacaatgcttctttcctgtatattctcttgtctggctgcacccctttttcccgcccccagattgataagtaatgaaagtgcactgcagtgagggtcaaaggagagtcaacatatgtgattgttccataataaacttctggtgtgatactttcaannnnncnnnnnnnnnannnaannaaaaaattgtccggccgccctccgcccctcgaagaaggctttcctaaaaccatttcgttttgggcgccgcggggcccagttagggtaaagtgaaacatgggtcaatagcctgttttccctaagggaaatccctgggccaatgaactaagggccttgggatttcctcccccaaattaaaaaaaccgcccccgggcggccaaacccggaggcgtgttcttgaaaccaaaattcccaaaatgggaagtttcttggaagggtccaatataactggggaatcctaattcaaaacagggggaagtccccaaaggccgaaaggccttccgaataattcaaaaaatttaaagggg

SEQ ID NO: 261469 - DNA, 515 bp, Homo Sapiens
aaatcctgtgttcttcccctccccagggtgggaactatggttgctagggctgaggtgtattgcttacttcttccatcaaaaatctcttttatccctgaacaacttgccacctctgcagaaacaagtccctgtggagatctcagttcagccccaggcagggttactacatggagtacccagatcccaggggctacttcaggcccttctactaagctcctgaccctggctctgggtcagatgttggctgaacatgaactattgtagggctgacagctacagaccacagaaagagcaaagcttcagtaggttcctgcctgatggagaagtcctcgggaagcccttggccttctatttcctcattgtcctttcagagaagagagcaggagttgggggagaaaggagattcgcatttactgaccatctgttatgtgctagacacttcattttacactgagaaaatatggaaaacatagataaacacctaaaagaaaataaaaacctcatgttatcccacc

SEQ ID NO: 261470 - DNA, 955 bp, Homo Sapiens; identical to SEQ ID NO: 14941
  misc_feature (137)..(137): n is a, c, g, or t
  misc_feature (195)..(195): n is a, c, g, or t
  misc_feature (202)..(203): n is a, c, g, or t
  misc_feature (206)..(213): n is a, c, g, or t
  misc_feature (713)..(731): n is a, c, g, or t

SEQ ID NO: 261471 - DNA, 730 bp, Homo Sapiens
  misc_feature (146)..(152): n is a, c, g, or t
  misc_feature (155)..(155): n is a, c, g, or t
  misc_feature (158)..(160): n is a, c, g, or t
  misc_feature (163)..(163): n is a, c, g, or t
  misc_feature (165)..(167): n is a, c, g, or t
  misc_feature (171)..(173): n is a, c, g, or t
  misc_feature (178)..(179): n is a, c, g, or t
  misc_feature (181)..(232): n is a, c, g, or t
  misc_feature (458)..(506): n is a, c, g, or t
ggggagaattccaaccctttatttctttccccggggtttcctttgggaacaaggttttgcccactgttccctttccctttgggggccgcgcccccaaaagaaatgtttagaaaagttttttaggggccgagggcggccgccaaggnnnnnnnttnttnnnttntnnntttnnncaatnntnnnnnnnnnnnnnnnnnnnnnnnnnnnnnnnnnnnnnnnnnnnnnnnnnnnngtatttcaaccaggtattttattggtctggcaactgcaaaatatacaaatttctgaaaggcatctcctgtttgaaagctagcatagctttatatcccaggtcattaattcagacaaatacacagaacacagagaagtcataagtcacacataggaggctcccaaaccaattaacaatgaaacccaatctctacagctttctattgtttaggctccttatacatatnnnnnnnnnnnnnnnnnnnnnnnnnnnnnnnnnnnnnnnnnnnnnnnnntcaagtattacaaagaaaaatatcattggtgtggttccaaacagtttttcttctctctcaaaatgaagagctttgcccgtggtctcaggacagaataaggaggggggaaactcacccaaaaacaaataggcaaagttaaaaatattggtccccgttattttgtggggtggagagttggaggaatcagtagacgccaaaagttcatgactgtagctcaaacccaa

SEQ ID NO: 261472 - DNA, 974 bp, Homo Sapiens
atgctgtccggttaccgtgacaatgcagctgaggaacccagaactacatctgggctgcgcgcttgcgcttcgcttcctggccctcgtttcctgggacatccctggggctagagcactggacaatggattggcaaggacgcctaccatgggctggctgcactgggagcgcttcatgtgcaaccttgactgccaggaagagccagattcctgcatcagtgagaagctcttcatggagatggcagagctcatggtctcagaaggctggaaggatgcaggttatgagtacctctgcattgatgactgttggatggctccccaaagagattcagaaggcagacttcaggcagaccctcagcgctttcctcatgggattcgccagctagctaattatgttcacagcaaaggactgaagctagggatttatgcagatgttggaaataaaacctgcgcaggcttccctgggagttttggatactacgacattgatgcccagacctttgctgactggggagtagatctgctaaaatttgatggttgttactgtgacagtttggaaaatttggcagatggttataagcacatgtccttggccctgaataggactggcagaagcattgtgtactcctgtgagtggcctctttatatgtggccctttcaaaagcccaattatacagaaatccgacagtactgcaatcactggcgaaattttgctgacattgatgattcctggaaaagtataaagagtatcttggactggacatctttttaaccagaagagaattgttgatgttgctggaaccagggggttgggaatgaccccagatatgttaagtgattgggcaacttttggccctcagctgggaaatccagcaaagtaacctccagattgggccctctctgggccctaatcaatgggccttgctcccctttaatatccatgtgcctaaatggaacctcccgaacacaattcaagc

SEQ ID NO: 261473 - DNA, 1474 bp, Homo Sapiens
aggcaggcgcgctcgggcgaggtaggagcgatgtggcctgggaacgcctggcgcgccgcactcttctgggtgccccgcggccgccgcgcacagtcagcgctggcccagctgcgtggcattctggagggggagctggaaggcatctgcggagctggcacttggaagagtgagcgggtcatcacgtcccgtcaggggccgcacatccgcgtggacggcgtctccggaggaatccttaacttctgtgccaacaactacctgggcctgagcagccaccctgaggtgatccaggcaggtctgcaggctctggaggagtttggagctggcctcagctctgtccgctttatctgtggaacccagagcatccacaagaatctagaagcaaaaatagcccgcttccaccagcgggaggatgccatcctctatcccagctgttatgacgccaacgccggcctctttgaggccctgctgaccccagaggacgcagtcctgtcggacgagctgaaccatgcctccatcatcgacggcatccggctgtgcaaggcccacaagtaccgctatcgccacctggacatggccgacctagaagccaagctgcaggaggcccagaagcatcggctgcgcctggtggccactgatggggccttttccatggatggcgacatcgcacccctgcaggagatctgctgcctcgcctctagatatggtgccctggtcttcatggatgaatgccatgccactggcttcctggggcccacaggacggggcacagatgagctgctgggtgtgatggaccaggtcaccatcatcaactccaccctggggaaggccctgggtggagcattagggggctacaccgacagggcctgggcccctggtgtccctgctgcggcagcgcgcccggccatacctcttctccaacagtctgccacctgctgtcgttggctgcgcctccaaagccctagatcttgctgatggggaagtaacaccattgtccagtctatggctgccaagacccagaggttccgtagtaagatggaagctgctggcttcactatctcgggagccagtcaccccatctgccctgtgatgctgggtgatgcccggctggcctctcgcatggcggatgacatgctgaagagaggcatctttgtcatcgggttcagctaccccgtggtccccaagggcaaggcccggatccgggtacagatctcagcagtgcatagcgaggaagacattgaccgctgcgtggaggccttcgtggaagtggggcgactgcacggggcactgccctgagctctgggtaaggacgagaagagccaaggtccgcctgctgccacagggtcaaaggaggttttcgatcagcccagaccagaggctctgagccctgaaccaaagtcccagagctgggctgggacgtgacctgtgctgagggctgtgagaatgtgaaacaacagtgtgaaaattggctgtgaaa

SEQ ID NO: 261474 - DNA, 607 bp, Homo Sapiens
gctcctagagaggccgccagaagacccggcgctttcttccttctgcagctgaggctgcggcggggccggggctggggtcggggccaggaggaattttgttgtcagagaataaaaggaggttgtccataattgactttaagcagcaatcagtaaaacattgagctcttcagctccgcctttcttgctctgaaaatcggaaaaccaagaaggttttgatgttttgtgtgacgccacctgaattagaaaccaagatgaacataaccaaaggtggtctggtgttgttttcagcaaactcgaattcatcatgtatggagctatcaaagaaaattgcagaaaacgagagtacaaattcaagagtctgtgaggggaaaagatgttttcatcatccaaactgtttcgaaggacgtgaacaccaccatcatggagctcctgatcatggtgtatgcatgtaagacctcttgtgccaagagcatcattggcgtgataccctactttccttacagcaagcagtgcaagatgagaaaaagaggctccattgtctctaaattgctggcttccatgatgtgcaaagctggtctaactcatcttattactatggatttacacc

SEQ ID NO: 261475 - DNA, 990 bp, Homo Sapiens
  misc_feature (790)..(790): n is a, c, g, or t
  misc_feature (857)..(875): n is a, c, g, or t
gagcgaggcctgggtggcgaattcggcacgagggtccgcagtgactacactcatggcaggtcccctgtggcggaccgcagcatttgtgcagagacacaggacaggcctcttggtgggttcctgtgcaggcctgtttggagttccagtctcgtaccacctcttcccggatcccgtggtccaatggctctaccagtactggcctcagggccagccagctccgctccctccacagctgcagagcctcttccaagaggtgctacaggacataggtgttccttcaggccattgctacaagcccttcaccaccttcaccttccagcctgtgagtgcaggcttcccaagactccctgctggggctgtggtgggcatccctgccagtttcttgggagacctagtgatcaacactaaccatcccgtggtcatacatgggcatacagtggactggcggagcccagcaggcgcccggctgagagcttccctgaccttgtcccgtgaagcccagaagttcgccttggccagggaagtggtgtacctggaaagcagtaccactgccgtgcacgccctgctggccccagcttgcctggcagggacctgggcactgggcgtgggtgccaagtacaccctggggctccatgcaggccccatgaatttacgggctgccttcagcttggtggcagcagtggcaggctttgtggcctacgccttctcccaggattctctcactcaatgccgtggaagtcctggctggaccgccgcacggcctccctctctgcagcctatgcctgggggngggaaagggaattctattgagaagctccttgtcgggcaacctgggccctgcgcagtctcttggggcnnnnnnnnnnnnnnnnnnnctgtattacaccccagcggggaaccatccgtccccagaacacttggtccgaaatccaacattttaccctaaacccacccggcggggaatctggggtggcgaaaaatgggggaagc

SEQ ID NO: 261476 - DNA, 805 bp, Homo Sapiens
  misc_feature (587)..(587): n is a, c, g, or t
  misc_feature (793)..(793): n is a, c, g, or t
ggggtaggcgttccgagcggcggcggagattgtccgcagtgactacactcatggcaggtcccctgtggcggaccgcagcatttgtgcagagacacaggacaggcctcttggtgggttcctgtgcaggcctgtttggagttccagtctcgtaccacctcttcccggatcccgtggtccaatggctctaccagtactggcctcagggccagccagctccgctccctccacagctgcagagcctcttccaagaggtgctacaggacataggtgttccttcaggccattgctacaagcccttcaccaccttcaccttccagcctgtgagtgcaggcttcccaagactccctgctggggctgtggtgggcatccctgccagtttcttgggagacctagtgatcaacactaaccatcccgtggtcatacatgggcatacagtggactggcggagcccagcaggcgcccggctgagagcttccctgaccttgtcccgtgaagcccagaagttcgccttggccagggaagtggtgtacctggaaagcagtaccactgccgtgcacgccctgctggccccagcttgcctggcaggnatctgggcactgggcgtgggtgccaagtacaccctggggctccatgcaggccccatgaatttacgggctgccttcagcttggtggcagcagtgggcagctttgtggcctacgccttctccccagattctctcactcatgcccgtgggagtcctggctggaccgcccgcacgggcctcccctctctgcagacctatggcctgtgggntggattggaatt

SEQ ID NO: 261477 - DNA, 1877 bp, Homo Sapiens
  misc_feature (49)..(73): n is a, c, g, or t
  misc_feature (98)..(225): n is a, c, g, or t
gggaaaaaacttttgccccgtttcctttctttttgggggccggggcccnnnnnnnnnnnnnnnnnnnnnnnnngggggccgaggggggccccacaagnnnnnnnnnnnnnnnnnnnnnnnnnnnnnnnnnnnnnnnnnnnnnnnnnnnnnnnnnnnnnnnnnnnnnnnnnnnnnnnnnnnnnnnnnnnnnnnnnnnnnnnnnnnnnnnnnnnnnnnnnnnnnnnncaatctgcaaaagactttattacaaaatacagcacggggctcacagacgcttttccaatattctctaacacgtacactgaagcgctgcaaaatccctggcggtgcccgcaatctaacgtctacaataacctcaacccccttagttacagaaaaactctgcaacaggcagtggaatggagagacggcaagtcgccgcggacgcctgggctctcagctgctgaacaatgacatcgttttctccaggggttgaaatccatgtccatggctgacaacccaacaaggctgggacccaaattcgtacagagatgaggcagagtggagagaaacaactctggctgagccagagttcttccagccactactttcttattcctgggctttagctcttcggctgcattacgcaggaaaatgtaattttttttctggggattataaaattcatgtccctttgaccagtcgtagctggaagcgtatgcaaatatgtttccattgtgattgaaacagcaagctgagatgggctgatctaactgttccgaagtttttagttttgttctggcatctttgtcccagaagctgaatctaccatcagatcccacagttgcaagggtgccatgaacaggatggaacgcgattccatttaccgcataaatgtcctgaggagctgaagtgttggttccattagatcgatgacatttaaaggtgaagttatctttggcggggttcggggggttgatatagtgaatagcaactctcccctcgatacttcccagggcaaaaccagtaggcttgttctgtttgtctttaaaaatagccacacaccgatgctgatgtttcagtggagattctatcctcctgaattcagaaggttgattctctagctgatagacaatcaggcccctctctgcagttgccaccacagccatggggtatatcacgtcagcacagtaacacctttcagggagttgcaaaaccatcataggatttgacgatcgagtatcccaaaactttaaagtcttatcccagctcccagtcatcacacagctgtagtttggagctttgatccaatggatggttttaacaggagcatcatgctgtgcgatctgtatcgcttggttactgctgaggtcccacattttggcagttttatcacacgatgccgtaaacactttgctcccatcgtcactccagcagacatcaagcacaggcccagtgtgcatctgctgggcttttggaatggtctgtccactgtcttgaacttcccagcagcgaacatcattagcccatgatcctgcaataagaaagttccccggcaaggttggtgggctaaaagacagacaaccaatgctatcatcaggagatgatgttacttcaatatccttcatgggattgtgattgtctgtagttgcactgccaaacatgctggtcccactggttccaaaacctgaggttgttccaaacaggctcattttgaacctgggggtctcgccccggcggaaagcggcggccgggagcagaagggtctgaggagtttgcgaacctgctctggcgcgaaggacgagggccaggagcgcggacagaaatcccaggagcccgaagcctccttaagcctgcggtagaaactgccctgactaccgcggaaacaacgcgcgtgc

SEQ ID NO: 261478 - DNA, 906 bp, Homo Sapiens
  misc_feature (115)..(115): n is a, c, g, or t
gccgcccccaggaaagggcgcagagatcgggtcatactgtcaggtataaggtgcggaaaagaggaagccaaaaacatctaggctgaaggcacatgtttcttcaaggttaggcaancaaaagaacattctggaactctaaccacctagtgtaacagagcttacctattaaactctaataaccaaagcatttggcgttttccttctcaacttcgtcctggttgctacatggagtttcatttagaaaagaaaatcacaggcagagatacaaagtcaacaggctccaaaacaaccctgagctgtcccctttacattcatgtcaattaaatacaaaaataaaagtcaaatgtccttccgtccccggtttgcgggacttgttctcaggtggaattcccagccgcccagcgcgaggccagcgagctggggccttaggaagtctgccgccacgtggaggcggtttacattctccaacaattcacttcggcagggaaaatacaaaagactacgtcaaaccagctacatacaaaactgtgaatcagagtcaagcttttgttctccttttaaataaacgcatatttataaatatgaaatactgcaaatacaagctgtctattggagagaggcgtgtgagagagagattatacactgatgggactggtctacgtacacagaaaaaagaaatcctagagttgtttttccttgaaaagggtttacctcgagccagtgaagaggaaggaatcgtggtgtaactgcaatgtccgtccctacagtgaagcctgccaccaggtgtgaacgtgagaattatcttactgtcaatagtttgaaagactgactggctgcgaaaggaagaaaatgcaattgagcactgatggttaaaaacatgttttgctagaaaattcttcatttgta

SEQ ID NO: 261479 - DNA, 1285 bp, Homo Sapiens
  misc_feature (68)..(68): n is a, c, g, or t
  misc_feature (317)..(334): n is a, c, g, or t
tgcagtgggacgaagcagcgtattggggagggccagagcatcggcaccggtgacccagctctcccacncaggccatcgcagggcagcctcagggcaggcgccaccactgctcctgctcagcccgcagtatctgcagttgctgcagctgtgtggcttggtagaaaagtctcaggcactgaggtttacttcaagggagaactgactggtgcccccgtccacactcatcaccctggacacaacctcgggggcttcactaaaggagggaaggatgtggaaactagtctctctcactccccttttgtgcagtttttatcttnnnnnnnnnnnnnnnnnngtcttctgggcaggaattactgataactgttattataaccaatgcagactttaaaatcccacctggacatcgggtgagaggaggagggcaggcagcaaaccgacctgcagacctgcagaggggagccgtgtccagggccactgcgtccccaccagacaacagctactagaagaggaaagtggccctcacaggcagggtgcctgccaccaagcagtcagacaagggggtaaccaagagctcccagccagaaaaacatgggggcagggaggccaaacaaaaagcactgaaaataaagagaaggctgggtggtggcagcatccgcccctccctgtgcgccccaattccaggtgccacgtagaggcgagaggtctttccaacacggcgggggacttgtcaacaggattaggcgtgaggagccgctctgcgtttccagtctggagactgcattcagcctgcagaataccagccgtggcgcccgctctccagggaggaacgtgctgagaagcttcagtgggtcagggagcccaggacagccagccccttgttcctccagggctgcccactatggggcagttacagggaacacactcagcaacgcttctggcttcaggaagggctgggctgggcccggtcctagccagcagagggcaggcgccctaggtcctggggaggctgcacatctcgcagtggcctgtgcctggctggttcatgaacgtgcagtgctgacaggcccacatggctgcagtggccgtgtgtgtggagcccccgacggccccgtactcatggagacctgggagctgcccgccaactgtgctgcacagctgctcgatggtggcccactgctcagacctcttccatgtctgggcgagctcctcatttctggtccgcacggcctccagcagcaagctgatgctgtcccctcgtgccgagaacgccacccaggcctcgata

SEQ ID NO: 261480 - DNA, 606 bp, Homo Sapiens
ggagttcttctttgtggaaacttaagatgtggtgtaaatgattctttccaaaattgtccagcagcttgaatgaggcagtgacaattctgaggtggtttattgggagtccttctacatttctcttagataactctgcactctgggtggctattgtgtagccttactgccccagagtgcctgttagccaaatatttcccctctgataggaatattttctaagaatcagctgataacttgcgtgctggaccttgttatctgtgcccctgggagacacacgttttcttggttttgaaaacctgaaacacaggcaactttacattttggggaattagctgatgcctcctgaagcctgaggaggtggcggggaatatgagcggtgctgtctctctcaaaagtgccctttagatgattccccctcctagggctgcctgcaggggctgtaggcttgggaaagattgtgtaggtgacagtgaatcagaatgaagtggtagattttgtgtagatgcatttgtctgctgtaattttttatatatatattaaacttactgtaactgtacagttcatttctgttgtaaaacatcattaaaccatcttccaagtgttttc

SEQ ID NO: 261481 - DNA, 1203 bp, Homo Sapiens
  misc_feature (1010)..(1010): n is a, c, g, or t
agctgggactgagtcatggcaggaagctgaggagggcgggagatcacaccagacaattataaaagaagagctggtcctgaagctcacaaccgtaacagccaccagacaagcttcagtggccggcccttcacatccagacttgcctgagaggacccacctctgagtgtccagtggtcagttgccccaggatggggaccacagccagagcagccttggtcttgacctatttggctgttgcttctgctgcctctgagggaggcttcacggctacaggacagaggcagctgaggccagagcactttcaagaagttggctacgcagctcccccctccccacccctatcccgaagcctccccatggatcaccctgactcctctcagcatggccctccctttgagggacagagtcaagtgcagccccctccctctcaggaggccacccctctccaacaggaaaagctgctacctgcccaactccctgctgaaaaggaagtgggtccccctctccctcaggaagctgtccccctccaaaaagagctgccctctctccagcaccccaatgaacagaaggaaggaacgccagctccatttggggaccagagccatccagaacctgagtcctggaatgcagcccagcactgccaacaggaccggtcccaagggggctggggcaccggctggatggcttcccccctgggcggccttctccagacaatctgaaccaaatctgccttcctaaccgtcagcatgtggtatatggtccctgggaacctaccacagtccagctactcccacctcacttcgccagggtgagaccctcaatttcctggagattggatattcccgctgctgccactgccgcagccacacaaaccgcctagagtgtgccaaacttgtgtgggaggaagcaatgagccgattctgtgaggccgagttctcggtcaagacccgaccccactggtgctgcacgcggcaggggggaggctcggttctcctgcttccaggaggaanctccccagccacactaccagctccgggcctgcccagccatcagcctgatatttcctcgggtcttgagctgcctttccctcctggggtgcccacaattggacaatatcaagaacatctgccacctgaggcgcttccgctctgtgccacgaacctgccagctactgaccccctacaaagggagctgctggcactg

SEQ ID NO: 261482 - DNA, 1513 bp, Homo Sapiens
  misc_feature (1471)..(1471): n is a, c, g, or t
  misc_feature (1500)..(1500): n is a, c, g, or t
tatcggctgcgggtgcccaaggcgtccaggagtgacctggggctgtggagagcgacccgtggccttgtgtttcaggtacggaggttccggactggacgggcgtcaggaagtcacagacttgtcctctgatgtggccccgcccgccgccgcactaatctcttcggcgtcgtacccgtcggcccagctcgacccgccgcagccccggccccgaccgtggacactgggggtccccgagggcgctgcgacctcctcccgggtgaaatgaaacccgagggcagtcccccttaccgaccccattagagacgtatctgccgtgccaggggtctaggctccagaaacagggagtttaccacctaggatgacttcagtgactagatcagagatcatagatgaaaaaggaccagtgatgtctaagactcatgatcatcaattggaatcaagtctcagtcctgtggaagtgtttgctaaaacatctgcctccctggagatgaatcaaggcgtttcagaggaaagaattcaccttggctctagccctaaaaaagggggaaattgtgatctcagccaccaggaaagacttcagtcgaagtcccttcatttgtctcctcaagaacaatctgccagttatcaagacaggaggcaatcctggcggcgagcaagtatgaaagaaacgaaccggcggaagtcgctgcatcccattcaccagggcatcacagagctcagccggtctatcagtgtcgatttagcagaaagcaaacggcttggctgtctcctgctttccagtttccagttctctattcagaaacttgaacctttcctaagggacactaagggcttcagtcttgaaagttttagagccaaagcatcttctctttctgaagaattgaaacattttgcagacggactggaaactgatggaactctacaaaaatgttttgaagattcaaatggaaaagcatcagatttttctttggaagcatctgtggctgagatgaaggaatacataacaaagttttctttagaacgtcagacttgggatcagctcttgcttcactaccagcaggaggctaaagagatattgtccagaggatcaactgaggccaaaattactgaggtcaaagtggaacctatgacatatcttgggtcttctcagaatgaagttcttaatacaaaacctgactaccagaaaatattacagaaccagagcaaagtctttgactgtatggagttggtgatggatgaactgcaaggatcagtgaaacagctgcaggcctttatggatgaaagtacccagtgctttccagaaaggtgtcagtacagctcggaaaagagaagcatggcaacaattagatccctccaccagctcgaaaactgttgaaagctcagctacagaacccaccctgcatacatggatcctggatctggggatctggcagtgactttatgagaagtttctggcaccaggtgccccaanaggagaggaaatgggaaaaagggccccancacggtggggact

SEQ ID NO: 261483 - DNA, 1563 bp, Homo Sapiens
gcgcaaagcggcggagcgggtcggaggttgcgggaggagcgagcagagggagcgcctccgccaggtgtcgcgcatcctgaggaaggcggcggcggagcgcaccaccgagcgagggcagccggcgggccgagacgcgccgacctgcaaagcggagcagcagggccggagccggcggcacgagcaccagaagcagcgccaccaccaggtgtgcgacgacccggaggagctgcgggggaaggtccgggagctggccagcgccgtccggaacgccaaatacttggtcgtctacacaggcgcgggaatcagcacggcagcgtctatcccagactaccggggccctaatggagtgtggacactgcttcagaaagggagaagcgttagtgctgccgacctgagcgaggccgagccaaccctcacccacatgagcatcacccgtctgcatgagcagaagctggtgcagcatgtggtgtctcagaactgtgacgggctccacctgaggagtgggctgccgcgcacggccatctccgagctccacgggaacatgtacattgaagtctgtacctcctgcgttcccaacagggagtacgtgcgggtgttcgatgtgacggagcgcactgccctccacagacaccagacaggccggacctgccacaagtgtgggacccagctgcgggacaccattgtgcactttggggagagggggacgttggggcagcctctgaactgggaagcggcgaccgaggctgccagcagagcagacaccatcctgtgtctagggtccagcctgaaggttctaaagaagtacccacgcctctggtgcatgaccaagccccctagccggcggccgaaagctttacatcgtgaacctgcagtggaccccgaaggatgactgggctgccctgaagctacatgggaagtgtgatgacgtcatgcggctcctcatggccgagctgggcttggagatccccgcctatagcaggtggcaggatcccattttctcactggcgactcccctgcgtgctggtgaagaaggcagccacagtcggaagtcgctgtgcagaagcagagaggaggccccgcctggggaccggggtgcaccgcttagctcggcccccatcctagggggctggtttggcaggggctgcacaaaacgcacaaaaaggaagaaagtgacgtaatcacgtgctcgatgaagaacagttggcactttgcagatggccagtgtcacggtgaaggctgggttgcccccacgggtctagggagaacgaactctttggggatgacattttcaccgtgacatttttagccatttgtccttgaggaagccccttgcactgctgcggttgtaccctgataccgcctggccatcgaagacacctgcccatcccgcctctgggtcaagaaggggcagccgcaccttttctgtgagaacggaacttcggttatttcaccccccggcctcagaatgggaaccgcccaacgggccctttcctcgctcaccagggccagtctcaggggcctaccggaatttctactactactttaagggaaaaaaggtggaat

SEQ ID NO: 261484 - DNA, 865 bp, Homo Sapiens
gatgaaagagaattctttctcgcctcttataacagaaagaaagaggatggagagggcaacgtttggattgcaaagtcatcagccggtgccaaaggtgaaggcattctcatctcctcagaggcttcagagcttctcgatttcatagacaaccagggccaagtgcacgtgatccagaaatatcttgagcaccctctgctgcttgagccaggtcatcgcaagtttgacatccgaagctgggtcttggtggatcatcagtataatatctacctctatagagagggtgtgcttcggactgcttcagaaccatatcatgttgataatttccaagacaaaacctgccatttgaccaatcactgcattcaaaaagagtattcaaagaactacgggaagtatgaagaaggaaatgaaatgttcttcaaggagttcaatcagtacctaacaagtgctttgaacattaccctagaaagtagtatcttactacaaatcaaacatataataaggaactgcctcctgagcgtggagcctgccattagcaccaagcacctcccttaccagagcttccagctcttcggctttgacttcatggtcgatgaggagctgaaggtgtggctcattgaggtcaacggtgcccctgcatgtgctcagtaagcctgcacgtcattgtgtttttacaagtgggaagttggttctgcagttgggatagtctgtgggtacaagtgtagtcactttgactgctgtgagggaggatgccacagtgataggagacccttgggaggactctatctggcagggggctttgctgagtcacttcctttcctatttccccgtgtataggccagataggcccagtgtggtagctcatgct

SEQ ID NO: 261485 - DNA, 799 bp, Homo Sapiens; identical to SEQ ID NO: 90666
  misc_feature (668)..(691): n is a, c, g, or t
  misc_feature (762)..(762): n is a, c, g, or t

SEQ ID NO: 261486 - DNA, 1747 bp, Homo Sapiens
tgtaccggtccccggatctcgggatatcgtcgacccacgcgtccgcggacgcgtgggctacggaagctgttctgggccagaaagacttccagttggagtcgtagctgcggggagggaatgaatgggcgctgggaacacgcccgcgaggtggggacgcgccggccgtagcgaggtccttagcgtgtgagtggccggggtcgggtcgcttccccgcagcatggaggacgatgcaccagtgatctacgggctggagttccaggcacgtgccttaacacctcaaactgcagaaacagatgccattcggtttttggttgggacgcagtctcttaaatatgataatcagatccatatcatagattttgacgatgaaaacaacattataaataaaaatgtcctcctccatcaagcgggtgaaatctggcatattagcgctagccctgcagacagaggtgtgctgacgacctgctacaacagaacttcagacagcaaagtcctgacatgtgcagccgtgtggaggatgccgaaggaattggaatcaggcagccacgagtcccctgatgattcatccagcactgcacagaccctggagctgctctgtcaccttgacaacacagcccatggcaacatggcctgtgtcgtgtgggagccaatgggagatgggaagaaaatcatttccttggctgataaccatatcctgctgtgggatttacaggaaagctcgagccaggctgtgctggccagctcagcgtccctggaagggaagggacaactgaagttcacctcaggacggtggagcccacatcataactgcacccaggtggccacagcgaacgacaccaccctccgtggctgggacacccggagcatgagccagatctactgcatagagaatgcccacggacagctggtgcgggaccttgactttaatcccaataagcagtactacttggccagctgcggagacgactgtaaggtgaagttctgggacacccgaaatgtcaccgaacccgtgaagaccctggaggagcactcccactgggtgtggaacgtccgctacaaccactctcatgaccagctggtcctcacgggcagcagtgacagcagagtcatcctttccaacatggtgtccatctcgtcggagcccttcggccacttggtagacgacgatgacatcagtgaccaggaggaccaccgttctgaagagaagagcaaggagcccctgcaggacaacgtgatcgccacctacgaggagcacgaggacagcgtctatgccgtggactggtcctcggctgacccgtggctgtttgcctccctgagctatgacgggaggctcgtgatcaacagggtgcccagggccctgaagtaccacatcctgctatgactcccgggcctgggttatccaggtcccattgagtggttttcctcttggcagattctcaaacagttgcagctctttggaggtgactcgtgttccaggtggatccctctctgggagagccgctgttcccttcctgtagcagcagcatttatgaatggggtgaatggggctattgtcgacggcacagctaatgcccgaacccagcccctgtcggcagagacagagccccacattattatgtgaataacaatgttttctgttttaagggtgtcaggagtttcgctttttaaaaaaatgtctgttcctgcagtagtaactcttctttctcttgagagtaaaaaatgaaataaaataaatccacgctgaaaa

SEQ ID NO: 261487 - DNA, 788 bp, Homo Sapiens
attgattcatagggatattaaagcaggaaatattcttctaacagagccaggtcaggtaaaactagctgattttggatctgcttcaatggcttctcctgccaactccttcgtgggcacaccttactggatggctccagaggtgatcttagctatggatgaaggacagtatgatgggaaagttgatatttgctcacttggcgtcacttgtattgaattggcggaacggaagccgccccttttcaacatgaatgcaatgagtgccttatatcacattgcccagaatgactccccaacgttacagtctaatgaatggacagactcctttaggagatttgttgattactgcttgcagaaaatacctcaggaaaggccaacatcagcagaactattaaggcatgactttgttcgacgagaccggccactacgtgtcctcattgacctcatacagaggacaaaagatgcagttcgtgagctagataacctacagtaccgaaaaatgaaaaaaatacctttccaagagacacggaatggacccttgaatgagtcacaggaggatgaggaagacagtgaacatggaaccagcctgaacagggaaatggacagcctgggcagcaaccattccattccaagcatgtccgtgagcacaggcagccagagcagcagtgtgaacagcatgcaggaagtcatggacgagagcagttccgaacttgtcatgatgcacgatgacgaaagcacaatcaattccagctcctccgtcgtgcataagaaagatcatgtattcataaggg

SEQ ID NO: 261488 - DNA, 780 bp, Homo Sapiens
ggggcaggcgcggtggtcggacgacagaccgtgtgtttccaaaatggcggcagcgatggatgtggataccccgagcggcaccaacagcggcgcgggcaagaagcgctttgaagtgaaaaagtggaatgcagtagccctctgggcctgggatattgtggttgataactgtgccatctgcaggaaccacattatggatctttgcatagaatgtcaagctaaccaggcgtccgctacttcagaagagtgtactgtcgcatggggagtctgtaaccatgcttttcacttccactgcatctctcgctggctcaaaacacgacaggtgtgtccattggacaacagagagtgggaattccaaaagtatgggcactaggaaaagacttcttccatcaagcttaattgttttgttattcatttaatgactttccctgctgttacctaattacaaattggatggaactgtgtttttttctgctttgctttttcagtttgctgtttctgtagccatattgtattctgtgccaaataacagtcagttggattcccgaacttccatgccccgctccttgactcctccctgtcggccgcctccggcccttccgaaaacgctttctaaacctttcctcttggcgccgccgcgcccatctaggtaaagcggaacctgggccctaagcctgcttccatagggagaaccctgggtccttgaattaggggcctcgcgattccctcacccaaataaaacaaaacgccccgcggggggcaaaccccgagcgggtttcctgg

SEQ ID NO: 261489 - DNA, 754 bp, Homo Sapiens
  misc_feature (120)..(120): n is a, c, g, or t
  misc_feature (125)..(137): n is a, c, g, or t
gggaaaccacacactccctttcgcgtttcggggagaagaggttcaaaccaagtttgttctgactatccccgggctctttgccagattttgcggcttaaatctcagaccgcgtgcttttgnaagtnnnnnnnnnnnnngttttcggcctgacatggcttagagttgcaattttatctgagagcactaatatcatattatcatgcaaagtagcattgcaacgtagcatagcactcttaacctgtagcatattctttgaaaaagtgcagtcctatggataactagaagccattgatataaagtgtaaggactgaacagtgccttatattattgctaagggaatatgagattaacttcctacaggggccaaaaccagagaaaggcttccagcaacttcgatgaaagtagtttggccacatgtcaagccaattgtttgtactatttatgtacctttttcataactggaattgccaaataagcatggagatctaaatgatgtacttgttagtgtattcattcatattgattgtaaaggattatttttcactcagtactgatgtccttggaaatcttacctggaaacatgtttgcaaaaaacattattgggtctttcatctttttcttggtattacatatttgttcaataaaaattaaacaccctcccttttttttgagtgagggcagggagtacctgaaataagacaatgtttactaaggcaaataattgaaaattaaatctgcactttatggaaatgag

SEQ ID NO: 261490 - DNA, 630 bp, Homo Sapiens
  misc_feature (528)..(537): n is a, c, g, or t
aaggtgggactgagaggggacacttgtggccagcagtgtatctctgacacagtctcaccccgcagggctcctgcagtctcgattcagggtgcttggtgttcccagatggtgtttgagggtcctgacccgacctcattctgctatagccatcagtcccctgctgtggctttggggatcagaacttcccagctagggctcccactgttggactcaggggacggaggcaggctagctgaaggggcagtgcccatgagctgggccccccgcagagcaggctcctctctctgcctggcctccacacctctactggtctccacgcccttgcatgaggtgacaggagctgaaatcacacatcccaggggctgaggcagctgtctgatttggagacttgctctgtggcccagggatccgtgcctcagcccagcctcacagggagtggggaagagagggagtaaatcagtggggcttcccttgtccacaggttatttagaaaaacagaacataataaatataccaattctttccttnnnnnnnnnngtgtttaaatgtgtttttccctgaagatttccagtgtattccacagtgtttaaaaaatagtttcccccaaaaatatatcttgaaaggcatttg

SEQ ID NO: 261491 - DNA, 308 bp, Homo Sapiens
cacaaaagggtaatttgtaatttggtgatttgtatgtagtgtagcacagaaaaaaaattgcacaagtttttccataaatgagaccaaaggttcaaattcatcctgtgtcaggttcaaattcatcctgtgtctgctctgcagccattttagtaagctgggcaaggaggtcatttagaaattgggtttttcctctttcccctgactcttcgcaccaagtcacatccctgatgtagatactcttgggggaggggaaaacatctggctctatgcaaacagggctcatcaaaaatctttatgtgccaaaatgg

SEQ ID NO: 261492 - DNA, 579 bp, Homo Sapiens
  misc_feature (64)..(90): n is a, c, g, or t
gttaatgtggccatgtgattccaagtgtcatgttgctttgtggcaagattgttgtgtgacttgnnnnnnnnnnnnnnnnnnnnnnnnnnnaaaggaaactatttgtgggctataggaaactttctgatgcctccggattgtgttagtagtagccatcaggagggtctccaactaaaacacttgttcctgcttgctcctttcccctctcattgttcagcattcttgtcaagttgcccagcttggagttgtctgtcacgcacatgtgtcctgtggttatagctagaaggacaggagtctcctgctgatgcgtgatagcttaagcttggggagaaggtcttttccactgcctagctaagcagtctggggagagcatggggatcatttctatgtgtgtgggtaatctggtcagtaagattgagacttagttaagattccccttggaaattccttaatgtttattagcttctaactagtgttgtaagtccgatgccagaatttggagatttgagttcttcttttcatggcttttattcactgtgactaataagcttcctaataaatccttgccagacttaaaaa

SEQ ID NO: 261493 - DNA, 842 bp, Homo Sapiens
  misc_feature (592)..(614): n is a, c, g, or t
ggggagcaacgctaggaagggcgggcagaaagggcacgctcttgtgggtgactacaggttaggagaccgttgaacctggaggggccctaggatggaccccgtggaaagattcagagactgcgccctctccctggcgccgcttcccctacacgcggcgggtatattctgttgcagttggcccaggacctgtttccaagactctgccccctcgcacttccgtccctcctggttttgtaaagtgatgctcataggaacccccaccccgcgtgacactactcccagctcctgggctgacttctagtcttctggttgaagctgcgcctttagatgacacgacccaacccacccctggtttccaggcggatgccccggggcctgggagccaacagaaattccttccagttcccctggggtgggggaaccgaagaaaaggaaacggttccagattggaggaggggcccccttgggaaaccaacaacgctttggccttttcaagtttcccgccattggaaggggattttgcaccaaaggggattttctcgggggccctccagcttggggggcccccaaaccttttaggggccccttaacnnnnnnnnnnnnnnnnnnnnnnnatttcgtgaatattttaaccccctttttccactcggtttgtgggcgcaccccacctgtttttctggcttctcgtgttccaaacccccacaaaagtgtgcgtttagaacctcaatttggggggaaaacgctccccccgtggggtggtcgggttctccgcggggataaatctcccctctcggccccccccttttttccatctccttcattcgtgtccgcccggcgcctag

SEQ ID NO: 261494 - DNA, 799 bp, Homo Sapiens
gggagaggcgtgaaactccgcagtgctcagccaagcagggagcaacgctaggaagggcgggcagaaagggcacgctcttgtgggtgactacaggttaggagaccgttgaacctggaggggccctaggatggaccccgtggaaagattcagagactgcgccctctccctggcgccgccttcccctacacgcggcgggtatattctgttgcagttggcccaggacctgtttccaagactctgccccctcgcacttccgtccctcctggttttgtaaagcgatgctcataggaacccccaccccgcgtgacactactcccagctcctggctgacttctagtcttctggttgaagctgcgcctttagatgacacgaccctacccacccctgtttccagcggatgcccgggcctggagcccacagaattcttccagtccctgggtggggacggagaaaggaacgttcagattgagatggcccatggcaccaccacgctcgccttcaagttccagcatggagtgattgcagcagtggattctcgggcctcagctgggtcctacattagtgccttacgggtgaacaaggtgattgagattaacccttacctgcttggcaccatgtctggctgggcaccagactgtcagtactggaagcgcctgctggccaaggaaagcaggctgtactatctgcgaaatggagaacgtatttcagtgtccgcagccctcaagctgctgtcccacatgatgtgcccataaccggggcatgggccttctctatggggcagaatgatctggggctgggg

SEQ ID NO: 261495 - DNA, 1150 bp, Homo Sapiens
caggctggtacggtcggaatgtcgggatatcgtcgaccacgcgtcgccacgcgtccgcagatctctgggtgctgggcggtcatggcgctactagatgtatgcggagccccccgagggcagcggccggaatcggctctcccggttgcgggaagcgggcgtcgctcggacccaggacactacagtttctctatgcgatctccagagctcgctttaccccggggaatgcagcccacagaattcttccagtccctgggtggggacggagaaaggaacgttcagattgagatggcccatggcaccaccacgctcgccttcaagttccagcatggagtgattgcagcagtggattctcgggcctcagctgggtcctacattagtgccttacgggtgaacaaggtgattgagattaacccttacctgcttggcaccatgtctggctgtgcagcagactgtcagtactgggagcgcctgctggccaaggaatgcaggctgtactatctgcgaaatggagaacgtatttcagtgtcggcagcctccaagctgctgtccaacatgatgtgccagtaccggggcatgggcctctctatgggcagtatgatctgtggctgggataagaagggtcctggactctactacgtggatgaacatgggactcggctctcaggaaatatgttctccacgggtagtgggaacacttatgcctacggggtcatggacagtggctatcggcctaatcttagccctgaagaggcctatgaccttggccgcagggctattgcttatgccactcacagagacagctattctggaggcgttgtcaatatgtaccacatgaaggaagatggttgggtgaaagtagaaagtacagatgtcagtgacctgctgcaccagtaccgggaagccaatcaataatggtggtggtggcagctgggcaggtctcctctgggaggtcttggccgactcagggacctaagccacgttaagtccaaggagaagaagaggcctagcctgagccaaagagagagtacgggctcagcagccagaggaggccggtgaagtgcatcttctgcgtgttctctatttgaacaagcatttcccccagggaagtttctgggtgccccactaagtagaataaagaaaaacggttata

SEQ ID NO: 261496 - DNA, 630 bp, Homo Sapiens
  misc_feature (41)..(41): n is a, c, g, or t
  misc_feature (111)..(157): n is a, c, g, or t
  misc_feature (265)..(274): n is a, c, g, or t
tgtctcctactaaaaatacaaaaattaaccgggtgtggtgncgcatgccctgtaatccccagcctactccaggagactgaggcggaattgcccagaaccctggagggcaannnnnnnnnnnnnnnnnnnnnnnnnnnnnnnnnnnnnnnnnnnnnnntgacagaatgagactcagtctcccaccctgccaaaaagtttgcaatgtcggcagcaaagtgcaaacagagccggctctgggtgaaagctttagttatgaaaaataagnnnnnnnnnntccctaagcatttcttaacactagttttaaagaaaaccccctctccaaaggtatgtttctccttcaactttcttgactttgccaggctgtcaggatgcaagctacctactcttttctggatggatcgggacaaagtttttaaacaaagactgtgtcctctccacaagcccttcccaccaccaccaccccagccccccgccgccataattacaggggctgtgaaatggctgttgagtgatggtcacacaaccagaaggcagatgaaaaggtcaggctctaagaggggttcagcctcccagtaccagcctgctgtgcccaggggtgggagtgctgggagaactgtcttccccagacag

SEQ ID NO: 261497 - DNA, 989 bp, Homo Sapiens
  misc_feature (792)..(792): n is a, c, g, or t
  misc_feature (825)..(825): n is a, c, g, or t
  misc_feature (904)..(904): n is a, c, g, or t
  misc_feature (958)..(958): n is a, c, g, or t
  misc_feature (965)..(965): n is a, c, g, or t
agctcttgtagaccccagccctggctgtccgcagggccaggagctgcagccatggcagccaccagcctcccacatgagccccagctcccagccccacacgcccactcctttgcccatgtggtgtcagctctggcctctgcttctacacatggaccctcagaccttgcacatctgttgtttcccttgcagggcagtgatgatgacatgaaatgaggtggggtcactcctggtctcttaggcagcacgatggcctccctgctcaaggccctgcacccaggggcagattgtgggaggcccactggccatggctgggccctatcgcagagagcctgtcagcacggccatttccacacccaggctggctgggaagcaagctacgaggtgctcaaaggccctctatgtctgcaggtagccccgtcccacacaggcgaggatcgttgggcctccttagtagccaaaggaactgaggtccagagcagggaatgtgttgcccagtgtcagcatggtctgctctggggtcaagcgtcttgccctggtcctaagccaccccaagccaaggcatgtccctgggcccatttcctctctcgaggtcttgggttccctatttctgatgtgtgtgaaaggaaggcctgtcctctggggtgaccatgaggctcagtgggaggagctgccaggcttgagctgggacttggcacctggccagcctttttttctatttcattgtaccttgatgggctgtcagttctgaagagaaaaaatacacttagggaatccattcttcctccaccattnttccctgggcagagggaagtggacttacacccntatggtgtgggacatacttgacgctcctccatggaaggcaggcaaagtttttgtttgttttcagggagattgtggggcnttgagggatgtgggtagttgacctcaccagaggagtttgggcatttcctaagtngttgccngggaggcttttaacagagacatat

SEQ ID NO: 261498 - DNA, 875 bp, Homo Sapiens
gggcccggcgcaccgacgcgcctctccggttactaagcggccttggatacctggccgcgggatgctgggcggcgtcaggtaaccatggagaaagagctgcggagcaccattcttttcaatgcctacaaaaaggagatatttaccaccaacaatggctacaaatccatgcagaaaaaacttcggagtaattggaagattcagagcttaaaagatgaaatcacatctgagaagttaaatggagtaaaactgtggattacagctgggccaagggaaaaatttactgcagctgagtttgaaatcctgaagaaatatcttgacactggtggagatgtctttgtgatgctaggagaaggtggagaatccagatttgacaccaatattaactttttactagaagaatatggaatcatggttaataatgatgctgtggttagaaatgtatatcacaaatatttccatcctaaagaagctctagtttccagtggagtcttgaacagggaaattagccgagctgcaggaaaggctgtgcctgggatcattgatgaggaaagcagtggaaacaatgcccaggctctcacctttgtgtatccttttggtgccacattgagtgtcatgaaaccagcagtggcggttctgtctacaggttctgtctgcttcccacttaacagacccattttggctttctatcactcaaagaaccaaggtgggaagctggcagtgcttggttcatgtcacatgttcagtgatcaatatttggacaaagaagaaaacagcaaaatcatgggatgttgtttttccagtggctcacgacaggagacatccacctaaaccagattgatgctgaggacccagagattcttgactacatgattgct

SEQ ID NO: 261499 - DNA, 906 bp, Homo Sapiens
  misc_feature (785)..(785): n is a, c, g, or t
  misc_feature (825)..(825): n is a, c, g, or t
ggaattacttgcagggctaacctagtgcctatagctaaggcaggtacctgcatccttgtttttgtttagtggatcctctatccttcagagactctggaacccctgtggtcttctcttcatctaatgaccctgaggggatggagttttcaagtccttccagagaggaatgtcccaagcctttgagtagggtaagcatcatggctggcagcctcacaggattgcttctacttcaggcagtgtcgtgggcatcaggtgcccgcccctgcatccctaaaagcttcggctacagctcggtggtgtgtgtctgcaatgccacatactgtgactcctttgaccccccgacctttcctgcccttggtaccttcagccgctatgagagtacacgcagtgggcgacggatggagctgagtatggggcccatccaggctaatcacacgggcacaggcctgctactgaccctgcagccagaacagaagttccagaaagtgaagggatttggaggggccatgacagatgctgctgctctcaacatccttgccctgtcaccccctgcccaaaatttgctacttaaatcgtacttctctgaagaaggaatcggatataacatcatccgggtacccatggccagctgtgacttctccatccgcacctacacctatgcagacaccccctggatgatttccagttgcacaacttcagcctcccagagggaagataccaagctccaagatacccctgattcaccgagccctgcagttggcccagcgtcccgtttcactccttgncagcccctggacatcacccacttggctccagacccatggnagcggtgaatggggaagggggtcacctcaaagggacaggccggggagacatcctaccacccagaccttggggccagaataa

SEQ ID NO: 261500 - DNA, 1171 bp, Homo Sapiens; identical to SEQ ID NO: 178159
  misc_feature (335)..(347): n is a, c, g, or t
  misc_feature (539)..(548): n is a, c, g, or t
  misc_feature (702)..(702): n is a, c, g, or t
  misc_feature (838)..(838): n is a, c, g, or t
  misc_feature (1023)..(1023): n is a, c, g, or t
  misc_feature (1031)..(1031): n is a, c, g, or t

SEQ ID NO: 261501 - DNA, 1008 bp, Homo Sapiens
  misc_feature (903)..(903): n is a, c, g, or t
tctaggtagcgaggcctgggtggcgcggaaacatcagccatcgtggagtacgcatacaatgacaaagccattttggagcagaggaacatgctgacggaagagctctatgggaacacatttcagctttacaagtcagcagatcaccgaactctggacaaagtgttagaggtacagccagaaaaattagaacttattatggatgaaatgaaacagattctaactccaatggcccaaaaggaagctgtgattaagcactcattggtgcataaagtattcttggacttttttacctatgcaccccccaaactcagatcagaaatgattgaagccatccgcgaagcggtggtctacctggcacacacacacgatggcgccagagtggccatgcactgcctgtggcatggcacgcccaaggacaggaaagtgattgtgaaaacaatgaagacttatgttgaaaaggtggctaatggccaatactcccatttggttttactggcggcatttgattgtattgatgatactaagcttgtgaagcagataatcatatcagaaattatcagttcattgcctagcatagtaaatgacaaatatggaaggaaggtcctattgtacttactaagccccagagatcctgcacatacagtacgagaaatcattgaagttctgcaaaaaggagatggaaatgcacacagtaagaaagatacagaggtccgcagacgggagctcctagaatccatttctccagctttgttaagctacctgcaagaacacccccaagaagtggggctagataagtctgcgtgtgtgttggtgtctgacattctgggaatctgcccactgggagacgttcagcctacccatgaatgccatccccagcttggcagcaacaggactgcatcctgntgggcaggacggagaagcttcacatggcaaaacatcttgcaggacatctaggtttggagtgggtaatagagcaggtaaaaaggatgaaagaaaatggggagagaa

SEQ ID NO: 261502 - DNA, 1107 bp, Homo Sapiens
gttcggcacaggctcgctgcagcttcccggagccggagcgcagcgcctgcggccgcccgtgccccgccgtcctccttcccgcggccgtgagggagaccgcggctcggccgtagcggagctgcgagttacagaatgtctgaaggggacagtgtgggagaatccgtccatgggaaaccttcggtggtgtacagatttttcacaagacttggacagatttatcagtcctggctagacaagtccacaccctacacggctgtgcgatgggtcgtgacactgggcctgagctttgtctacatgattcgagtttacctgctgcagggttggtacattgtgacctatgccttggggatctaccatctaaatcttttcatagcttttctttctcccaaagtggatccttccttaatggaagactcagatgacggtccttcgctacccaccaaacagaacgaggaattccgccccttcattcgaaggctcccagagtttaaattttggcatgcggctaccaagggcatccttgtggctatggtctgtactttcttcgacgctttcaacgtcccggtgttctggccgattctggtgatgtacttcatcatgctcttctgtatcacgatgaagaggcaaatcaagcacatgattaagtaccggtacatcccgttcacacatgggaagagaaggtacagaggcaaggaggatgccggcaaggccttcgccagctagaagcgggactgaggctgcctcacgtgttgcaagaacagttttgagccattgttaacaatgccttttttcttcacataaagtagttgattacgagggagtcaaattttctttttaaaaaggagcttcaatgatttgtaactgaaatatcaggttctagaagaaactggcgcttaaacaaaatcgcatggatttctttttcagtgacgttcaagtgtttctcacggatggaattctagtcagctgcaggcgggaagccaggcgggtggagcccatgggagcaaagggcgagtggccggtccccgctgtgccaggtgggcaggcaggagcaaggcctgccagggaggaaccgggcgcttccccgccagccgcctttcccagcagccg

SEQ ID NO: 261503 - DNA, 514 bp, Homo Sapiens
  misc_feature (478)..(478): n is a, c, g, or t
  misc_feature (485)..(485): n is a, c, g, or t
tggggcctgagctttgtctacatgattcgagtttacctgctgcagggttggtacattgtgacctatgccttggggatctaccatctaaatcttttcatagcttttctttctcccaaagtggatccttccttaatggaagactcagatgacggtccttcgctacccaccaaacagaacgaggaattccgccccttcattcgaaggctcccagagtttaaattttggcatgcggctaccaagggcatccttgtggctatggtctgtactttcttcgacgctttcaacgtcccggtgttctggccgattctggtgatgtacttcatcatgctcttctgtatcacgatggaagagggcaaattcaaggcacatgatttaagttaccggtgacatcccgtttcacacatggggaaggaggaaggtacagagggcaagggagggtggccgggcaaggctttcgccagctaggaggcggggattnagggttncctcacgtgttttgcaaggaacagttttt

SEQ ID NO: 261504 - DNA, 451 bp, Homo Sapiens
  misc_feature (401)..(401): n is a, c, g, or t
aatggtagtcacttcttggtgctgatacatagatgatctcttgctattttaactcactctttttagctgttttaaaaattgaaagccaaccctagcagaaggtacattttgtggcaggggtcagtacagaagttacaggacctgcttcatgcttttggactcttgtctttctagatttatcagtcctggctagacaagtccacaccctacacggctgtgcgatgggtcgtgacactgggcctgagctttgtctacatgattcggagtttacctgctgcaggtaggtgtgggctgaagtgacgagacttggctctgtccacgttacctgggcgtggtgtttgtggggatgttgttgatccagtctgtcttgcaggaagtggtctctagtaatcaattttcantaaacgccaaatgtcagaaagatctcagtgactgtctttaacgaaacagg

SEQ ID NO: 261505 - DNA, 457 bp, Homo Sapiens
atcacttagaagtaggctttccctcttcctagtagatctcaatgttttataattccttaaaacagctgaaaattgggacaacatactttacgcaatgaacagtagttaaataggaaataaactagttccatgtaagtatacacctagagttttaattacctttataatgtttcttaaaagtgaaacttagatacaattgtgattggatacttagatactaagtgaaacttagtgtaacaattttgatctgttaaattggattttacatgtacatttgaatgccagaatttctaaataaatcccctggttaggaaattttaaaagtcaaagcttgttttcttcaaccactaccttctacattggttgacttagaccgtaagctttttaagtttctcattgtaatttaccttctcatgcagattgctgatgttttaaaaaaaactaccttccgaaaatg

SEQ ID NO: 261506 - DNA, 845 bp, Homo Sapiens
aaggaaaaaagagaaggcgctgtcccgctcttgctacggtggcctggaggagtggcgaaaccggaacagagaatttatcacttctgggactcacagtcgtgatgtctttcaagagggaaggagacgattggagtcaactcaatgtgctcaaaaaaagaagagtcggggacctcctagccagttacattccagaggatgaggcgctgatgcttcgggatggacgctttgcttgtgccatctgcccccatcgaccggtactggacaccctggccatgctgactgcccaccgtgcaggcaagaaacatctgtccagcttgcagcttttctatggcaagaagcagccgggaaaggaaagaaagcagaatccaaaacatcagaatgaattgagaagggaagaaaccaaagctgaggctcctctgctaactcagacacgacttatcacccagagtgctctgcacagagctccccactataacagttgctgccgccggaagtacagaccagaagcccctggtccctctgtctccctttcccctatgccaccctcagaggtcaaactccaaagtgggaagatcagtagggaacctgaacctgcggctggcccacaggccgaggagtcagcaactgtctcagcccctgcacccatgagccccacaagaagacgagccctggaccattatctcacccttcgaagctctggatggatcccagatggacgaggtcgatgggtaaaagatgaaaatgttgagtttgactctgatgaggaggaaccacctgatctccccttggactgatacccttttcccattcattcacaaataaattacaatgggtgctgagaactt

SEQ ID NO: 261507 - DNA, 942 bp, Homo Sapiens
ggcaggcggtaccggtccggaatttccgggatatcgtcgacccacgcgtcgatttgattgggtcttgattaatgtcatctgaactggatttctagttcatgaagaaatctctcccaatacccatttatcctatttttagcaataattcgttaatgattccacttgattttcagaatatgtcctggttgatttgatttgacagcatacattatgaaatttgaaagtaggttaccattttgaggcagttggatataaattatgtaaatatgtatgattatgatttttataaatggcataacatgagtgtactaactaccttctatgctggccatgctacagattttctggaggtatgacaatagtatttttttatgctcagattaaaaatcagcttttcacctctccagtttttccaagtgatactcccagttctagagcaatctacagctgtttatgtgaggtgcccaacacccattcatctcaagtgcttcagtctttggtttatttcatgcactgtgccttcaaaatgaaatttttaaaagggactttaaatgaagttgaatagtagtttttaaaagtcaatttgtaatttatgtgaaatctaactgtaatgaggtcctttctgttttttatatgtaaacagatctactaatcctgtataaaagttattttacgaatggaaaaaacaaagcataccacagcaacacaaaccagacagctagaaccagcgccccactataaacaacacacgtacaaacccgacacgctcaccgaaaagcaggcgcgcgacgcaaaaacccaccggcagccataccgaaagcagcctcagcagcgccccaccacgcccgccaccacgcatgaggaccactgacgcgcgctgcgacccacctcacggacaccgcagacaacaccaaacgcaagaccctctaaccggcccccctg

SEQ ID NO: 261508 - DNA, 372 bp, Homo Sapiens
tttttgataactgccgcaggtgccgccttgcttggggcttggttcagggagggagaagagtgcggtgctcgggtgggagctgggccaaggtgtgatacgagaattctgagggaagaattcatggcggggcctgtggcccgcggctagtgtgactcaggggaatcacggcctgggcgtgggtttctcctgaagccgggtctgctctcccaccttcccagcgcactcggccaccgtttatctccgtctcctaaggcacgtcacggcccctttgtaagactgtcttcgttggaaaacgggagaacagtgctgatggtgggaggattcattaaacagatgggcgtgaaaacaagtagcagctttcctgagttctct

SEQ ID NO: 261509 - DNA, 959 bp, Homo Sapiens
actacttccggtgcgaaccgcctcggccgttccctcgcggagcttactgagcgcggccgccgagcccagctccgccgccgagcgcctgtgccggcacggctacaccatggagcgcccggataaggcggcgctgaacgcactgcagcctcctgagttcagaaatgaaagctcattagcatctacactgaagacgctcctgttcttcacagctttaatgatcactgttcctattgggttatatttcacaactaaatcttacatatttgaaggcgcccttgggatgtccaatagggacagctatttttacgctgctattgttgcagtggtcgccgtccatgtggtgctggccctctttgtgtatgtggcctggaatgaaggctcacgacagtggcgtgaaggcaaacaggattaaagtgaacatcacctttttatagcattaaattcattttttaaaatgataaatgctggagggggccatctgatttgaataaagttgaaagaacatgttacaaaaattcaggaggacttgaaggtgactccttgtcgggccggcctcggccctccaaaaaacttttcaaaaccatttcttttggcgccgcgggcccccaataggtaagggaaacctgggtcataacttgttttcccaggaagaaccccgggtcatgaactaagggctttggaatcccccacccaataaaaaaaccccccggggggcaaaccgaaccgtttctgaaaccaatcccgaatgggaatttttgaagggcccttcccggggaaccttaccaccggggaatcccccagccgaagctccgatattcacaaataaacgccccccgcccctgggccaaatccatccggaagagaacggggggggaaacttctttctaggccattttttggccgcacccggggaaaacctctttcccaaaaacaggggatcgtaagtgaaaccctggaaa

SEQ ID NO: 261510 - DNA, 432 bp, Homo Sapiens
tcgacctgcgctccgcgctctggcgctacggtctggccgtcggctgcggcgccatcggagccctcgtactcggtgctggtcttctcttctctctccggtctgtgcgctcagtggtgcttcgagctggagggcagcaggtgaccctcaccactcatgccccctttggcttgggggcccatttcacagttcctttgaagcaggtatcttgcatggcccaccggggtgaagtccctgccatgctacctctgaaagtcaaaggccgacgcttctatttcctcttggacaaaactggacacttccctaacacaaaactctttgacaatactgtgggtgcctaccggagcttgtgaagaaatgacctcaagtcactcacctctccaagaggaggataaaaactgaaccttggggagccaggtgtgttggttcacacct

SEQ ID NO: 261511 - DNA, 1867 bp, Homo Sapiens
  misc_feature (1505)..(1562): n is a, c, g, or t
aggtagcgaggcctgagtggcgaattcggcacgagggagggcatcatcccagccaactacgtccagaagcgggagggcgtgaaggcgggtaccaaactcagcctcatgccttggttccacggcaagatcacacgggagcaggctgagcggcttctgtacccgccggagacaggcctgttcctggtgcgggagagcaccaactaccccggagactacacgctgtgcgtgagctgcgacggcaaggtggagcactaccgcatcatgtaccatgccagcaagctcagcatcgacgaggaggtgtactttgagaacctcatgcagctggtggagcactacacctcagacgcagatggactctgtacgcgcctcattaaaccaaaggtcatggagggcacagtggcggcccaggatgagttctaccgcagcggctgggccctgaacatgaaggagctgaagctgctgcagaccatcgggaagggggagttcggagacgtgatgctgggcgattaccgagggaacaaagtcgccgtcaagtgcattaagaacgacgccactgcccaggccttcctggctgaagcctcagtcatgacgcaactgcggcatagcaacctggtgcagctcctgggcgtgatcgtggaggagaagggcgggctctacatcgtcactgagtacatggccaaggggagccttgtggactacctgcggtctaggggtcggtcagtgctgggcggagactgtctcctcaagttctcgctagatgtctgcgaggccatggaatacctggagggtaacaatttcgtgcatcgagacctggctgcccgcaatgtgctggtgtctgaggacaacgtggccaaggtcagcgactttggtctcaccaaggaggcgtccagcacccaggacacgggcaagctgccagtcaagtggacagcccctgaggccctgagagagaagaaattctccactaagtctgacgtgtggagtttcggaatccttctctgggaaatctactcctttgggcgagtgccttatccaagaattcccctgaaggacgtcgtccctcgggtggagaagggctacaagatggatgcccccgacggctgcccgcccgcagtctatgaagtcatgaagaactgctggcacctggacgccgccatgcggccctccttcctacagctccgagagcagcttgagcacatcaaaacccacgagctgcacctgtgacggctggcctccgcctgggtcatgggcctgtggggactgaacctggaagatcatggacctggtgcccctgctcactgggcccgagcctgaactgagccccagcgggctggcgggcctttttcctgcgtcccagcctgcacccctccggccccgtctctcttggacccacctgtggggcctggggagcccactgaggggccagggaggaaggaggccacggagcgggaggcagcgccccaccacgtcgggcttccctggcctcccgccactcgccttcttagagnnnnnnnnnnnnnnnnnnnnnnnnnnnnnnnnnnnnnnnnnnnnnnnnnnnnnnnnnncaagataaggagaaagaaagtacccagcaaatgggcattttacaagaagtacgaatcttatttttcctgtcctgcccgtgagggtgggggggaccgggcccctctctagggacccctcgccccagcctcattccccattctgtgtcccatgtcccgtgtctcctcggtcgccccgtgtttgcgcttgaccatgttgcactgtttgcatgccccgaggcagacgtctgtcaggggcttggatttcgtgtgccgctgccacccgcccacccgccttgtgagatggaatcgtaataaaccacgccatg

SEQ ID NO: 261512 - DNA, 671 bp, Homo Sapiens
cgctttacccaaagttggccttatagccttcgtcatcaactcactcagctcgtgttttggcttcctcgatcctactctgtctctctttgttttggagaagttcaatttaccagctggatatgtgggactagtattcctgggtatggcactgtcctatgccatctcttcaccactatttggtctcctaagtgataaaaggccacctctaaggaaatggcttctggtgtttggcaacttaatcacagccgggtgctacatgctcttagggcctgtcccaatcttgcatattaaaagtcagctctggctgctggtgctgatattagttgtaagtggcctctctgctggaatgagtataattccaactttcccggaaattctcagttgtgcacatgaaaatgggtttgaagagggattaagtacattgggacttgtatcaggtctttttagtgcaatgtggtcaattggtgcttttatgggaccaacgctgggtggatttctgtatgagaaaattggttttgaatgggcagcagctatacaaggtctatgggctctgataagtggattagccatgggcttgttttatctactggagtattcaaggagaaaaaggtctaaatctcaaaacatcctcagcacagaagaggaacgaactactctcttgcctaatgaaa

SEQ ID NO: 261513 - DNA, 778 bp, Homo Sapiens
gcagcggcgaggacccgggtctggcgctgtgggccgggagccgtggggcggcatggaggggctggttgtcgccgccggcggggacgtctccctgcacaacttcagcgcgaggctgtgggagcagctggtccacttccacgtcatgcggctgacggactcgctgttcctgtgggtgggggccacgccgcacctgcgcaacctcgccgtggccatgtgcagccgctacgactccatccccgtgtctacctccctccttggagacacttccgacacgacctctactggccttgcccagcgcctagccaggaagaccaacaaacaggtgtttgtcagctataaccttcagaacacagacagtaacttcgcattacttgtagaaaacaggatcaaggaagagatggaggctttccccgaaaagttctagctgagtggcagaagtgagaatttgtaaacttatgtacaatgtacgtgtaaataaatggattgaatttcagtttgtcatcaggccgcgctcccgttttgtttttaaggggttaatcttttgagcttccttctcagcagtgtgtgggccaaaaggctcatactgacccacctggtgaaggagaggcaaagtgggcagtatatacttcctcatttggctgtgagtgatagagggatgaaatgggatttttgttgggattgaagactgtaatctaagagtttcaatcagacatgactgtaacgtgcatcttcaattagaattaaagtgatatataaatatgctttagatttgtgtgtg

SEQ ID NO: 261514 - DNA, 975 bp, Homo Sapiens
tgtcaaaagaacatccacctctggacacctacggacggcggctcctggcacgtggaccagcggccattcgtgggccacacacgctctgtggaggacctgcagtggtcaccgactgagaacacggtgtttgcctcctgctcagctgacgcctccatccgcatctgggacatccgggcagcccccagcaaggcctgcatgctcaccacagccaccgcccatgatggggacgtcaatgtcatcagctggagccgccgggagcccttcctgctcagtggcggggatgatggggccctcaagatctgggaccttcggcagttcaagtctggttccccagtggccaccttcaagcagcacgtggcccccgtgacctccgtcgagtggcacccccaggacagcggggtctttgcagcctcgggtgcagaccaccagatcacacagtgggacctggcagtggagcgggaccctgaggcgggcgacgtggaggccgaccccggactggccgacctcccgcagcagctgctgttcgtgcaccagggcgagaccgagctgaaggagctgcactggcacccgcagtgcccagggctcctggtcagcacggcgctgtcaggcttcaccatcttccgcaccatcagcgtctgaggcgtcccactggctctgatcttgcttcctgcttggaaactgaagtcgaattgggctcccctggaaagagttcattcaagtctgttgactgagactggccggcctgtgggctgccgtgatggattctgtttgacgtattgttcctctaaaaggcctggctctgatccagtgaccccctctcccaaaaaaactcgggttaaacaaaggctctgtaaaaaccactcccaccccacagaacttgtgggggaccctggggggtgggcccttggggtgttccgaaaattccctttcccggtcaaaccttggggaaacccaattttagaaccgtaggggtct

SEQ ID NO: 261515 - DNA, 939 bp, Homo Sapiens
aaaaaaagtcccgggactgggaagaaacggcggccgggagggggctccggggaccatggggctcctgaccattctgaagaagatgaagcagaaagagcgggagctgcgactgctcatgcttggcctggacaatgctggaaagacaaccatcctgaagaagttcaatggggaggacatcgacaccatctccccaacgctgggcttcaacatcaagaccctggagcaccgaggattcaagctgaacatctgggatgtgggtggccagaagtccctgcggtcctactggcggaactactttgagagcaccgatggcctcatctgggtagtggacagcgcagaccgccagcgcatgcaggactgccagcgggagctccagagcctgctggtggaggagcgcctggccggagcaaccctcctcatctttgctaataagcaggacctgcctggagcactgtcctctaacgccatccgcgaggccctggagctggactccatccgcagccaccactggtgcatccagggctgcagcgccgtcaccggggagaacctgctgccgggcatcgactggctcctggatgacatttccagccgcattttcacagctgactgaaccactccagatgccccccacctagcagtccaggtccctcaaccttcaccaaacactacccatggggggttgggagtcagccggccaaactaacactccccctcctccaccccagcctgctgctgctactgctgcccgctgctgctctgtggccacccggctcccatggcgggagggctgtgccctggctgtctctctggctcctgacctggcctttggctaccataccaagaagagagggctgggcggggaggagctgctactgctgctaccgaggctgtgggcctcatccttcactcagttgtgaaataaaccgctccttgccccga

SEQ ID NO: 261516 - DNA, 648 bp, Homo Sapiens
  misc_feature (514)..(514): n is a, c, g, or t
  misc_feature (578)..(578): n is a, c, g, or t
  misc_feature (610)..(610): n is a, c, g, or t
  misc_feature (624)..(624): n is a, c, g, or t
gggatgctccgcgcgcgttccggtccgttccccctcacgggagtcctccgcccgggcgtccggaacagtcgacggcagactccggcccgctgagccacccgaggggtcccgtggcctccgcggacccggaatctgggccctcgcggacccgcgccccgcccagtcgccccagggcttccccacacccacggagtgaagtcagccgcggccctgcctgggaggaacttaccgtctaccgggaaaggtggccagcagatgtgtcgggcctggtgagagggtgaggcgagacggcccgatcgcccagggccccggaagctgcggaggtcacccccgcctggccttagctcagggacaccctggattcacgtgggagcccctgctcctgcctcccccgtcccaccactgaggctgttgggccaggccagtcatgctagaacgtaagtcgtagggcagggacggtgggagaactgggttaagatgcacaggcccaggtccccgagtgttgccagggttnggcctgggaggttgttgtttgttgaccagttgacctccaggatcccaacaccctgggttccttnattttggagaaaccctggggtttgggattttnaggttatttaagantcaagagggaagatttttccacaa

SEQ ID NO: 261517 - DNA, 562 bp, Homo Sapiens
ggcccatcaaatgggtaggagtccccatgagctcctcgcgcaaagccaatcatgatgtcagcagttccccatacaactttcctgaaatgcagggggatctctttgccccacatgtttaaagcctttgacactaatcgatccactgtaatatgcggtaagtctcgagtatatgatacgatcctgtaggtgaccactttggaagtccattttgggctatttggaaatagtgagtattctgcaacatctggcactccacatctgggcttctgcattatttctatgacgcgggagtttaacattccagttataggtaggccaaagaatttttgcatctccttgagtttggcttctaaactgttggcattttttgtttctgagtcatagagataaaatctcttgagatagtcctgagcctgttcccactgtagctcactcatgcctcccgcctcctgaggcagcggcagggccaggctgccaggcagcaggcacacagcacacagcacggtgagtcgcatagctgccgtccagagacaattgttcttggacctatggttgatttggt

SEQ ID NO: 261518 - DNA, 1305 bp, Homo Sapiens
  misc_feature (1254)..(1254): n is a, c, g, or t
  misc_feature (1293)..(1293): n is a, c, g, or t
attactacagggcaggaagggcacgttctcatcagcatggatcagctggaaaatgcaaaaatggagcacacaaatgcatctttcgataccttcttctgtgagacaagagctgggaagcatgtgcctagagcactcttcgtggacttggagccaactgttatagatgggatccggacgggccagcaccgttcactcttccaccccgagcagctccttagcggaaaggaggatgctgccaacaattacgcgcgaggccgttactctgtggggtcggaggtcatcgaccttgtgctggagaggacccggaagctggcagaacagtgtggtggacttcaaggatttttgattttccgaagctttggaggaggcactggttcaaggtttacgtctctcttaatggagaggctcacaggagaatatagcagaaagactaagctggagttctcggtctacccagcccccaggatctccactgccgtggtagagccttataactctgtcctcaccacccactccaccacagagcacacggactgtaccttcatggtggacaacgaggccgtctatgatatatgccatcgtaaactcggtgttgaatgcccctctcatgccagcatcaatagattggtggttcaggtggtatcttccatcactgcctccctccggtttgaagggcccttgaatgtagacctaattgaattccagaccaacctgggtaccttatccgagaatacatttccccatgacagccttcgcccccatcgtctctgctggacaaagcctaccatgaggcagttctctgtgtcagacatcaccactgcttgctttgagtcctccaaccagctggtcaagtgtgatcctcggcttgggaagtacatggcctgctgcctactctatagaggggatgtggtccccaaggaagtgaatgcagcaatcgcagccacgaagtcgaggcactctgttcagtttgtagattggtgtccaactggtttcaaggtgggcatcaacaatcggccgcccacggtgatgccgggtggggacctggccaaagtccaccggtccatctgcatgctgagcaacaccacggcgattgtggaggcctgggcccgcctggaccacaagtttgacctcatgtacgccaagagagcatttctgcactggtacctcagagaaggcatggaagaagcagagttcttggaggccagggaagatctggcagccctggagagggactatgaggaagtggcgcaaagnttctgaggcatgtatgatgggtgcaaatgaatgtcaagntaaaatggcatg

SEQ ID NO: 261519 - DNA, 1564 bp, Homo Sapiens
accgttcttttaactgcgcaggcgcgccggaagcacctagagagcggcgcgtgcgcagcgggagtcgaagcggagatcccggggtcgcgcgagagccgcaagcggagttggtgggcgctatgctatcacccgaggcagagcgagtgctgcggtaccttgtagaagtggaggagctcgccgaggaggtgctggcggacaagcggcagattgtggacctggacactaaaaggaatcagaatcgagagggcctgagggccctgcagaaggatctcagcctctctgaagatgtgatggtttgcttcgggaacatgtttatcaagatgcctcaccctgagacaaaggaaatgattgaaaaagatcaagatcatctggataaagaaatagaaaaactgcggaagcaacttaaagtgaaggtcaaccgcctttttgaggcccaaggcaaaccggagctgaagggttttaacttgaaccccctcaaccaggatgagcttaaagctctcaaggtcatcttgaaaggatgagactcaagaaccaagatgggggaccagcaaccccccagggtcatggaggacccaggaccctccaaccttgacacctgtaaggacaggatctgccctgtaaggggccagccgtcaggaatctggccatgaaaacctctttgtagtgcttggctactctgtgatggcaggagggaaccttcagcctgtctggctgctggacctggacaccagggctcggtggacacaagatctattgacgggccttggtagccaccagtgggtgtgtggggcagtggctgtgggggtgtaagaatgactgcaacaggcacttcccaacaatggcctgctgttcacatggaccctgagcaaggaaggaggggagggaggggcagagtggagtgtcattccagcattcctctcagaagggagagaggttttcaggctggtgccatgcgattggaataaagcaggaggctcatgggtgggtgctgaatgaagaacagaatcttggtgctttgtggctcaccacagccatctgtgggggggagggacacacagcctcccggccagttccaattttgcccttttttccccttgcttggattcccaaaaggtagagggcctggccttaacaagcccctttgcgtgggccacctcttttacctccaggaagggcccctttgccaaaagtcccctggcaccaaggcccctggggggggaggtggaatggcccccctccttaaccaataatgaacactcgggttcacaggatgtggcctttccagtgcccgctttatgaaagaggggcgggccccgacaccaacaccctgggtcgggttaaatgggctggccctttccgtggggacctggaagggaccccaaaattgaaacttggccggtaaaacccacaaacctctctatagtggttccactcaagggggtcgcaataaagggggtaggccgcgcggacgaaactacaaacgcatacatgctacgtcgcgccctcttttcgcgccgccgccctccgccccctctagtaaaactgtattctgagagccgttggc

SEQ ID NO: 261520 - DNA, 1650 bp, Homo Sapiens
  misc_feature (23)..(24): n is a, c, g, or t
  misc_feature (48)..(48): n is a, c, g, or t
  misc_feature (63)..(63): n is a, c, g, or t
  misc_feature (77)..(77): n is a, c, g, or t
  misc_feature (80)..(80): n is a, c, g, or t
  misc_feature (156)..(156): n is a, c, g, or t
  misc_feature (208)..(225): n is a, c, g, or t
gcaagcgctgccgcttccgcgcnnccccccctgagggccccccgtttnacgccactcgccgcnacacccctgcggcngcnccgcccgctcctgaccacgggccaatctctccgacgtccggcccctggtggcccccgtgggttcatttgaacgtcnccgtcgtacgctaagcacccttatcaggcgccgacgcaccccccccattccnnnnnnnnnnnnnnnnnnttggaggaaccccttccggaccagtccccagttattaagttccagtgtcaataattcccatcctgcaaccaaagtgtatggaccatgatctctttgccaaaactttcagtgtcaaaaaggaaattaaggccatcagattggcagcttaaaaattcccataaaggaaatataagaatattctgtgcttctgagaaggctctgcactgtatccaggtaaggattcccatacttctttattttgaggaagccagtggaaaattttccataattgcacagcttctattggatgctcttggggttccctgctggtggaaaagttcttcctcaacaaccactccagctgcttcttcgtcctcctcctcttcttcaggtatggttgttttaaagactgtacttctttgagcaacctcctctccctgagaatttttcaatataaccttcacatcttcgccagtgccccacgagttctggttcttccagatgaggtcagttggggggctggctgtgacaccagcgtttgcagcccaaattgtaacagtctggcctgccttcagcacatatcttgaggtatatttataactgactgatgtgtctccaatttttatgatcatctcccagcctcccattggttgatcctgttcagaagtgttcttcaagcggataaatttcccatcaacatcaatttcttcgatgcaaacatttccagtggctgaggcggaatgagagatgctaacactactactcgcctctgattattccacatcaaccctcttccgctttcctctagttgtacgtacactacgacttgaggatgctcgggatactgtcacacgggaagaagggcttggagacagcttcaacctctcttcttcgccttctaagagtttcctgtaagcactgatttccatgtccagggctaactttacatcaagaagctgttcatagtcattcagctgttgctgcatttgatcccttatttccgccatctctctctctttgtctgtcagcatgcgacgagagttgtctttttctttagcaagcaagtcctctaattcttgaatcctttccaaacatgctctagacttaagatgcaaggaaacatatttactttctaggaacattccaacattagcaccaggcagctattttaaatcatttcctagactggaaaacagtacaaccctatggaatctctaactcactagaattcaagagattttaagaaattaaaacccaaaattcctcaaatacaaaacacagacctcaggatagttttggctgataaaagaataaaagacatattccacaaatgtaagttctgtaaatatacatataatttttctgtacttagccaaaaaaatgttaagatgtggttttggtaaaagtcaagtctggctcccttacaaagcctttacttccaaaagt

SEQ ID NO: 261521 - DNA, 1019 bp, Homo Sapiens
aaaaaagatggcggcggccaggtgttggaggcctttgctacgcggtccgaggctttcattgcacaccgcggctaatgccgccgccacggctacagaaacgacctcccaagacgtcgcggcgacccccgtcgcgcggtacccgccgattgtggcctccatgacagccgacagcaaagctgcacggctgcggcggatcgagcgctggcaggcgacggtgcacgctgcggagtcggtagacgagaagctgcgaatcctcaccaagatgcagtttatgaagtacatggtttacccgcagaccttcgcgctgaatgccgaccgctggtaccagtacttcaccaagaccgtgttcctgtcgggtctgccgccgcccccagcggagcccgagcccgagcccgaacccgaacctgaacctgcgctggatctcgcggcgctgcgtgcggtcgcctgcgactgcctgctgcaggagcacttctacctgcggcgcaggcggcgcgtgcaccgttacgaggagagcgaggtcatatctttgcccttcctggatcagctggtgtcaaccctcgtgggcctcctcagcccacacaacccggccctggccgctgccgccctcgattatagatgcccaggtcatttttactgggtgcgtggtgaagaaattattcctcgtgggcatcgaagagggccaaattgatgactttgcgatacccgtatagatgatacacctaaacaacccgaattccgaatatccaaagcaacctccccagagttgtggggccaattggaattattcctggttcctaaacgaaatcccccccttatagaactggagaaccaggaacaaacctttccattaattcccaaccgggagctagggacacacctcattatttggttggcctctcaaaacctgccaaaatccttggttggttaaggggccacacccagattttcatccggggtaccccggaagaattatagaaaggcaaagggccttctccgagaaaaaaaccttgggcagagtc

SEQ ID NO: 261522 - DNA, 182 bp, Homo Sapiens
tacatacgaaataatagcatttaacaaatgtaggtagaattttaagtatcatgttaaaattaggatacgaaatgcctctgctgacattcttgttactcttttctccacagtcaaaacctgaatcagaatatttcaaaagagaggaaataaaagttcagcttaaaactgttctgccctaaaaa

SEQ ID NO: 261523 - DNA, 1556 bp, Homo Sapiens
  misc_feature (362)..(376): n is a, c, g, or t
  misc_feature (856)..(1042): n is a, c, g, or t
tcagcacgcacacaacacacaagggagagaacccccagatgagaaaataggaaggagcaatcatttgtagatgggtgaaaaaagaatgaggttcaagggagcgtgcaccaggtgaggtgagcgtgtgtgctctcagggaagggcccaggatcccatgcctgggaggagctgccagagagaagcaaaaaggcggctgtggatcgccctgggctgggcaccagtgacaggtcaggatctccaaacatggacgtcctcccctccaaatccagaagctcccagaaggtgtccttaactgcaaagctgtgcagggtactcctccagatggaatcaggaagtcgagacaccatcccaggtgtgtgtannnnnnnnnnnnnnnacagggaggatacagaagtattgcagcccagatcccctatcagggggacagctggtgggcaaagcagccaccccacagccttgtggctagagtacagtggggtggaccctccagccccaatagccctagtacccagctggcagggttgcccacccctgctgtccacctgctccatcctctagggttccacaggcccctgaccgcacagggaggctggggccagcctggtctcccaggcctgaggacatgcctcccaccaaatgtcccctgctccagtcccactcctgtcactccacgctctgcactggggagaaaacgggaggtgctcgtgctggccctgggtgggagcggggagtcctggtgagaccccggtgagatggaccatcctgcccgcgtgggggatcccctttcccacatccgtgctgtgtcattgttgctctgcttcctttcaatgtgtcagtgcctgggggggaggggcannnnnnnnnnnnnnnnnnnnnnnnnnnnnnnnnnnnnnnnnnnnnnnnnnnnnnnnnnnnnnnnnnnnnnnnnnnnnnnnnnnnnnnnnnnnnnnnnnnnnnnnnnnnnnnnnnnnnnnnnnnnnnnnnnnnnnnnnnnnnnnnnnnnnnnnnnnnnnnnnnnnnnnnnnnnnnnnnnnnnnnnnnnacctgacctttatccaccccgcactccagccaccgcgcactccctcatcataaacagacccacccgcaaaagtctccgcgcagtacaaccctagagtgaacactaactagagcgtcagcgcccctcgtcccgccccacccacccccatcatcaacagcaacgcccaccctcctcttattccgaccccctataactacaccgctcgcccaccctacctatgcctctccaccttcgcccccctctctctccctctccctgtacctcgccgctcctccgcctctataccatacaccgcacacccctcccggccaccaccgcgtcattatgagtggcgacacaccccgatgagttgaccccctccgccgccctcctgaatgtcccaccgatatctccctcctcctaccacccacatctggtcttcttctctcatgtcaccacgagaccactcccgccacagaaaggagacgcctcgcactcccccccctctagcgcctctgtcataacctatacaacc

SEQ ID NO: 261524 - DNA, 474 bp, Homo Sapiens
cgtgacacagtgagacccggcactttgctccatcacttctttctgacacatgtcttgaacgttcaccgtgcaattcacaatgaactcgggggaggagcagtcgttgttcagctggaattcttcacactggtagcactggatttgcagcgcaaagccttgcggactcccggggatgccccggtgctatcttcgccttccttcccgagccttgcagcaggtggtgcgggagaccgcttgcccgccggagtgcgttggtgcccccgcccccaatccgcacattcccatcccctttccgcacatccttagggagcatccatttccgtggaaatcgcctcctaagctttagctcctcttcacccttttctcccccggccacttctgggggcagctctctcacgccgggacgctgatcatttatttctgcatcctcccagcagagctggtctgtaaaggggcttaaatgactttctttgt

SEQ ID NO: 261525 - DNA, 476 bp, Homo Sapiens
  misc_feature (138)..(178): n is a, c, g, or t
  misc_feature (204)..(204): n is a, c, g, or t
  misc_feature (209)..(209): n is a, c, g, or t
ctacaagaaattttttaaaaatgagcccaagtgtggtggtgcatgccctgtagttcccagcctacctcaggaccactgaccgtaggagggttgccttgagactgagagttggaggctgcgatgagccatgaatgcccnnnnnnnnnnnnnnnnnnnnnnnnnnnnnnnnnnnnnnnnncaaaaaaaataagttctggttgtcantgaantgggataaacagagagcttgatgctttctgccttctgtctcaggtgatgcattgcacatttgggatatttggaaaggaaatgaggaaagaaattagggcctcctctgatctctcgctatctgcgggtcctgtccttttctcaagaccttcaccattactggtgttttcctgtcttctctttagtatgatccctcaaaacctcactaactggaaggatgattttgtctcagtttgtactcctaaataaaaagtaaacatgacacctct

SEQ ID NO: 261526 - DNA, 1043 bp, Homo Sapiens; identical to SEQ ID NO: 5500
  misc_feature (955)..(963): n is a, c, g, or t

SEQ ID NO: 261527 - DNA, 720 bp, Homo Sapiens
  misc_feature (567)..(625): n is a, c, g, or t
  misc_feature (628)..(640): n is a, c, g, or t
  misc_feature (642)..(649): n is a, c, g, or t
  misc_feature (662)..(677): n is a, c, g, or t
gggagggcgcctgtgcttgaggttgggggttgcgtcgctctctggtaaaggcgtgcaggtgttggccgcggcctctgagctgggatgagccgtgctcccggtggaagcaagggagcccagccggagccatggccagtacagtggtagcagttggactgaccattgctgctgcaggatttgcaggccgttacgttttgcaagccatgaagcatatggagcctcaagtaaaacaagtttttcaaagcctaccaaaatctgccttcagtggtggctattatagaggtgggtttgaacccaaaatgacaaaacgggaagcagcattaatactaggtgtaagccctactgccaataaagggaaaataagagatgctcatcgacgaattatgcttttaaatcatcctgacaaaggaggatctccttatatagcagccaaaatcaatgaagctaaagatttactagaaggtcaagctaaaaaatgaagtaaatgtatgatgaattttaagttcgtattagtttatgtatatgagtactaagtttttataataaaatgcctcagagctaaaaaannnnnnnnnnnnnnnnnnnnnnnnnnnnnnnnnnnnnnnnnnnnnnnnnnnnnnnnnnnccnnnnnnnnnnnnnannnnnnnnaaaaaattgtggnnnnnnnnnnnnnnnnaaaaattttttaaaaaaccttttttgggggccggggccccccc

SEQ ID NO: 261528 - DNA, 1264 bp, Homo Sapiens
  misc_feature (62)..(62): n is a, c, g, or t
  misc_feature (947)..(962): n is a, c, g, or t
  misc_feature (1058)..(1122): n is a, c, g, or t
  misc_feature (1249)..(1249): n is a, c, g, or t
ttcggcacaggggggttgcgtcgctctctggtaaaggcgtgcaggtgttggccgcggcctcntgagctgggatgagccgtgctcccggtggaagcaagggagcccagccggagccatggccgtctacgttttgcaagccatgaagcatatggagcctcaagtaaaacaagtttttcaaagcctaccaaaatctgccttcagtggtggctattatagaggtgggtttgaacccaaaatgacaaaacgggaagcagcattaatactaggtgtaagccctactgccaataaagggaaaataagagatgctcatcgacgaattatgcttttaaatcatcctgacaaaggaggatctccttatatagcagccaaaatcaatgaagctaaagatttactagaaggtcaagctaaaaaatgaagtaaatgtatgatgaattttaagttcgtattagtttatgtatatgagtactaagtttttataataaaatgcctcagagctacaattttaaaaaatgatttagcacaagctaaatctcaaagccttggtataattttcttgtttaaatttggggattttaaatcagattatagtttagaatatttgcgtattaattatgggcaagcacacaccttctgaatagaaatattgttcattactcatttagcagataatttgggacctatgtctacttttcaaggcaaagtgaagatgacagtccttgctctcagggagcccccactttaatgggagactgataaactggtaattagactgtgataaatagtatgatgggaaattagcttaagctgtttaagtaggggactcttcttattccggtgggaaaggctgttccaggtacaggcaactggcctggcaacttggatacttggaaccttgtatttaaaagtgaatttaaccacaactgagacctaagaaattgacctagggnnnnnnnnnnnnnnnnattctatgtacatataaaccatttttatttcatgcattaaaaatagtatgataaagatttcagagtacaggtctgtacaatcacagttcattgcannnnnnnnnnnnnnnnnnnnnnnnnnnnnnnnnnnnnnnnnnnnnnnnnnnnnnnnnnnnnnnnnatgagtatttacattgtattcagctagccccttaaaggtaatgaccatttataaattattccttcagttggctatttcttgacataatcaaacttctgcaattggtatgattaagcttaaaccctgntagcaaaactgaaaa

SEQ ID NO: 261529 - DNA, 756 bp, Homo Sapiens
  misc_feature (356)..(371): n is a, c, g, or t
  misc_feature (434)..(537): n is a, c, g, or t
agtttagaatatttgcatattaattatgggcaagcacacacttctgaatagaaatattgttcattactcatttagcagataatttgggacctatgtctacttttcaaggcaaagtgaagatgacagtccttgctctcagggagcccccactttaatgggagactgataaactggtaattagactgtgataaatagtatgatggaaattagcttaagctgtttaagtagggactcttcttattcggtggaaaggctgttccaggtacaggcaactggcctggcaacttggatacttggaaccttgtatttaaaagtgaatttaaccacaactgagacctaagaaattgacctagggnnnnnnnnnnnnnnnnattctatgtacatataaaccatttttatttcatgcattaaaaatagtatgataaagatttcannnnnnnnnnnnnnnnnnnnnnnnnnnnnnnnnnnnnnnnnnnnnnnnnnnnnnnnnnnnnnnnnnnnnnnnnnnnnnnnnnnnnnnnnnnnnnnnnnnnnnnntatttacattgtattcagctagccccttaaaggtaatgaccatttataaattattccttcagttggctatttcttgacataatcaaacttctgcaattgttatgattaagcttaaaccctgttagcaaaactgaaaactgaaatgttctcaatatcaacatatttaatttggactctttagaatttatacactaataaatttaaatgatgtttaaaggc

SEQ ID NO: 261530 - DNA, 914 bp, Homo Sapiens
  misc_feature (656)..(664): n is a, c, g, or t
  misc_feature (680)..(740): n is a, c, g, or t
gggagtgcgaatcatgggaggcggctggtggtgggctcgggccgctcgccttgcccgtcttcgcttccggaggtcgctactgccgcctcagcggccccggagcgggggcgcccgggggtccttcgcccccggccacggtccccgcgccggggcttcgccgcccccagtgtccgagctggatcgtgcggacgcctggctcctccgaaaagcgcacgagacagccttcctctcctggttccgcaatggcctcctggcatcgggcatcggggtcatctccttcatgcagagtgacatgggtcgggaagcagcatatggcttcttcctgctgggcggcctgtgcgtggtgtggggcagcgcctcgtacgccgtgggcctggcggcgctgcgaggacccatgcagctgacgctggggggcgcggccgtgggcgcgggcgccgtgctggccgccagcctgctctgggcgtgcgccgtgggcctctacatggggcagctggacctggacgttggagctggtgcccgaggacgaccggacggcctccgcggaaggccctgatgaaggcgggtcggccccccaccgagtgaaccgacacggccgtgcggccctggtaggcgcctggaccagccccccaggtcttgggaacatctaccccttaaannnnnnnnntcctcccgggaaccgnnnnnnnnnnnnnnnnnnnnnnnnnnnnnnnnnnnnnnnnnnnnnnnnnnnnnnnnnnnnncggcaccggcggtgactgccactcaaatctcgctggtataggctcccacaccctcgctcatctcgggtggccgctctatccccgcgtccgccccctcccaaccgccgcgccacacaccacccgtgttccagcgccccccgtacctagtcgcgcacgcaatcaccgaacaaccga

SEQ ID NO: 261531 - DNA, 1041 bp, Homo Sapiens
  misc_feature (57)..(127): n is a, c, g, or t
  misc_feature (135)..(135): n is a, c, g, or t
  misc_feature (139)..(277): n is a, c, g, or t
ggggggaaaacacccctttttttggccggggtttttttgaaaaaacatgttgccccnnnnnnnnnnnnnnnnnnnnnnnnnnnnnnnnnnnnnnnnnnnnnnnnnnnnnnnnnnnnnnnnnnnnnnnccaacaanttgnnnnnnnnnnnnnnnnnnnnnnnnnnnnnnnnnnnnnnnnnnnnnnnnnnnnnnnnnnnnnnnnnnnnnnnnnnnnnnnnnnnnnnnnnnnnnnnnnnnnnnnnnnnnnnnnnnnnnnnnnnnnnnnnnnnnnnnnnnnattgaaaccacaagccagtttatttatcaatgatgtcagtactcaaagttgtccagttaaaatctacttcctcttgaaaaacaaaaatacactgaaggaagatgcaaagagctaaaagtggtatcatgattccacagcagtgattgtaagacagtgagccacagggaaatgggaaaacgtgaaaagaaacaagtatcaggaccaaattagagaagatatgagtagggccatcactagaggtgaaaatggagaaacctaagaaaaccagtgttggcatgaattatgcaagtggaaaatacatctgtagagggacgagatagaaggacctagatctaactccaagtgcttgattggagaagagagggagaaagagaatttatagaattaaatgtatagaagcctaaaaaataagattatcagcctagtcatgtaaagtctagaagttcctttatttgctcatcacctttcctttttctataagactattaagcagaaggtcagtaacagaaaatttaccctttcctctcctctcttggtttaaattttataaggaatctgaagaggctatggatcagttggcattacagtgggaagagcttattgaagcaaggttgacaataggtcttgtcattctgctccctgaaaatgcccttcgacaactgtgtcaggcagaaagcacacacaaagtgctcaggatggaacttgtaccccatggcactgatacaacggccagtgatgggctgcccacacccatggcagagccc

SEQ ID NO: 261532 - DNA, 774 bp, Homo Sapiens
  misc_feature (46)..(221): n is a, c, g, or t
  misc_feature (433)..(477): n is a, c, g, or t
cttgttaaaaatgtagatggccaccctttccaaagctctctaggtnnnnnnnnnnnnnnnnnnnnnnnnnnnnnnnnnnnnnnnnnnnnnnnnnnnnnnnnnnnnnnnnnnnnnnnnnnnnnnnnnnnnnnnnnnnnnnnnnnnnnnnnnnnnnnnnnnnnnnnnnnnnnnnnnnnnnnnnnnnnnnnnnnnnnnnnnnnnnnnnnnnnnnnnnnnnnnnnctttagatgcttttgaggcacaggctggaatgccatgactacaaccacaggtgaggatccagaatccactgcatacaaacattttccttaactgcttcctcagctgtacctatagggtaagatttttactaatccataaaattatcaagagaataaaatgaaataatgtattaccatcagtctctgtttctgtataccctaccactcctggnnnnnnnnnnnnnnnnnnnnnnnnnnnnnnnnnnnnnnnnnnnnngcccttatttcctccttttactctgctgagcagtacaaaacctggctgctcctacctctcttcagcaggtagtcttttttgggatttagccttggggtcctcaactaaatgtcaaacagctctcctgggggtatctggaaacagggctatttctggctgtcatgactagggggagtgctactggcatttctgtggaggaggttaagggttgtactccatgtcctgcaaagcttgggacagtcctacaaaagaaataattgtcctgcccaaaatgcccttgtgtccctaggcaaaaaa

SEQ ID NO: 261533 - DNA, 897 bp, Homo Sapiens
  misc_feature (39)..(39): n is a, c, g, or t
  misc_feature (85)..(85): n is a, c, g, or t
  misc_feature (108)..(108): n is a, c, g, or t
  misc_feature (148)..(148): n is a, c, g, or t
gaagtgcgactgcattgaaagggacctgaatagggtgtnagtactatgtaaaggagaaagtggtttgggccatcgggggctgcanctggctaaggtaaactcaagaanggacagatctcgaaagaattttgttatgtgactctctatntcttggagttattctgaatgcaaagtctgtataaacacctatcagtttatgtccagtgaactcaactggactctctttttcttcatcagcaaattccaaagcatctgcaaatgctgcgagtctgaaacgtcgatttctcatcttggtcttgctttttgtgtacaagccatccatgtcatctacatactgcggggtaaggtctggcatatatttactgtggtcagagcggaactgaaccacgtggctgggagacagcaatcggatcagatcaatgagaagcaggagcccctggtctgaaacccatcccatagtgttgacgatgagaggggactctctcttgtaagcgctgaacacatatttcactatgtcaatataattctcatagttgtttttacaagaaggtttcccataatataccatcttctgtggagtcctcaggtgagtgaaaggtggtcccagaactggttctgtaatattaagcaaagaaatgcaaccaggaggggtaaattctgtctgtcccagatcacattccaaatagtcaacgcagggaagactatttaacaaatggttaatcaggtatctattaaatgttgactttccaacatcctgggatccacaaactagaatgacagggcagccatctacttcttctgaatgggaaacaaacattgatcgctagaattagccgtcttccttggactcgaattatgactaatcttcctctgggggtctcttgcacaaaaatgtag

SEQ ID NO: 261534 - DNA, 500 bp, Homo Sapiens
acaaggtgctgtcacttctctgagccttggtttccccatgagtcaaaggaagcaagtaaactccagctgatgagactgtgtatggcaagaatgtcgcatgtgctcagggcagggtcagtgctcaataaaaccagctctcatctctgcaaaccagagaaccctggccaagggggactatgaacattccaaatgaagaaaaacagtggctccctagactcattgcccagaggaggactatgaacatcttagcaagtctcccccgaggttttcctagaatagatgtctctacgtagttaataaaaacatacattcaagttttgcagctttttgctccactttacactttaagttgaacgtttacacttcccattccaagatcttcagaaacatgtttagaaagagaagaatatcccaacaacagtctgtttaacctcttcccctaatgctgaactattgttgctttaagcatacaatttctgtgagtgtttcagatgtagttt

SEQ ID NO: 261535 - DNA, 645 bp, Homo Sapiens
cttatcgattatcaaatgtctcaaaataatttctgaattttatattctttttttggtgattgcattttggaggctaaaggaaagagtatgaaatatttagttcatatttcagagcaaggatgaagttttaatatacttatcttctttttctgttggttgaagttatctatgatgacaccaatgaaaagattcaaggtaaagaatgaaccaaaaataataaagatacatgtacaggttgtcttcatacactgttctggggtttgttctctacccttccaaccaatcacacccctgcctttttagagaaaaagacaaaagaaagtggaagtggtattccccacccctccctgcacccatgtgcctgggcttcccctttatttaagaaatcaatggtagatttaacagcagattgtaaatagcaaaatacaaaacttttaatctggaagacaaatggataaacaatagaaagcatgggtatggatattttttatttcttaatttctggtattgtatttctcaaattttgaatatctatttcattgtgattttgtcattttaattttctcatgaaattctctatcttttcatatgtttcttgggctttgtttggccttacgattaaataataaagctaaaataaatggc

SEQ ID NO: 261536 - DNA, 1014 bp, Homo Sapiens
  misc_feature (493)..(493): n is a, c, g, or t
  misc_feature (695)..(712): n is a, c, g, or t
gcagggtacattatttattttcacttgaacatggaaagaaagtgtcacactcccccttcccctttatagggggagtgtattttaatcagcaacctcttctccatccaccctgtgtatgtgtgtacacatataccaccacagttgggaggcatgactaggctgacccagtcttatctgttcctcctttgaagagggtttgacaaatgggaaaaaggaaggagccacatcaggcagaggtttcaagccatggaatggaggaaaggcggcagaaaggagcaccaccagaggccaggaaagagtggaaagggccacagcttgtttttaaaaaattctataatttggaagagggtggcgattaattttcaaaatacacttcagagtcccactttccacatagctcccttactcacagccctttggttttttagacaaaatttaagagctctcataaagccagaagtattgataactccttagtgcatccaaaaaaaangtgttcacatcaatcccttacaaagactatgtgatgtagactccgcttcttcctatacatttgtcttacggctcagtggtaaggtagctgtagagacacattacggggtaaatggaaaagggaaataaaggggaagcccaggcacatgggtgcagggaggggtggggaataccacttccactttctttggtctttttctttnnnnnnnnnnnnnnnnnnggcaggggtgtgattggttggaagggtagagaacaaaccccagaacagtgtaagctccagaggtgggtgatgggaacagtccccaaagtgagaagagggaataggtcagggcaatgcttgcagcatcaagttcctcaggagtttctgtcggcccagctcatagtcctcctcgtctacatttaccagcagcttgatggcttcatggcccacagcttgcttgagggagtctgtgatgaagacacctctaagtgcctctaataaagagccattgatgtagtcacgccagaatgcatcgaggtacc

SEQ ID NO: 261537 - DNA, 493 bp, Homo Sapiens
  misc_feature (55)..(75): n is a, c, g, or t
  misc_feature (381)..(381): n is a, c, g, or t
  misc_feature (422)..(422): n is a, c, g, or t
  misc_feature (448)..(448): n is a, c, g, or t
  misc_feature (458)..(458): n is a, c, g, or t
tcctaggtagcgaggcctgggtggcgaattcggcacgagggaactagtctcgagnnnnnnnnnnnnnnnnnnnnnaattcacaatggaagtttattgcaaggatacacacaaatgttgatgtggaagggtcctcccaccagcagcacagtatcacaggtcccatcctcctatcttctggaagttaagaagttcaaacctgttttacttgcatttatatttcccaaggacagagtgccaccctgtgggtaaggtcctagtcagcaacttttaccttcctaacaaacttttctgttcaagagatagcagctaaagggggcaaaaaacatgattggaaccacttttctcaataagaaactttgtatagggccggccgtgggggnctcacacctggtaatcccaggcacttttgggaggccgaggnggggcgggattcacaagggtcagggngtttcaaggnccagccttgaccaatataggtggaaaccccgtttt

SEQ ID NO: 261538 - DNA, 243 bp, Homo Sapiens; identical to SEQ ID NO: 4010

SEQ ID NO: 261539 - DNA, 991 bp, Homo Sapiens
  misc_feature (928)..(929): n is a, c, g, or t
  misc_feature (934)..(936): n is a, c, g, or t
  misc_feature (940)..(940): n is a, c, g, or t
  misc_feature (942)..(942): n is a, c, g, or t
  misc_feature (944)..(944): n is a, c, g, or t
  misc_feature (946)..(946): n is a, c, g, or t
ccccattcttataccccctcccatccgtccctacagcgcaactcctgcgtggcgaattcggcacgagggtctcccctccgtgttctggctgaaaccccagattcctttgaaaagcatattagaagcattttgcaacgtagtgttgccaatccagcatttttgaaagcttctgaaaaggacatagcccctcctcctgaagaatgccttcagctcctcagcagagccacccaggtgttcagagagcagtacattctcaaacaggacttggcaaaggaggagattcagcggagggtcaaattattatgtgaccaaaaaaagaaacaactagaagatctcagttattgtcgagaagagaggaaaagtctgcgggaaatggctgagcgtttagctgacaaatatgaggaagctaaagaaaaacaagaggatatcatgaacaggatgaaaaaactacttcacagttttcactctgagctcccagttctctctgatagtgagcgagacatgaagaaagaattacagctgatacctgatcaacttcgacatttgggcaatgccatcaaacaggttactatgaaaaaggattatcaacagcaaaagatggagaaggtgttgagtcttccaaaacccaccattattctcagtgcctaccagcgaaagtgcattcagtccatcctgaaagaggagggtgaacatataagggaaatggtgaagcaaatcaatgatatccgcaatcatgtaaacttctgacaccaccaggagctgactcacacctgaactgaacaccattgaaggcttaaacccatattgtaaaacaggtagaattatctaatttataaaaaggtggttttgatgacctttgggtgtggttcatcctttttaatatggttgttttataataaattgagtaaatggcttttattttaaaaannaaaannnaaananananaccttcaaggcttctatgtccgggtggcggagaaagagggtaagg

SEQ ID NO: 261540 - DNA, 730 bp, Homo Sapiens
attgaaaatgattactggtgaccacagcactccatgctcttccttatggaaaaagggttgcctagaagatttaggcaatactgggagttcttatttgaagtcacagaaaggagaaacttttctcaagccgtttttattacacttagtgtattaagacaagtacaaaataaccttgtaattaagatactgtatcagtcaaaaaagaagtcactattgtatgaagagatttacaaatgactaaaatatacaggctgtgacagaattaacagtttgaaagagggttgcttttttcttttagaaatgctaaattttcttaacaagacaaaaatacagtgctctaaatatgcattaccatgaaaacgttaaagaaaagcagtcttaacacttaactactattaacagcctttgccaacacatgcctgcctactccctttcctaactttaaagaactgtttcctctaaggaatactagtgcagcataacccttaaataatttcatttatttttaaagttacaacctacagagaaattaacatcttgtcaatctaataacagtggcaaccattcttcacatgcacttctcttagaataaatccccttggctggcaggataaggcttatgctgtagaaccttctcccccacagccacaaatccccttctataagtccctcctaccctcatccccccgcatccccactggcattcacctttcccaccccaaaaagtgca

SEQ ID NO: 261541 - DNA, 414 bp, Homo Sapiens
tgtgccaataatcatttaatatatgccaaatcttacacgtctactctaaactgctctaatgaagtttcagtgaccttgagggctaaagattgttcttctgggtaagagctcttgggctggtttttcagagcagagttcttgttgtgggtagactgtgactaggttcacagcctttgtggaacattccgtataacggcattgtggaagcaataactagttcctatgaaagaaccagagctgggaagatggctgggaagcaaggccaaaatgggggcaacagcttgcttctctttctcttctcaccctcagtttgtatggggaaaatgggagatgtcctctccactttatcccacgatatctaaatgaaaaagaaagaaaacccacacacaaagccaaaactccagtattaagagc

SEQ ID NO: 261542 - DNA, 877 bp, Homo Sapiens
  misc_feature (757)..(757): n is a, c, g, or t
  misc_feature (778)..(791): n is a, c, g, or t
  misc_feature (793)..(804): n is a, c, g, or t
tgacaggccaaggggcagtttaagaaacagtcagtggccaacggtgtggagatatctgtgcctgtacccagcgatgccgactcccccagattcaagaccagtgtgggcagcgccaagtatgtgccggagagaaacgtcgtgatttggagtattaagtctttcccggggggcaaggagtacttgatgcgagcccactttggcctccccagtgtggaaaaggaagaggtggagggccggccccccatcggggtcaagtttgagatcccctacttcaccgtctctgggatccaggtccgatacatgaagatcattgagaaaagtggttaccaggccctgccctgggttcgctacatcacccagagtggcgattaccaacttcgtaccagctagaagggagaagagatgggggcttgaacacggggcttccttacagccccggatgcagattttagagggagggcaggtgcgggctgtgtgtgtctgtgtgagggcaggtcctggacttggcagtttcttgctcccagcacccgccccttcctcacctcttccttattcccataggctgggagagaaactctctctgcttccctcgcccttggagctttccccatccccctgattttatatgaagaaatagaagaggggcttgaagtccccctcgcgagtgccttcttgcaattacctgccttagcgggtggtgcgggtccctccttcacagccgctgaagcccagaggtcccgctggcccctcctctganattttaggatggtcagtaaannnnnnnnnnnnnnannnnnnnnnnnncctgttcggccggcctccggccctcgaagaagcttttctagaacatttcgttttgggggcgcggggcccaatc

SEQ ID NO: 261543 - DNA, 1049 bp, Homo Sapiens
catgccagtccacctttggggtaagggggccaagaggaaccagaagttatggagagagttttcattggctaatttaggggaaaaccagaaggaaattccctcgaagcaaaagaagcaggactgagtcctgggttagtttggattcctcacaagccctaagacaagattttgaaagattggactaatgtcatgtgtccttaagaaccagggtcagcaagtggctgatctgaatggttggtggccatggaaccaatgggacttattctttttcatttttttccctaaaaatccaggtggataaaggactgtgtggggaaagtaccaaataaatgaggtaaaaaggaagggtcatacaaagagggcactacaccagcttcttggcctcaaagaagctcttgaggtgacgcatctgccagatgccagtgaggatgaggatgacagtctgagcaatggaccaccataggaccctctggttggtgctctcgctcgtcagtcggaagcgctcttcacgatacctttggtaatcctgctccttctgaatctgttccacctgatcaagcaactggcgggcgcggagctgtagctccgtcagcttatcttttgcagcaatctcagggtagttgttggcatgctccccaacctggatgtcgagatgcacacgcagtttgccaccagcgaagagagccatcctggtagaattggagtgcagacagatttgatggtcaccgggcgtgtgggaggtgaacgtgaagcggccctccgagccgtactgccgggacagcaccaccttgccgtcggggtccttcacttccacgtgcatgcccaggccaggggtcgagggcaggaagacctccttctgcttatcccacatctgggtacgatagttgccgatgaccatggtctcgtcggggatttcctcgatgaaacagcgcttctcggtctcgccgatgtggaagtagagcccctgggcgcctgtggcgcacagcgcgagaagcagcagggcctgccgccccatcgcccgccctcgtgccgaattcgccacccaggcc

SEQ ID NO: 261544 - DNA, 493 bp, Homo Sapiens
atgagcaccgcgcctggccccttcttttgaatgggcctccttgcgtttccgtttcaatgccccgtgctacttttttgggagccccaaggctgtactgtttgattgactcctttttttcccctttctttttaacctaaattaaagctgccactgcagagccccgccatggaagacacgccgttggtgatatcgaagcagaagacggaggtggtgtgcggggtccccacccaggtggtgtgtacggccttcagcagtcacatcctggtggtggtgacccagtttgggaagatgggcaccctggtctccctggagcccagcagcgtggccagtgacgtcaccaagcctgtgctcaccacaaaagtccttctggggcaagatgagcctctcatccatgtctttgcaaagaacctggtagcgtttgtgtctcaagaagctggaaacagagcagtcctcctcgccgtggccgtgaatgacaaaagcatggaggggctga

SEQ ID NO: 261545 - DNA, 615 bp, Homo Sapiens
  misc_feature (159)..(168): n is a, c, g, or t
gagatttattcaaggtaatttgataacttaaaatcaattctccattttttatcatatgtgggatttgttgctaagtcgtgttcaacaatagcttttatgttcctaacatatctgaaagcttatttatgaatggatatactggattattgatatactgannnnnnnnnnaatggggacatttgccattttcttcccagaaatatgtaatcccctggctgactaggactgttaaacatagtgtggactggatgatgccttcgacaaaccagagaagccaagttggggggagctggtgcctggagtgggccctgtgcacctcacctggcggaggctggggggggctctgtcagcaggaccctagaggagactctcattcgattttaaagaagcacaacgggtcattttcctttgtatgttcctagcgcagaactgtttctaaaacaacttgaagtatagttttgttatctaagcaatttttgttttaagtaagtaagtgtactagaatgcgaagccgttatggttcaggtttttaaaaactggtacagtattgtatttgtctcatctgttgcactgtatttcaatcatctgtaattaaaatgatcatatgtttaaaaa

SEQ ID NO: 261546 - DNA, 567 bp, Homo Sapiens
agttggggagcgcagatcccgaagcagcgctgggagcgtaagtgcgggcagagcactgcgccgtttgggaacgcaactttgaggagacagtgcggtggttctggaggctgggaagtccaagaccagttggctcgcatctgacttcagtgaagttccttatgacttcccctgaaattgcttccttatcatgggggcaaatgaaagtaaaaggctctaatacaacctataaggactgcaaagtatggccagggggcagtcggacttgggattggagagaaacaggaactgagcattctcctggtgtgcagcctgcagatgtgaaggaagttgttgagaagggtgtacagactcttgtgattggccgagggatgagtgaggccttgaaggtgccttcatcaactgtggagtacctcaagaaacatggcattgatgtgcgggtcctccagacagagcaggcagtgaaagagtataatgccttggttgcccaaggggtcagggtgggaggtgtcttccattccacctgctgatggagccttaagaagaggataaatcactaagtgcccaaaa

SEQ ID NO: 261547 - DNA, 1124 bp, Homo Sapiens
  misc_feature (546)..(765): n is a, c, g, or t
  misc_feature (959)..(1014): n is a, c, g, or t
cggaatttacgggatatcgtcgacccacgcgtccgcagatcccgaagcagcgctgggagcgtaagtgcgggcagagcactgcgccgtttgggaacgcaactttgaggagacagtgcggtggacttcagtgaagttccttatgacttcccctgaaattgcttccttatcatgggggcaaatgaaagtaaaaggctctaatacaacctataaggactgcaaagtatggccagggggcagtcggacttgggattggagagaaacaggaactgagcattctcctggtgtgcagcctgcagatgtgaaggaagttgttgagaagggtgtacagactcttgtgattggccgagggatgagtgaggccttgaaggtgccttcatcaactgtggagtacctcaagaaacatggcattgatatgcgggtcctccagacagagcaggcagtgaaggagtataatgccttggttgcccaaggggtcagggtgggaggtgtcttccattccacctgctgatggagccttaagaggagaataaatcactaagtggcctnnnnnnnnnnnnnnnnnnnnnnnnnnnnnnnnnnnnnnnnnnnnnnnnnnnnnnnnnnnnnnnnnnnnnnnnnnnnnnnnnnnnnnnnnnnnnnnnnnnnnnnnnnnnnnnnnnnnnnnnnnnnnnnnnnnnnnnnnnnnnnnnnnnnnnnnnnnnnnnnnnnnnnnnnnnnnnnnnnnnnnnnnnnnnnnnnnnnnnnnnnnnnnnnnnnnnnnnnnnnacagcgagaaaccacgcaggacagaaacacacacgtgacacagtacaaccaagaaaaaggagacacaagtggcaccacccagagaaagaatacaaccgaacacacagagcccgcgcagagcatccacgacctagtcatcaacagcacaagggcagacgaagaaacagagaacggacgacgagccaacacgagannnnnnnnnnnnnnnnnnnnnnnnnnnnnnnnnnnnnnnnnnnnnnnnnnnnnnnncaacagcaaaacgaaagagaagcagacagcaaggccagaacagagaggacaacgacagaagaagaaagacaggaagagacaaagcagaacgacaagaaaaaaacaggaag

SEQ ID NO: 261548 - DNA, 716 bp, Homo Sapiens
gaaagtattattaaaatataaaggaccaaatagtgatccttgtagaacttgagggattctgagaaatagttgaaatgacactgtctcagggttaggtagactggagagcccaacgctgatgaggcagaggaatgtgtgcagccactgctatcctgggtcagcaaaatgagggtacatgatatataaagatgacctcccaagaaggacaagtctgtaagacaaaggcccaagagatccccacctgtcctcaggaatgctgtgataccaacacctaccttcaaggcctcactcatccctcggccaatcacaagagtctgtacacccttctcaacaacttccttcacatctgcaggctgcacaccaggagaatgctggatgtggaaagagaaagttagacagatggagtctcactctctcacccagagctcacattctagtaaaatgaaacaagaggccactgactgctggaaatccaagtgtaaggtcataggagactacaaacccataatcctctggagattagactggagacagccacagcccattggagtggctggatcaatggaactcaagtgatgaactgggctgctgctgctttactgcaggctcacagtgtcatgtacaaatcaatgaaagataactctgcaagggcctgtggatccatgggattggagcatgagactattatttgaggcattcctcaacctgccactagc

SEQ ID NO: 261549 - DNA, 412 bp, Homo Sapiens
ggatgaataaacaaactattttaccaagaaaaatctcagcttgcttactgcttaattaaaaacctacaatttacacacctccctgccttcaagactgtgagctttggatagccctgcttaaatgtttgtcaacaacaagagtcgtaatgtgccagtacattgtagctcctttgaaatttaactctttctgtgttacatgaattgttttaaggagtccggcaaacatgtttcttcacttccatgagaatggtgccaagtgtcagactctaatgagccctcagctcaggttttaatttctattgaatgctaacattcttctgattttttggtatcttttataatcatatcggtttctgctgtattaatgacaattattcatgaaaataaaaaatgaaatattttgtatactact

SEQ ID NO: 261550 - DNA, 771 bp, Homo Sapiens
ggaccgtgtgtcacaacaggctagggcacttcacgatgtcactacttgtttttctgatgttccaaaaacaacgtaacttggttttcatgtgtttttccgtggtatatgtgagattgatgctacgggtcttacggactcacacccgttcccactctctgcaatatggatcaggcagtgtttctgataggatgtgaaatggactctcctcgggtgggtccagcaggggccctgccaaccagaacacagtccgtgctgtgctgcgctaaggagctggccctcaactctccttcggtgcagggttcccacaaccgagttctagttccctgaggtctttaaaaacaaaaacagaatgttgtacgtgaagattctaggaggggagggaccagcaaatctgagagaaccgtcctggggcctcccttcgaggagccctctgatgtgaggagggacttgagttgagtgacgctgtggtgtgaggtgttctgagctcactgaccggaaggtccaggtgaatctcgtcataagtgatctcaggctctcacaggatccggagggaaatgtgttagagggtctggaaaattcagtgcttttgagttacttgtttttattaaaaatttcctcacaaaagagagtcctcaagttgtggctgttcttgggaaaggggtcaccgtgtctgacaaagtgtaactttaaaaagcacgttgattttttacaaatgtaagtgtgcttgggaattccttaaattttgtgcaataaactattttttggtaaaga

SEQ ID NO: 261551 - DNA, 530 bp, Homo Sapiens
aatacatctgagcctattttagccaaatcaaattttgcctgtgagacacaccaatagccacaaagaatctcaatataaatgttcccagaaatagtgtatttgtttgtttacatcttcagaggcaacggaccactaaatgttttgggtttaaaaacaatgtttaaaattatcaaatggtaaaagacatcatgaccaaagcttgggagatcagtgcctgtgtggagacccttcccaaaacagcttcaggcaaaggaagcctggccccctccgtgggccgagtgagatgcttgtgtgtgcagcaggtgcctctgtggtgctgggtgaagagcagacgacagggggggctttagaagtctccctggggcctacgctcccaagggcagactgctctcctccccatcccccaacagaggggcctgtgctctaagcactgcccgctgagcccagagctgccctccaggcacccgccgtcccaacggcccccatttacttgtctctctcttgtcaccagatagacagacaaaggcgct

SEQ ID NO: 261552 - DNA, 785 bp, Homo Sapiens; identical to SEQ ID NO: 172218
  misc_feature (598)..(598): n is a, c, g, or t
  misc_feature (769)..(769): n is a, c, g, or t

SEQ ID NO: 261553 - DNA, 528 bp, Homo Sapiens
ggcaacattttattacgattattattcagcagcacattctgaggggggaacaattcacaccaccaataataacctggtaagatttcaggaggtaaagaaggtggaataattgacggggagatagcgcctgaaataaacaaaatatgggcatgcatgctaaagggaaaatgtgtgcaggtctactgcattaaatcctgtgtgctcctcttttggatttacagaaatgtgtcacatgtaaatctttcaaagccatttaaaaatattcactttagttctctgtgaagaagaggagaaaagcaatcctcctgattgtattgttttaaactttaagaatttatcaaaatgccggtacttaagacctaaatttatctatgtctgtcatacgctaaaatgatattggtctttgaatttggtatacatttattctgttcactatcacaaaatcatctatatttatagaggaatagaagtttatatatatataataccatatttttaatttcacaaataaaaaattcaaagttttat

SEQ ID NO: 261554 - DNA, 390 bp, Homo Sapiens
  misc_feature (35)..(35): n is a, c, g, or t
gccaggacattaggaattatggatagccatggagnttaatacatcctattattttcccctccccttcctcatgtttttaataaataggcaataaaaaatgttttgccctgcccaattgaatgatttccgtagctgaagtagaaacatttaggtttctgtagcattaaattgtgaagacaactggagtggtacttactgaagaaactctctgtatgtcctagaataagaagcaatgatgtgctgcttctgatttttcttgcattttaaattctcagccaacctacagccatgatctttagcacagtgatatcaccatgacttcacagacatggtctagaatctgtacccttacccacatatgaagaataaaattgattaaaggttaaactt

SEQ ID NO: 261555 - DNA, 582 bp, Homo Sapiens
gtggggcgcagggctcgggacgtcaaagccctgcgtccttcggcccccagagcggagaagcgcgcaaggcacctggtggcagctggcgacggcagctgcgacagcaacccctgctgggccgaaactggggcagagcggagcagacgtctgaagcagctgcgagtgaggcgcgagggtagctgccctgcgcccgggaagacccctctggctgctgaacctggcagcccagcccctgggtcccggttcccaaggccccgcctctagggcctggggactaatcggattgagagcgcgccggcccgggccgcgaactcgccaattgcggagggcggtggccaccgcccaatccggagcagacaggtgcgaggtccggaaggcggaggccaatcggcggcggttgcgacctgctggggcaggtctcggccaataacgaggctcgagtgacatcttcgcgcaccaatcgggagtgagggagcattcgtgcccgctcgcccttccggccagacctctatttaccagggcgtgcagcccgcttgccaatcagagccgcggatgagccggcccgcaagccaaccccccgag

SEQ ID NO: 261556 - DNA, 619 bp, Homo Sapiens
ttggtatttgaaagaataagcatatgcttctgtttattaaaaaaagaaaccttccaatgtccaaaactgctaaccctcgacgtggccgccaaattagtcgctccttgctaacccggtgagtgaccgcggccccgaacctggggctggacgcaggtcccaggacatgctgctcccttgtgtgagtgaccacggccccgagcctggggctggacgcaggtcccaggacgtgctgctcccttgtgtgagtgaccacggccccaagcccggggctggaggcaggtcccaggacgcgccgctccctcatgctgcccgggcccttcctccaagaccctacagagcctgaggggcacctttggcttccgcctgtgctagctttgccatgtcatctggaataatacttgaaattttgatttttggaaaaaaaagttttttatcttttgttgaaatcacctgttatccttgtttgtaaactgataacttttttgcttcttctcaggaatacagttttcaactgttgtcttgctcttgatagaaactgagaagcagcaatctgtatttgtggaggaaagtcctctcttttgcatattctaataaatgagccgcgtttgctcctccaaaa

SEQ ID NO: 261557 - DNA, 1067 bp, Homo Sapiens
  misc_feature (75)..(111): n is a, c, g, or t
  misc_feature (127)..(127): n is a, c, g, or t
tgttgaaaaagcttgtgaaggggacgggccagtttttgaaatcccctccaagtaaaaaaggggagggaaaagggnnnnnnnnnnnnnnnnnnnnnnnnnnnnnnnnnnnnnactgctgtgatgcagntgccccagtccggccctagtggcggctggagaccagacctttcactttggacatcttcttggtggggctgcctctgctcagcggaagggggacactcccgttcagccagctgctgctccatctcctgagccgaggaggatgcggtggctttgagtgtcttcttgatgttggtaacctctgcttctacctgctgctgagttcggttgtggttctctttgtactggttggctctcagaacttgctgctcgatgcccagtagaactgcttcacagccatcacaccattcatgcagggtcttgacaatattattgatatccttctttcggatgtcacggccaatgcagaaatccacttccagcagctggtttcgctggtccagcttgccctggatgatgtcagtgtagacagcctcaatgataaggtcttctagttcccggagattccgcatctccaggtctttcagcaacacggagtaggggatacacttcattcttgatgccaagctcacgatggtaagatgcttcagcttgttctgctgagctgtgctcagttctggcaggctctccttgttggctatgtaatctgggtatgtcccataggcaaacaggttcaacaactgcaaataagcagcattagctccttccgcaagctcctgcacgttggccagctccagaagttctccaaagacatacactccgggagcctctaagacctggcttatgagagcagtgagggctgagccactggtacctttggctagtaaaataaactgctccaggagattacttgagggtttctgttcccctgccattctctggccttgaaatctgtccacgccacctctcggtcctcttagtcgctggctcggcctcccggcgcctgcccgcaggtgtcaagcgtccatgatcacccccctcgtgccgaattcgccacccaggcc

SEQ ID NO: 261558 - DNA, 572 bp, Homo Sapiens
  misc_feature (346)..(346): n is a, c, g, or t
  misc_feature (453)..(453): n is a, c, g, or t
gggatgttgacggggtcctaagatggctgctgggcgaccacttcctgacagctccagttaatgggactgccagcaggctagacatccttcgccggaatgtgcagcgcttagttctgtgcccgggagcggctcatctctcttttgggattggagtgtggcattgccgccagaaagcctgcagaattccgggttgtgcagccaagcaggaacggtgtacctttctagacccatcctcttgcaatcttggaccctaagaaaagatgtggagtgggctgctacctcctgggcctaaatgaaagtgacgctgagtcaaactcggaagatgaagctacgttggagaactctnggacttaacttacaggaagataaagaggatggagagcatcagaaaacacagaaatcataagaatttctcaaacagaatggaacccaaaaaaactggaaaacagaagntccaaaatggtaaaaattggccctaaatggaaaagaaatgggtccctttcctggggaaaatttccccaataagaaaaatgggggggaaaataaaattttcccaaagaaaattggccctt

SEQ ID NO: 261559 - DNA, 1313 bp, Homo Sapiens
  misc_feature (37)..(37): n is a, c, g, or t
  misc_feature (51)..(51): n is a, c, g, or t
ctggatcttccctgaccctttgtgatcccgcccgttnttcagccttcccanaagtgctggggatcacagggagtgaagcccactgcgcccagcccactttttatccctaaataagtttcatttatccttggtatctgagttttatcctggactcatctcaatttaataatcattttgggggcggagaggactcctttgtcccaggcccagggctaattttaggataagttctcttttcagaaagagaaacactaggtatgactagtatccctttggcatataatcactttgtgggatggcagatagttctaggttaggagttcccaagctctagtctactttcaacactcttcagaccttagtaggaagttagccctcttctgggaagaaagtgggagcccaggaacaaattcaggtatgttcggtaaagatagggctgctcaaatcaatgcaaatggcaactaaaaatgacagccaaggttgtcacatagtgatcaagatgctccgtctaccagttacgtagatagaaaagttcactttcatgcagttggtatggtcctttggggggagttaaaggcagataaataatgtcttccatactgaacaggcctgttaagtgaattccttggaagctgacttttgcttttctttcacctcagttagcatcaggaactcactgccttgttggggccagatctttcccaattctgtcttcagaagaatctgttattaagaaatgctcgagcatccattttttcaggggactgaaaaaagcaggaacattagtattcacagtaaaaaaatactgtcattatgcttccacatgttcacagagtaccccctttccagaatgagctactcagctgtgtgggaatggctcttgttcatccagctttggcaaagagatattacctgggggggccacaaagtactcctccacgacgcgatgggagttttgtagtaattcatcagcacagttgccttctaccacattgtcggatctcaggtatagacatctgtcctccaggaccgattccatgggctccaccccgtctgtgtccacggcgcgtagccggtcggcgaaggcgatagctttctccagtcgcgccactgcctcgcggctgccgaagtccacaagcgctagacgctccaggtgctcgatcaccgcagccgtgatccggccactgccctgaggatccgccttggaggtgaagccctggcgcccgcccagaggggcccgaaggcccagccacaccaaccgcgaccacatttcttccttccttggcccccgcagtgcgcccgcgcgtaacccc

SEQ ID NO: 261560 - DNA, 891 bp, Homo Sapiens
  misc_feature (779)..(789): n is a, c, g, or t
ccgggcccgcgcgccatcttggctccggatcgtgcgtgaggcggcttcgtgggcagcgagagtcacagacaagacagcaagcaggatggagcactaccggaaagctggctctgtagagctcccagcgccttccccaatgccccagctacctcctgatacccttgagatgcgggtccgagatggcagcaaaattcgcaacctgctggggttggctctgggtcggttggagggcggcagtgctcggcatgtagtgttctcaggttctggcagggctgcaggaaaggctgtcagctgcgctgagattgtcaagcggcgggtcccaggcctgcaccagctcaccaagctacgtttccttcagactgaggacagctgggtcccagcctcacctgacacagggctagaccccctcacagtgcgccgccatgtgcctgcagtgtgggtgctgctcagccgggaccccctggaccccaatgagtgtggttaccaacccccaggagcaccccctggcctgggttccatgcccagctccagctgtggccctcgttcccgaagaagggctcgagacacccgatcgtgaagacctgctgagccagcctgttctccgggcctgaatgtctgggggtgcttgtgccttttctgagaaagcgttgtgactgctcaacatcccaatcaaggtttgagtcccccaaaaggggaacctcccctatcatggcttccccctttcccccctaaaatgggggggaagggaaacttgcctggggaaaaaaatgaaccaaaannnnnnnnnnncctccttggcccaagtttcttggccttttgcaaaataagggggttttcctccttggcttttttaacctaaaggggggatttttgaaaacgcgcctttccttg

SEQ ID NO: 261561 - DNA, 474 bp, Homo Sapiens
gtgggttctcggcctgaggtgcgagagaagcggtgaccgcggccctggctgctcggacccgggaacatgatggtcgctggagcagaaggcgctgagaagggaccacggcggcgctgggtcgtgcgagccagtagcgggctgaaacgtagaggccagaaccaggtctcaaggggcactaaaggcgggcggaggtaatccccacaccgcttcctcctggaagtcaggctggccgggagctcccgtatccaggacggttggtcgcctctggcctggcagggatcctagtgtctcgggacctcccggtgacgcgcctgcctcccctgctgcaccataggcccgggagtacggcgtccccacagcttggaccggcaggggctcgtgaaatgtttgtcaagtggataaatgaccatggccgtggtctccgcgggaggtgaggaaactgaaagccaccgaggaaaaggggggcgctcctta

SEQ ID NO: 261562 - DNA, 379 bp, Homo Sapiens
  misc_feature (22)..(22): n is a, c, g, or t
  misc_feature (85)..(85): n is a, c, g, or t
  misc_feature (89)..(89): n is a, c, g, or t
  misc_feature (98)..(98): n is a, c, g, or t
  misc_feature (103)..(103): n is a, c, g, or t
  misc_feature (108)..(108): n is a, c, g, or t
  misc_feature (111)..(111): n is a, c, g, or t
  misc_feature (121)..(121): n is a, c, g, or t
  misc_feature (133)..(133): n is a, c, g, or t
  misc_feature (158)..(158): n is a, c, g, or t
  misc_feature (161)..(161): n is a, c, g, or t
  misc_feature (168)..(168): n is a, c, g, or t
  misc_feature (173)..(173): n is a, c, g, or t
  misc_feature (175)..(175): n is a, c, g, or t
  misc_feature (183)..(183): n is a, c, g, or t
  misc_feature (192)..(192): n is a, c, g, or t
cctggaaccccggaccctcggnccggccttagcccccctaaagtgcccgggaatacaggcgtgaacccaccgcacccggcccagnaccnacaacccantttantgaanaantttaatgacntaaaggtcaacnatgaaaaagctttcctttcacatgnacnttttgantaggnantatcaacntatgaaacntgaagatgtgaagtgacaggttttgcatgtgatgagtgttttctgttaaaaaataaatattgaaatattaacccattaaatacatttttatggtaacctatgttttacagtggagttttaaaaatgctaggtctttctttcattttattgataactacaaatgaataaaaagcatttattctctttg

SEQ ID NO: 261563 - DNA, 310 bp, Homo Sapiens
cggagaaatattgtaaatatatatttttttgttgctgatttagagtcaatctccaatgttgtgctaaaaagtttaaattaaatgtaagcattaaaggcataagtcttatgctatctcagttgacacattgaggttattttgggccagagaaggaggaagctagttggactttgttttgttttccaaaagttctccactattggttttagagagagcaaggacatctttcctctgacacgtgggaatgggtgatatttgtgtaataaaatttttaaaagacaaaaaaagaaatagcctccaatgggaaata

SEQ ID NO: 261564 - DNA, 706 bp, Homo Sapiens
atgcaggaaaacatttaaaatttattgacaacagaaatattttatagcccaacctggtatgcaaaaatgctggctatgtcccactgagttgatttcatggctcactaatgaaatgtgagccacagagggacaattacattgcagggtattaaatggcctggagaatcaccagaaaagaacactcttgcctgtgcttccacaaactgggtggtcaagtgggctgatagttccagaagcactccatgtgtataacccacatcctcaaaacgatgcctggtgtctcacagaatctgatggacaaaacctaagtgacacccaaaaccctgatacaaaggaatctgagaaacatagtaaagaaaggaaagcacactagcaaaacttccaaaagatgttaatcaaggtaagccacagaatcagtcccatatctgcaatgaaatgctgcttatgtatgtgagacagaaaaacctggtggctgaagtattatttcatttatcttatctctataaatggcatattttcttgattacagcctattgctacttcactgagggaaaactcgtaactacaactagtacaatttgcctgatgagatgaaattcaagggaacaaacctaaagtaacaaatccccaagttacatgtctttcacaaacatacctctacccagtcaatagaggatttatcaaaagaaagattaatagtggaaaa

SEQ ID NO: 261565 - DNA, 422 bp, Homo Sapiens
  misc_feature (407)..(407): n is a, c, g, or t
cgcgatgcagcacaggctagaggctgcgcaagcgcggggcccgcccctgggaccctccgggccgggcggtttggccccttagcgcccgggcgtcggggcggtaaaaggccggcagaagggaggcacttgaggacccaagtttcttcaccatggggatgtggtccattggtgcaagagccctgggggctgcctcccttggcatttgctgcttgccaacacagacgtgtttctgtccaagccccacaaagcggccctgggagtacctgggaggatatagacctgaaaacactggagaaggaaccaaggactttcaaagcaaaggagctatgggaaaaaaaatggagctgttgattattggccgtgcggaggccagggcttgttttcctcttgttcgagagggaagcttncggatcttgttcctc

SEQ ID NO: 261566 - DNA, 1025 bp, Homo Sapiens
  misc_feature (814)..(822): n is a, c, g, or t
  misc_feature (824)..(928): n is a, c, g, or t
  misc_feature (937)..(952): n is a, c, g, or t
gggggggccgccgccatcgctctcccgggcttagaaggcccggctactgacgcgcagtgccagaccttagccctcacggtccttaagtctcggtcgccctcgcctcgcagcctgccacccgcgctcagctgcccgcctcctcagccagccatgctggagcatctgagctcgctgcccacgcagatggattacaagggccagaagctagctgaacagatgtttcagggaattattcttttttctgcaatagttggatttatctacgggtacgtggctgaacagttcgggtggactgtctatatagttatggccggatttgctttttcatgtttgctgacacttcctccatggcccatctatcgccggcatcctctcaagtggttacctgttcaagaatcaagcacagacgacaagaaaccaggggaaagaaaaattaagaggcatgctaaaaataattgaggttttcatgattcagcacctgcttttgtttctgtgagatgagctaaattgctttcataccccagataagagctaaaaccacctaatgctcttatggcacagctgtgtatagatttagttctctttatacttcatttctagcccagttgggttttgatttatataagtagtttagaccttctcttcataatcttgctctgagatggggaacagaacacacaagtatgaagtttctttcaggtgtaaataatgaaaaataaatgcctcataaatgatagtacaatgtaactatcaaagttttataattcattatgagttaaccattttaatgtttccaattaaacctcatagtgcnnnnnnnnnannnnnnnnnnnnnnnnnnnnnnnnnnnnnnnnnnnnnnnnnnnnnnnnnnnnnnnnnnnnnnnnnnnnnnnnnnnnnnnnnnnnnnnnnnnnnnnnnnnnnnnnnccttggggnnnnnnnnnnnnnnnntaaaaattttttaaaacctttctttgggcgggcggcccccaaaagaaagggaaacgggccaattcgtttttcc

SEQ ID NO: 261567 - DNA, 831 bp, Homo Sapiens; identical to SEQ ID NO: 171245
  misc_feature (507)..(507): n is a, c, g, or t

SEQ ID NO: 261568 - DNA, 495 bp, Homo Sapiens
ataatcacccctgataatattattactaatcttaattatttattacatcatctctttctcaatggatctaatgttttaattttttcccctattggtagagaacaataacagaagtaatttttatattatacacttggagaaataaagttgaaacagaattaaaaatatttctcaaacaactgtatcacaatataaattaaactaattcatttttgtgtagacatacgaaatcacaaaaataataacactgaaataattctaccaatgcagtgatggaaacacttttcttatgtaccaagacatagataggtaagagaaataaagaattgaagtgaattagaaaatccattttattgcttgggtttaaaatagttgtgggatacaagtatttacaatgctattggagtcaattattgacaacactttgcaacagtaataccatttctagcttttcaattggcaatacttaaaaccttactgtagtgacctgatttt

SEQ ID NO: 261569 - DNA, 464 bp, Homo Sapiens
aaagaaaaatgctctgcatggattggagacacagcaataactactgttgccatggaagggttaacagtgtaggagctggtttatcagtccgctttgacatacagctaaaggaaatttatgtttgggggaaaaaggccctctgttcactttaaaattcagtgtggacttatgccaaagggggctgtttaagttgaaagaagccaagttaagtttggcctcttgcctggaatcacttgaattctgaaatttcactgcgacggacatgtgccttgtcacattttccattgcttaatcctgaagtttggtgcaagtctctctgcacctattaaaaagtgatgtatatacttccttcttattctgttgagttgtatagaattgtcttttgtatttaacactttgtaattttcacaatattttttaatttaaataaataaacacattttttccctcctgggaagtcacga

SEQ ID NO: 261570 - DNA, 398 bp, Homo Sapiens
ttttgcactcatagttgtcttagcccaatctttctatactcttacgattacttgggttaacgcttctgtgaggaccttcgggcccttgagataccctaaatatttaagatatttagatatcttgaagatagtataggatatagagattgtaccaaataggaatataaggagtatgttaaaatgaccagatacctgtttgatagtttactgacctagcagatgtgtggaaaaggaatcagatcttgattcttctgggtttatactggttgtaaaacagaatgatacagaaaatgttttccttgtttaactggtagttgaacatagaacttgggtattatagatcacttttcactttttggaatgttttgtattgaaacttaataaaactttaacatggc

SEQ ID NO: 261571 - DNA, 1055 bp, Homo Sapiens
  misc_feature (743)..(743): n is a, c, g, or t
aaaagcaggctggtaaccggtccggaattccgggatatcgtcgacccacgcgttcgctgaaatctgccaaaacacgaaaggtaatacaggtagatgaaatgatagtggaagaggaagaagaagaagaaaatgaacgtaagaatcttcaaactgcaagagtcaaaaggtgtcctccatccaagaagagaactcagtccatacaaggaaaaggaaaagggaaaaggtcaagccgtgctaacactgttaccccagccgtgggccgattggaggtgtccatggtcaaaccaactccaggcctgacacccaggtttgactcaagggtcttcaagacccctggcctgcgtactccagcagcaggagagcggatttacaacatctcagggaatggcagccctcttgctgacagcaaagagatcttcctcactgtgccagtgggcggcggagagagcctgcgattattggccagtgacttgcagaggcacagtattgcccagctggatccagaggccttgggaaacattaagaagctctccaaccgtctcgcccaaatctgcagcagcatacggacccacaaatgagacaccaaagttgacaggatggacttttaatggggcacttctgggaccctgaagagacttcttcccttcaggcttattgtttgagtgtgaagttccagagcaaggagcccatgttcctctaagggaattcaggaattcagacgtgctagtcccacaccagttaangtagagctgtctgttcaccctcccatcccagctgatcccaggtcactgcttgctggggccatgccatggaagcttcccatcagtctcccagctgaatcctccctgctctctgagctgctgccttttgcctcctgcaactcaacatcctcttcaccctgccctgcctgcagttgagggggtgaagaagaaccctgtgttctcaagaagactgcctccaccaccgctacccagagaacctctgcatctggcatttctgctctctatgcttgagaccgggaggtttaagctcagataagtgagctctgggccatg

SEQ ID NO: 261572 - DNA, 273 bp, Homo Sapiens
aaaaaatggcctcatctcctgctgtccttcgagcgtcccggctgtacaatggagcctgaagagttcggcgcagttcctggggtctccacagctgaggcaggttggtcagatcattaaggttcctgctcggatggcggcgacgctgatcctggagcctgcgggccgctgctgctgggacgaaccggtgcgaatcgccgtgcgcggcctagccccggagcagccggtcacgctgcgcgcgtccctgcgcgacgagaagggcgcgcttttccaggc

SEQ ID NO: 261573 - DNA, 425 bp, Homo Sapiens
ttggggctgccaaccagcacggtgatctttgcgaggtgagcctcgccggcagtgtggagcctgcccaaggagaggccagggagggttctccccgtgacaaccccactgcacagcagatcatgcagctgcttcgtgagatgcagaacccccgggagcgcccaggcttgggcagcaacccctgcattccttttttttaccgggctgacgagaatgatgaggtgaagatcactgtcatctaaaagccggctactgtcagcaaagcctgaagaagtggggctggataccctgcccccaccatatccctaccatcccttctcagtcaaccctttacccttacagtagcaagcatagacccctgtctaacgggggtagacaggtgcagatgaggtgaagatcactgtcatctaaaagctggccactaaatt

SEQ ID NO: 261574 - DNA, 1845 bp, Homo Sapiens
  misc_feature (1436)..(1457): n is a, c, g, or t
  misc_feature (1565)..(1565): n is a, c, g, or t
  misc_feature (1571)..(1571): n is a, c, g, or t
  misc_feature (1573)..(1573): n is a, c, g, or t
  misc_feature (1578)..(1578): n is a, c, g, or t
  misc_feature (1649)..(1686): n is a, c, g, or t
  misc_feature (1813)..(1813): n is a, c, g, or t
cgaagattggccacgtgacctgcatgtttccacagaggaactacatggtgcagacggaggaccagtacgtgttcatccatgaggcgctgctggaggctgccacgtgcggccacacagaggtgcctgcccgcaacctgtatgcccacatccagaagctgggccaagtgcctccaggggagagtgtgaccgccatggagctcgagttcaagttgctggccagctccaaggcccacacgtcccgcttcatcagcgccaacctgccctgcaacaagttcaagaaccggctggtgaacatcatgccctacgaattgacccgtgtgtgtctgcagcccatccgtggtgtggagggctctgactacatcaatgccagcttcctggatggttatagacagcagaaggcctacatagctacacaggggcctctggcagagagcaccgaggacttctggcgcatgctatgggagcacaattccaccatcatcgtcatgctgaccaagcttcgggagatgggcagggagaaatgccaccagtactggccagcagagcgctctgctcgctaccagtactttgttgttgacccgatggctgagtacaacatgccccagtatatcctgcgtgagttcaaggtcacggatgcccgggatgggcagtcaaggacaatccggcagttccagttcacagactggccagagcagggcgtgcccaagacaggcgagggattcattgacttcatcgggcaggtgcataagaccaaggagcagtttggacaggatgggcctatcacggtgcactgcagtgctggcgtgggccgcaccggggtgttcatcactctgagcatcgtcctggagcgcatgcgctatgagggcgtggtcgacatgtttcagaccgtgaagaccctgcgtacacagcgtcctgccatggtgcagacagaggaccagtatcagctgtgctaccgtgcggccctggagtacctcggcagctttgaccactatgcaacgtaactaccgctcccctctcctccgccacccccgccgtggggctccggaggggacccagctcctctgagccataccgaccatcgtccagccctcctacgcagatgctgtcactggcagagcacagcccacggggatcacagcgtttcaggaacgttgccacaccaatcagagagcctagaacatccctgggcaagtggatggcccagcaggcaggcactgtggcccttctgtccaccagacccacctggagcccgcttcaagctctctgttgcgctcccgcatttctcatgcttcttctcatggggtggggttggggcaaagcctcctttttaatacattaagtggggtagactgagggattttagcctcttccctctgatttttcctttcgcgaatccgtatctgcagaatgggccactgtaaggggttggggtttannnnnnnnnnnnnnnnnnnnnncttgagttcactttggatccttattttgtatgacttctgctgaaggacagaacattgccttcctcgtgcagagctggggctgccagcctgagcggaggctcggccgtngggcgnanggagntgctgatccggctgctcctccagcccttcagacgagatcctgtttcagctaaatgcagggaaactcaatgnnnnnnnnnnnnnnnnnnnnnnnnnnnnnnnnnnnnnnaggccacattgacagtggtgggcggggagaagatagggaacactcatccctggtcgtctatcccagtgtgtgtttaacattcacagcccagaaccacagatgtgtctgggagagcctggcaagcatntcctcatcaccatcgtgtttgcaaaggttaaa

SEQ ID NO: 261575 - DNA, 1048 bp, Homo Sapiens
  misc_feature (48)..(101): n is a, c, g, or t
  misc_feature (148)..(211): n is a, c, g, or t
  misc_feature (249)..(307): n is a, c, g, or t
gtgaggcgggggacacagcgcgtcagaggagggcggatagagtcaggnnnnnnnnnnnnnnnnnnnnnnnnnnnnnnnnnnnnnnnnnnnnnnnnnnnnnntgtaaagtaaaagacattggggacaggaggaggtagagggaagggtnnnnnnnnnnnnnnnnnnnnnnnnnnnnnnnnnnnnnnnnnnnnnnnnnnnnnnnnnnnnnnnnggaggcatctggtttatgacgtgatagaggagaaaaannnnnnnnnnnnnnnnnnnnnnnnnnnnnnnnnnnnnnnnnnnnnnnnnnnnnnnnnnngtcgcggtgagagcgccaaagattcatgtagggaaaagagaagggagggaaaatgtattcgggtgtataaaaagatagttggaaaagggcgttacaagaaggggaggggaggcgaatttttagaaaaccttgagactcaaaatagtaactgccttcatgattgatgttgaatattgtagtaaaccaaccgttcaagaaaagaatgatattgttccaggaagaatatcaacaaaagtgtacaatcacaggaatggatactcctaaagttaagcagaggtgacaaagacacagtcgtttaatcagaaaatgcaaagccaccttttatcttattttagaaaaaaaggttcttataaagtggacttgacacctattttctgaaaagccgagttctgtctactcgcgtaagtggtaactatgaaacagacgtcaataggcacgtttgctgctgcctcttatatcttgggagatcgaagtatttctgagttgcccagtgggcaaaatcattacagggcatatatgaatcttcacccaaggtgagagatctggggaccaggcgggtggggtacagagacaaggaacactccctccccatccccctgcccacagtctgggatggtgggagaggtagccgaaaggtttcctggccagcaccgaggtagactggggtggtcttcagggcagcaggggagggccaggtctcctcgtgccgaattcgccacccaggcctcaaaaagatgaggt

SEQ ID NO: 261576 - DNA, 859 bp, Homo Sapiens
  misc_feature (229)..(241): n is a, c, g, or t
  misc_feature (557)..(569): n is a, c, g, or t
tccgggtgcaggtacagtttattcttcacaacagagaaatacaaagagcagagggtttgtaattcctttgtttcttgccccctttagtgttttccccccacatttgattttcatttgctccccactcccttttttaaatagaatgcaaactaccttcctgaagtgtctgaggggcacctgccttcacctccctgcctccaagatgcagactgagaagccaacagactgnnnnnnnnnnnnnaataaggtaactagttctaaatatggtggcctggaggtcccatagaaaaagcaaaggggtgttaacagtatgtataacagcgtatttacagggagtaacatgcggacaaaaagctacaatactgagtatcagacgacgcaagtcaaacaaagggccgggggtgggggcagagaaccccatgggcaaagaaaccccaggaaacgttaaactggtaaatcaatggcgagttaaggcttaaaaagtgtataaaaataacacagttaatattcaaaacggaactccagatacagaatatatagatgagtttctgtctagnnnnnnnnnnnnncccggggggatgtagggggcttctctgggctctgtacatggttcctatatacaccgacacgcatggctttcagattggggtgtgtctgtgggggctgggggcagggtctgctcctgggacctgcctccccggggatcccttccctgctgaggggcctagggcctcggctggggattcccactccatggcagggaagacaaataacccctccctgggcactgcccccatctggaggaaattctggagggaggtcccagatccagcctcgtgccgaattcgccacccaggcc

SEQ ID NO: 261577 - DNA, 1752 bp, Homo Sapiens
  misc_feature (1640)..(1648): n is a, c, g, or t
cagccaaaatatttttttaaagtcattttccttaagctgcttgggctacatgtgaaatacactggacggtcaacattcctgtctcctcccatttgggctgatgcagcagatccagggaatgttacctgtttctgctgctagaagatccaggaaattgggaaggttacctgacgcacacatggatgaaggccatcatctagaaatggggtcaaccacaattgtgttaattccgtagtgtcagggattcttcgggaaggtcaacagtatgaaggattctgacccctgtgcctcccatttatgtgatcaggtgacagttaataaccgtggaggtcacactcagccatccaacagccttacagtgaccctacacaaaagcccccaaattccaaagactttttcttaacctaaaggaagaaattatttgttaattccagtagagcaactgaatatactgggctatttgtacttttttatagagaactttaataataattctttaaaaatgagtttttagaacaaagcaactgacgatttcctaagattccaatgccctggagcttgtaggaagacttagcctgggtcagctggagcacccccgacctgatctcccactgccagattttcccatgctcctagggtatggagtccacgtgggaaatgactgcacagttcagggggaacttggccgactgatgctctgcgaagtttttaatagacactggggacaactgcttaaggtttagaaacttccaaaccacaggaaaagacatttttagtgtcccccatccagaggcagccctggaataggattcccaggggtttctgggacccctttccttgctccgtgaggctctgtggccatcttttggcaggaggaggatgcttccttggctctgtgcccagacccgcctggtccccaggtctctcaccttgggtgaagattcagagatgccctgtaaggattttgcccactgggcaactcagaaatacttcgatctcccaagatataagaggcagcagcaaacgtgcctattgacgtctgtttcatagttaccacttacgcgagtagacagaactcggcttttcagaaaataggtgtcaagtccactttataagaacctttttttctaaaataagataaaaggtggctttgcattttctgattaaacgactgtgtctttgtcacctctgcttaactttaggagtatccattcctgtgattgtagacttttgttgatattcttcctggaagaatatcattcttttcttgaagggttggtttactagaatattcaaaatcaatcatgaaggcagttactattttgagtctaaaggttttctaaaaattaacctcacatcccttctgttagggtctttcagaatatcttttataaacagaagcatttgaagtcattgcttttgctacatgatttgtgtgtgtggaaggacataccacgtttaaatcattaattgaaaaacatcatataagcccccaactttgtttggaggaaagagacggaaggttgaggtttttcctttctggataagcacctactgacaaaatgtagaggccattcaaccggtcaaacaacatttggttatatcgcagaggagacggatgtgtaaattactgcattgcnnnnnnnnncagtttgtataacctctaatctccgtttgcatgatacgctttgttagaaacattaattgtagtttggaagcaagtgtgtatgaataaagataatgatcattcga

SEQ ID NO: 261578 - DNA, 847 bp, Homo Sapiens
aactaatagaaatttaatgttgttttaagataatacttaaatattaagaaagctaaaatttaaaatgtgttgactaggtttttctacacattatatttacataatgactaaggtaaaacctttccacaaatagttgcccaggaggaagaaaaagcaacctacaacagtctctggggcttgcactgccttctcaggccagctataccctagctgagcaaagaactgaagaagcaagtgtccactccccacccctctcccctgccccccttttgttacttgaagtgtttctgagtaacaaatgcaaaactaggtttgaatataaaagctagacgaccacgccaattcaggattgttgtttcatctgagggagacctggcatagaaaaaacaagaattctctctcatttacaaggatactgtgatgaaagtcaaagatcacacataaatttatgatctctgagcaaaggcacagctagcataaactcatctgtaaaatgaggggttttgacttggccatctgtcaaggtccattcagcctgtcaagctagcgtcaaagttcagatcttccacgatgaaagaacttgccctctgctaaggtggatgcagaaagaaaagtcccattatattgtgggaccaaccttctgatataaaaaactatgttgggattaaagtagatcaataaagtataaatatttatcatagttgtagggtaaatattcaaaagtttgaaatttatgtatactgtaaaactggcaaactggtcttaaacacataaagcaaagattttcccatggggagagaaaatttgagagtaagcccagtgaattacttaagtcctgagcgtccat

SEQ ID NO: 261579 - DNA, 817 bp, Homo Sapiens
  misc_feature (291)..(352): n is a, c, g, or t
  misc_feature (372)..(385): n is a, c, g, or t
  misc_feature (699)..(707): n is a, c, g, or t
  misc_feature (776)..(776): n is a, c, g, or t
  misc_feature (779)..(779): n is a, c, g, or t
ggtatcgtatgcagtgcaaatatgtgaaatgtcttttggtttattccaacaattatttattttagaaagtaagtttaaagactttaaggacattcaaagtttaaaatagtgttcaaattgcaaaatttggcaatcttcatataaattggtttcttttctaacttttcaaaaactaacattaaatgtcaattataggaaaacatagttggaaatgtaatcatccaaagatcatttttaaaatgaaatttaattagcacatattgaacatttgacttaattgttaaaccccannnnnnnnnnnnnnnnnnnnnnnnnnnnnnnnnnnnnnnnnnnnnnnnnnnnnnnnnnnnnngttgctttattattcaaggnnnnnnnnnnnnnncttccccatgggggagattgtcttccaatgtttaactacgtttaaataaataaaaattgaattttattgttcatttatataaaatctgataccttgatgtaatttcacaatacagttcccatttttatggcttttataattacaatgatattttcttctataataaatccaaaagtaaacatttaaattggtagaactgaatatttttcattttatatgaaagtataaaccctctacttggggtctataattggggaatcatccctgccctttcaaatttggttttcataaatttgttaagatgaaaaactaannnnnnnnnggggaaaatgttaacctgaaaattttggattggaacccaaataaaaaaggtcctacccttaacccttanggngggcataagaacaactggccaaccaaaaacaagatctc

SEQ ID NO: 261580 - DNA, 1002 bp, Homo Sapiens
  misc_feature (282)..(282): n is a, c, g, or t
  misc_feature (894)..(894): n is a, c, g, or t
accactgctgaaggtctgagcagcgttctggtgctcctaaaccccattccagtggttgctgaagcagcatcttctgcacaaagcccaacagaagggttcttatccccgtttggtataagaagtggattcaccacccactccctccacgtgcctttgttcctctctttggcccatttccccagcgtctactgggcgtcaggattggcaggagcacaggcactcagcagagcattgcccctgcaagaccttcagtgttaggggccccccttccagctccaggcnaaaaggggcatgagtcctgggccccaaggggcctgtggctgcagttcagaggagaagaaggtcagtgtttggaggtgcagcctcaggatgctgagaaaggaaactggcgaccgtgagaaagaaaagagccaagcagcatcctggttcttggacagcatctttggacactctgtgaagggcaacgatcctgccagagaccgtctctctacaactgatgacccactagggcctggggttaattgctcaaagggcccagtgttcacaaagccacctctgccctaacccttgccagagctctccaactatgacccacgagaggggtgatggtgggacttctaacatcaacagagcaaccagaaagacattgggcctcccacactcaggctgcaggcccactttcttggtccttatcagctttaatatttattaatgacgacataggagcccgagtcagctgtaaaggccattaacttgcaatctggacaggaagttgacgctcaccactttgggtaagagctgctctgactgtaaggccccctatttgttgtcctaacccagaagcagctctgggctgccaggatggtggatggaataccagagagttcacactanggaggaagcaatgcctgccccctggagtctcctagggggcagcagttaaaataagggaagaggatttgctggtcactgtttgctgacatgggtttccatggtgagttc

SEQ ID NO: 261581 - DNA, 2432 bp, Homo Sapiens
  misc_feature (2010)..(2010): n is a, c, g, or t
  misc_feature (2370)..(2380): n is a, c, g, or t
tttaaaggaaattcctcctgccgacatccccaaaaataaaaaacttctaactgatggctatgcttgtgaagttagatgccaaaatatctacttaactacaggttatgctggcagcaagaatgggtccagggatcgagctacagagctagctgtaaaactcttgcagaaacgtattgaagttagagttgtccggcggaaattcaagcatacatttggagaggacctcgtggtgtgtcagattggcatgtcctcctatgaatttcctccagctctgaagccaccagaagacctggtggtgctgggtaaagatgcttccgggcagccaatttttaatgcttctgccaaacactggaccaattttgtcattacagaaaatgcaaatgatgcaattggtatccttaacaattctgcctcattcaacaagatgtcaattgaatacaaatatgagatgatgccaaatcgcacatggcgttgtcgagtgtttttacaagatcactgcttagctgaaggttatggaaccaagaaaacaagtaaacatgcagctgccgacgaggctttgaaaattcttcaaaaaacacagcccacttatccatctgtcaaaagttcacaatgccatacaggctcttcacccagaggatctggaaagaagaaagatataaaggatcttgtagtttatgagaattcttcaaatcccgtgtgcacgctgaacgacacagctcagtttaaccgaatgacagttgagtatgtctatgaaaagatgacaggcctccgctggaaatgcaaagtgattctagagagtgaagtaattgcagaagcagtttggggtgaagaaaactgtccaaatatgaagctgccggggaagctgtgaaaaccctcaaaaagacccagccaactgtcattaacaacttgaagaaaggagctgttgaagatgtgatttcaagaaatgaaattcagggccgctcagcagaggaggcttacaaacagcaaatcaaagaagataatattggaaatcagctgctgagaaagatgggttggactggtggtggtttaggtaaatctggtgagggcatacgggagcctatctcagtgaaagagcagcataagcgggaagggcttggtctggatgtagagagggtgaataaaattgccaagagagatattgaacagatcatcagaaactacgcccgctccgagagccacacagatttgactttctctagagagctgactaatgatgaacggaagcaaatacatcagattgcccagaagtatggtcttaagagtaagtctcatggggtgggccatgataggtacctagtggtaggtagaaaaagacggaaggaagacctactagatcagctcaaacaggaaggccaagtgggccattacgagcttgttatgcctcaagcaaattgagatcttactaatttattttgtaaatgcctaatgaggcagatttttgaattaaagaaatgctacatgttccggttgcagagtatattcataagatgtctcaccttgttcatttcacatagtggtttattagatattggaacctaaagaattctgtccacttgtattagcttaatccagcagatgatattgtgcagttactgtttgtgtctttgatattgctgtgtccctcagattttagtagtttgacaagcaagaacacatatccaaatggaattttaccctgagaaattatcattttaaagggcatagcacagcaatctgcaacaatatgtaaagttgatattgactacaataaaaatccagtcttaattccagatttactgaaaatgtcagatcattttgtattaatctattttcatctttgtgtgaagccagttatagaatgtttgacaataaattgtgctgtacacgtaaatggccttaccaactaaatgatgtaaaacttttcttaaagtaatttttagtgttccatttatttataacttctaccatgtgatttccagactattggaagtgatttactgtaccttgtgnatatatgggttttaacaaattcctagtccttcacgcctgagagagcactacttgagagagcagttgaaagtttcaaaaactttggttcaatctgaagaaaggaagcttgaactgtttgttcttggtgccttgcagagagactcacagcaactctccattatagctttcacacggtttggatgtgcagcacatccaaggcaaccacagctgtggtagagcttggtaaaagactgaagatacattggtgctttgatgaaaaggtcagttggctggtccctctctcaaaaagcttattaagcctgaaaagccaactttgtaacatatttaaaactgctattttcgcttatttctggaatgttnnnnnnnnnnntgtataaaaagaattagtgtatgcttcctgaataaaaaggagccaaaagttg

SEQ ID NO: 261582 - DNA, 920 bp, Homo Sapiens
  misc_feature (232)..(232): n is a, c, g, or t
  misc_feature (282)..(282): n is a, c, g, or t
ggtgcaccgaactcaaatgaaaggtgttcttgttgatgaggagaacatctgtgagtcgtgcctttcccctattcttccatcagatgcagctaagcccttcagcgtggtggtcttccattgccggcacatgttccacaaggagtgcctgcccatgcccagcatgaactctgctgcacagttctgcaacatctgcagtgctaagaacccgtggaccagaaagtgcaattttggnagatgaaaaaatagctcatttctccttgtcagtctccttgtcaccactcntttttgagactgttttttgcaacaacaaaagcatttgttgacactcgtgctgttaagagatttgtttatgtttatattatactcaaaaacaatttcttcatctattcctgtactaatggtttctctttgcagttcacagagaatttggggctctcttcatgccttgaaattttggggtccatagtgaatattttgttatttatttgtttggctcattctttatatagtaatggaaacataagtctaggagttagaaatgaattttttagaccttagtaaaaccagttaaccataaaatggacaactgagaattctcccagctgcctgaaagcgtcgccaactgtggttatcctgcaagctgctacctggcaacttggacgttgtttccacgtgctctgcctgggctacgattcttgcattctggggttggcttttttctgtgtcatcaactatggttatcctctaaattagcatttaatggaaccttgtacaaattgtcactcctttgatgacccccggggaattaaattaaccaggctggatgtccctgccacccattatggtttacctaaatcccccctggttccggggggggctggggcaccaacttgtgcaaaagaaaataatcctgggcccct

SEQ ID NO: 261583 - DNA, 713 bp, Homo Sapiens
gagaaatgagctattttttcatctccaaaattgcacttcctggtccacggttcttagcactgcagatgttgcagaactgtgcagcagagttcatgctgggcatgggcaggcactccttgtggaacatgtgccggcaatggaagaccaccacgctgaagggcttagctgcatcctagagcttgagaacctcagctctaagcaatggcagcaccagcattccactgagcaggatggaagccacaacacttctctccactgggttattctgatggaagaataggggaaaggcacgactcacagatgttctcctcatcaacaagaacacctttcatttgagttcggtgcattttcttcagtaaggacaaagagtcagctacgagaatcttcttgcagccttcacgaagcagaatttgcaaattgtagtcttgcagaattttaaccaaggaatctctcaaattggggatctccattccttccttaatacggtgaatcagtagaattgggtcaacatgtgtgcccaatgttgtttaacaagcccagtaataaatggtggtttgtcaatggaatataaaatcaaatcttcccacagctctccatcatcttgctccttggcaaattcgattgctttatcaacatcatgtaattcctccataatcatcttcagggcacttcggctattacccattcggctcagaagataaactgtctcttct

SEQ ID NO: 261584 - DNA, 581 bp, Homo Sapiens; identical to SEQ ID NO: 173147

SEQ ID NO: 261585 - DNA, 702 bp, Homo Sapiens
  misc_feature (103)..(145): n is a, c, g, or t
  misc_feature (154)..(154): n is a, c, g, or t
  misc_feature (159)..(159): n is a, c, g, or t
  misc_feature (322)..(322): n is a, c, g, or t
aacaaaggcagataaacaggcattccatagcagtgcttttgatcacttacaaattttttgaataacacaaaatctcattctacctgcagtttaattggaaagnnnnnnnnnnnnnnnnnnnnnnnnnnnnnnnnnnnnnnnnnnncgcgcgcgncacgncctttgagcagtcagcattgcacctgctatgggagaagggtattcctttattaaaatcttcctcatttgggatttgctttcagttggttttcaatttgctcactggccagagacattgatggcagttcttatctgcatcactaatcagctcctggattttttnttttgttttcaaacaatggtttgaaacaactactggaatattgtccacaataagctggaagtttgttgtagtatgcccccaaatataactgactgtatactatagtggtaacttttcaaacagcccttagcacttttatactaattaacccatttgtgcattgagttttcttttaaaaatgcttgttgtgaaagacacagatacccagtatgcttaacgtgaaaagaaaatgtgttctgttttgtaaaggaactttcaagtattgttgtaaatacttggacagaggttgctgaactttaaaaaaaattaatttattattataatgacctaatttattaatctgaagattaaccatttttttgtcttagaatatcaaaaaa

SEQ ID NO: 261586 - DNA, 1628 bp, Homo Sapiens
  misc_feature (787)..(795): n is a, c, g, or t
  misc_feature (977)..(1011): n is a, c, g, or t
  misc_feature (1165)..(1165): n is a, c, g, or t
  misc_feature (1167)..(1167): n is a, c, g, or t
  misc_feature (1345)..(1345): n is a, c, g, or t
  misc_feature (1353)..(1353): n is a, c, g, or t
  misc_feature (1421)..(1421): n is a, c, g, or t
  misc_feature (1458)..(1458): n is a, c, g, or t
  misc_feature (1540)..(1540): n is a, c, g, or t
  misc_feature (1554)..(1554): n is a, c, g, or t
  misc_feature (1575)..(1575): n is a, c, g, or t
ggggcagttaagggggcaggagtggcgctgctcacctctggtgccaaagggcggcgcagcggctgccgagctcggccctggaggcggcgagaacatggtgcgcaggttcttggtgaccctccggattcggcgcgcgtgcggcccgccgcgagtgagggttttcgtggttcacatcccgcggctcacgggggagtgggcagcgccaggggcgcccgccgctgtggccctcgtgctgatgctactgaggagccagcgtctagggcagcagccgcttcctagaagaccaggtcatgatgatgggcagcgcccgagtggcggagctgctgctgctccacggagcggagcccaactgcgccgaccccccccactctcaaccgacccgtgcacgacgctgcccgggagggcttcctggacacgctggtggtgctgcaccgggccgggggcgcggctggacgtgcgcgatgcctggggccgtctgcccgtggacctggctgaggagctgggccatcgcgatgtcgcacggtacctgcgcgcggctgcggggggcaccagaggcagtaaccatgcccgcatagatgccgcggaaggtccctcagacatccccgattgaaagaaccagagaggctctgagaaacctccggaaacttacatcatcactcaccgaaggtcccacagggccacaaactgccccccgcccaccccgccccgcttcccgcgcttttcctttagaagaccagagccccgcaccgacggcccgctttttctacccttacaccccatgtctctnnnnnnnnngcttgtaagctagcccctccctctacccatcctctccgctagcaccccggccacaaaactccccgccccgacgagatggcccacgtgctggcgcgcctcccccccctcctcatccccggccatacacccttcccgctccgcccgctggtgcacctcgcgcgccctccgcgcgctgtcaatgnnnnnnnnnnnnnnnnnnnnnnnnnnnnnnnnnnncaattcgtgcgttccggtcccgcgcgcagtatcccgcgcgtttctggtacgctctcctacgcgcactccaccctccctcgcgcctcgattttgcgtaccccctttcttcactccgcacacacccccatagagatcgcatgctcacttccgtgcncnccactttacccctataacttgcgtaccgcaccgcttctccacctagcgcgtcctatccccgctatccactctcgttgacgcacccgctcgcgcgccatccctgtcacaccttacagacttccgctgtccgaccgcctctgtcttattttccgccggactccttgtcccgcccacaatnacctcctngcgcgctgagctgtcgctggcgcgtcggcatcgcggtacccacacactcacgcgtgtcgctcgccatngttgcttatccactcatatcgctgccacgtccgcccncgtgtctctctgcctctcggccgtcctcgcgtgagtgtacttcgcagctcgttgctgcacgactgtgacgtacagtagtccnagcccaccccactntgacctcactgcccgcttcgnatctctattgtagttcgccctgccaccgtgtgactctactcgcccgacctgcc

SEQ ID NO: 261587 - DNA, 810 bp, Homo Sapiens
  misc_feature (316)..(357): n is a, c, g, or t
caatacattaaagtttgttccttatacctttaaaaatgagataccctgaaagacagctgtttagtcattctatacattagcagttctcaacctgcattgtaaagtccacaagttcatacataacactgagcactaagcatcctgcagtattttaagtgtattttcaattgcactgtaataaatttcaaaaaaccccctatatatttaaaagcaattctgaattcatagcttttaatcaagatgtactcatttactatttatacgaaattacaattactatctaacagcccatatatgttgggtttttgtttctgcnnnnnnnnnnnnnnnnnnnnnnnnnnnnnnnnnnnnnnnnnngtgacagagtgagcctgtctctctcttaaaaagtaaataaatagtatctggaagtgccacaaatggggcgttttgcccaggaggggcatcaccagcacctgtgcccatctgcccaacgtgacccactctgaaagaggacggtgactgctggacagatgaagttttggacatatataacctctcaatgtctattctgtattcacatcttagtgacttttttcaacaatcaaaggtaagatttaaattgagtctgtagcatttgagagagaaaagcaaaattgaagggctgagaaaacaataaacatttgggtatctgcaatacatgctgttatctagggacatttctgcttcctcccagaatcagttttccatacttagtgagtggggtgtgtttgtttctcccactagacggatgttaattctttgcaggcagtaactatattttcttccagt

SEQ ID NO: 261588 - DNA, 531 bp, Homo Sapiens
  misc_feature (29)..(29): n is a, c, g, or t
  misc_feature (77)..(77): n is a, c, g, or t
agtcacgtctcttcagagtgtcacgtggncagatggcacaggtgctggtgatgccctctggggcaaacgcccacatntgtggcacttcaggatactatttatttacttttaagagagagacaggctcactctgtcacccattgcactccagcctgggaacaagagtgaaactctcaaaagcagaaacaaaacccaacatatatgggctgttagatagtaattgtaatttcgtataaatagtaaatgagtacatcttgattaaaagctatgaattcagaattgcttttaaatatatagggggttttttgaaatttattacagtgcaattgaaaatacacttaaaatactgcaggatgcttagtgctcagtgttatgtatgaacttgtggactttacaatgcaggttgagaactgctaatgtatagaatgactaaacagctgtctttcagggtatctcatttttaaaggtataaggaacaaactttaatgtattgaaatgcataaataaaatttattttttatattttgaaaa

SEQ ID NO: 261589 - DNA, 910 bp, Homo Sapiens
  misc_feature (163)..(163): n is a, c, g, or t
cgtggggggtttttgttttccggggcccccgccccctggaccgcttccggttgggggtggggccggttgggccgggtggatagacggaacaaaggcagcagcctggtgtgcaaccgggttccccgggccggtatgtgctcccggtcgtctgcccgtccccttnggtcaccagcaccagctgcggtggcccctgaaggagccaggacatcgtcatcgtcgctgtcgtcctcctcgttggatggggctgccccaggctcaggcgcgggcatcttggcctcctgctcctgctccacgcggctgcgcagggccaggatgcggtggtgcagggctgcatacaactgacctgtgtccttgaagctggccgaagatcaaggaagaccttcacgccctggtcctcggtgtccatggctgtgatgcgaatgctcttctcgctggccttgtcgatctgcatctgggcccacagcttggtgttgaggatcagtcgcaggctcccctgggtccgcatcactagtcgggactgtagtgtgccgtcatcggtggacgccatgtcattgagtctgagcagcccccggcctctctccacccaggactgtgaggtcttgtcaaagacaaacagcttgcactgcatctgtaacacattgctatccgcctcctccccggtgatgacttccactttttccaacaaacacttccgcgctgttgccttggtgtaggcggctgccgactcagccagggactctttctcaggggtggcctcctgggacgaggactcagaccctgactcggcagctgcattttccctgttggcatctgaactgacctcgtttaattttggggggctcaaaactcgctcgctcatgttctggccaaataccaaatttgttgctggaggcgtcggcactattggttg

SEQ ID NO: 261590 - DNA, 744 bp, Homo Sapiens
tgcacataaatgtttgtgtaaaaagagcattatgacagttgataccacaaagattacagtaagaaaaagcactttatgacaatatttcacaaattcacaaggatcactttaatatacaaagcaactgctaccattctgaacacaaagcagctattatgtacatagtgttaataaaatgcattgtaactcagtacatttttttctttacacataaagcacaaaaagatttagataaaaaaattaaaacagggatgtttctagaatgtagggaattttattagaaatgtatttccctcattatagttatttatttagtattcaactccaatagaaacatcagagttaaaaatcaataccctgttttgtgctgacagttgtgggggaagtcttctttaccccaaccctcaaaaaccaaaaagccaaacacctttctaggaacttccctgattattttgcttctaaaaagtttcaagtgatacatctgggttagaaataattccttttgcagggaatgggggagttacaactgacatgtggacaaatcagtcaaggacaactttacatggaaaactgctaactagcactcttctttgccacccctaataaatctatactcaaaaaaaatgttgacaattatttcccacttttaatataaataattttattacatacacaaattggagtggcacttggataaaaatacatctataccagtaggccaacagtgattccctatagtgagtc

SEQ ID NO: 261591 - DNA, 854 bp, Homo Sapiens
ggccgaggcggtatccagattccgggggtctcgctccttggcatagtggtcgcttaactccagcgccttcccagtgcctcccaaacctctcctcctcctgcccggggctgttctaggaggagcctaaatgtccgcttccccagctgaaggggattgtggtgcgtaaacaggattaactccctcgcccccagctgcgcggatctgcgcggcggcctgcgggccagagcgagccttcgggtgcgtggagggcgcagcactggagcgggggatggggaagcgcgcggccttggagccgtctcttgggcccgcttcctcgccgagtggggaggggggccacagcctaaagagctgctcctcaaaagcccgggcggacggcggcgacagccgcgggttcctagcggcagcctcagctccaccacctccctcaccctccccgcgcttcctctccgcccctcgcgctccagccactcggccgcagacggcgcttggtccttccggcccccgggagccgccggtggccagacccttcgccccagacatgggggaccctgccgggccctcgctgcgcctctccatcgcgctgcgcatccagccctattgacggcccggcctttcaccacacgtgccctggcgcagcgctttcggcccagtaaccgcacctatcaagcctgctcacccggctccctccttacaccgcttgcgcgttcgaaggattgaagccccaggcatccctagcaccgtcgcagacaccactccccacttcgagctgatgtgctttgccccccctcgtcccctgacgtcctcacaagcagcctgcccggcgaccgcattcgccgaatacggccacctgatcc

SEQ ID NO: 261592 - DNA, 542 bp, Homo Sapiens
  misc_feature (21)..(21): n is a, c, g, or t
  misc_feature (430)..(442): n is a, c, g, or t
gacctgccgggcctcgtgcgncctctccatcgcgctgcgcagtccagcctaatgacggcccggtcttttacaaggtggacgggcagcgcttcggccagaaccgcaccatcaagctgctcaccggctcctcctacaaggttgaggtgaagattaaacccagcacgctgcaggtcgagaatatttccattggtggtgtgcttgtcccactggaactgaagtctaaagagcctgatggggacagagttgtttatacgggtacatatgacacagaaggtgttgaccccaacgaagagtgggagaacgggcaacccatccagattcaccattgccggagtgcctggaacaacgaccccaagagatctctcttacatatgaatgtgaagaataagcacattcttcaatgtgtgccatcatgaggaacaaatgttcnnnnnnnnnnnnnccaaattatttgctttgcattctaggggagggcttctcacaggccatcagaattatcggggatgcttgttaaaatgtagattcctaaactctaccttttt

SEQ ID NO: 261593 - DNA, 520 bp, Homo Sapiens
atctcgggctgcaccagggcacttgtaggaccgcactaaaaacagcggaaagtgaggagccaagcctgggtccggggcggcccgccgtacagctggcctcacggattccactgcctgcgcctgcagatgacttgttctggagagtagagaatgttctcggatttaaagtacaatccggtttcctttccattcattatagttgcctacactcaacaaacaaaagttgggaaagataaagggattattctagcgcgtcacattgacaaacaccgacgttaacacgctcagtccagcctgactcacttgcctcaggtcagagaggtcaccactgacgacgccgggccctcaagccgatcctaatccagcttggttctctcagcctcagccagaccatccgttcttgcctctgtcccaccacgtgcaggtgtaagcttccgccgcacttcttgtctgaatctgccaagaagaaactgcatctttcagctaaattcttttcactgatcagggtagagtttagcgg

SEQ ID NO: 261594 - DNA, 490 bp, Homo Sapiens
  misc_feature (14)..(14): n is a, c, g, or t
  misc_feature (22)..(22): n is a, c, g, or t
tcagtcttccttgnggaatgcngcctttattatatttgaattgacaggggaacttggtttagggttaagacgttggaaggaaatctaaggaaaattaatcctcacagaggtccgggtttagtatatgtcttgagaggagacttgtgaattcccagactctgcctcctggtttcctttctcatttctttctaactgtagctatcattactggctgtggatagcccatagctattttccttgcttttcttttttaaaggggtctgttctgcagtggagaagacattctggtgaccagacttttgcttaccttttcctattctgttgccaatttttgttttccccacattctatagccataaacctgaagatgagtaaaactggtgggtctttaataaaacaacaacaaaaacagcagtttgtgatatagcagaggtttaaatgtaccctccccttttatgcacttcaaataattaaatctctttaagaatga

SEQ ID NO: 261595 - DNA, 510 bp, Homo Sapiens
tgtactgtatgaattaagtgatgctttaactttgattttacattttaaagttaaaatgtgggcattatgtcagcaaacttaagggcattatgtcagcaagctaaaacattttttttcctgtgcttttaatgtatctctttacatgatctgagagaggattcaagttgatagaaatagctgaggggaaaagggggaacatcttgggatgaagcttgtccttatggtgatggtttaattacagattaaaaaattagaaggaaatttcagtggattaagtgtatagctttcatatctacatttcaagaaattaccattgtaacttgataagagatgatttattttatgtaaacatctttgcaaagcaaggtgtagcagctcagctagatttattactgtgcacgaaagtaaatacctatctcaattattctttttcttttccagtataaagtttgctgaatgtacaagaagagtttatcacttaggatatagaatttttttaggggttggggg

SEQ ID NO: 261596 - DNA, 664 bp, Homo Sapiens
  misc_feature (138)..(173): n is a, c, g, or t
  misc_feature (233)..(251): n is a, c, g, or t
gtcgcggagcccagccttgggaggcagatgcgaaccgtgtccacagtgccccctactggagattccccacaagccgaggttttggaggtgggaaagctttggagagtcataccagtctcatccttgtctagatagtannnnnnnnnnnnnnnnnnnnnnnnnnnnnnnnnnnnaggtatcacagtgctggctctgcagacagagctgcaatgaagacagacaccgttccctgnnnnnnnnnnnnnnnnnnnatgtagctgatccctattctagttggtcctgtagaaactccacttggtttccagttggtctgagttatttggtgaactcaacaaaacttcccccgccttccagacactccacgataattcgatcacctggcaggggggaccccgacctttgcaaaccttcccagagcggttccttggactgccaccctgccccaatggccctgcctcctggctgagccccggccgggtgggatcctcctccctggctcctgcctcttctttcataggacaatctcattcgttctgacaccttcattctcaaacccagtagttattgagtattacttataaaggtgtatttccttgaagcaaataatcaagcatgtatgttatgtaatggataataaaaactgaagtagaaacgtacacgtatg

SEQ ID NO: 261597 - DNA, 622 bp, Homo Sapiens
  misc_feature (519)..(519): n is a, c, g, or t
aaactgacatcccatctagagccgtccctcctcttcctcccctcccgactctctgctcctttcccgccccagaagttcaagggcccccggcctcctgcgctcctgccgccgggaccctcgacctcctcagagcagccggctgccgccccgggaagatggcgaggaggagccgccaccgcctcctcctgctgctgctgcgctacctggtggtcgccctgggctatcataaggcctatgggttttctgccccaaaagaccaacaagtagtcacagcagtagagtaccaagaggctattttagcctgcaaaaccccaaagaagactgtttcctccagattagagtggaagaaactgggtcggagtgtctcctttgtctactatcaacagactcttcaaggtgattttaaaaatcgagctgagatgatagatttcaatatccggatcaaaaatgtgacaagaagtgatgcggggaaatatcgttgtgaagttagtgccccatctgagcaaggccaaaacctgnaagaggatacagtcactctggaagtattagtggctccagcagttccatcatgtgaagtaccctcttctgctctgagtggaactgtggtagagctacgatgtca

SEQ ID NO: 261598 - DNA, 682 bp, Homo Sapiens
tactacaagcagatgaggtcaagcagcccatctctctgatttttcagaggtaccaaggaaagcacttgacctgggccttcctttcagtccactcccctggcttctcctaatagctcctcatagtggcaatgcccagacccagatgtcccatccccaccagatgcccatggctgcttcacagcaaacacgtcccaatctaagcccacttctctgttcttcctcctgcatctcccatttcagtgaataggaacgccccccactcaggcccccaagccatgaacgtgggcataatccaatgtcgtcctgcttggcgagcccaatcaccaagcttcctgaacagcaactaaccacaccccactccatgctcatgtcctttccctggtctgcttcatctcctctcacctagactcatcatggcactgacagaggaagatgagtggtgacaagccaagaactcaggccaggctgcccagggtcaaaccccagctctaccactggggaaccttgggcaagtgactgcccctctatgccccagattcatctgttaaaggagacagaataaacctacctcagagggttgttgggggacaaatcaggtataattgtcatgagtgctttatgtctagcacaaaataagtaaatgtaagtgtttaataaaaacatttttccagtcttaaaaaaa

SEQ ID NO: 261599 - DNA, 589 bp, Homo Sapiens
ataaagatcaatcaagtttcccgagacaggcaacgtatttgccatttgcaaagcaggatccatcaagcccaagatttcctcattataacttgattctaggctaatgatgtcatcgattacatcatccatctgcatacaggacgctcgtgaatgtgtgttcatgcctgggcactcgctctctgccctgttttgctcttcaaacttataaaatccctgctgccgttgggcttgctgtatgtggtacttggtggggttttcgaggtgggtctgcaccttaaggacttccatcggcacctgcgtggcagagggaagggtggtgggcacactgacgtttatggctggtgtctgactcacgggcactctctgttgcatgaactgggccgcctgcagcttctgctgctgctccctgcgctcctgctcctgcatctgctcacgcatgagttgctggcgtagcaagatgcgtgatgtcatactggaggagcttatcggaggcttggaggccccaggatgctcggcggaactgctctaacatctttagatgctcagactcatggagagatgaggattcaatcttctgctgtagggagat

SEQ ID NO: 261600 - DNA, 619 bp, Homo Sapiens
  misc_feature (211)..(287): n is a, c, g, or t
tgggggtaggtaagaatataattgctctattatacagtacatataaatcataaatttttatattactccatgatataaactatctctggaaggataacgaacattggctgactatgaagaaaggggtgggattggagggggcatgtatagctgtgaatatctggagacttgcactagatggatgtatgacctattcgtcgtataagtaagnnnnnnnnnnnnnnnnnnnnnnnnnnnnnnnnnnnnnnnnnnnnnnnnnnnnnnnnnnnnnnnnnnnnnnnnnnnnnccgtgaaaagaaaatagggaccaccttggagtggtttccatcggcaaaatttggggtgatttaagctttaaaaatacattagggatcataccactttgaatataacaattcgtgagtccatagtggtactcagagagagaaaggtgcagtggatgtgaaagctggaagaatgtcagctaacagatgtagaaaaattggtacaatcgaaaaacgtaataattcattcaagaagaatcatcatcaactaacacgtgaaatgttgaggatgaagattttcacaaggcctcatatcatcccaattaactggattctggattttaaaaaactataaa

SEQ ID NO: 261601 - DNA, 606 bp, Homo Sapiens
  misc_feature (211)..(287): n is a, c, g, or t
tgggggtaggtaagaatataattgctctattatacagtacatataaatcataaatttttatattactccatgatataaactatctctggaaggataacgaacattggctgactatgaagaaaggggtgggattggagggggcatgtatagctgtgaatatctggagacttgcactagatggatgtatgacctattcgtcgtataagtaagnnnnnnnnnnnnnnnnnnnnnnnnnnnnnnnnnnnnnnnnnnnnnnnnnnnnnnnnnnnnnnnnnnnnnnnnnnnnnccgtgaaaagaaaatagggaccaccttggagtggtttccatcggcaaaatttggggtgatttaagctttaaaaatacattagggatcataccactttgaatataacaattcgtgagtccatagtggtactcagagagagaaaggtgcagtggatgtgaaagctggaagaatgtcagctaacagatgtagaaaaattggtacaatcgaaaaacgtaataattcattcaagaagaatcatcatcaactaacacgtgaaatgttgaggatgaggattttcacaaagcctcatatcatcccaattaactggattctggatttt

SEQ ID NO: 261602 - DNA, 537 bp, Homo Sapiens
gaacctcctctccgggatatttttattaatatttggagaacaacataaaacacatttccaagtggttcatgagatgccatggccatccaaaagagggaggcaatgcgccggagcttggtcttgacaagagatattttccatagcaaaatttaccactaactcgagggcaataccaggtgggctgggaatctcacatctcccaaattagcctcttgattctgtcacaaactttcagaactcaaaggcttgtggttctgggaatggaaactaaccaaacatcatctggactgagacagccaaacctggagacagcgccatcccaaaagtgaaccgtctgcttcatgggaagaacatttatctcagagcagggagggatgtagcagctgcagtcgcaggggaccgagacccaagacggtgatgcccagagcacaaacacgaccctccactggcctgtggggctctgggaaagagcttcggcctcacactgggtcacctccccacagggtccccatctggcaaataagggaaggaactagc

SEQ ID NO: 261603 - DNA, 1250 bp, Homo Sapiens
gtggtactagccccctaatgggtacaatggacttaaaccacttggtgccatgatggggaggaatggggggattaaaggatggagggactaaaagttcaagatattaacaaaaggaacaaagaaaacaggggcactgatgggaggcaagaggatagaacagactgtacagtgggaataaagatcataccgtatttacaaaggaagtagaaaagacatggtaatggatatcaaattgagtgtgaaacctgggaaaggacagaaaactcctcccttttgcctgacctcctttttactcccctaccttggcctgtgctatcctgagacactcctcaattgctcaattaattctccaggaaaggcaaacctatagtcaatagttagcttggcaagaatataggttaataattagagttggaggaagctaacagtggagataggacttgagtagctgccactggtagttttatctataacctctcctcgaacctcgcattaacctcagatttcattgaattaaaaagaaggtgggagggcaagtaaatcaatcaaaacttccataaaacaagtaccccaactgaactaccatcaattaaagtgcaaactgcaggggtatatggtggctggggctgaggccatctaaaggccagaggggaaaaaatgcatatgtataaatcagaggatgggtaccagaaactgtccctcctccaatcagatcacagcagagccaaagatgcaggcaaccagtgaaaattctttggaagactctggggtccaacccccacgattaggggaaacgctacctaagaggctgcgtgaggggaaactgggcctttgaagagttacagagccacagttgacactgcacctccacctccgcccagttagcttacaaggcacctcctgcctggtgcctgagatcttgcctccccattctcacctctacctaggaacaccctccacaaggccaaatcatggataccgcaatgttttcaaatatgagaaactccaaccaaataaaaacaaaaaggaaatgtttccttactccctcctgctctgagctttattctcccccagggcccttaatgtaaatgaactggaaacctccttcctcagttcctgggttcaccactttctgcatcctggggagaggagaaaagaggctcaagaacagggactgaccaaaagcagaaggggaagggacaggagtcagaagtttttcgaaaaaatcctcgtgccgaattcgccaccca

SEQ ID NO: 261604 - DNA, 802 bp, Homo Sapiens
  misc_feature (26)..(26): n is a, c, g, or t
cttgtaaataggtatgatctttattnccactgtacagtctgttctatcctctgcctcccatcaggccctgtttctttgttcctttgttaatatcttgaatttagtccctccatccttaatccccccatccctccccatcatgcaaccagtggtttaatccatgtaccaataggggctagtaccacagaggcctcctgtggtgccctcgtatcataccacctgttcctgtggagagggaatgaccggcactgaaggtaccttacaactggctcatattatcagaggaccttggtcctttctaaatctctagtctctcttcatatccttcatcaggtgttttaagatgtctctgagaagccatcaaggcaaaagagaactttaagttccttgttccagcccggagttttgggaaagaaagaaaggaaaggtcacagtgacctaggattggaaccttcctgcccttttggcttgcagactgccttctatcccagaacagctgagaaatctatgaagctgagattctgaaggacccagcttaggttcttccacttaggcctcaattcccttccttttccaggggcagccttagttcccatggccctgaaacacacacatttcccccttcctttcccagaagccactggccccccatagcacccagtgcatcctttttacaagtggaagaactaggatggctttccaaagtcttcttagaaatgaagttctttctctgtgcagctttcccccttggagcaggagtgaagatgtttcattatcttgggcctggaaaccacttccccag

SEQ ID NO: 261605 - DNA, 427 bp, Homo Sapiens
tttttgccatctcagaagggctttatttctacttcatcacggtctcatacagacccagaggcatcatcatgtgtttccatttggtatccttgtgactttttgtagtgttttcccttaagaaaactttgagtaagctctgtacattgccagttaatcttttcacaataatttaaagatggtgttgctgttggatcatcgatgcaagaagaccaacaataaaagtacagtacaagggaattcacaacatattacagtggaacagactgagtcacatttaggtgatggcgaggacacagtagcggtatatacatgcacccgaagacgtgcaagccaagtaggataatataaggatcatacagtgaattttctaagcccactgaggactttgtaccttttcaaaatcatcctgtatcccctccagcataca

SEQ ID NO: 261606 - DNA, 592 bp, Homo Sapiens
  misc_feature (544)..(544): n is a, c, g, or t
tcgcgcacgcgcagtgctgcggcaacgtggggcgagggaccgttggcccttggccgcggaccgcgtgggccgagaactttgccagacgagacttgttttctctgggcagttggagggtctcgcggctcctacccttttttggaacggatcattttaaaagttctcgttagaaaccaattcggcgccggcaccctttgggtgaaacctaatcagcccgcgacgctgcctttctcactggtcacgggcaacagctaggctgctgttatttcgcaaggcagaagagaaaaggcatcctcgcgagcagatgaggaacctcggggataaatccttttgtggcttcaagtgtctaagtacattagagtcaggaacggcgctttccagcgtccgccatttttgtggcgtcaccgcgtcgctgctacgccatccccagcgcagtggctgccgcgctcctgtcccagtgtcccccgggaggtcggcccgtgcggtgacgcccctgagcgcggggtacgccgggagttgtagtcctgacggcacagccttgcancgtctccggaagtggaggcgggagcggcacggcagccactgcttgggg

SEQ ID NO: 261607 - DNA, 572 bp, Homo Sapiens
attgttgattagtcttgcagaaggctatagttctcgctgtcatccggtttttcagcttaaaaaacaggtgctgagctgtgaggagagcatcagggtttgggctctgctgcctttccccgaagaactcactcggcaagccgtcagattagaagataattctgaaacaaatgcctgccactctttgattacaaaaatgacggatgagctgtatcaccatatgcctgagaatcgttgtgtgttaaaggacttggatcgtcttcctactgagacgtggccccagcttctccgtgagctctgcagcacacctgttcccaccctgttctgccccaggattgtgctggaagtgctggttgtgctccgaagcattggcgaacagtgccgccgtgtgtccagccaggtcaccgttgcctcagagctgagacacaggcagtgggtggaaaggacgctgcggtctcgccagcggcagaactacctgcgtatgtggagtagtatcagactactgtcccctgtgctcagcctgatactgttactcattgcgctggagttggtcaacattcatgctgtttgtggga

SEQ ID NO: 261608 - DNA, 1241 bp, Homo Sapiens
  misc_feature (658)..(687): n is a, c, g, or t
  misc_feature (1179)..(1179): n is a, c, g, or t
tttagatttcccactttaaaatgcagtgatttgtgttgaatacatcttgattgtgctttacctaaagtattttcttaaaaggctttgtgtaaaatttaaatgtatatattttcctgtagacttccatcatgattttcagagattagccttaaaaaatttggccctaagaaattcattcagtgtttttctagatgacctctgtacatagaggtcattatagtggagaccctttaccagcagcattttaagatttaaattagatagaaagtttcttaggattcaactgaaaattggctagtaaaatatgtcccaggtaataaagcatgctgactttgctaaggcactgcccatttttatttaactaaagtcatggagattttgagtttaaaggatgcagtatagatagtggtttagtgtttaggctctaatgccagtctaaaaggcaagtcatttaaccttgggagcctcagtttcctcactgtaaaacagggataataatagtaactacctcagggttgttgtaaggattaaatgagatgatatttgtaagatacttagctcaagtgcctggcacacaatgagcacactctataaatgttctactactactattattaacacctagtctagggatgcacagcagaatcccctagggttnnnnnnnnnnnnnnnnnnnnnnnnnnnnnntgacggaatagccccactccagatcagaattcccagtgggctggggtctcggccagtgtattctccagtaatctcgccaggtgtttgaaacacccagtgctatctgaaaactatcagtaccccaaccctttgctttatagattaagaaactagcagaagatggttaaattacttgcctattgtctcagaacggttaattagtggcagagccaaggctagaattcaagtctcttgactttatggttgtggggtctttccaccatacctgctgccatgtgagacactgcaaaaaagtggctcagaccgacaatcagcctgtgtggtgctgcacactttctaaagcacatgctcctgacactttgaccttaacgggcttgaatgtggagtaatgggaacacaagccaagcaagcactcagtagaattcagtcatttaaaaaattcagtggggtcattcttttggacagacctcagcaacacagcaatgtgcactntgtagtaaagaaataccaacttgagtttttaaaaaacctagttagtcctacattcccttttc

SEQ ID NO: 261609 - DNA, 306 bp, Homo Sapiens
caaattgtcttctgaacaggaattaacattggttttgatgaaggtgagggtcagttctcaagatttgtgctaatcataaaatgaatgaatgcaaaacaccttgtaatttcatatggaattataaaaattaggtttgctgggttttggcctaataagagtgctagtatgtattggttagaatacatcttactatttcacattttaaaaatcagtacactcttcaggattttcttttatttcaacttggagcctagattactttgccaaatgtattattttcataatgcaataaaatataaattagaa

SEQ ID NO: 261610 - DNA, 738 bp, Homo Sapiens
  misc_feature (130)..(130): n is a, c, g, or t
  misc_feature (255)..(255): n is a, c, g, or t
tgaccaaaccccacacacacccaaaccttgatttgggagacggtgtctccactgagcacctgctgggctgagcttctacctacgagtgaaactctgtcctcccgcgaggaccaggcatcgctgtgtgagnacggcacggccagcgcctgctgtgagtgggtctcccaagactaggcctcaggacgcggggggagccatccccgccgccctcacaggacccaccaggcagcggagacatgtggaattagagtattntgaggtgtcctttctttacaaaataatggggtcttgggcatttcacatcactccatttctactgagactttcagaatcacacaggccctttccgtggatttcatttggggcaaagaaacaacgtagttttgtttttgttttcagcctatggaatgatttccttttgtctgtcttgttcaagttcagacgaagctactctggcatctgcacatttccgtgttacagcagctgcctgatgaattttatccacctccatttcagcatgtggctcgcgtggacaggtggacggacgctgtggccgcatggaaccttgagaacccagggacgagccagtgccgggaaggaactgccgggactcaccgagctgcacttaactgttctctttctggctattttttgttgtttgtttctttgtgttgactttgtccctggcaaaattttccactctgagtaaaacaagtctcctaagtattgtgtatgttt

SEQ ID NO: 261611 - DNA, 741 bp, Homo Sapiens
  misc_feature (110)..(110): n is a, c, g, or t
  misc_feature (148)..(148): n is a, c, g, or t
  misc_feature (225)..(225): n is a, c, g, or t
agagatcacccttgcagtgagtgtgagttccttccaggtgtgtgcgcgtacactcaccctctgaattgctgccgctgccaaggaagtgggctccaggtgaaggccagtgncacgtcactctggctggccttcttagtagtttcatttntccggaagctgagccagtctcctggtctagcccaggttgccagaacgcttaggcattgcagagtgctagagccagtngagaacttgccaacttgattgttttacagcagaggaaagaggatcacagagggaaagtgattcacccaaagtcacacagcaagttcatggctgagctgagaccaggattaagcttcctgactcccagttcaccatgaaaagggttctggcaacaggttcaagctggagaatccttcaaaatgctacacccacattctctccaactcttcatctccctgatcttccagacaaactacctggatgttgcccttaaaccatttctagctgttaaccctatccagaaaaatgattgagtgatagctgagaagtggaaagtgtgggatttttggcaggtgctctctttcctccgccccccgcgccatcctttctcttcctcctctctgtaatggtatgtccagcctcactctccctccctggtgctgtatgcgttccccctgttagctacatttgtgatcacatacccttcttttaagtgaatttttttcatttgatttgtcaataaacgaatcaaactgg

SEQ ID NO: 261612 - DNA, 947 bp, Homo Sapiens
  misc_feature (53)..(64): n is a, c, g, or t
aatttataaaatatcctttatttattctaaggaacagtcaagcagtagctttnnnnnnnnnnnngctacattttttgaaagatattcttagtgttgtgacctggcattgggcccctgtgagcgggacggtggctgagaccgcctgctgtggctttgcgagttctctgcactcactggcaggggtttggtgggaaacggggaagctttggcatggttctgtccagttgcttataatcaagaataatgagttttgaggtttacaaagagcagaagtaacatttatacggctggcatttgacaaaagattgctgataatatactcattccaggaagtgtaaaaatgctttaaaggaatgataatttgtacttactgtttatggggactagatatattagaattatagcatcattatggggacatagtgtttccctataaattcagaaattctctggttgatgtaaaatcatacttcctggttttacttaattagtaaagaaataaataaattagagtaacatttagtcaggtagagttactcctttttccccttctttattaataaattttatttttagcacaatcatttacccaaaaagagagtttgagaatgttcgagaatctctaccactcggtaaccatgctggctgttatatcagaaaaatccataaacatacacagcagcgagctgttttcacaagacttcctgctaataaacacaacactttctcctccactcagatgggagcctcagatgccaaaacgcagatgtgccaactaactataggctcgttgctaagcagagaaacctatcaagtttgtccagcaaattcgattgtacagtgggatggcgtctgctctgcggccttggacagggagccactggtctgtgctgctgtctcctgaggcaggtcgaagctggggcccttagagggcaggtaaaagggtt

SEQ ID NO: 261613 - DNA, 599 bp, Homo Sapiens
  misc_feature (473)..(473): n is a, c, g, or t
  misc_feature (496)..(496): n is a, c, g, or t
  misc_feature (526)..(526): n is a, c, g, or t
  misc_feature (532)..(532): n is a, c, g, or t
  misc_feature (537)..(537): n is a, c, g, or t
  misc_feature (583)..(583): n is a, c, g, or t
taaaggcatcagctgcagcatctctgttgcatacaaattcactaagtacaaaaaaactcctagacttttgggcccattgcttattacataaaattgtttccagcagtagggtttaagacaaaacacaagtgaaataaaatgtacaagtttgttccatagaaacaccgaaaacacggttatgtccttctacaattcagtaaaacaaacactgccacaaacaccctcaggttcacagtttagatttcattcattcaataattattttctaagtactttcattactggggatgcagtaatgaataataaggtccctgttttcttggagcctctgttccagcagtggggcaggggagacagacagcaaacaaaataaatcaatataccacgttagtagtcacatggttactgggtagggaaaggaaagcttctgcacacctaaaccccttaagagcaatttgaggctgctgcaaatntcacggcctcttttaggggaagntaaaaactctaagttttatatatatatatntaaatnggaantggggtctgggccatgttacccgggttgggttgatcttgaactccngggcctgaagtgatcc

SEQ ID NO: 261614 - DNA, 1024 bp, Homo Sapiens
  misc_feature (986)..(986): n is a, c, g, or t
cagttggagccagacagcggggtggacaagtggcgtgtgtgctgcgaccccgagggaagatgaacgggacgcggaactggtgtaccctggtggacgtgcacccagaggaccaggcggcggaatatatatgtcccagatgtgaatcaggctttattgaagaagtgacagatgattccagttttttaggtggtggcggcagtcggatagacaataccacaacaacacattttgcagagctttggggccatttggatcacacgatgttttttcaagattttagaccctttctaagtagcagtccactggaccaagataatagagccaatgaaaggggtcaccagactcacactgacttctggggagcaagacctccacggttgccattgggtcggagatacagatctcgaggaagttctcgtcctgacagatctccagctattgaaggaatactacaacacatctttgcaggattctttgcaaattctgccattcctggatctccacaccctttttcctggagcgggatgctgcactccaaccctggggactatgcctggggtcagacagggcttgatgccattgtaacccagcttttaggacaactggaaaacacaggccctcccccagctgacaaggaaaagatcacatctcttccaacagtgacagtaactcaggaacaagttgatatgggtttagagtgtccagtatgcaaagaagattacacagttgaagaggaagtccggcagttaccttgcaatcacttctttcacagcagttgtattgtgccgtggctagaactgcatgacacatgtcctgtatgtaggaagagcttaaatggtgaggactctactcgggcaaagccagagcactgaggcctctgcaagcaacagatttaggcaatgacagtcagctacatggaccgatgggactttcttgaagctaaagaccacacctggaatcagggctgttggtaatcatctttaccntaggctgttaaattgttatccaaaaccaaaaattaggt

SEQ ID NO: 261615 - DNA, 666 bp, Homo Sapiens
cgaggtcactcctttttgctctggcgtcgtcatgtggtactttaggtagcttcacattttatgttctagttaagtaaaattcttagagaatgaggtactatctctggatagtctgtttgatcttgaaaatgtacagaattctttgcctcttgatcctggaggactagtgactttccagctctgagagagaacaggatccctctgccaatttttttctgtggtgtaaggcagagcctggtcactccatctaatgctgtctatctcatctcacgtataggagcgggatgctgcactccaaccctggggactatgcctggggtcagacagggcttgatgccattgtaacccaggtgaggagctgccttttgagggtgtctgttcagtgtgtctcatggttccacaggcttcctgctttccttctgctactttctgaaatggcagtcactctgctttctctaatattttgagctttggggtttccattttactaaagggatgaatgatttatggggttagctcagcatccatgcacttcctaggtctgagggaatttctagaagatggtttcacctccataggaagaaaagacttctataacaaatagtattttgtatttttgtctctcttgctcagttctataaggattctattaacaaatatttcaca

SEQ ID NO: 261616 - DNA, 542 bp, Homo Sapiens
  misc_feature (426)..(442): n is a, c, g, or t
cttatcaggagacaatcagcattacaacacctccttgcttgccgctgcagcagcagcagtttcagatgatcaagacctcctacactcgtctcggtttttcccgtatacctcctcacagatgtttcttgatcagttaagtgcaggaggcagtacttctctgccaaccaccaatggaagcagtagtggcagtaacagcagcctggtttcttccaacagcctaagggaaagccatagccacaccgtcacaaacaggagcagcacggacacggcatccatctttggcatcataccagacattatttcattggactgattcccaggccctgctgctcccatccccaccccagatcgaatgaacttggcagaaagaagagaactttgtgctctgttttaccttactctgtttagaaaagtatacaagcgtgnnnnnnnnnnnnnnnnnagggaaaaaattaaaagaaatgtacagagaacaaaactatattttcagttttacttttgtatataaatctaagactgcctgtgtgataaaacacttgttt

SEQ ID NO: 261617 - DNA, 565 bp, Homo Sapiens
atttctctagcctggcttctcactggtatcatgaaggtcatggcacagacaataactgttccaaatatatgacgtattgttcctgtgctttctaggctgggtagataccctatatactctgtttttcccattatcccaactgaatagtattataatatattccctcccctgcccccaccaagtacatagcctcaatccaaaaggagaaagctggatcactcacctcttcccaatctacaccttttaagttgttttagaaacaataagagatgacctgccctctccattacactcgttggttctgacacacagaatagcaaacaaaaccaatttacgtgatgcccatgtctttacacttccacactctggaacaaacacacttgcaaacaatcagctcggggagtgttaaaaggccctcaaaaaattcagaatatctctaagtataaaataattcaaaaacatccagttccaaatagtccctgagcacactgttcattccagcaagaagtctccagagaggtaatgaatgaaaggcacattttctcgaacttgaggaccgctgcat

SEQ ID NO: 261618 - DNA, 514 bp, Homo Sapiens
ttttttagacaaatgctcactttaatcacaattctaaattaattattttcacattaatatagatatttccataaaccaagaaaaactgagttattatacattttttaacagctaacatgatttgaaaattttttattaaaaattgatcagaagctagttgaaattctcaatgtaaatataaaatattcattacaattgtttttcaaagtaaattcagatctaagcttcctgaaaagctgtactatctcatatcataatagggatgactaagtacttgacaactactttctaaagaacttaacaaaaagtgactacttgaagattacatttacaacagaaaggctaacattctctgcagagctctcattttatcatgaaatgtggacaatcaggaacacgtggatgagtggtatcaagaaaaagggcatttcaaaatatttccacttttattaaaggttttgacaatgaagatttcataaaatgtctttaaataccatttttctagagagtaacc

SEQ ID NO: 261619 - DNA, 125 bp, Homo Sapiens
gtgaagacatcttcttggtttttattttgaaacaatttttaggcttgttccgggggtctctgtgctgcctgtactgtattgacctgttttataggtgcctttttattaaaaagaaaattcaaaaa

SEQ ID NO: 261620 - DNA, 480 bp, Homo Sapiens
caaaagtagtttcagattagcagaaataaagagctttaagttttaaaagttgagattgaatatttaatgaaagtttattaattctttttccaggaatagcagtaaggtcagtttttttccctaaaataaaaagttttaataaacagaaaattatagcaacagtacttaggagaatagttgaagattgtattaattttaattataatagttatttgtcataggctattgatgattagaatttcattagttttgtccactataattttaaaaatagttgtgtcaaatacaaattctggtaaactgttaggttttaacaccagacagtattcaaaggaaattaatgtttgcaaacataaatccatagtcttcatttctttatattgtcacctttgtaaaagtgtttaaaatttgtattgtttgttttgtatatctttgggcatcttgtgtctagctataataaaaagaaacggtgccaaggtt

SEQ ID NO: 261621 - DNA, 570 bp, Homo Sapiens
acagtggacagaactaattccagattcaatcctttccaatgtgtcccataatatcaattactgcatgttttctgacatctcatatgtatggagaatgaagggtgggaaatgtcaagcccagggccaggaagtacggccatatatcaggggaagtatgataataacactaaggaaataagactaaaaaatcaagaagagatgtggggccaaaataacacatggaagatcagattacatcatgtcagacctttcatgattcagtttggggtcactgttctagtgatgacgtaccaaaaactgtagacagtattctcatggtgttcgctagtgtcatctttcaagttctaaaggaatttcatccctttgaactggaaagcggaagacaaataatcatccaacttttgagttattttggtggaacagatggattgagttatttatatttatacatatatatatcagactcagggaaaaataaatttggtttagtctactggcacctacattcttgtttaccaataggttgttaatgactggattatgaaaaggctgacaaaaatcttggaaaat

SEQ ID NO: 261622 - DNA, 635 bp, Homo Sapiens
  misc_feature (33)..(33): n is a, c, g, or t
  misc_feature (456)..(456): n is a, c, g, or t
agcacagaaagaggaaggacagcacagccgacnagccagtgctcagaaagtttctggatcctaggctcagctccacagaggagaacacacaagcagcagagaccatgggaaccctctcagcccctccctgcacacagcgcatcaaatggaaggggctcctgctcacagcatcacttttaaacttctggaacctgcccaccactgcccaagtcacgattgaagccgagccaaccaaagtttccgaggggaaggatgttcttctacttgtccacaatttgccccagaatcttaccggctacatctggtacaaagggcaaatgagggacctctaccattacattacatcatatgtagtagacggtgaaataattatatatgggcctgcatatagtggacgagaaacagcatattccaatgcatccctgctgatccagaatgtcacccgggaagacgcangatcctataccttacacatcataaagcgaggtgataggactagaggagtaactggatatttcaccttcaacttataccaccctgctccagcacaggcccagcgagagacacacactcaagagctctcacataacaaatgaaggaatggaatgaagaaatgaatgatccaaaacctcttt

SEQ ID NO: 261623 - DNA, 888 bp, Homo Sapiens
  misc_feature (25)..(25): n is a, c, g, or t
aaaatgtccaggcctcctcctcagnatcttaaccaccatcactgaacctgaaatcctgtgtttcccaaagtgtccttgtcactgtcatgagaggatcaaggagaggaccttgttttctttccccactcacactctacaccaccacaggcccagcgagagagacacacactcaggagctctcacatgacaaatgaaggaatggaatgaagaaatgaatgatccaaaacctctttagagattggatcttggatgcagaatcctaggaggttctagccacacctgtcccttgtccttcagaggctggacatccatgtttcatccccccacttacctctttgcccctaaagccaccccacctcatgtaattctgaagctcttaagccaccggagggttctcgagggctccttggtcctggactatggaactgggggcacctggtccctggagtttctgaagacagtgtctccctcactgctcactgccatggtgtatctgcctctctctgcttctctgtgtccctcatcttcctcccacttcattctgactggcaagccctgtcctgcacagcttcttcctcaacctctaggccttccctagacactccctctaaccactctggctgttcagttcccttcccactaacactgtggcctggcccacctcccaggaaagaggaaaggcacagaaatcatctggagttgccactcctgccaggcttcctctcgagccaatgtccccaggtcactaagagaatgaccttccactgtattcccatccagggctctttccctttgtgaggctgacctgtggacaagaccatgggacagggataggcagttcctccatccactctcataattgccagacaagttcctctggcctcctgc

SEQ ID NO: 261624 - DNA, 869 bp, Homo Sapiens
  misc_feature (838)..(838): n is a, c, g, or t
ctggcatacagtgagttgagaaacagtatattccaatgcatccctgctgatccagaatgtcacccaggaagacacaggatcctacactttacacatcataaagcgaggtgatgggactggaggagtaactggatatttcaccttcaccttatacctggagactcccaagccctccatctccagcagcaacttaaaccccagggaggccatggaggctgtgatcttaacctgtgatcctgagactccggatgcaagctacctgtggtggatgaatggtcagaagcctccctatgactcacagcttgcagctgtccaaaaccaacaggaccctctacctatttggtgtcacaaactatactgcaggaccctatgaatgtgaaatacggaacccagtgagtgccagccgcagtgacccagtcaccctgaatctcctccgtgagtatcttctgttcctctgtgagccaggctgccatcccaaatacaaatggccagaggccaggcctctcagtccctctcaggtccaagtacagagacctttacccctgaacatcaaagctggccatgacttcctgccccaggcaaaccagagtaggcctaggcttgatcaacaataagagaaaagaggctgctcctgtcatgggagactcagggtccacagcttgtgatggaagaaacaggtgaatgtctcaggctccagatcagtgaacacagcggggatttggctgggacttcagtgttgcaacttggctcacagggtcactgtgactgtgtcccttccacagaccaggattttcccttccctctgacaatatcgcctgtgacattattctctttgctncgcatggcctggatgctcccaccgtttcttc

SEQ ID NO: 261625 - DNA, 638 bp, Homo Sapiens
  misc_feature (545)..(545): n is a, c, g, or t
  misc_feature (576)..(576): n is a, c, g, or t
  misc_feature (605)..(605): n is a, c, g, or t
  misc_feature (610)..(610): n is a, c, g, or t
  misc_feature (628)..(628): n is a, c, g, or t
ttaacctgtgatcctgcgactccagccgcaagctaccagtggtggatgaatggaccctatgaatgtgaaatacggaacccagtgagtgccagccgcagtgacccagtcaccctgaatctcctcccgaaactgcccaacccctacatcaccatcaacaacttaaaccccagggagaataaggatgtcttagccttcacctgtgaacctaagagtgagaactacacctacatttggtggctaaatggtcagagcctcccggtcagtcccagggtaaagcgacccattgaaaacaggatcctcattctacccagtgtcacgagaaatgaaacaggaccctatcaatgttgaaatacgggaccgatatggtgggcatccgcagtttacccagttcaccctggaatgtcctcttatgggtccagaacctccccagaattttaccctttcatttcacctatttaccgtttcagggaggaaaacctcggacttgttcctgctttcgcgggacttttaacccaccaggcaggaatatttcttggggacaattnaatgggggaagttttcagcttattcagggancaaaaggtttttttattccccccaggttnatttncaaaggcttagggggggnttttattggt

SEQ ID NO: 261626 - DNA, 612 bp, Homo Sapiens
  misc_feature (542)..(542): n is a, c, g, or t
  misc_feature (564)..(564): n is a, c, g, or t
  misc_feature (590)..(590): n is a, c, g, or t
gagactagagaagaaattcgacatttcaccttcaccttatacctggagactcccaagccctacatctccagcagcaacttaaaccccagggaggacatggaggctgtgagcttaacctgtgatcctgagactccggacgcaagctacctgtggtggatgaatggtcagagcctccctatgactcacagcttgcagctgtccaaaaccaacaggaccctctttctatttggtgtcacaaagtatactgcaggaccctatgaatgtgaaatacggaacccagtgagtgccagccgcagtgacccagtcaccctgaatctcctcccgaagctgcccaagccctacatcaccatcaacaacttaaaccccaggggaggattaaggatgtcttaggctttcacctgtggaacctaaggagtgaggaactacacctaacatttgggtgggttaaatgggtcagaggcctcccggttcagttcccgggggttaaaggcggaccctttggaaaacagggttccttcatttcttaccccagtgttcacggnggaaatggaaacaggggacccnttttcattgttggaaattaggggganccgttttgggtgggctttccgc

SEQ ID NO: 261627 - DNA, 426 bp, Homo Sapiens
cgagaataaggatgtcttagccttcacctgtgaacctaagagtgagaactacacctacatttggtggctaaatggtcagagcctcccggtcagtcccagggtaaagcgacccattgaaaacaggatcctcattctacccagtgtcacgagaaatgaaacaggaccctatcaatgtgaaatacaggaccgatatggtggcatccgcagttacccagtcaccctgaatgtcctctatggtccagacctccccagaatttacccttcattcacctattaccattcaggagaaaacctcgacttgtcctggcttcacgggaatcttaacccaccaggcaggaatattcttgggacaattaatggggaagttttcaggcaattcagggacaaaaagctctttattcccccaggtttatttacaaggcttgg

SEQ ID NO: 261628 - DNA, 777 bp, Homo Sapiens
  misc_feature (35)..(35): n is a, c, g, or t
  misc_feature (233)..(233): n is a, c, g, or t
cccagtcaccctgaatctcctccatggtccagacntccccagaattcacccttcatacaccaattaccgttcaggagataacctctacttgtccttgcttcgcggaactctaacccaccggcacagtattcttggacaattaatgggaagtttcagcaatcaggacaaaatctgtttatcccccaaattactacaaagcatagcgggactctatgtttgctctgttcgtaacntcagccactggcaagggaaagctccacatcgttgacagtcaaagtctctgcttctacaagaataggacttcttcctctccttaatccaacatagcagctgtgatgtcatttctgtatttcaggaagactggcaggagatttatggaaaggtcctccttaccaaggactcttgaatacaagctccctgataaccttcaagatccatacccactggacctaagaactttcaaaattttaatgaacaggctgataccttcatgaaattcaagacaaagaagaaaaatactcaatgttattggactaaataatcaaaaggataatgatttcataattttctatttgaaaatgtgctgactcttggaatgtttcattctccagatttatgaacattttttcttgagcaattggtaaagtatacttttgtaaacaaaaattgaaacatttccttttgctctctatctgagtgccccagaattgggaatctattcatgagtattcatatgtttatggtaataaagctatttgcacaagttcagtaagaaaa

SEQ ID NO: 261629 - DNA, 1107 bp, Homo Sapiens
  misc_feature (308)..(308): n is a, c, g, or t
ctggatatttcaccttcaccttatacctggagactcccaagccctccatctccagcagcaacttaaaccccagggaggccatggagactgtgatcttaacctgtaatcctgagactccggacgcaagctacctgtggtggatgaatggtcagagcctccctatgactcataggatgcagctgtctgaaaccaacaggaccctctttctatttggtgtcacaaagtatactgcaggaccctatgaatgtgaaatatggaactcagggagtgccagccgcagtgacccagtcaccctgaatctcctccantggtccagacctccccaagaattttcccttcaagtcacctcttactattcaggagaaaacctcgacttgtcctgcttcgaaaactctaacccaccagcacagtattcttggacaattaatgggaagtttcagctatcaggacaaaagctctttatcccccagattactccaaagcataatgggctctatgcttgctctgctccgtaactcagccactggcgaaggaaagctccacatccttgacaatcaagagtcattgctcctccaggattaggaacttttgctttcaataatccaacgtagcagccgtgatgtcatttttgtatttcagggaagactgggcagaaagttgctttcattcttcctcaaagtatttaaaatcagcttacagtccaaaattgcctttttgttcaaggagatttatggaaaagactatgaaaaggacccttgaatacaagttccctgataacttcaagatcatacccactggactaagaactttcaaaattttaatgaacaggctgataccttcatgaaattcaagacaaagaaaaaaacccaattttattggactaaatagtcaaaacaatgttttcataattttctatttgaaaatgtgctgattctttgaatgttttattctccagatttatgcactttttttcttcagcaattggtaaagtatacttttgtaaacaaaaattgaaacatttgcttttgctccctaagtgccccagaattgggaaactattcaggagtattcatatgtttatggtaataaagttatctgcacaagttc

SEQ ID NO: 261630 - DNA, 961 bp, Homo Sapiens
  misc_feature (63)..(63): n is a, c, g, or t
  misc_feature (68)..(68): n is a, c, g, or t
ggatgcctgtggaggaatcaaaggtgccacacaggacaatcttctgttatccacacagcgacncactnatgccttacatcaccatcaacaacttaaaccccagggagaagaaggatgtcttagccttcacctgtgaacctaagagtgagaactacacctacatttggtggctaaacggtcagagcctccccgtcagtcccggggtaaagcgacccattgaaaacaggatactcattctacccagtgtcacgagaaatgaaacaggaccctatcaatgtgaaatacgggaccgatatggtggcatccgcagtaacccagtcaccctgaatgtcctctatggtccagacctccccagaatttacccttcattcacctattaccgttcaggagaaaacctcgacttgtcctgcttcacggaatctaacccaccggcagagtatttttggacaattaatgggaagtttcagcaatcaggacaaaagctctttatcccccaaattactagaaatcatagcgggctctatgcttgctctgttcataactcagccactggcaaggaaatctccaaatccatgacagtcaaagtctctggtccctgccatggagacctgacagagtctcagtcatgactgcaacaactgagacactgagaaaaagaacaggctgataccttcatgaaattcaagacaaagaagaaaaaaactcaatgttattggactaaataatcaaaaggataatgttttcataattttttattggaaaatgtgctgattctttgaatgttttattctccagatttatgaactttttttcttcagcaattggtaaagtatacttttgtaaacaaaaattgaaatatttgcttttgctgtctatctgaatgccccagaattgtgaaactattcatgagtattcataggtttatggtaataaagttatttgcacatgttccgtaaaaaaa

SEQ ID NO: 261631 - DNA, 475 bp, Homo Sapiens
atagcgggctcaatgtttgctctgttcctaactcagccactggaaggaaagcctccaaatccatgacaggtcaaagtctctggtaagtgaatcccagcatcgttggcaatagggttttaggtggagtctatctggcattcagagaagagtcaggaaaacaattgtattcccagcctgtgtcccatgggcacaagcaaatcccaaattctcctcctgaaccctccaaatttgtctaagaacttcgaaaactttaacaaacaggctgatatcttcataatattcccagcctagaccaagcaggaagaacattgatttcattgaaataattgataataatgaagataatgtttttatgatttttatttgaaaatttgctgattctttaaatggtttgttttctacattgatggaatttttctcttttaatctatctacagcttatagcagttcaataaactatacttctgggaaccgt

SEQ ID NO: 261632 - DNA, 1297 bp, Homo Sapiens
  misc_feature (21)..(21): n is a, c, g, or t
  misc_feature (28)..(28): n is a, c, g, or t
aacgaaacagaaccaaacaanagaaccnccccaagccttggtaagtaaaaagggccggaataaaagaaccttttgcccccggtaacctgaaaacttttcaattaattgtcccaagaatactgtgcccggtgggttagagtcccgcagaacaggacaagtaagaggacttctcctgaacggtaataggtgaatgaagggtaaattctggggaggtctggaccatagaggacattcagggtgactgggtcactgcggatgccaccatatcggtcccgtatttcacattgatagggtcctgtttcatttctcgtgacactgggtagaatgaggatcctgttttcaatgggtcgctttaccctgggactgaccgggaggctctgaccatttagccaccaaatgtaggtgtagttctcactcttaggttcacaggtgaagtttaagacatccttattctccctggggtttaaagttgttgatggtgatgtagggcatgggcagcttcgggaggagattcagggtgactgggtcactgcgactggcactcactgggttccgtatttcacattcatagggtcctgcaatatactttgtgacaccaaatagaaagagggtcctgttggtttcggacagctgcaacctgtgagtcacagggaggctctgaccattcatccaccataggtagcttgcgtccagagtctcaggatcacagattaagcgcacagcctccatgccctccctggggtttaagttgctgctggagatgtagggcttgggagtctcccaagtataaggtgaaggtgaaatgtcgaatttcttctctagtctcatcacctcgctttatgatgtgtaaggtgtaggttcctgcatccttccgggtgacattctggatcagcagggatgcgttggaatatactgtttctcttccactgtatgcaggcccatatataattattttaccatcaactatatacgatataatgtaatggtagaggtccgtcatttcccctttgtaccagaagtagccaggaagattctggggcaaattgtggacaagtagaagaacatccttcccctcagaaactttgggtggctgggcttcaatcgtgacttcggcagtggtgggcgggttccagaagtttaaaagtgatgctgtgagcaggagccccttccaggtgatgcgctgtgtgcaggaaggggctgggaggggccccatggtctctgctgcctgtgtgttctcctctgtggagatgagcctgggatccagaagctatctgagcacggctgctcagctgtgctg

SEQ ID NO: 261633 - DNA, 543 bp, Homo Sapiens
  misc_feature (434)..(434): n is a, c, g, or t
  misc_feature (491)..(491): n is a, c, g, or t
  misc_feature (496)..(496): n is a, c, g, or t
  misc_feature (523)..(523): n is a, c, g, or t
gtcagagcctccctatgactcataggtttcagctgtccgaaaccaacaggaccctctttctatttggtgtcacaaagtatactgcaggaccctatgaatgtgaaatacggaactcagggagtgccagccgcagtgacccagtcaccctgaatctcctccatggtccagacctccccagaattcacccttcatacaccaattaccgttcaggagataacctctacttgtcttgcttcgcgaactctaacccaccggcacagtattcttggacaattaatggggaagtttcagcaatcaggacaaaatctgtttatcccccaaattacttacaaaggcatagcggggctctatgtttggttctgttcgtaaattcaggccactggggaagggaaagcttccacatcgttggacagttcaaagtctctggtttcttncaaggattgggattttttcctttccttaattcccaacattggcggtgtggttgttcntttcngtattttcgggaggattgggcgggagnttttggggaagggttttttt

SEQ ID NO: 261634 - DNA, 433 bp, Homo Sapiens
  misc_feature (40)..(40): n is a, c, g, or t
ccctatccaatggtgaaatacggggaccgatatgggtggnatcccgcaggttacccaagtcacccctgaatggtcctcctatgggtccagacctcccccagaatttaccccttcattcaccctattaccgttcaggagaaaacctcgacttgtcctgcttcacggaatctaacccaccggcagagtatttttggacaattaatgggaagtttcagcaatcaggacaaaagctctttatcccccaaattactagaaatcatagcgggctctatgcttgctctgttcataacctcagcactggcaaggaaatctccaaatccatgacagtcaaagtctctggtccctgccatggagacctgacagagtctcagtcatgactgcaacaactgagacactgagaaaaagaacaggctgataccttcatgaaattctt

SEQ ID NO: 261635 - DNA, 420 bp, Homo Sapiens
  misc_feature (16)..(16): n is a, c, g, or t
  misc_feature (25)..(25): n is a, c, g, or t
  misc_feature (48)..(48): n is a, c, g, or t
  misc_feature (69)..(69): n is a, c, g, or t
  misc_feature (88)..(88): n is a, c, g, or t
  misc_feature (178)..(178): n is a, c, g, or t
  misc_feature (188)..(188): n is a, c, g, or t
ccgaagcccccggggnaaggggggncccccagcatccgtggggcaaanaggggttttaaggggggaagncctatcctgggcattccangagaagagccagggaaaacaattggtattcccccagcctgtgtccccatggggcacaagcaaacccccaaattccccctcctgaaccccnccaaatttgnctaagaacttcgaaaactttaacaaacaggctgatatcttcataatattcccagcctagaccaagcaggaagaacattgatttcattgaaataattgataataatgaagataatgtttttatgatttttatttgaaaatttgctgattctttaaatggtttgttttctacattgatggaatttttctcttttaatctatctacagcttatagcagttcaataaactataaaa

SEQ ID NO: 261636 - DNA, 1033 bp, Homo Sapiens
  misc_feature (190)..(284): n is a, c, g, or t
aaaggtttaatacagtcaatgaacaagatgccacacacagaggaaccaatgtcagctaccatattactaccattatcattagccttgaggtcaaatagtcctagaatcaaatctcagatccacctgtcactagccatatgacaccaggaaagattttacaccacgctaagcttctgtcttttcattgccnnnnnnnnnnnnnnnnnnnnnnnnnnnnnnnnnnnnnnnnnnnnnnnnnnnnnnnnnnnnnnnnnnnnnnnnnnnnnnnnnnnnnnnnnnnnnnnacctcaacagtaccttcctttttccatacatatggaaaaagaggtaacacatagaacactagaacatggctactgactacttgtgggagagaaagaaaaaaagctaagtgcaaagaatcaagcctggtatgttagtttttaccaactgagatgcatccaagatgggattagacatacaagataatttatcagggaagacacctgtgagggaatgtggggcaggcatgaaggtagtatgggagaacccacagaccgctatgcagagctgattcctgtgaaaaagaaagagaaagaagttttaggtaccaatgcagttctaagagtttttgcaaggctgatgaggaatcctccaaccagtcacccattggagttaaagagagcctcggagaactagacttgctttcacacccttgctgggagcctgtgggaaagaagctttctctgtaaaaggaggtagtgaatttgaaatgcgctgacctgggccttctgttcaatcaggtccctgccatggaaaccagacagagtctccattaatggctgccacaatagagacactgagaaaaagaacaggttgataccttcatgaaattcaagacaaagaagaaaaaaactcaatgttattggactaaataatcaaaaggataatgttttcataattttttattggaaaatgtgctgattcttggaatgttttattctccagatttatgaactttttttcttcagcaattggtaaagtatacttttgt

SEQ ID NO: 261637 - DNA, 1188 bp, Homo Sapiens
  misc_feature (1099)..(1099): n is a, c, g, or t
aagcgaaaaaaaataggcatgaacagttgtctaataaagcaggctggtaccggtcccggaattcttcgggatatcgtcgaccacgcgtccggcgctccgaggttcgaggctgtgccccgcgaccccgccttcggcgctcggctcgcaggatggatcccgtacccgggacagactcggcgccgctggctggcctggcctggtcgtcggcctctgcacccccgccgcgggggttcagcgcgatctcctgcaccgtcgagggggcacccgccagctttggcaagagcttcgcgcagaaatctggctacttcctgtgccttagttctctgggcagcctagagaacccgcaggagaacgtggtggccgatatccagatcgtggtggacaagagccccctgccgctgggcttctcccccgtctgcgaccccatggattccaaggcctctgtgtccaagaagaaacgcatgtgtgtgaagctgttgcccctgggagccacggacacggctgtgtttgatgtccggctgagcgggaacaccaagacagtgcctgcataccttcgaatacgggacatggcctccctccgccatctgttgtacgatggccatcgtccctacggccagccgtctaacctcctgcagctttccgtcgccgccaatcattggtatccccccttcccttagtttccctccgccctttccgttctacatgtcgtgccactcccgctcttgccaggtgcttcccacttccgtgcccccgcttcctttcctgtacccacttccccgatcccatttggcgccgccttgtattcccgacgcgccccatttttcgccttcgttacgccattcttacgtacttgcgtattgttctcccccccaatttgccgattacctcagcgccgacggacgccgcaagaaccggtaaactaggaccacgacattgatccggccgcgcgccaacgcatccggtgtataatgcgagcactttgtcgcctcactgtgcgcccgatcattccgcccccgcggtacgtggccactgcccgcaacccttcgacccgattgcctgtaaccacgaaacacgccaacacagttgtatatccctctcnctatggcgcgggagaccggccgccccgctgacacaattagacccggtggggaaacagccggtgaaacgtagtgaacgctactctatagt

SEQ ID NO: 261638 - DNA, 610 bp, Homo Sapiens
  misc_feature (78)..(78): n is a, c, g, or t
ccggcagcggcggcggtggtgaaggccgatgctgtgggggtggccgaggagagaattcttctgtgggtcctctgaacnttgagtggtcggcttggtgtggtgtgcggaggagctccaggcccgtcggcgcggagtggtctcacgtgtgaaacatggctacagattggctgggaagtattgtgtccatcaattgtggagatagcttgggtgtctatcagggaagagtgtcagctgtggatcaggtcagccagaccatttctctcacccggcctttccataatggagtgaagtgtcttgttccagaagtcaccttcagggcaggtgacattacggagttaaaaattctggagataccaggacctggagacaaccaacattttggagaccttcatcaaacagaattaagcccctctggtgctggctgccaagtgggcatcaatcagaatggcacaggcaagtttgtcaagaagccagcctcttccagcagtgcccctcagaatatccctaagaggacagatgtgaagagccaggatgttgccgtttccccgcagcagcaacagtgctcaaagagctatgtcgacaggcacatggaatccttgagtcagtccaa

SEQ ID NO: 261639 - DNA, 1299 bp, Homo Sapiens
gggagagacgcagtcgtaacgcacttccggcggtctacgcgaggaagatggctgcatcccagcagcaagcttcagcggcttcctcagctgctggtgtatcgggtcctagttcggctggcggcccgggtccccagcagcagccgcaaccgccagcacaactggtgggccctgcccagagcggcctcctgcagcaacagcaacaggacttcgatcctgtgcagcgttataagatgctcatcccgcagctgaaggagagtctacagaccttgatgaaggttgcggcccaaaacttgattcagaacactaacatcgacaatggacaaaagagcagtgatggacccatacagcgctttgacaagtgcctggaagagttctatgcactctgtgaccagctggagctgtgcctgcgcctggcgcatgagtgcctgtcacagagttgtgacagtgccaagcactccccaacgttggtgcccacagccaccaagcccgacgcagtgcagcctgacagcctcccctacccacagtacctggcggtcatcaaagcccagatttcctgtgccaaggacattcacaccgccctgctggactgtgccaacaaggtcacgggcaagacacccgcaccacctgctggccctgggggcactctgtgaagtgggggacagggagtggggcaggcagtggttggtgggtggtgtgcaagggaatgaagagcgtcctgggcctaaacacagcagcctcctctcttcctgcctgagcaccgaagcgggagccagcagggggcagcagaggccaacagggagctcgcaggccgggcccctgcgtaccgtgcccttcttcctgatcaccctcctagcctaagggtagactttgaactgtgtgtgtcgatgactgctctgttgcacaggccgtcccccattcttgcctgggtgtggagcctggctgtcccctctccctcagtccttctgactgtctccagctggaggtggctctgagctgcactcctctgggttctattacaggtggggtcccataatcctgtttctttaccgtggattcactggtcgaaaagggatacccaaggccaatgcttaatgacctcactttttaaccctagaggattaaccaagcctaagggaacatggcaagcaagaggaaaccagagaactggaaaagaagggagtaaggggaagaaaccaaagcgaaggaaacccaacaagctgagcaggagaggacaaaaacggcagaacaaacacgaacagaaagagagcagacataaagaacagcaggatcgcgcggagt

SEQ ID NO: 261640 - DNA, 925 bp, Homo Sapiens
ctcagaaagaaacatttaataggaacttacaaacagaagcaatgtttctagcagccactaaatggcggcactcaccctcccaaaagtaccctttatataacaagcatttttggcaaaacgtgtagctagtcatatctcagactttcttgtgaaacacctgaacactggggaggttagataagcatctttatgaggggttatctgtactaccggcactgtttaaagacattgctgcagaatatcttggtatgcaggagtcaaacagcagtcatcatgccagctgctcttcaagatgacatcactcttacaatgcaacaggctgttttcctacactcgacccctcgaaaccagtccttaaaatcttacatgcctgcttcttctgtgatagtccctggacctagagggagggtgcttgatattgtatggctttagtagtattgcaatggaaatggaaaacagattgggtccagtggaattccacaagagggagatttgcaggcttggttgaatcatctatatagtcttcataataccatgaagaagtaaaacaatgagaaatacataacattaataattggagtagtagaaatctaaataaagtaatatgatgtttaagatatcccttgccttaatagcctataaatatgggaagagtgactatcatcttctgaatttcaagacccatatattccgacagtttcagtaatatgaagattttggaaattctaaaaggttttgagatcatttctaatcaagcatttagctcttatgttagcattaattgcagccccaacttttgcaacttattgacctgcacatttttctgagcacttactttccttatgtcagatgtagggaatcatgagatgaacaagttttggttcctgcactgtagcaaatgaatttaggcaaagatataaagatg

SEQ ID NO: 261641 - DNA, 821 bp, Homo Sapiens
ggggccctcaggtaggcggggcccctggccctaaactctgggactggcgggcggtcaggcggcacagggggaatcccgggggcctaaggaggttgtcccagtttttgtcagcatctccaccccgaggtggtttgaactttgagccttttgtagtcctgatgaataatttcattttcctcaagtttatgacactcggaacgtcaagaactggaggtttgtgcaatttgagaccggtcggcactgtgcagagatcagagtactaagagacagagattaaaatggcttccagaggaaagacagagacaagcaaattaaagcagaatttagaagaacagttggatagactcatgcaacaattacaagatctggaggaatgcagagaggaacttgatacagatgaatatgaagaaaccaaaaaggaaactctggagcaactaagtgaatttaatgattcactaaagaaaattatgtctggaaatatgactttggtagatgaactaagtggaatgcagctggctattcaggcagctatcagccaggcctttaaaacccccagaagtcatcagattgtttgcaaagaaacaaccaggtcagcttcggacaaggttagcagagatggatagagatctgatggtaggaaagctggaaaagacctgtacactcaccagaaagtggagatactaccagctctttaggaaactggaagagaagctgactgcagatgaatgagcctttcctgtcagcaaatgcagggtgctatactccagccaggttttgagaaagcctctacaggaccttgggctcctgggaaacaaaattct

SEQ ID NO: 261642 - DNA, 641 bp, Homo Sapiens
tggtaccggtcccgaatgctcgggatatcgtcgacccacgcgtccgggtttttaaattaaatattaattgaatagacttatcttaatcatgtgaactgaaaatgggggcatggtggtcatgaggaggaaacatttagggaaattagattataagtaaaagtgtgggcatattctcctcttttctacaaaggttttcaaatggttcctgaggttttttgttgttgtccgtgttgttactgttgttcttgtcatcaggtttgattttggtccttgccctttccttctagttctccttttattaataggaaggcaggcaaaagccccatttatgtgtgtgttttcccctcagacagctttcatccactgctctgcactagaattgcacaaatcttcatggtgagcaattttaagaaatgttagtgaaaggtagaaattatttcacaaatcagtttctctggtccttcatattaataataatatttggcttcccattgctctctggagttgtttattaaatatgtgtttttgacaacctcctcattagtttcttaaatgagtactggtttgtaaagaattatcaacattatccattccatttatgaagaagaggagaacagctaataaactgtattgtaaaatcc

SEQ ID NO: 261643 - DNA, 695 bp, Homo Sapiens
  misc_feature (51)..(92): n is a, c, g, or t
  misc_feature (212)..(382): n is a, c, g, or t
ggtggtaccggcccggaattccgggatatcgtcgacccacgcgtccggtannnnnnnnnnnnnnnnnnnnnnnnnnnnnnnnnnnnnnnnnntcatgtttttcccgggatgtcaaagataaactggagtttcaatcttgctatcttaacaagaacagagggagaacaaagaataaaacaagaaaataaagctgactatattaaaagaacagnnnnnnnnnnnnnnnnnnnnnnnnnnnnnnnnnnnnnnnnnnnnnnnnnnnnnnnnnnnnnnnnnnnnnnnnnnnnnnnnnnnnnnnnnnnnnnnnnnnnnnnnnnnnnnnnnnnnnnnnnnnnnnnnnnnnnnnnnnnnnnnnnnnnnnnnnnnnnnnnnnnnnnnnnnnacgagagcccttgcaagcacatgagggaaggcacttaggtggcgtggcctagtccatgaggtcgacaagacgacccgaactgaaagcaccaatgcattcgcaaggcagtatattccataaccatgcatactctccatgaactattccaactacaatcagtcccgtgtgcagcactgcaaatgtcccagagtcctcaacgtaccaagtaagttggagcacttgcgaaattccgaacacacggaaacgggtgacaaccgggccggcactacctcggcggcggcgtcatggacttggagcgcagattaaaacttct

SEQ ID NO: 261644 - DNA, 1457 bp, Homo Sapiens
  misc_feature (924)..(951): n is a, c, g, or t
catctttacaatgaaacaaaagttagaaaggagcttataagagaggtagaaatgggtccatttaaacatacggttgatgatggtctggatattagaaaggcagcatttgagtgtatgtacacacttctagacagttgtcttgatagacttgatatctttgaatttctaaatcatgttgaagatggtttgaaggaccattatgatattaagatgctgacatttttaatgttggtgagactgtctaccctttgtccaagtgcagtactgcagaggttggaccgacttgttgagccattacgtgcaacatgtacaactaaggtaaaggcaaactcagtaaagcaggagtttgaaaaacaagatgaattaaagcgatctgccatgagagcagtagcagcactgctaaccattccagaagcagagaagagtccactgatgagtgaattccagtcacagatcagttctaaccctgagctggcggctatctttgaaagtatccagaaagattcatcatctactaacttggaatcaatggacactagttagatgtttgttcaccatggggaccattacatatgaccatacaatgcactgaattgacaggttaatcataagacatggaaagagaagtgtctaaaagcttcaaaatgttccacttttttttccttcatggagactgtttgtttggctttcttccattgttgtttttgtagcatttatttcagaaatgtgtatttccataatccagaggttgtaaaaccactagtgttttagtggttacagcaacatttgaaatggaaactaaaagttaggattttatggagtatggagatagggtccagtatctatttaccctgtaatgtttaggattaaaatgttaaaattttgtgaccatgaatttctttcttttataaattttctcatttnnnnnnnnnnnnnnnnnnnnnnnnnnnnccatgtttctttttcttgtataactttttgttttcagcaacataaattgatttttagctggcagacaagaatatccatataagatttgttaccatttcagagagtttggcaatttttaaaagataataaggtatcatttttaagtatgaaaattacaatatccctgttgcgcacactaattttgcatgagtaagtttacaaatatgtatcgtctgtaaagcagcatgtgcaggattattcataatattcgaaagttacaattaagtattagtgcaacgtttccgcaatacttactttttgccccagaaaaccctttttcggagaacaaagacggcacatttggagacttgggttccttaatgcccgggaattggcacagtttccgaaatcagtcacgtacccattgcacttttccttataaattctactcattggaattagttccactaccttggtggtttatcctcaatttcaaccatttcaccggggactccacctctaggagg

SEQ ID NO: 261645 - DNA, 1699 bp, Homo Sapiens
  misc_feature (145)..(145): n is a, c, g, or t
  misc_feature (700)..(947): n is a, c, g, or t
  misc_feature (966)..(984): n is a, c, g, or t
gtggggagatcggagggacagatgaaacggcgcgaaggagacaaggcgaagggcaaggggtgtggtttttgcgaggggccggacaaggagggcggagagagccgtgtggtttccgtgggaggtggcgagggcataggtaaatganctttggtgtttaaggcagggcgatacttttaagggaagcttcgggcggatgggtgagcacaattagggttgaggaagcacactgttctagggtaacagctcaggttctctgggcttaccactacagggagaacgggaactaggaagtgcagaccggggttctgatctcaggcttaccactaaatatctgctgtttcccacagccctgcccgcttctcaggactgtgggggaccaaatgggatccttattaacaaggtcctgtaagatctgggtccagcctgcctcagaccttatcatgtaatactttctattttgagttgggctttctaaccaggctgacctcaagtagagtttgtttctgcctcagggcctttgcacaggctgttttctctgcctggaacaccctcccttttgacctctgcactgcagctgcctcctgttaatcagatctcagcctaaatgttgtctctccagtgagaccctccagggtctgcacgagtatcaaatacctttgtcaagaaataaaacctccccaggccgtgcgcagtggctcannnnnnnnnnnnnnnnnnnnnnnnnnnnnnnnnnnnnnnnnnnnnnnnnnnnnnnnnnnnnnnnnnnnnnnnnnnnnnnnnnnnnnnnnnnnnnnnnnnnnnnnnnnnnnnnnnnnnnnnnnnnnnnnnnnnnnnnnnnnnnnnnnnnnnnnnnnnnnnnnnnnnnnnnnnnnnnnnnnnnnnnnnnnnnnnnnnnnnnnnnnnnnnnnnnnnnnnnnnnnnnnnnnnnnnnnnnnnnnnnnnnnnnnagagggaaactccgtctcnnnnnnnnnnnnnnnnnnngacctcccttgctttcccctactgatttctcttggaaatgacagcaatgttaccctgattactctcgcagcccataccctgcaaatggaaatctgccaacttcaaccaggaagaaaagactggaatgcaggttgctttttatagcatttcaaggaaagatcattcattcactgcctatacatccttccttccggcatcactgtgagactctgcatgcacattaatttcatccattcctcttgaaaaagtgaaggacttaaaccagaaaagcggccacaggtcacaatacaagatggttaacgtcactccgttaacagtgccttggccaaggacagccagatggcccggaggctgacttggcaaagctgctggagagttggggagggctgcgggttaacagcagggagcacatacttcattaaactacaagccgggagccgtccagaggtgccttctgctgcagaatggaaatttaataatggtttattggtttagttgtgattttcaattaagcacgacagaaattggttttaagtccaatattagaggttctaaaatgttagtttacacagtctaatgatgtatgacgggagaaggccacagctgttttctttaatctatttacaatcttcgcagcagaaaggctaaatgaactctcctaccattatcaggtcagggctaaatgcagccccgatcacaggcagtgatgccttct

SEQ ID NO: 261646 - DNA, 1393 bp, Homo Sapiens
  misc_feature (1195)..(1195): n is a, c, g, or t
  misc_feature (1204)..(1204): n is a, c, g, or t
tgaggcgcggcggccccgtggagcagcgcagtatggcgggcggggcccgggaggtgctcacactgcagttgggacattttgccggtttcgtgggcgcgcactggtggaaccagcaggatgctgcgctgggccgagcgaccgattccaaggagcccccgggagagctgtgccccgacgtcctgtatcgtacgggccggacgctgcacggccaggagacctacacgccgcgactcatcctcatggatctgaagggtagtttgagctccctaaaagaggaaggtggactctacagggacaaacagttggatgctgcaatagcatggcaggggaagctcaccacacacaaagaggaactctatcccaagaacccttatctccaagactttctgagtgcagagggagtgctgagtactgatggtgtctggaacgtcaaatccattcccaatggcaaaggttcctcaccactccccaccgctacaactccaaaaccacttatccctacagaggccagcatcagggtctggtcagacttcctcagagtccatctccatccccggagcatctgtatgattcagaagtacaaccacgatggggaagcaggtcggctggaggcttttggccaaggggaaagtgtcctaaaggaacccaagtaccaggaagagctggaggacaggctgcatttctacgtggaggaatgtgactacttgcagggcttccagatcctgtgtggacctgcacgatggcttctctggggtaggcgcgaaggcggcagagctgctacaagatgaatattcagggcggggaataataacctggggcctgctacctggtccctaccatcgtggggaggcccagagaaacatctatcgtctattaaacacagcttttggtctcgtgcacctgactgctcacagctctcttgtctgccccttgtccttgggtgggagcctgggcctgcgacccgagccacctgtcagcttcccttacctgcattatgatgccactctgcccttccactgcagtgccatcctggctacagccctggacacagtcactgttccttatcgcctgtgttcctctccagtttccatggttcatctggctgacatgctgagcttctgtgggaaaaaggtggtgacagcaggagcaatcatccctttccccttggctccaggccagtcccttcctgatcccntgatgcagnttgggagagccaccccatggaccccactgtctgcatgtggggagccttctggaacacgttgctttgcccagtcagtggtgctgaggggtatagacagagcatgccacacaagccagctcaccccagggacaactccacccctctgcccttcatgcatgtaaccactgggggaagaaaatctttggctca

SEQ ID NO: 261647 - DNA, 1272 bp, Homo Sapiens
gcgactccagcgcgcggctacctacgcttggtgcttgctttctccagccatcggagaccagagccgccccctctgctcgagaaaggggctcagcggcggcggaagcggagggggaccaccgtggagagcgcggtcccagcccggccactgcggatccctgaaaccaaaaagctcctgctgcttctgtaccccgcctgtccctcccagctgcgcagggccccttcgtgggatcatcagcccgaagacagggatggagaggcctctgtgctcccacctctgcagctgcctggctatgctggccctcctgtcccccctgagcctggcacagtatgacagctggccccattaccccgagtacttccagcaaccggctcctgagtatcaccagccccaggcccccgccaacgtggccaagattcagctgcgcctggctgggcagaagaggaagcacagcgagggccgggtggaggtgtactatgatggccagtggggcaccgtgtgcgatgacgacttctccatccacgctgcccacgtcgtctgccgggagctgggctacgtggaggccaagtcctggactgccagctcctcctacggcaagggagaagggcccatctggttagacaatctccactgtactggcaacgaggcgacccttgcagcatgcacctccaatggctggggcgtcactgactgcaagcacacggaggatgtccggtgtggtgtgcagcgacaaaaggattcctgggttcaaatttgacaattcgttgatcaaccagatagagaacctgaatatccaggtggaggacattcggattcgagccatcctctcaacctaccgcaagcgcaccccagtgatggagggctacgtggaggtgaaggagggcaagacctggaagcagatctgtgacaagcactggacggccaagaattcccgcgtggtctgcggcatgtttggcttccctggggagaggacatacaataccaaagtgtacaaaatgtttgcctcacggaggaagcagcgctactggccattctccatggactgcaccggcacagaggcccacatctccagctgcaagctggggcccccaggtgtcactggaccccatgaagaatgtcacctgccgagatgggctacccgcccgtggtgagttgtgtgccctggggcaggtcttcagcccctgacggaacccctcaagattcccggaaagccgtacaagcccagagccaaccccctgggtgcaacctgaaaaggcggtgcctaacattccg

SEQ ID NO: 261648 - DNA, 1016 bp, Homo Sapiens
ggggaatacccccggggaattgggtgaccttggcccttctggcaggtttcttcccccagttgtgcaagcccagggttttcgtggggggtgtcatcttttagcccctggggcgaaggttgtgtctttcagctggtcagggaggcactgtctgagtgcttcacgtgccctggggttatctgaaagtcgaaggtaacatctcactacatgcttcagcagacgggcagaaggctctttggatagctgcaggaccatcttacccaagatcatggcaacatgggagaaacgctcatacgtctgacatatataagccaaaccagtgtcatctaacaagatcttctggaggatgaatgtggcaactgttttagaaagttcacttccagattccataattcgcaaacataaagggataatttctgttgttaataaaaagttgattacttcttgttcatctgttttcaccagggccccaataactccaaggctggtgagccggagatactcaaagggacgtgttttgctgacagtgtgcaaaaaggggtacaaaaaaagtgggatgtgtgctgcgagaaacgctgacctggtttctggatgtgatgctacacattgcagtaatgccagagcattgcaaactctgttagactggtgtgctgtcaaggtgggtgggttgatagatggataaatatttacaatttcctgtaaaagtgctgcaatagtaccaaatgaatgccacagcatgggtgcaaggtcaggaacagattctcgcttcttacttagctccagcaaagcattttccctagtctcaggactggacagctcattgatccactgatagatcttttctctatccacttgtgccagtgtagtaggcacaggcgcagccgtcgccaggctgtgcatgttgtgagcggccgccgctctcttccacagccggacgcgtccgacccgcgtccccccttcagcacccctgcagcggaaaataatgagccgccgtagccgccatccgactccggctcccc

SEQ ID NO: 261649 - DNA, 1060 bp, Homo Sapiens
gcgggtccgggagcgcggcggagacgatgcctgagatcagagtcacgcccttgggggccggccaggacgtgggccgaagctgcatcctggtctccattgcgggcaagaatgtcatgctggactgtggaatgcacatgggcttcaatgacgaccgacgcttccctgacttctcctacatcacccagaacggccgcctaacagacttcctggactgtgtgatcattagccacttccacctggaccactgcggggcactcccctacttcagcgagatggtgggctacgacggccccatctacatgactcaccccacccaggccatctgccccatcttgctggaggactaccgcaagatcgccgtagacaagaagggcgaggccaacttcttcacctcccagatgatcaaagactgcatgaagaaggtggtggctgtccacctccaccagacggtccaggtcaggttcccagggccacagctggcacagtcactgcccacccccacaccaaccatgccctccgcccgttctacacagtttctggaaggctggggcctcagggtgagcccaccccacctcactcttgcgtccagcaccgtggggacaccaggaggcgtcagcgcgaggatgcgggtcccagaccagactgggcgccgacccgggagagcacgtgcagggtgggggtatgcactggcttacgaaaccaccaggctctgtccgagcggcattgaaatggccagagtgggacaggctggtgccctcagagcgcttggaaccgccagagactccctggagctcccggggggttgcccgggcaagggaggcaggggctggaaggggagatgggccagctctggagggtgcctggttctgggtgtgggtcagggaagaagtgaaggttaaatcagcgagtgacaggtgaaattccatttctgacaaagattatgggggttgcctgtgtcctcactcgaatcttctggggaatgctttttatatttcttgaaaatatattagggaacctatgtaattttggaacattttaatttttcgaattgaaccttgga

SEQ ID NO: 261650 - DNA, 1671 bp, Homo Sapiens
  misc_feature (1340)..(1349): n is a, c, g, or t
  misc_feature (1551)..(1593): n is a, c, g, or t
ataagatataaacgaatgggacttaaagcctgcgtggcgaattcggcacgaggggagcgcggcggagacgatgcctgagatcagagtcacgcccttgggggccggccaggacgtgggccgaagctgcatcctggtctccattgcgggcaagaatgtcatgctggactgtggaatgcacatgggcttcaatgacgaccgacgcttccctgacttctcctacatcacccagaacggccgcctaacagacttcctggactgtgtgatcattagccacttccacctggaccactgcggggcactcccctacttcagcgagatggtgggctacgacggccccatctacatgactcaccccacccaggccatctgccccatcttgctggaggactaccgcaagatcgccgtagacaagaagggcgaggccaacttcttcacctcccagatgatcaaagactgcatgaagaaggtggtggctgtccacctccaccagacggtccaggtagatgatgagctggagatcaaggcctactatgcaggccacctgctgggggcagccatgttccagattaaagtgggctcagagtctgtggtctacacgggtgattataacatgaccccagaccgacccttacgagctgcctggattgacaagtgcccccccaaactgctcatcacagagtccacgtacgccacgaccatccgggactccaagcgctgccgggagcgagacttcctgaagaaagtccacgagaccgtggagcgtggtgggaaggtgctgatacctgtgttcgcgctgggccgcgcccaggagctctgcatcctcctggagaccttctgggagcgcatgaacctgaaggtgcccatctacttctccacggggctgaccgagaaggccaaccactactacaagctgttcatcccctggaccaaccagaagatccgcaagactttcgtgcagaggaacatgtttgagttcaagcacatcaaggccttcgaccgggcttttgctgacaacccaggaccgatggttgtgtttgccacgccaggaatgctgcacgctggggagcccctgcagatcttccggaaatgggccgcaaacgaaaagaacatggtcatcatgcccggctactgcgtgcacgggcaccgtccgccaccatatcctccgcggggcagtcgaagctcgacatgcgaggggccgcacgtcgctggacgcttacattcccggtgcagtacattggcattccaccgcctccccgggaggctagcgggtttcctgcgagctggggcgggccagcgccaaacccgcgggggactggggcccgctcacgtgcctacggcgnnnnnnnnnnactcgccgtacaccccccctccgatccctctggctttctcctcccatttcccttgaggcgttctctcccgcccttttcccctcgcgcttatcgccgtcaactatgcgcgcgtgccttccccgccgtaccactctcatcgccgtaccccttatcgcgcgctctactcccctccttctgctcctttacccgctctcgccctttnnnnnnnnnnnnnnnnnnnnnnnnnnnnnnnnnnnnnnnnnnnttagctcacgcgcgttcgccgcgtgcccgcttactccgcccccgcttacccgcttgtcccgtgccgcccgcccccgcg

SEQ ID NO: 261651 - DNA, 841 bp, Homo Sapiens
cagagcgagaggcagtgacactgagcgggcgcagggggccgagtcggagaccgtgccggagttcgggagcggcaacagagtgggcatagacactccgagcagcctcgccgtcgtctctgcgttcctgttgactgcctggctgccccctcccctactcctcggttcctggtgaagaggctgcgcgctgctgtttggggagggggtgtgtggagccgggtcctgtgtccgcagtggctgctgtcggggggtcgcctgttcgcggaggtgcggagagactccttgggggtcgagcacataacggggttcgggtgtctcgtgtgtgaacatcacagggtttgtggatgcacttagatgtttgcaatgagcactgtggctggcatgccccagtgttttggataccaatgcatacgactccatagtaatccaatttaccagaggcgaacgtcatgagcatagtgatcccattgggggttgatacagcagagacgtcatacttggaaatggctgcaggttcagaaccagaatccgtagaagctagccctgtggtagttgagaaatccaacagttatccccaccagttatataccagcagctcacatcattcacacagttacattggtttgccctatgcggaccataattatggtgctcgtcctcctccgacacctccggcttcccctcctccatcagtccttattagcaaaaatgaagtaggcatatttaccactcctaattttgatgaaacttccagttgctactacaatcagcacatctgaggatggaagttatggtactgatgtaaccagggtgcatatgtggtttacaccatgatgatggattc

SEQ ID NO: 261652 - DNA, 1199 bp, Homo Sapiens
tgagtagctgccaggctgtcccccgccctgcccggcccgagccccgcgggccgccgccgccaccgccgccatgaagaagcagttcaaccgcatgaagcagctggctaaccagaccgtgggcagagctgagaaaacagaagtccttagtgaagatctattacagattgagagacgcctggacacggtgcggtcaatatgccaccattcccataagcgcttggtggcatgtttccagggccagcatggcaccgatgccgagaggagacacaaaaaactgcctctgacagctcttgctcaaaatatgcaagaagcatcgactcagctggaagactctctcctggggaagatgctggagacgtgtggagatgctgagaatcagctggctctcgagctctcccagcacgaagtctttgttgagaaggagatcgtggaccctctgtacggcatagctgaggtggagattcccaacatccagaagcagaggaagcagcttgcaagattggtgttagactgggattcagtcagagccaggtggaaccaagctcacaaatcctcaggaaccaactttcaggggcttccatcaaaaatagatactctaaaggaagagatggatgaagctggaaataaagtagaacagtgcaaggatcaacttgcagcagacatgtacaactttatggccaaagaaggggagtatggcaaattctttgttacgttattagaagcccaagcagattaccatagaaaagcattagcagtcttagaaaagaccctccccgaaatgcgagcccatcaagataagtgggcggaaaaaccagcctttgggactcccctagaagaacacctgaagaggagcgggcgagagattgcgctgcccattgaagcctgtgtcatgctgcttctggagacaggcatgaaggaggagggccttttccgaattggggctggggcctccaagttaaagaagctgaaagctgctttggactgttctacttctcacctgggatgagttctattcagacccccatgctgtagcagggtgctttaaaatcctatttacgggaattgcctgaacctttgatgacttttaatctgtatgaagaatgggacacaagttgcaagtgtgcaggatcaaggacaaaaaacttcaagacttgtggagaacatgtcagaagttgccaccacaaaaattttgttaactt

SEQ ID NO: 261653 - DNA, 1096 bp, Homo Sapiens
tgttgcgcatgctcagcgcgctgcccggctggggacccacgcacctgcagcgcccgctgctcggccctgcatcctgcctgggcatcctgcgcccggccatgacggcgcactcattcgccctcccggtcatcatcttcaccacgttctggggcctcgtcggcatcgccgggccctggttcgtgccgaagggacccaaccgcggagtgatcatcaccatgctggtcgccaccgccgtctgctgttacctcttctggctcatcgccatcctggcgcagctgaaccccctgttcggaccccagctgaagaatgagaccatctggtacgtgcgcttcctgtgggagtgacccgccgcccccgacccaggtgcccagctctcggaatgactgtggctccactgtccctgacaaccccttcgtccggaccctcccccacacaactatgtctggtcaccagctccctcctgctggcacccagagacccggacccgcaaggcctgcctggttcctggaagtcttcccagtcttcccagccagcccgggccctggggagccctgggcacagcagcggccgaggggatgtcctgctccaatacccgcactgctctggagtttgccctctttcccaaggagatgctgctggggagctggtatgggtggggtctttccctttacagacggggcagatgccaggactcagcccagtcctgaggaggacacgtgtcctcatggagagggtgctccggcccaggcgggggagtcggtgcccagtcagcagctctgccaccatcctgctgggaactgggggggcctctattgggttataggcaaggccttttctctggcatggaattgttacttcctctgacccgtctagatgtgagatctctgaacatgttgaagcagagaaacattcacacacaaaaagcaacatagtcatgtgggtccacgatggcctcagtcctagatgtggcacctttgcttgtgtctactcagagtattctgtcccggctccggcacctggacttcctcaggggtgttttccttccccgaacccaagctgccggcccgacccggccgtttggcctgcccgggccttg

SEQ ID NO: 261654 - DNA, 1013 bp, Homo Sapiens
  misc_feature (11)..(11): n is a, c, g, or t
  misc_feature (902)..(902): n is a, c, g, or t
  misc_feature (928)..(928): n is a, c, g, or t
  misc_feature (959)..(959): n is a, c, g, or t
  misc_feature (975)..(975): n is a, c, g, or t
cgaggcccagnaattcggcacgagcggcacgagggctttgtgccatttgtggatgaacagcaaccaactgaaataccaattccaattacccttcatattggagactacaatatggatggctatccagacgctctggtcatactaaagaacacatctggaagcaaccagcaggcctttttactggagaacgtcccttgtaataatgcaagctgtgaagaggcgcgtcgaatgtttaaagtctactgggagctgacagacctaaatcaaattaaggatgccatggttgccaccttctttgacatttacgaagatggaatcttggacattgtagtgctaagtaaaggatatacaaagaatgattttgccattcatacactaaaaaataactttgaagcagatgcttattttgttaaagttattgttcttagtggtctgtgttctaatgactgtcctcgtaagataacgccctttggagtgaatcaacctggaccttatatcatgtatacaactgtagatgcaaatgggtatctgaaaaatggatcagctggccaactcagccaatccgcacatttagctctccaactaccatacaacgtgcttggtttaggtcggagcgcaaattttcttgaccatctctacgttggtattccccgtccatctggagaaaaatctatacgaaaacaagagtggactgcaatcattccaaattcccagctaattgtcattccataccctcacaatgtccctcgaagttggagtgccaaactgtatcttacaccaagtaatattgttctgcttactgctatagctctcatcggtgtctgtgttttcatcttggcaataattggcattttacattgggcaggaaaagaaagcaggatgatagagaaaaacgacaaggnggcccaccggttttcattttgatggntatgtggacttggccttttaatattaccttntgggatggctgttcantggattagttgaaacacaattctggctgaaaaataggg

SEQ ID NO: 261655 - DNA, 1168 bp, Homo Sapiens
  misc_feature (195)..(262): n is a, c, g, or t
tggtacggccggaatttcgggatatcgtcgaacccacgcgtcgtaggctattcctttccaaactgaagtgagtccagtttcagaccatctcttttcctgtctccaaaaaccattttgtttccaaacctagctcccccgaaattttaagactatttacctagattcggagatggtcttggagagttccaaaagggnnnnnnnnnnnnnnnnnnnnnnnnnnnnnnnnnnnnnnnnnnnnnnnnnnnnnnnnnnnnnnnnnnnnctaatatttagactaaaccatggtaaatgtacgcacccagtatccttttcagttagcatattctttcttaaactcatctcagtacttttcatttgtttgcttcattatcttaaacaggttaaaagtgcctatgataaggacttaattatttcctaaagaaaagcaaaaaatgtggggaacagggtagtgttatactatcatctcaggtactgcctatgttcaagaacatagacctggtatggtgagaacaaaaggttcctatgccaaatccagatggctatatcatttgttggctacaagtgagcctgactgcaaggtttgcttctgctgagaaatcccatggtgagagtagaactcatgaagtgctgagtcacatttgcacctctggtgtggtggcagttcactctcccctggatgctgtcagctggccttgctttcatcctatccctgtaggcagggtaggtggctgggtaggagaagctattgagtgtatgacacagaccaagctttcctgggccttctcaccaactagagaagcgctgatgtcgttcattgaggcacttaaacaccagtcactcagccaggcctcctcccagacattctgtaacatgtcagcactcacaaggtttaaagcaaatgtgttcccctttgcagagaggaaggtgctctcagactgatagattagaggagacagacaaactcgtaatcctctggggacttgaagagaatggctaaggggaaggccttgttaaaagaaaagggaccaataagaaaatccatcttaagggtacccccttgaaggagggaaataacctttcttgaggggggataaatttagaaggggaaccccaggtttaatggttcggggaaaggtaccccctgtggggaagggggggccggcccccc

SEQ ID NO: 261656 - DNA, 2150 bp, Homo Sapiens
  misc_feature (213)..(213): n is a, c, g, or t
  misc_feature (250)..(251): n is a, c, g, or t
  misc_feature (310)..(310): n is a, c, g, or t
  misc_feature (1309)..(1317): n is a, c, g, or t
  misc_feature (1629)..(1638): n is a, c, g, or t
  misc_feature (1667)..(1667): n is a, c, g, or t
gtagcgaggcctgggtggcgaattcggcacgagggattagtgccattggaaggggcatatgtgtgttgctgggtatttccctggaggatacgcagaaggaactggaacacatggtccgaaagattctaaacctgcgtgtatttgaggatgagagtgggaagcactggtcgaagagtgtgatggacaaacagtacgagattctgtgtgtcagcncagtttaccgactccagtgtgtcccctgaagcggaannacaagccgtgatttcccacccttatgcaatgcgcacacggagccacggcacgacgggtncttctacagagcgagcttccctgtgagcccagctgcgctaagaacgatacgagtgccggagcttatcaaagatggcaagtttggggcctacatgcaggtgcacattcagaatgatgggcctgtgaccatagagctggaatcgccagctcccggcactgctacctctgacccaaagcagctgtcaaagctcgaaaaacagcagcagaggaaagaaaagaccagagctaagggaccttctgaatcaagcaaggaaagaaacactccccgaaaagaagaccgcagtgccagcagcggggctgagggcgacgtgtcctctgaacgggagccgtagctcaggaggcagaattcagtgtgttatcattgggcagaactggatcctgaaaaattcaagatgctaagcacctacactactttaagaatttggaactgaaacatgaagaggaagacagaaataagaatttgggaacctgaatagctctgcaaaaaacaccaaaggaccgttttatcgttttctgttgttgctgtggtggagtgatgcagtgggcactgccggtgggccagggggcgggtgcgcatgtggtagaaggtgtgcgctcgtgcctcccccacagaaaggctttgttggtttctaccacatcttggcttgcttttggaacaggctggcccagcatcatttgtcatcaagtccactgtggtgtattctgcgtgtccatggcgggggttctccaatacactcacactgtccatgttctttttattgccagggcccgtgttgaagtgtcaagagagcaatcatcaatgataatgtattgtgtgagacctttgcatcttgtaaattttctcttttttctaaaaataaataataataaaatcctaaatctcaacgaacagaaccgccctgcggccccaggcgcccccgctcaactgcaggagctcaagcgcccccgccgacgccgtgcgaggcgggatctcaacgccggaccgcctcggccgcaccgnnnnnnnnnacacccgcttcgcgacgcaccggccccaacagggcaccgcggtctggggggcggggcgccctccgcctcgccgatgagaacgaaacggcgcttcaagcaagtcacaggggaatactcagaaccccccgcgccccccgcaccgcgccgagccgggtgtcaaccgctcacccttctctcacccctgtattttgctctcctcgagaccccgcgcaacagtccgctgcgatcccactagtacacactcaccaccgcccgtgtcttatttcatatgtccctctcctcacgtcacagtagcaatcacgcagacgcatnnnnnnnnnnaatcgctggttggaggcgataacacccancgttcacagtatttacacccgttttcctctgtccctagatatctcccacctcctcacctaccccactctgtaccatattactcctttaccacgcacctaaacgcacctcaactcacgaacgaagcgcgcgtcccactaggccaactgcgtcccggaaaggaggctgccgtccgcgcgatcacgtatcccttgagagccactcgcacggactattcccaggagggcagcgtggtctggcccacggggctctccgcactacgcccctgccatcgagcacatcattttcccgcaggagcagacgcgccgccataaatgtcgtacgggcctgcccctttgtcgtcattatactattccatcctcactcagcgcggaagcgagaccgccgatacctgtccgacacccaacacagcactgtggtcgctcgggggagggacaaaagggatctgacacgcccgtatccgggaccggctgatcaactagata

SEQ ID NO: 261657 - DNA, 829 bp, Homo Sapiens
  misc_feature (739)..(739): n is a, c, g, or t
ggggcagaagacccccatcagggtgcggggtgcagttgcggctccagggccatggcggaggagcaggaccgggaacgggactcggttcccaagccgtcggtgctgttcctccacccagacctgggcgtgggcggcgctgagcggctggtgttggacgcggcgctggcgctgcaggcgcgcgggtgtagcgtgaagatctggacagcgcactacgacccgggccactgtttcgccgagagccgcgagctaccggtgcgctgtgccggggactggctgccgcgaggcctgggctggggcggccgcggcgccgccgtctgcgcctacgtgcgcatggttttcctggcgctctacgtgctgttcctcgccgacgaggagttcgacgtggtagtgtgcgaccaggccatttgcatcccactgtccttgtgttcggagccaggccacaccgtcctcagcagtgtcatgtgttaaaaacgccaagctgaatatatcatgcccctattaaaacttgtacatggctccccattggtttttggagaaaagttcaagctttttaccttggtgtctgcctgtatcccagtgttcaggctggctagacggcggaagaagatcctattttactgtcacttcccagatctgcttctccccaagagagattcttttcttaaacgactatacaggccccccaattgactggatagagggaatacaccccagggcatggccagactggcatctttantcaacagcccagttcacagccttgctggtttttaaaggaaaccatttccaagtcccctggcctccccatagagacccctggatgggccca

SEQ ID NO: 261658 - DNA, 519 bp, Homo Sapiens
acttccgggagcctggggcccaggactgcagcggcttcggaaggtgggctctgccagcgggaccatgctgctccgagccgcttggaggcgggcggcagtggcggtgacagcggctccagggccgaagcccgcggcgcccactcgggggctgcgcctgcgcgttggagaccgtgctcctcagtctgcggttcccgcagatacagccgctgccccggaggtggggccagtgctgcgacctctctatatggatgtgcaagctacaactcctctggacccccgggtgcttgatgccatgctcccttacctaatcaactactatgggaacccacactcccggacacatgcttatggctgggagagtgaggcagccatggaacgtgctcgtcagcaagtagcatctctgattggagctgatcctcgtgagatcatttttactagtggtgctactgaatccaacaacatagcaattaagggggtggcccgattctacaggtcacggaaaaagcacttgatcaccac

SEQ ID NO: 261659 - DNA, 1477 bp, Homo Sapiens
gaggctggtgagtcggcagccctgtggcagccggcgggctggtttccatggttgcacgattaggaaccaccagctgctgcatcccatggccaggggtggcgtccaggtggcagagcagctaggaacgcaaggcctgaacctggggccagacaccctgctctcccggccatggtcaacgaccctccagtacctgccttactgtgggcccaggaggtgggccaagtcttggcaggccgtgcccgcaggctgctgctgcagtttggggtgctcttctgcaccatcctccttttgctctgggtgtctgtcttcctctatggctccttctactattcctatatgccgacagtcagccacctcagccctgtgcatttctactacaggaccgactgtgattcctccaccacctcactctgctccttccctgttgccaatgtctcgctgactaagggtggacgtgatcgggtgctgatgtatggacagccgtatcgtgttaccttagagcttgagctgccagagtcccctgtgaatcaagatttgggcatgttcttggtcaccatttcctgctacaccagaggtggccgaatcatctccacttcttcgcgttcggtgatgctgcattaccgctcagacctgctccagatgctggacacactggtcttctctagcctcctgctatttggctttgcagagcagaagcagctgctggaggtggaactctacgcagactatagagagaactcgtacgtgccgaccactggagcgatcattgagatccacagcaagcgcatccagctgtatggagcctacctccgcatccacgcgcacttcactggggctcagatacctgctatacaacttcccgatgacctgcgccttcataggtgttgccagcaacttcaccttcctcagcgtcatcgtgctcttcagctacatgcagtgggtgtgggggggcatctggccccgacaccgcttctctttgcaggttaacatccgaaaaagagacaattcccggaaggaagtccaacgaaggatctctgctcatcagcccaggcctgaaggccaggaggagtcaactcccgcaatcagatgttacagaggatggtgagagccctgaagatccctcagggacagagggtcagctgtccgaggaggagaaaccagatcagcagcccctgagcggagaagaggagctagagcctgaggccagtgatggttcaggctcctgggaagatgcagctttgctgacggaggccaacctgcctgctcctgctcctgcttctgcttctgcccctgtcctagagactctgggcagctctgaacctgctgggggtgctctccgacagcgccccacctgctctagttcctgaagaaaaggggcagactcctcacattccagcactttcccacctgactcctctcccctcgtttttccttcaataaactattttgtgtcagcttcttccttgactcaaaaacc

SEQ ID NO: 261660 - DNA, 584 bp, Homo Sapiens
atgcgcgagtgtacgcgttgccggcgaagaggggagcctgacgactcggaaatttgaataccacagtagcatggagtgtgacctcatggagactgacatcttggagtcgttggaagatctaggttacaagggcccattgttggaagatggagcgctctctcaggcagtctctgctggagccagttcccccgagtttaccaaactctgtgcttggctggtgtctgaattaagagtgctctgtaaactagaggaaaacgtgcaagcaactaacagtccgagtgaagctgaagaattccagcttgaggtgagtgggctactaggggagatgaactgcccgtatctttcactgacatctggggatgtgaccaagcgccttctcattcagaagaactgcctcctcttgctcacatacctcatctcagaactagaagctgccagaatgctctgtgtgaatgctcctccaaaaaaagctcaagaaggaggcggtagtgaggtctttcaagagttgaaaggcatatgtattgctctaggaatgtccaaacctccagccaatataactatgttccaattcttcagcgggattg

SEQ ID NO: 261661 - DNA, 798 bp, Homo Sapiens
  misc_feature (624)..(624): n is a, c, g, or t
  misc_feature (693)..(693): n is a, c, g, or t
  misc_feature (697)..(697): n is a, c, g, or t
  misc_feature (766)..(766): n is a, c, g, or t
actgacgtcaccagcacgcgccccgtccgctgcagtccgccggcgagggagttacgcacgtcctgattctcctggagtctccagcccgcccagtggccgcagtcacccaggtccagaggcggcggtatcacaggctctccgacatgtctatgctggctgaacgtcggcggaagcagaagtgggctgtggatcctcagaacactgcctggagtaatgacgattccaagtttggccagcggatgctagagaagatggggtggtctaaaggaaagggtttaggggctcaagagcaaggagccacagatcatattaaagttcaagtgaaaaataaccacctgggactcggagctaccatcaataatgaagacaactggattgcccatcaggatgattttaaccagcttctagccgaactgaacacttgccatgggcaggaaaccacagattcctcggacaagaaggaaaagaaatcttttagccttgaggaaaagtccaaaatctccaaaaaccgtgttcactatatgaaattcacaaaaaggaaggatctgtcatctcggagcaaaacagatcttgactgcatttttgggaaaagacagagtaagaagactcccgagggcgatgcangtccctccactccagaaggagaaccgaaaccacgacaaccagctgccttcaccatccaggagtactttnccangcggatggcagcacttgaagaataagccccaggttccagttccaggggtctgacatttctgagacgcangtgggaacgtaaaagggggaagaaaagaaata

SEQ ID NO: 261662 - DNA, 764 bp, Homo Sapiens
ttattaaaaagtcgctcacagcagcgtaacttccagcttctggtaatcactcatgatgaagattttgtggagcttttaggacgttctgaatacgtggagaaattctacaggattaaaaagaacatcgatcagtgctcagagattgtgaaatgcagtgttagctccctgggattcaatgttcattaaaaatatccaagatttaaatgccatagaaatgtaggtcctcagaaagtgtataataagaaacttatttctcatatcaacttagtcaataagaaaatatattctttcaaaggaacattgtgtctaggattttggatgttgagaggttctaaaatcatgaaacttgtttcactgaaaattggacagattgcctgtttctgatttgctgctcttcatcccattccaggcagcctctgtcaggccttcagggttcagcagtacagccgagactcgactctgtgcctccctccccagtgcaaatgcatgcttcttctcaaagcactgttgagaaggagataattactgccttgaaaatttatggttttggtatttttttaaatcatagttaaatgttacctctgaatttacttccttgcatgtggtttgaaaaactgagtattaatatctgaggatgaccagaaatggtgagatgtatgtttggctctgcttttaactttataaatccagtgacctctctctctgggacttggtttccccaactaaaatttgaagtagttgaatggggtctcaaagtttgacag

SEQ ID NO: 261663 - DNA, 1004 bp, Homo Sapiens
  misc_feature (54)..(72): n is a, c, g, or t
  misc_feature (336)..(351): n is a, c, g, or t
gaggctccccccctttttccccctcccccatggaaggctgaggggaaccaaggnnnnnnnnnnnnnnnnnnnagctttacctagcttaaaataaattagaccaaccaatctcaaaacaggccctttagaagtgaatagggcagctatggcctcaggtaactccagatcagggctttgcacactcccacctttgccctgccccattttgaatgggggctctgtgtccaagagatcactccccaatggggctgggaattcaatgttgttttgtccatgtccctccttcagtaaatgtccctgcatccctcccccactgcagagccagctctcctagannnnnnnnnnnnnnnntgagatgaagaagtgtcacagcaaagggggaaggggcaggtggggcagggtggtctaggggtccggtcctgcggagccttcctgcccccatctggcctgacccctttagcctgagtctgaatcactggtgtctgaagacgacgacgaggaagaggaggagctggaatctgagctggagctggaagcgctaaggcgtgacactgctacttgctgtgcagaggatgactctgttttctcattcgctttcttggggggctttttagtagaattgagctgtccgctgacatcttgtaaccgcttttctaattcccgctttttctccaaagccagttcctcctttgtctttcccacaggcttcttaatggtgtagggcttccggggtttcttacgtaggcaggaaaggacatagcgctcaagctctctaagtgtggatggcttgagtgtttcaaaatcaatctcaatctcttctgggtttgaatcacgtaaagagggctccatggcttggattatatgcacaactcggcccagcttctccccaggtaatttgttgatgtccaggctcagctgccgcttctcatcgtaactcatgggcctgctctcttcctcctcctctgaatcataacctgtaggcagggcaggtggggctgtctttg

SEQ ID NO: 261664 - DNA, 1038 bp, Homo Sapiens
ggatcttcagatctgtgacagtgacagccaataggactgataatattagcttcaaaccaataatatccagggttaaaataaaaatcatagtgaaagtacgattgtaaaattatgctatattaacttttaagtctgtaataacttgacatcaaaatgttatgtaattaccataaataatggctagcgagaacatctttggaaattctcaaattacctttcttactacactgtttgcagaatgaatgtagaaatgatcctgttagctttctgaatgttctgtggttgaatgtgtttttgcttaaataaagcttttggtatttgtttaaattacacttcttgagaagtggaaattttaggatcatctttgctttgtttcagttttgtgatttttgaaatgaatgtttagtttactgagccagttggtcatttcttcctcatgtcgttaagtccagtgagtaagcctgaactgtgaataaattaccaaaaacttgcttagaatttcattttgaagcaatttgctaatatttgaagtgtatacacatttgtagttatgttaaaaattgtattgtactaagaatgtaatcaatgtctactttagttgtaaacatttctgatgtcaaaactttattcattactgttgattttaagaataagaaatcactgcctaaatattaccaaaagccactgtctctacccgaacttcccagtttgggaaagaatcgttagataaaacaaaggctctgccctttctgataccaaactccacagatactttctcacatcttttaaaacattttgcaataacatattgtttataggaagtttacagggtatgcaatgattaaaacttttaagtgaattgatagttgcaaaagaaaagataaatatttaagggtcagtgaagtagcaagacaatctaaagtttctgtaatatctggctctctgttaattatagagcaaagtttcccttacagaatccttttatgaacagcaagctagagtctatccctagtggttatagcacctgctgcgtttttc

SEQ ID NO: 261665 - DNA, 1302 bp, Homo Sapiens
  misc_feature (33)..(33): n is a, c, g, or t
  misc_feature (622)..(633): n is a, c, g, or t
  misc_feature (753)..(753): n is a, c, g, or t
  misc_feature (798)..(809): n is a, c, g, or t
atggacatacagctctaaatatagatacagagnaggtctgccgtgacagttcagtaggagactggaaatacttttgctttctgtatcgatagtactttctttcctttttaaagagaaggtttcgttttgatcttgagaaattctgataaaaccaccaactgaaaacctgccattataaaggagggatttcacaacgttcattccaaaaaactgtgggctatttcatttctgggaagtgattcactgcaggaaggaatcgctgtttgggggtggagggagcgttgatttttagaagccagcctgccctctgagaagtgagcagcaacctctgagatggcagccacgtgccttctgacccccagccctgctccctgaatcaccacccctcgagatgacacgcagtgaccaattccctcttaaaactccccttcttttcaaaaacccctatgatccatgcacccctctgtctaatcctctgcgatggggccagtctgcaagatccgtctgggcgggctccggtagcattctccacctgccaacacttcagttgctggtgagtaaccagcatacggactctcacttcctgtgagtatttctgaaagagcttatgatatttccttcnnnnnnnnnnnnttgtggggaggaaagccactcggggaggagaagcaactttcaacaagcaaagttaaaagcatgcaacgtgatcactgttgaccagacacgccataattttaatttggtttctcaaccccntgtgtaattaagacagcccaaagagaacagcatcaagaggaaagnnnnnnnnnnnngacatttcacaaatgcttagaccttcggtgcgcgtgaccagaaaagtaattttaagattcaagcgaaccaatctgaggctggttggagcattaacccttcaaggaaagagaaagaattatttttgtttgtccccaaatttcaaatacggaattcgtcttccctaccaggaactgagataccaaaaatcagcctctaaataccatcctctgggcttgtaagatgaaaaaactttttcagatttgtccatcacaggggtagaaaaatacctatttatgagacccagtcacattaacagagcagccgacatggtgttcacactcaggcaccctttgaaaaccggccactaaggctaaaatgtgacattttgtatttctctaggctgtagccaaacctgttaatttatgttagagagaagggcagcatttcttgacaactgggcaaaatgagtaagaaaacttgctttcatcccaccttacagagtatcaatggtga

SEQ ID NO: 261666 - DNA, 582 bp, Homo Sapiens
ttttccctggggagaggtaggaaggaaccaggccctcacttaggtttggaggggcagataagagcactgctgaccatctgctttcctccaagggttgctgtgtctagggtgaagtaggcaaaacgttgcccttaaaactgggccctgaagacggttccagccttgtccttcctgtgtgctccctgagagccattcctgtcccttacacattccagggcagggtgggggtgggtagccctgggggttcccctccctcttgtgcaccattaggactttgctgctgctattgcacttcaccagaggttggctctggcctcagtaccctcagtctcctctccccacattgtgtcctgtgggggtggggtcagccgctgctctgtacagaaccacaggaactgatgtgtatataactatttaatgtgggatatgttcccctattcctgtatttcccttaattcctcctcccgaccttttttacccccccagttgcagtatttaactgggctgggtagggttgctcagtctttgggggaggttagggacttatcctgtgcttgtaaataaataaggtcatgactctaa

SEQ ID NO: 261667 - DNA, 1063 bp, Homo Sapiens; identical to SEQ ID NO: 4061
  misc_feature (777)..(908): n is a, c, g, or t
  misc_feature (934)..(961): n is a, c, g, or t
  misc_feature (980)..(980): n is a, c, g, or t

SEQ ID NO: 261668 - DNA, 695 bp, Homo Sapiens
  misc_feature (25)..(25): n is a, c, g, or t
  misc_feature (40)..(40): n is a, c, g, or t
  misc_feature (50)..(50): n is a, c, g, or t
  misc_feature (91)..(91): n is a, c, g, or t
  misc_feature (104)..(225): n is a, c, g, or t
  misc_feature (238)..(269): n is a, c, g, or t
tcacctggggtccagaggttcctanaacgagccctaaccnaacatggggnaaacccccgtctcctactgaaaaatacaaattttagccccngggtggtggtggnnnnnnnnnnnnnnnnnnnnnnnnnnnnnnnnnnnnnnnnnnnnnnnnnnnnnnnnnnnnnnnnnnnnnnnnnnnnnnnnnnnnnnnnnnnnnnnnnnnnnnnnnnnnnnnnnnnnnnnnnnaaacttcatctcnnnnnnnnnnnnnnnnnnnnnnnnnnnnnnnnggaaataagcacagccatttaagtatgttattcacagttacactgctggtatatggagagacaggagttgaactgagatcctctagatacaaaacctctatacttaagagtataccatttatgatattttctctttaactcacaaataagggcatcgagggtaaactgacacagggctaaggactcattcattggtgaacaattatcacacgatgatatagaaaggctgttgaaaagcttttcttcatcttcttagtcagtgtcagaggcaattgggtgataaatatctggcagaagtaatacctaaatagcggtctcattttatgaggtataggtcagttttccttaggagtacggaaaatgatgaaaaaaattgctatcaaatgtcaataaaatattggggactaatatggcacaaggcaatta

SEQ ID NO: 261669 - DNA, 1684 bp, Homo Sapiens
gtggttcgggtccgctttcgtctccgtcctgctgccgttaccgccgctgctgccgccgcttgcgtcccccgctccggtctgtggtgcagccgggacccaggaccatgtctctgtctcgctcagaggagatgcaccggctcacggaaaatgtctataagaccatcatggagcagttcaaccctagcctccggaacttcatcgccatggggaagaattacgagaaggcactggcaggtgtgacgtatgcagccaaaggctactttgacgccctggtgaagatgggggagctggccagcgagagccagggctccaaagaactcggagacgttctcttccagatggctgaagtccacaggcagatccagaatcagctggaagaaatgctgaagtcttttcacaacgagctgcttacgcagctggagcagaaggtggagctggactccaggtatctgagtgctgcgctgaagaaataccagactgagcaaaggagcaaaggcgacgccctggacaagtgtcaggctgagctgaagaagcttcggaagaagagccagggcagcaagaatcctcagaagtactcggacaaggagctgcagtacatcgacgccatcagcaacaagcagggcgagctggagaattacgtgtccgacggctacaagaccgcactgacagaggagcgcaggcgcttctgcttcctggtggagaagcagtgcgccgtggccaagaactccgcggcctaccactccaagggcaaggagctgctggcgcagaagctgccgctgtggcaacaggcctgtgccgaccccagcaagatcccggagcgcgcggtgcagctcatgcagcaggtggccagcaacggcgccaccctccccagcgccctgtcggcccccaagtccaacctggtcatttccgaaccccattccgggggccaaagccccctgccggtgccccccgagctggcaccgttcgtggggcggatgtctgcccaggagagcacacccatcatgaacggcgtcacaggcccggatggcgaggactacagcccgtgggctgaccgcaaggctgcccagcccaaatccctgtctcctccgcagtctcagagcaagctcagcgactcctactccaacacactccccgtgcgcaagagcgtgaccccaaaaaacagctatgccaccaccgagaacaagactctgcctcgctcgagctccatggcagccggcctggagcgcaatggccgtatgcgggtgaaggccatcttctcccacgctgctggggacaacagcaccctcctgagcttcaaggagggtgacctcattaccctgctggtgcctgaggcccgcgatggctggcactacggagagagtgagaagaccaagatgcggggctggtttcccttctcctacacccgggtcttggacagcgatggcagtgacaggctgcacatgagcctgcagcaagggaagagcagcagcacgggcaacctcctggacaaggacgacctggccatcccacccaccgattacggcgccgcctcacggaccttccccgaccagacggacagcggcttcaagcagaggccctacagtgtggcggtgcccgccttctcccaggcctggatgacatggagcgcggtccatgagcaggaatccctttgcccacgtccagctgaacccgacagtgaccaacg

SEQ ID NO: 261670 - DNA, 1114 bp, Homo Sapiens
gaggctggaccggtccggattcccgggattggagggtctgcctgaggccggtaggggctcagcccaagtacatcgacgccatcagcaacaagcagggcgagctggagaattacgtgtccgacggctacaagaccgcactgacagaggagcgcaggcgcttctgcttcctggtggagaagcagtgcgccgtggccaagaactccgcggcctaccactccaagggcaaggagctgctggcgcagaagctgccgctgtggcaacaggcctgtgccgaccccagcaagatcccggagcgcgcggtgcagctcatgcagcaggtggccagcaacggcgccaccctccccagcgccctgtcggcctccaagtccaacctggtcatttccgaccccattccgggggccaagcccctgccggtgccccccgagctggcaccgttcgtggggcggatgtctgcccaggagagcacacccatcatgaacggcgtcacaggcccggatggcgaggactacagcccgtgggctgaccgcaaggctgcccagcccaaatccctgtctcctccgcagtctcagagcaagctcagcgactcctactccaacacactccccgtgcgcaagagcgtgaccccaaaaaacagctatgccaccaccgagaacaagactctgcctcgctcgagctccatggcagccggcctggagcgcaatggccgtatgcgggtgaaggccatcttctcccacgctgctggggacaacagcaccctcctgagcttcaaggagggtgacctcattaccctgctggtgcctgaaggcccgcgatggctggcactacggagagagtgagaagaccaagatgcgggggctggtttcccttctcctacacccgggtcttggacagcgatggcagtgacaggctgcacatgagcctgcagcaagggaagagcagcagcacgggcaacctcctggacaaagacgacctggccatcccacccccccaattacggcggcgccctcccgggccttcccccggccaaacggacagcgggcttcaagcagagggccccaaagtgggggccccggccggccttctccccagggccgggaatgaatttttggaaccc

SEQ ID NO: 261671 - DNA, 920 bp, Homo Sapiens
  misc_feature (633)..(642): n is a, c, g, or t
acaagtccaaagacaactgtgttatcagctttgcatgggaaagacaggaggtagctaaactgacctgtaggtgccctttcagtgtggctagggtcatctgagcagtcagggagtctctcattcatcaacagtttagcctcctttagtgttgattatttgacttatctgcaaaatggaagagccccagctacttgggaaaaaatgttttatctctgaaccccaaaagtggattgaatacttttcagtccacaaatggaatttcagtgacccccacttaatcatcaaaacacctttaaaaagaagagggcaggagaacaaaatgattttgttaacatttggtgcaaagaatgatacttttcatggttgggaatactaggaatactctcttgcttcttggcctaacaaatctttaaaatgaggaacccctttaggtgcatcaaatgagttaaatgaacttgagcagtttatctagagcagtgtttagtgtagtgatgtgtacagggttggccatattaatctaagaatgtggaaggctagactagagaagaaaatctctttgaagaagcatttatcaaaagcctgaaattctccaatgcggtctcttaagaccaatgaaaaggcattttttaattnnnnnnnnnntgcaggcacataaaaatctttcaaggatgaaagacatgaaaatactcccgggttccactcctgccttcagaactgtttactgagaaagaaaagacagaagcagggccaggcaaagtgggaaaactttcgggaatttgccaatacagcctgagccttggcaccaaactaaaacaaaaatgtaggtgttctgcattctgcctttcttataatgctgaaacatattttctttagaagttaaaacaaacacgacaaagtggcctgggcctgtgctgggctcc

SEQ ID NO: 261672 - DNA, 1929 bp, Homo Sapiens
  misc_feature (1778)..(1790): n is a, c, g, or t
gcagcatcagaagctgctcgcccagctactagtactttgaatcgcttctcagcccttcaacaagcggtacccacagaaagcacagataatagacgtgtggtgcagaggagtagcttgagccgagaacgaggcgagaaagctggagaccgaggagaccgcctagagcggagtgaacggggaggggaccgtggggaccggcttgatcgtgcgcggacacctgctaccaagcggagcttcagcaaggaagtggaggagcggagtagagaacggccctcccagcctgaggggctgcgcaaggcagctagcctcacggaggatcgggaccgtgggcgggatgccgtgaagcgagaagctgccctacccccagtgagccccctgaaggcggctctctctgaggaggagttagagaagaaatccaaggctatcattgaggaatatctccatctcaatgacatgaaagaggcagtccagtgcgtgcaggagctggcctcaccctccttgctcttcatctttgtacggcatggtgtcgagtctacgctggagcgcagtgccattgctcgtgagcatatggggcagctgctgcaccagctgctctgtgctgggcatctgtctactgctcagtactaccaagggttgtatgaaatcttggaattggctgaggacatggaaattgacatcccccacgtgtggctctacctagcggaactggtaacacccattctgcaggaaggtggggtgcccatgggggagctgttcagggagattacaaagcctctgagaccgttgggcaaagctgcttccctgttgctggagatcctgggcctcctgtgcaaaagcatgggtcctaaaaaggtggggacgctgtggcgagaagccgggcttagctggaaggaatttctacctgaaggccaggacattggtgcattcgtcgctgaacagaaggtggagtataccctgggagaggagtcggaagcccctggccagagggcactcccctccgaggagctgaacaggcagctggagaagctgctgaaggagggcagcagtaaccagcgggtgttcgactggatagaggccaacctgagtgagcagcagatagtatccaacacgttagttcgagccctcatgacggctgtctgctattctgcaattatttttgagactcccctccgagtggacgttgcagtgctgaaagcgcgagcgaagctgctgcagaaatacctgtgtgacgagcagaaggagctacaggcgctctacgccctccaggcccttgtagtgaccttagaacagcctcccaacctgctgcggatgttctttgacgcactgtatgacgaggacgtggtgaaggaggatgccttctacagttgggagagtagcaaggaccccgctgagcagcagggcaagggtgtggcccttaaatctgtcacagccttcttcaagtggctccgtgaagcagaggaggagtctgaccacaactgagggctggtggggccggggacctggagccccatggacacacagatggcccggctagccgcctggaactgcaggggggcggcagcagcggcggtggcagtgggtgcctgtaatgtgatgtgtctgaactaataaagtggctgaagaggcaggatggcttggggctgcctgggcccccctccaggatgccgccaggtgtccctctcctccccctggggcacagagatatattatatataaagtcttgaaatttggtgtgtcttggggtggggaggggcaccaacgcctgcccctggggtccnnnnnnnnnnnnnctgaaaatcactctcgggactgccgtcctcgctgctgggggcatatgccccagcccctgtaccacccctgctgttgcctgggcagggggaagggggggcacggtgcctgtaattattaaacatgaattcaattaaaaaa

SEQ ID NO: 261673 - DNA, 639 bp, Homo Sapiens
agcgttaccatggatcctggaggtgcccgcgaacactgcttgtcgcctgggcaaccggagaggacgaagcaggacctaggtggcggcggtggtaccggctgcaatggtgtccaatcccgtgcatggcttgccctttcttccgggcacgtcctttaaggactctacgaaaacagccttccacagaagtcagacgctgagctacaggaacggctatgcaattgttcgacgtccaacagttgggataggcggagaccggctccagttcaaccagctgtcccaggctgagctgggatgagttgggccagtaaggcaccagtctttaacttatgggccaaccttaaacaagccccacctgcggattttattcctgcgcatgtggcctttgacaaaaaggtactgaaatttgatgcctatttccaagaagatgttcctatgtcaactgaggaacagtataggatccgtcaggtgaacatttactattatctagaagatgacagcatgtctgtcatagagcctgttgtagaaaattctggaatccttcaaggcaagttaataaaacgccagcggctagccaagaatgaccggggtgaccattaccattggaaagacctaaatcgaggaataaacatcacaatttat

SEQ ID NO: 261674 - DNA, 593 bp, Homo Sapiens
gtccatgggctccccactgtgaacgtattcccagagcagctcctcggacagctccgagaacttcaccttcgtttcttcgtagaattccgagaccctggtgtcccagctgatggtctttgctggagcagtggacgatcgcgacacctgtgaacacgctgtgttctctcccactcaaccgggacagcatcctgtaggcgtcctgcttgtccaccggcttctccagaatcagccccccgactgtcacgatcgtgtccgctccaatgaccacgtcgggggcccgcaggtctttctggtacagccggttggccacctccagggccttctgcttggcggtctccatggcgtacccatacggagtagcgaaggaggctttgtccagcttctctttaaacttggaggggaccacctcaaacttgagacccgcgttgctgaggatctcctgacggcgtggggaggcgctggccagcaccacgcgcttgtgcagcagcttcccaatcaccgggcacagcaccatggcgtccacgccgggagccgggcgtccgcacttctgagcccggagcccgcggtgcgcgcagcgcggctgcaaaaaaaac

SEQ ID NO: 261675 - DNA, 547 bp, Homo Sapiens
ttccagtctaaaaaaggaatcctctgtgtcttcaaagcaaagctctttactttccccttggttctcataactctgtgatcttgctctcggtgcttccaactcatccacgtcctgtctgtttcctctgtatacaaaaccctttctgcccctgctgacaaagacatcctctatgccagcagccagccaaccctttcattagaacttcaagctctccaaaggctcagattataactgttgtcatatttataggaggctgttgtcttttccttctgagcctgcctttctcccccccaccaaggagtatcctcttcccaaataaaaagactttttccttgggctttacccttaaagatactggaaggtctaagtgctttaaccccacacaccctcacttaaacttttatcactgttgcatataccagttgtgatacaataaagaatgtatctggattttgtgcctagttcctagcacacagcttcaaaaattctagagtttcctgataggagtgtcttttgtattcataacaagcccttttcacccatgcct

SEQ ID NO: 261676 - DNA, 760 bp, Homo Sapiens
gagaagtgtgtggttctgattcagctgtgtaatgagttggtcccatccatgaccctcatagtgaacgatgtagtaaccatttgagtccacattaaatttcacccaactggtcttttcaggtagatccagagtatctgtctttgattttagaatgtgtctgtggatcacattagaagaactcgtggagtaggtcaatgggatatgccacaggtacctctcctgcagggccctccattcagggtcttcctggaaaaccccctggaggaagcgctcctgttgcagtcggagtgaacacccgtcttgtttaaccaccagcagggggattcctttctggagagtccatgtagtcatcatctctttgacctctgcattttcccccagaaaggcgagcatgttacttgtcatcttgggatccgaatgacaaactccaccagatgtaaaatcactttctaaacaactatttgacagactgctccacaagtcatcattcttagcatttctatagctgaacttctttaagtactgaattattcctttctggaatttctcctcacccagaaaatccttgagcatattcaaaatacaagctcccttgttataggaaacttcatcaaacatttcctgtatttgagtcggggtttccgctggtttggagatagggcgggatgaattcaatgaatcttttgtaattacttcaaaacacacattcaaaaaatagtcatcaaattgcagctctggatatgtagcattaacagcgata

SEQ ID NO: 261677 - DNA, 778 bp, Homo Sapiens; identical to SEQ ID NO: 6137
  misc_feature (623)..(640): n is a, c, g, or t

SEQ ID NO: 261678 - DNA, 816 bp, Homo Sapiens
tccccgcaagactcacaccagtggatggcactcgagtccacagctgcacggagccacgggtccaaaacgaattctccactgagatgggtccacagagcctggtggccacaatggctggatctaatgtcttcctttatgaatacatctgtgcacctgggatcagttaaaaaacgaaatacttcctgtcatgatgatcaatatgcagaactgcgtataggtgaggactcttctgcctgggtggtacatggttgttgtattttgctatctagtttctttgatgcaaatttgtagcaattgctttaagacaacccattttgcctcagacagtgaccctattaagaccacgtatgtttacagaaaacttgggagtttgatttttctttagagttctcacttataacaagaagtaagaggtgtctgtgtattgagataaacagtggtatataccacacaatctaaattaggttccttttaacaacatttgatgcggtccttactcctaggcactaaaacaacttctttaaaaaaataaaattgtgatttcccaaggcctttattttatagggaagaggaataaaagatcaatgctagtgggtgtttcgtcatgagcccaaagcccgttgggagtctctgcgaggtcatttgccctttagattctgcaaaggcaaaaagaaatcgatactgatttttaaaaatatatcttaggagccctggtctcctgctgattccatggatgcctggagcacttgtatctggagaatggagacaatatcaccccaagcccgaattcatttgatgagactactatgtataaaa

SEQ ID NO: 261679 - DNA, 582 bp, Homo Sapiens
  misc_feature (530)..(530): n is a, c, g, or t
  misc_feature (564)..(564): n is a, c, g, or t
acgttgtatgatggtcgctggcatctgccacgtccccaaggactcgaggagaaccagaggctgacaagagcagcatgagctagccctggcgatgctcagccgggctggacacagcggatccacaaggcgttcaggcctcgcagccactccaaaggcccaggaaacaccgactgtcagaaaacccggagcacggtgaccctgcgtccgcacagccgcctttccgtgtgtaccaggcagagaaagccccagccctcccccgtgccagacccctgggtagcagaggccaccccagtccaagcagggtgtctggccagggtgtcacggggtcgagggctccgctcacaggccttacagggtctcctgcggtcaccccagcttcaaggttcgcggctgctggccccgtgtgtccaaccctggagcaggttcctgcaggccgcccaatgtgtaccttgggctcagacggtgtttcataagaggaaatggggaaaacacttgctttttatgtcatcctaaaaacatccaaaaccctnggggccagatcaaccctggctgtccccgctgagnacaaacagcgtcccagcc

SEQ ID NO: 261680 - DNA, 576 bp, Homo Sapiens
cgaagtccacgtgcgcctgccgctggttcaggtctttcagctcctggaggttctccagcacctccatctccagcttggagtccttggtccggttctccagcaccttcatggggttgttcagctcctcgtcctcccgctccttatgcaccctcttctcctcctcctccaggagcttctcagcctggaaattccgcgtggctccatgctccatggtatagtctgtgttttcagggtctgtcttgaaggtgatctctgccaggcagcgcgtgcacttgatgtaaaagcggaagatgggcaggcccaggtagacctcgttctgcaccgtctccttccgagcgttgaatttcttccccttgtagatgtattctccgcacgtcttacacctcatgttgaagggggccatcagccgcaccacgtactgccggtctttggggagcttgagtttggggatctttgatgggtcaaagtccggcgggtagtatttgtttaatacttttcgctccgacatctttgccttctgatcacctcgcaagcacctgagaaatggttaggctgggtaattatcgagcttttccg

SEQ ID NO: 261681 - DNA, 1175 bp, Homo Sapiens
  misc_feature (710)..(722): n is a, c, g, or t
  misc_feature (724)..(940): n is a, c, g, or t
ttcgtctctcgctctacttcgaacacggcggatctatttttgcctgcctgtgttcgatgctgttgcgagtgtcgttcttttatttctgtggcgcttacactggcgctgctcccgctggtgtttgtcccgccccgctttgcgttgctgttgttcgtctcttcgcggcttgctgccctatctttcttttcgccttgtggctgtgtccctttgtcccttttctctggtgttcctttactctcgggtggggaactccccggccctgggtttcccgttctttgcacagagtttgtgcccggtgtgccttctgtgggtgagatgtgcgttcggcgtgccgttctgtggccccatctgcccaggctctcccctggtgcctacctcagggtattgcgttgtcccccccaaggaccaaaggcctcctgggctccgccccgtgtccttcccatgtgaatagccctgtcaaccccgttatgaattccagtgtcagcgcctactccgtgcgatggcctgcgtgtcagagggacacccgccacgtgttttggctgacacccccctgacctcccggcccggccctttcccgggcataccgcgcccccttccccatcccatggtaactgaaggcttgctcctgcgtaacactctctctgttttccttagtcctctctagcccggggactttttaggaccctcttttatagatattcaccttgccnnnnnnnnnnnnngnnnnnnnnnnnnnnnnnnnnnnnnnnnnnnnnnnnnnnnnnnnnnnnnnnnnnnnnnnnnnnnnnnnnnnnnnnnnnnnnnnnnnnnnnnnnnnnnnnnnnnnnnnnnnnnnnnnnnnnnnnnnnnnnnnnnnnnnnnnnnnnnnnnnnnnnnnnnnnnnnnnnnnnnnnnnnnnnnnnnnnnnnnnnnnnnnnnnnnnnnnnnnnnnnnnnnnnnnccattttttgtttttaatataagcaaattatctcctccatccctccctggggcaggagacagctaaggtggggaaggctccccagaggggtgcagagctggtgagggagaggcacctggagaaggcgcttcccagcctgggctgaaggccgttttttctctatcagctcaacccactcctaagaagcagcggacgcgtgggtcgacgatatcccgaaaattccggaccggtacca

SEQ ID NO: 261682 - DNA, 1854 bp, Homo Sapiens
  misc_feature (1151)..(1151): n is a, c, g, or t
  misc_feature (1544)..(1544): n is a, c, g, or t
  misc_feature (1568)..(1568): n is a, c, g, or t
  misc_feature (1668)..(1668): n is a, c, g, or t
  misc_feature (1690)..(1690): n is a, c, g, or t
  misc_feature (1693)..(1693): n is a, c, g, or t
  misc_feature (1721)..(1721): n is a, c, g, or t
actcctcgccttcctccggctcagccgccgcgccgccgggctgctccttcttcctcctcgggcgcccgcggcgatgttcaaccgcgccgtgagccggctgagcaggaagcggccgccgtcagacatccacgacagcgatggcagttccagcagcagccaccagagcctcaagagcacagccaaatgggcggcatccctggagaatctgctggaagacccagaaggcgtgaaaagatttagggaatttttaaaaaaggaattcagtgaagaaaatgttgtgttttggctagcatgtgaagattctaagaaaatgcaagataagacgcagatgcaggaaaaggcaaaggagatctacatgacctttctgtccagcaaggcctcatcacaggtcaacgtggaggggcagtctcggctcaacgagaagatcctggaagaaccgcaccctctgatgttccagaaactccaggaccagatctttaatctcatgaagtacgacagctacagccgcttcttaaagtctgacttgtttttaaaacacaagcgaaccgaggaagaggaagaagatttgcctgatgctcaaactgcagctaaaagagcttccagaatttataacacatgagcccccaaaaagccgggactggcagctttaagaagcaaaggaatttcctctcaggaccgtgccgggtttatcattgctttgttatttgtaaggactgaaatgtacaaaacccttcaatgggatgtgtgttttatcaactgcttcaccagtaaattttgcatgatggctaagctaacataaaaaaagaataataataacttggaaaaacgacaaaccgcgcgcgtaaacgccgggtcgcgccattgggcgcttctataccacccccaccgccgtttattttgggatccccggggacgtgcgcagaaaccccccacccgacgccgcgaggcctgcccgcgtggggtgggcccctcccccgagattattccctggtccgtagaagcggggcaccctcacccccttagtggcccgcgccgtgtcgcgcggtgggcggccgctgtctcccgcctctgcgcgccgcacccaaaagtcaattgtgctccgtgtgagcgcgcgggcatgggcccccgcgcccttcgtatatagagcaggnataggctcgcggctcatacaagagccgccgcctccagatggtgactactacggcacccggcggggtggtgcgcgctatcgctcgctgtgttgccccgcgcgctggcccgcgcaccgacttagacgtgatcgggggtgcagaacagtcacgagtgcaccagctaagttgaggtaggcctcgccgtccaggaccggagccagtagatcccggcaccggggcgcgacgccgacaagataagtcgctctcgtgcgacttctggcgatcagggaatatatgacgcacgaacgcggcggcgtgcgaaggacgtagtggggtaacactacactatggtttttggttgcggcccactctcttcgtccttggagaggtagtatcagcgtacctgatgcgcgncgagctgccgggcgcgtatcctangaacaggagcctcacgggtcttaaatgacccgcgggggaggaggatacacccactactccccccggcccgaacgtgcagagagggacctgcaacgttggncacaagttgtcccgcttgtgtngcnaggtcgtcggctgcacacacgcagtgcncgatgcgacacggtggtcgggtcgtcgcggccccggcagaggatgggacacgagaagcatgagcgcggagccacgacgacctaagtgcctatcatgtaccgcgacctctgatagcgtagggcggaggcgcgtg

SEQ ID NO: 261683 - DNA, 600 bp, Homo Sapiens
  misc_feature (370)..(392): n is a, c, g, or t
  misc_feature (539)..(556): n is a, c, g, or t
  misc_feature (589)..(589): n is a, c, g, or t
agggtgtggtccccatgccaggggtcactggtcccaacaaaatgccccatttcagagagctgtgcaggttccaagggagagcagcttaggggggcctggggagggcgttgtgtagggtagccctgggggccacagctgcttggcagagtcacctgggagggtcagagccaccttgctgacgtcccttcccccaagcccaggtcagtccccttcctgaggggagaggatgcggcagggaagccccaaggtgccttcatcagggaacgcccacgcatcactttccacatgacaaaaccaagagaacccccaacatcaaaaaaacaaaagacccgccgcctgtccccgttctgtctgtgtgcagtggcttccnnnnnnnnnnnnnnnnnnnnnnnctcaggtttacacggggtctttttaatacaacgtttaatcatctggttgatcaagaaatgcaatgctcagtctaggaacagcagcagaaatagcgagagacacgggacttttatacaaaaaaatttgttgcttacaaaacatatgcnnnnnnnnnnnnnnnnnnccagagaccaaaggcagcatccttgctaatttncatctacatta

SEQ ID NO: 261684 - DNA, 739 bp, Homo Sapiens
agcaggctggtacggccggaattcgggatatcgtcgaccacgcgtcgatttgacattcagttctggggtaggtttaagatgttaaggtgatttcttgtaacctcaaaggtaaggttatctagcactaaagcaccaaacctctctgagggcataacagctgctttaaagtagaggtttccattggctattaaggagttatgaaaactccctagcaatagtgtcatatcattatcatctcccccttcctctggggagtggaagaatagcttgaatgttatctgaaaagaggcctggtagtaaaccaggccctggctctttaccagcagtcatctcttcttgctctggggccagccaggaaaaacaaacaacccggggcacattgggtagactcagtgtaggaaaaatggtggcagctccactgtttatttttggtgacttcgtacgtcattatgaaccgcaattaaggaggaggcttaatggctgttcccaaactcaaatctcagagtgggtatcctagcatctagcaagactgagtggggagatttctcatccgtgtgaaaatgtaaagtgaggcctctgactagctaattgtgtattctgttgggtttagtattttcgtaaatgtttacaacaatattgggcttgatgttcaggttgcagctagagggagctgggcagattttcaattacgctttcaagatataaccaaaagctgtttctaaatcctaaaattagaatt

SEQ ID NO: 261685 - DNA, 1311 bp, Homo Sapiens
  misc_feature (724)..(724): n is a, c, g, or t
  misc_feature (785)..(786): n is a, c, g, or t
  misc_feature (1175)..(1175): n is a, c, g, or t
  misc_feature (1222)..(1222): n is a, c, g, or t
  misc_feature (1226)..(1226): n is a, c, g, or t
  misc_feature (1237)..(1238): n is a, c, g, or t
cttcttccgctttctcgtcaggctcctgcgccccaggcatgaaccaaggtttctgaactactgggcgggagccaacgtctcttctttctcccgctctggcggaggctttgtcgctgcgggctgggccccagggtgtcccccatggcggggccgcgggtggaggtcgatggcagcatcatggaagggggcggccagatcctgagagtctctacggccttgagctgtctcctaggcctccccttgcgggtgcagaagatccgagccggccggagcacgccaggcctgaggcctcaacatttatctggactggaaatgattcgagatttgtgtgatgggcaactggagggggcagaaattggctcaacagaaataacctttacaccagagaagatcaaaggtggaatccacacagcagataccaagacagcagggagtgtgtgcctcttgatgcaggtctcaatgccgtgtgttctctttgctgcttctccatcagaacttcatttgaaaggtggaactaatgctgaaatggcaccacagatcgattatacagtgatggtcttcaagccaattgttgaaaaatttggtttcatatttaattgtgacattaaaacaaggggatattacccaaaaggggggtggtggaagtgattgttcgaatgtcaccagttaaacaattgaaccctataaatttaactggagcgtggctgtgtgactaagatatatnggaagagcttttcgtttgctggtgttttgccattttaaagtaagcaaaagatattggcagnncggcagcagttagatgcatcagaaaggagatccgggatttgtatgttaacatccagcctgttcaagaacctaaagaccaagcatttggcaatggaaatggaataataattattgctgagacctccactggctgtttgtttgctggatcatcgcttggtaaacgaggtgtaaatgcagacaaagttggaattgaagctgccgaaatgctattagcaaatcttagacatggtggtactgtggatgagtatctgcaagaccagctgattgttttcatggcattagccaatggagtttccagaataaaaacaggaccagttacactccatacgcaaaccgcgatacattttgctgaacaaatagcaaaggctaaatttattgtgaagaaatcngaagatgaagaagacgccgctaaagatacttatattattgaatgccnaggnaattgggatgnnacaatccaaatctatagagtatttgccctcttaaatgataacctcatttgatataattgcactattttcataa

SEQ ID NO: 261686 - DNA, 484 bp, Homo Sapiens
ccccccaaccttaaaagctccttccccaggtaaataaaagtatacgaggggaaaaaattaaaatacacttatctacagagtaagggttttgaaatattaatgtaatccctccttcaaaaattctaactagagtcatctggtcatttctgattacatcttaaagatgtatccagattcaatttctgttggtttatccttagacgcttctagtcaaaaagtattaattttattcccaaatatcttaaccactagtacgactgcagtgtattatctcccagagttatcaagcactggaagagaaaaaaatagatgttcaagcagcaggcaacatttatggccctttcacacagtggcatctgagtggctactgaatagtccaggaataattccaaaaacaagaaaattcatgcattttagtaaatatgttgtagttttcacagttgaaatttcctcagacattgcactttctttataagggaatcct

SEQ ID NO: 261687 - DNA, 521 bp, Homo Sapiens
tttgctctcctgccacggaggggagcgcttggtggcagtccgcgggcccggacggaaggctgaggcgacgcctcgacgacagcggaccggagctgcaggggcaacacattcagggcggggtgccccatttaggcctggctgaccggagtaagaaactacaacccccgaagtgccttgcgcctcaaagttacggaggcagtgaccacccaccctggagccatagtccacgccttcctcattcacaccttgagggccccgaatactgaggacacgggcctttgccgagtgctgtactcctgcgtcttcggtgctgagaagtcacctgatgacccacggccgcatggtgccgagagggacaggcttctccggaaggaacagattttagctgtggccaggcaggtagagtcaatgtgtcggctgcagcagcaggcatctggccggccccccatggacctgcagccgcaatcctcaaatgagcaagtgccgctgcacgaggccccacgtggggctttccgcctggc

SEQ ID NO: 261688 - DNA, 893 bp, Homo Sapiens
  misc_feature (792)..(792): n is a, c, g, or t
tatgtagatgtgtgaagtgttaggtaaaatttttttcacttatccatttaaacaccttgttacttgaatattgtgttgactggtctgcaacagtgatccattctgtaatatagctcttttaactgggaaggaaccacaccccagttgtgccgattacattagtgttggcacacagtcgggtgctagtgtaacacaaatgccgcgttgtctgggtgtacagtgtttgtggagacgccacttcctcaaaatggtttttgattgtttttaacctataagacgttctgatgctcacaaacctctattcaacacacaaaacaaacatgaaaaggtagttagttgggttgtaacagcttactggggtggactcataaaacagtggctttctgttcatctaaagtttcctcagataccacagaccactgttaagtgtgctcattgtcactttaaatttcaacgataccctatttttgtcattctaaatatcagatgtactattggtataattgcacaccaaaaataagccaaacagtgcattacgctaactggatccctgcttttatgtgagctaaggaaagatggagccaactccaacgagggcctctttttctctcttgtctagcctgtttctaaaccgaatgatccagggattcaagcttctattgttcaagtgaaacttttcctcagatgggactccagggtagccagggttcacctaaaacctagtgggtcctgtggcgatgcttcttttctggccagtccctggaatctctggcagctttctcttaacccgtncttaacctgtagttaaaggcacaattgcagtgggcgttcgcatttcagaaggaggggaagggtcagcagaggctatggcatgtttgtgttgatggatgagt

SEQ ID NO: 261689 - DNA, 534 bp, Homo Sapiens
agaattgcttgtatccccctcctggagccagtgtgtacgactccacagagcatttggattacactcctccgaatgctgaaggaaaaacgctcaaaatctcattcttcagggggaagcgttgccactccgaggtgcccactgggaacgaatcccaaagccacgagcgcctgcctagtggggaatgtgaactgttatcctgagagtcgtccttctctctccctggtccaggacagaaaatactgaatagacaggaatttctgaagtctaaacgcctccaatgataacaggagtgttattggaaagggaacaagcgagaagacacagtcttcgaggagttaagttttgctaatctaatgatgagactgcattcatgaagactgagtgaagactttattggcaccatcacatcactaaaggtttttctccaacatggaacattctggatgaagtcgaaggctttgaggcctgacttaaaggcacatattcacactccctacacttccatgttttctctcccatgtggaccctctgatg

SEQ ID NO: 261690 - DNA, 243 bp, Homo Sapiens
gggtaggttgtgtgtccggggctatgggaacctgtcccccatgatggatcttggtagagacacttccctctgtcatcgtgcccaggaggatgctgcaggtgactacctgcagccctgttctcattcatttggatgccctccagaaatctggggagccatacatcctttagagccttttttgctccttatcaagttggcaaggcttggccaattcctgttcaaggctgcattaaaggcatgtcc

SEQ ID NO: 261691 - DNA, 638 bp, Homo Sapiens
atgaataacatccacattaataccttcatatatgagctcatgaaaaagttctttagccctttcaatggactgaacaaaaacaagaacaggtggattgaaaccctttttaacaagttctctcacggccagaagttttccggtctcagatccaacaaagagaagctcttgttctacagtttctactgcagaattccttgctccaatggacacactgatgacattgtccaggttgagtttgcaccactgttcaacatcatatgcaaaagttgcactgaacatagctcttcggaaccttgtgggatgtgcaggcccaggaaaatggaagccagctggtctctgaaacccagttttgccatcttcaaacagtttatctgattcgtctactacaagccactcaacacttgctaggtcgattccggggggatcttgctttaataaatagattagtcgatttggagtagtcacaagaatatcaaactttttagatgatttaggtccaaatttcttggctgccactgctgctttgtggatcatgtgtattctgaatcctgttccctcagaaatttttattaactctctgtgaatctggctggcaagttctcgtgttggtgatataatcagggctctgaagcctttat

SEQ ID NO: 261692 - DNA, 1020 bp, Homo Sapiens
  misc_feature (787)..(797): n is a, c, g, or t
ggagcgaggcctgggtggcgaattcggcacgaggacctgttcttgtgttttgttcagtccattgaaagggctaaagaactttttcatgagctcatatatgaaggtattaatgtggatgttattcatgcagagagaacacaacaacagagagataacacagtccacagtttcagagcaggaaaaatctgggttctgatttgtacagccttgctagcaagagggattgattttaaaggtgtgaacttggtgatcaactatgactttccaactagctcagtggaatatatccacaggataggtcgaactggaagagcagggaataagggaaaagcaattacatttttcactgaggatgataagccattattaagaagcgttgctaatgttatacagcaggctgggtgtcctgtaccagaatacataaaaggttttcagaaactactaagcaaacaaaagaaaaagatgattaagaaaccattggaaagggagagcattaggacaactccaaaatgtttcttagaaaaagctaaggataaacagaaaaaggtcactggtcagaacagcaagaagaaagtagctcttgaagacaaaagttaaaaacagactttaaaaatactgtcccagaaatgtaattttatgatcccagcatgccccggaggtttttttgtgatatgaaagaaagaaaaactccccctgtacaaaacatttgaaatcaactaccagtacatggggactggtgataaatgatcctaaactatcaagtcagtttccaatttgtaggtggccnnnnnnnnnnnccctggaaaaaagaagggcccttgccatgtttggcccaggctgggtcttggaaactcctgggaccttcacaaaattcctccccggcctttagccctctccgggagtaactgggaaatttaacgggggacaaagttggggtgtgcgacccacaattcttggtgaagggggaacttttttaaagtggcgttttacccacggggggaaataaaaactttcctcttg

SEQ ID NO: 261693 - DNA, 595 bp, Homo Sapiens
  misc_feature (227)..(280): n is a, c, g, or t
  misc_feature (393)..(427): n is a, c, g, or t
gggaagctctgcaaaatcttaaaaatttgaaaagtcttgacctgtttaactgtgagatcacaaacctggaagattatagagaaagtatttttgaactactgcagcaaatcacatacttagatggatttgatcaggaggataatgaagcgccggactctgaagaggaggatgatgaggatggagatgaagatgatgaagaggaagaggaaaatgaagctggtccaccnnnnnnnnnnnnnnnnnnnnnnnnnnnnnnnnnnnnnnnnnnnnnnnnnnnnnntgaagatgaagatgaagcaggttcagagttgggagagggagaagaggaagtgggcctctcatacttaatgaaagaagaaattcaggatgaagaagatgatgatgactatgttnnnnnnnnnnnnnnnnnnnnnnnnnnnnnnnnnnnaggtcttcgaggggagaagaggaaacgagatgctgaagacgatggagaggaagaagatgactagatcattctaagaccagattctctaatgtttctgggtgtgcaatagagtgatcacatctttgtttcttcatgtacgatagctatccctacagaagataatgtgta

SEQ ID NO: 261694 - DNA, 533 bp, Homo Sapiens
ataaccagctcaggagacgccaaggaaagatgggacctcccggcccagagacgcgaggacacccccacagtgcctcctctccttcagagcgtgtgttcccgatgcccctgcccaggaaggcgcctctcaatattcctggcaccccagtcctcgaagactttcctcagaatgacgatgagaaggagcggctgcagcggaggcgctcgagggtctttgatctgcagttcagcactgactcacctcgcttattggcctccccctccagcaggagtattgacatttcagctactatccccaagtttacaaacacgcagattacggaacattactccacctgtatcaaactgtccactgaaaataaaatcactaccaagaatgcttttggtttgcacttgattgattttatgtcagagattcttaaacagaaagacaccgaaccaaccaactttaaagtggctgcgggtactctggatgccagcaccaagatctatgctgtgcgcgtggatgccgtccatgccgatgtatacagagtc

SEQ ID NO: 261695 - DNA, 572 bp, Homo Sapiens
  misc_feature (243)..(255): n is a, c, g, or t
caggcgaaagaggatgctgcattgcgaggacccagaaattatactggtgccacgtttccttcccttatttctaacgtgtatgtttctggtggaaaccaagttcaccctggctgggagcatctctgatgaggcatgctggcgactggatggataatcctgtgcatcaccattgcgtcctgtgctccctcctagcgcagtggccaagccgggaaagcctctaacttgcctttgctgctgctgccnnnnnnnnnnnnngtctctgcctttccatttgttagatgggggcccactcttccttagctctgtctctgagttactgggtggaaataagcttataaatgaaatactcttcttcatctctgttttgctcttaaaaatataaaaaggcaattccccgagccctagagccacctgatttccccttagaaggctgtttttcagtttcccccagtgaggcccaaagaacagtatattcctcctttcctcttgctgatttggtttcagacctgcctgcatcaccatgactacgtgagaacgtgtgggctcgctgcagttccagggatataatttaa

SEQ ID NO: 261696 - DNA, 525 bp, Homo Sapiens
gtagtagtcaagaaaaaggcagctcagacaacgggaaggacagaagggtttgcagagagtgaaaggagccaacgcaggatagggcaagccagagcaaacagctctgggctggggtgaaggtggactctggcaaatggagaagaacttgggatggaactaactctctgccccaccaagggcatggggaatagcaaagccaaaggggggccatcaattttaagcaagatatctcttgaggaagtactcgctgccaagggagtccatgtttcatcagccagtgggcagatttgactggattgccaaaagggctggctggcctccgggctgccaatcattccccaaaccctgatcgggcagtaaaaaacccatgtggaagagggttagggagaaacaggaggaaccacgagcacacagccatctctgagccacagcatttaggaaaatgctctcaacttggcatgattgcaagggttaagtgatttgccctaggtcatgaagcttctaacttggacaagtcccatcatc

SEQ ID NO: 261697 - DNA, 983 bp, Homo Sapiens
  misc_feature (826)..(826): n is a, c, g, or t
  misc_feature (918)..(918): n is a, c, g, or t
  misc_feature (926)..(926): n is a, c, g, or t
tataccacaatctttgtaccagcctgttccctactatacatggcaatgatgaagtaaaacggggtgtcctgctgatgctctttggtggcgttccaaagacaacaggagaagggacctctcttcgaggggacataaatgtttgcattgttggtgacccaagtacagctaagagccaatttctcaagcacgtggaggagttcagccccagagctgtctacaccagtggtaaagcgtccagtgctgctggcttaacagcagctgttgtgagagatgaagaatctcatgagtttgtcattgaggctggagctttgatgttggctgataatggtgtgtgttgtattgatgaatttgataagatggacgtgcgggatcaagttgctattcatgaagctatggaacagcagaccatatccatcactaaagcaggagtgaaggctactctgaacgcccggacgtccattttggcagcagcaaacccaatcagtggacactatgacagatcaaaatcattgaaacagaatataaatttgtcagctcccatcatgtcccgattccatctcttctttatccttgtggatgaatgtaatgaggttacagattatgccattgccaggcgcatagtagatttgcattcaagaattgaggaatcaattgatcgtgtctattcactcgatgatatcagaagatatcttctctttgcaagacagtttaaaccaaagatttccaaagagtcagaggacttcattgtggagcaatataaacatctccgccagagagatggttctgggagtgaccaagtcttcatgggaggattacagtgcgacanttggaggagcatggattcgtctctctggaagctatgggctcgggatggcactgctgtgatggaggtcccaacctaaaacatgtggaagggangctttccngttacttgaattaattcattcatccctgtggggaaacacctggatgtccattctagg

SEQ ID NO: 261698 - DNA, 1476 bp, Homo Sapiens
gtagcgaggcctgggtggcgaattcggcacgaggcccggcttcttcgtcacaggagaccgcgccggtggccggagctggtgcctgcggcgggtggggatgagcgccgggtggctgctgctggaagatgggtgcgaggtgactgtaggacgaggatttggtgtcacataccaactggtatcaaaaatctgccccctgatgatttctcgaaaccactgtgttttgaagcagaatcctgagggccaatggacaattatggacaacaagagtctaaatggtgtttggctgaacagagcgcgtctggaacctttaagggtctattccattcatcagggagactacatccaacttggagtgcctctggaaaataaggagaatgcggagtatgaatatgaagttactgaagaagactgggagacaatatatccttgtctttccccaaagaatgaccaaatgatagaaaaaaataaggaattgagaactaaaaggaaattcagtttggatgaattagcaggtcctggagctgaaggcccctcaaatttgaaatccaaaataaataaagtgtcttgtgaatctggtcagccagtgaaatcacaggggaaaggtgaagtggccagtacaccctctgacaatttggatcctaagttgactgcccttgagccaagtaagaccacaggggctcccatttaccctggcttccccaaagtcacagaggttcatcatgagcagaaagcctcaaactcttcagcatctcagagaagcttacagatgtttaaggtgaccatgtccaggattctgaggctcaaaatacagatgcaggaaaaacatgaagccgttatgaatgtgaaaaaacagacccaaaaggggaactcaaagaaagttgtgcaaatggagcagggaacttcaggacttacagtcccagctgtgtgcagagcaggctcagcagcaggcaaaagtggagcaactaaagaaaactttcccaggaagaagaacagcatcttcagggtttggagatagcccaaggagaaaaggacctgaagcaacagctggcccaggctctgcaggaggaagagaaggagaagatgcaagcacagaaggaagaagttcttagccacatgaatgatgtgctagagaatgagctccaatgtattatttgttcagaatacttcattgagcaaagagattgttctgaagaccgtgctctaagggcatttgaaagactgccaggtagtgcgagcctgagatggtctggaggattctctctagccgtgactccgctgctctgaaggtcaactgagaagtcttgtgggacagagacttgagttaggaagccctcagtcacttgccttccacggtggccagccctgctgccatcattggctgaagcaccaccaggattcacggcacccaactgcttcagggtacttcgtagactctgcctcactacatgtcgaaagagttatttgagttctcttctg

SEQ ID NO: 261699 - DNA, 574 bp, Homo Sapiens
  misc_feature (558)..(558): n is a, c, g, or t
atttcggcacagggatgcaagcacagaaggaagaagttcttagccacatgaatgatgtgctagagaatgagctccaatgtattatttgttcagaatacttcattgaggctgtcaccttgaactgtgcccacagtttctgctcctactgtatcaatgaatggatgaagcggaagatagaatgccccatttgtcggaaggacattaagtccaaaacatactctttggttctggacaattgcattaataagatggtaaataatctgagctcagaagttaaagaacgacgaattgttctcattagggaacgaaaagcaaagagattgttctgaagaccgtgctctaagggcatttgaaagactgccaggtagtgcgagcctgagatggtctggaggattctctctagccgtgactccgctgctctgaaggtcaactgagaagtcttgtggggacagagacttgaggttaggaagccctcagtcacttgccttccaccggtggccagccctgctgccatgcattgggctggaagcaccaccaggatttcacggcacccaactngcttcagggtacttcg

SEQ ID NO: 261700 - DNA, 772 bp, Homo Sapiens
ccctataaattatagaacaaatgggaaacaagggtttaatttagttcagccattttacaaggaaataataaaatactaaaatctgattgttttttgctatttaatagccactgcccagacacatatttaagagtttaatctttcagttgctatggcttatgaacaagctaaggttgaccataaaacatttgttggatgacgtggtttaaaatgatcaccacaaaaagggaccacaaaaaaaggaaggaaatgagcatggttggcgattggaagcaagggtaccagagggcacagtgtgctttggcatgcattttatacataaaatgaatggaacaaaaggtgccagaagtcccaggttacacaatcaggagcttagatactgcacacaaaaataattatctgggttaaaaaagtaaacatagggcagattctatatggcctatcatgtttcttcaccttcccctcgttgctggctgatacagcgaggtggtcagctgatgactacttagtcaatatgacctttagtcgtgaaactgacagcagcagtgattaaggctgacttaatcaggttggccactttgaaggacagaaatgcagtggaaacagttttattctatgtagtttacatgcttaaggttacagagtttctacctgcactgtaatggaaatataatttctctgtagccaaaagctggcaaacttgacccagagggaaaatttaaaactgcagcaggctcaaatgtagagtatttttctttttatgggcaggttg

SEQ ID NO: 261701 - DNA, 898 bp, Homo Sapiens
  misc_feature (466)..(466): n is a, c, g, or t
  misc_feature (613)..(613): n is a, c, g, or t
  misc_feature (671)..(671): n is a, c, g, or t
  misc_feature (835)..(835): n is a, c, g, or t
  misc_feature (859)..(859): n is a, c, g, or t
tttaacctgattctctgatgtcatgatctaaatgaggggtagtgggggatggaagagagtaccaggtggtccaccgttggggagtggggccgtccgcctgctctctactgtgcagacctcctaactgagtttacacacgcttgtgtttgcaacactaggtctggatgggaggtgaggggtgtgcgtatggctgccatgccagtgtctgtgcacatccctgtctgttggtctccatggccactgtggaccgggacccttgggggaagcctgcccatgtcgggctgtgggaggctgatcggtgcatgtgagagtggcttcccttctgcctgactccccactccctgacctgccccttccttgtttttcctcctactggtctccaccaaggctttgttagcccccaccctgcctggtgtgcagctaacccctccctccccacagccagaggaggccacagacccctcangggagttccgcgctggtgtctgggctgtgctccctcactaaagggaaggaaaggaaactgggcgtcctccgggccccccaacacacgtcccatttagccctgcacagcggtctccttcccctaagccagcactgctgctccctgganccgggaaggaggctgcctggctggaggccgagccaatgggccctgtgctgaggatttntgctgtgatttgggcaaatcattccaggtctttgggcctccaccccctcgtctctagtggacatttgagatcagagagcaccacagggctgggcttttgtgcccttaacccctgggattgcagcctgcctttttccattaaagttcacctaggtgagggattangccgcggggaccttcgggcattgnacaacatgggaagattcgggggccctttttccccagtgg

SEQ ID NO: 261702 - DNA, 240 bp, Homo Sapiens
taacattaagtctggcggaatggatgtcactgtgcacaataaagttttcacaagtataaacaatggtgatgtaagtcaacattgctgtagccaggtgtgaaggttgtatggtgtgtgacgaatgtacatcatgtttgtaggtttggatgctaatcttgaattgtagcttaaaaaatacgtatttttgtaactctttgaaagtttatgaagactgacagctttccttgtaagcactaagag

SEQ ID NO: 261703 - DNA, 915 bp, Homo Sapiens
tgtaccggctcggaattacgggatatcgtcgaccacgcgtcgggctacgctgtcggatttcaagttcatggcccagggagagacagggagcagctcaccccctggggggcccccgaagcccgggagccagctggacagcatgctggggagcctgcagtctgacctgaacaagctgggggtcgccacagtcgccaaaggagtctgcggggcctgcaagaagcccatcgccgggcaggttgtgaccgccatggggaagacgtggcaccccgagcacttcgtctgcacccactgccaggaggagatcggatcccggaacttcttcgagcgggatggacagccctactgtgaaaaggactaccacaacctcttctccccgcgctgctactactgcaacggccccatcctggataaagtggtgacagcccttgaccggacgtggcaccctgaacacttcttctgtgcacagtgtggagccttctttggtcccgaagggttccacgagaaggacggcaaggcctactgtcgcaaggactacttcgacatgttcgcacccaagtgtggcggctgcgcccgggccatcctggagaactatatctcaaggccctcaacacgctgtggcatcctgagtgctttgtgtgcgggcaatgcttcacgcccattcgtgaacggcagcttcttcgagcacgagagcagcctactgtgaggtgcactaccacgagcggggcggctcgctgttttcttgctgcaagaaagccatcacgggcgtggtcacgcatggcaagaagtccacccgagacactctttgtgcttctgctccagcagtcacacggccttcagagaacgacacctatgtcgaaggtctaagcttgtagggcggctttgcccacaaaatccaggaaggacaaatacggaagg

SEQ ID NO: 261704 - DNA, 542 bp, Homo Sapiens
actatttggaatattcaacctaaatactacccgctgctgtggtgacggggggtggaggaagcgtggtggaaccccaacacctagtgaggggtggctgattaataccacggctcacaacataacagagcggctcattccatgaacaaccccgggggaatttcgaattctatcatctgggcaaaagatgtgatgagtgtaacttcctgttttctccaaactaaaacactacgcagattcctgtaccgctctgggacagaaatcctcagccagagcagaggccgtccccagagtccacactgtttcctgcataaagtgggttatctcagaagaaacatcccactggtctgtgtgatccttctattgaaatgtggtcttttatctacatctaagtatctctagaagtaatgcgtttgtatgtacttgtcactcagatatgtaatcccttaatttgtgcggggttttggggtgtgaaaaattcttggtttatatcctacacttttaaataacctcctcaaaacttacatgtatttaacacctttttt

SEQ ID NO: 261705 - DNA, 1323 bp, Homo Sapiens
  misc_feature (269)..(269): n is a, c, g, or t
gcaccttcccccgcgcgggccggcccggggcgtggggacggcggtcctggccgtggttcaccgtccagggccccaaggagctgccagcgtagaagtccatcgggtagggctgctgccaggaaatgtccctcagagccacggccgcctcatagggtgtcagcagcggcttggggaaggctgtgccccagtcaatggagagacgtggacatgccacctgcacccacacatccacctcgggaagtaggctaagcttgctggggaagatctcnagagagcagcagcctcacaaaaggaaaggcccaaggctcggagtcgagattccaggtgctccaggatcttaggaactgccctggcggcccaaagtgcccagaataaggccccaggacttagctgagcgggcagtggctatggcttcttggcgagcagcctgcatgcgctggtggtcatagtgttctctggatagggactttgcttatatgggtcataccggtaagcgggaacattggggttggcaatcatgacagactccagatggaagcggccatctccaagatacacaacggcctccacctctttggacagtcggggggatgtgcagcccaggatctctccaggggacaggggcttgcactgtgggacactcacacgatactcggctttcagctcctgggcgctgcctgcaaggtcgacacaaactgaatggtgctgaccagggcaagggcagtggctgggggaaaggtgaggcggagagagtccaggaggtgtgtagtgtctatccggatgtccacaaagacgtacagcaaccggaagtcttggccgaggtgtccatgggaatcaggcaactgtggccgtaggggcaccaagaagtcagctcccaggaccctcgctgtgaagtcatccacacagcaagccccgtaggtcacgtcacccatcaccatcactgcggcctccgtgaacctttccaagatatccacaatggtacaggcaaagaggaggaggccttccggcatttgcaagaccaccttgcttggcctgggcgtgttggatcctccagatggtcttggggatctcaaagttgtagttggaaggcaggacccggattgctgcctgcagctgagggttcttcaggatctcaggggggatctgattgaccacgcggccccgaggggcccgacctctgccagggccgtctcgaccgccgtgctccgctgccccggatgcgaccagccgtcgtgcggaagtcgccagagcaggaggtcgtaggggacacgaaagcggaaaggatgcggtggaacgggaacataaggggaggatagaggggta

SEQ ID NO: 261706 - DNA, 1162 bp, Homo Sapiens
  misc_feature (1073)..(1099): n is a, c, g, or t
  misc_feature (1101)..(1101): n is a, c, g, or t
gtgcattgtgcttccgctcggggaaagaccgcttccggtgcttccgtcgctccttgccgggcataatggccgcgcagcgacccctgcgggtcctgtgcctggcgggcttccggcagagcgagcggggcttccgtgagaagaccggggcgctgaggaaggcgctgcggggtcgcgccgagctcgtgtgcctcagcggcccgcacccggtccccgaccccccgggccccgagggcgccagatcagacttcgggtcctgccctccggaggagcagcctcgaggctggtggttttcagagcaggaggccgacgttttctccgcattggaagagcccgccgtctgcaggggcctggaggaatcactggggatggtggcacaggcactgaacaggctggggccttttgacggccttcttggtttcagccaaggggctgcgctagcagcccttgtgtgtgccctgggccaggcaggcgatccccgcttccccttgccacggtttatcctcttggtgtctggtttctgtccccggggcattgggttcaaggaatccatcctgcaaaggcccttgtcattgccttcgctccatgtttttggggacactgacaaagtcatcccctctcaggagagtgtgcaactggccagccaatttcccggagccatcaccctcacccactctggtggccacttcattccagcagctgcaccccagcgtcaggcctacctcaagttcttggaccagtttgcagagtgaaagatcaagaaatgtctctgctcctacatccagctcctctaggggcagcctccgtcatccatgccctcccaggaccctccactcactgctgtgagtgcgcctcaccagaaccagttaagagacaactatcaattcttgagacccaaattataagggccctgccctgtactgaagaaaaggggagcacaaggccttaatggacattgacttgtgaaaacgcaaacatgaatatggttggagagccctggattaggaaggtgacatggggaaggcagaggctggcaccatggtgactgccacataataaaggggtgattttggaannnnnnnnnnnnnnnnnnnnnnnnnnncntgtcgggccgccctcggcccctcgaagaagcttttcctaaaccaattccgttttggcgccg

SEQ ID NO: 261707 - DNA, 1063 bp, Homo Sapiens
  misc_feature (272)..(272): n is a, c, g, or t
  misc_feature (970)..(1007): n is a, c, g, or t
attctcaactaacattctcattagatgtaaatgattcaaattacaaataatactaacctaagcattgtcattacttttaaaatccaagtttctcaaagtttgatttttttactcaatacaaaaatgacctggttcacactattagctgcccaacaaactgtttgaaaaactaaatattctttgttcaagagtagattacaagaaatgttttccatgctcttatttcaaaaaacaagattctgatatacataatgaatctaaataaaaattcnacaagtggtggctgaaatcctgtcaacttttcagccccaatacaatataaatccagcagttataatgcataaacaattcaaaattaaagtttataatggaaatgtcaacaagtcataactactacacattactactgatgggttccactatacttcaacctgggcacagcagatgtgcacatctgatagacagactgcttagaaaattaaagctatcagagctataaataaggaatacataaatatgaacatagcaatgccaaagcattagagctgttaaaaaaagtgaataagatgtgatgtaaacacatctgatagttctctctgtaagccactttccactgatttataaagctatggttttataattcttttaaaaagtaaaatttttctacactgctgcatgcagtaatttcattgtacattctcaactacaatgcaatcttctaaccctcttgcagagcttgacatatctcatcagaatttctccagaaagtcagcttgtcatattttcagcagccttcagtgcttcagtagccttgcgaagctccttaataaccgatgataaagcttctgggttaattccttgttcacaaagccgtacacaaatagacagagtttccatatctaagccagtattcaaaattcttgaaatctcaagcagaacgtccatggtctcccgcaccgcattcagattnnnnnnnnnnnnnnnnnnnnnnnnnnnnnnnnnnnnnntactcgccatggctaaggccgagggaggcgggagaagggcctgacccggaactccc

SEQ ID NO: 261708 - DNA, 456 bp, Homo Sapiens
  misc_feature (399)..(399): n is a, c, g, or t
  misc_feature (437)..(437): n is a, c, g, or t
acccaggttcgagtgcactggagtgatcacagctcactggcctcaagtgatcctcctgccttggcccttaagtgccagggttacaggcatgagctaccatgcctggcagaaattcaagatttggataaacttacttctttgccaagcctgttcttcaagttattcagaactgggtgtataccttgtcctcatatgtatcttgtccctgctgtcttttaggttagcaaggtgtatgaatacttttaagttttgtttgttcttttcctcgtggtatcagtgaaatactgatctattctctggctagggtcaatttacaaaattgccatggaactgagcaaaaggcccacgtgggataaaatcactcaccatcgacgccaccagtatttttcaagttatggncttttgaagtataacaaattttcagtaaacaaaatccnaaaggaaaaattccctctg

SEQ ID NO: 261709 - DNA, 799 bp, Homo Sapiens
gggcttttttttccaaaatggcagcctccagtcgcgcacaagtgttatctctgtaccgggcgatgctgagagagagcaagcgtttcagcgcctacaattacagaacatatgctgtcaggaggataagagatgccttcagagaaaataaaaatgtaaaggatcctgtagaaattcaaaccctagtgaataaagccaagagagaccttggagtaattcgtcgacaggtccacattggccaactgtattcaactgacaagctgatcattgagaatcgagacatgcccaggacctagcaagccggggaccagccaccagtggcggccagggaccaccttcagcatccactctctgtttgagctgggggctcccaaaaccagcttacaatagccttttgcgctgcctgtcctgtgggagctgataaaccaagtcacatttgcattctgttgcaggcttagtgaaaaaggactgctgtctttccttggttcaagtgttagaatggagagctggagttcgttcagaatagtgctgtgtgttaccacgtctcccctgcaccccattcctaccttgtagctcatgaccattgtgtatagcatttctacactttggtttcttggtcccttggcaataaaaagaatgatctcccctgagccctttgaccccaggataaaccccctcccaatttaatgcataattccttttccctactgaatacaagggccctggaaaaaggggctggtttgggggggcccctcccgggggaaggggtttccaacttccttggaaaacccaagaaacctgg

SEQ ID NO: 261710 - DNA, 574 bp, Homo Sapiens
  misc_feature (157)..(157): n is a, c, g, or t
  misc_feature (273)..(273): n is a, c, g, or t
  misc_feature (340)..(340): n is a, c, g, or t
tggagacccagcacccagcagggggagccaggtgacagcaggggaagcagatggcagggccccaggcagtccaggacctcaggctctgaagggtggggcaagggggtcaggtcacgtcttgacatccagcagtggcatccgcttgtgctggtaaccnactctgcccagcccatgtaaccaccttggggtctccccatgtcaagaagagcagctccctgctcagcctcatgcagttcctcagctgggtcatagctgtacatggggagcaggtgnatggcgcagccggtcccacccgctttttcttctgtacatacattaccacagccaccaccaccccganccagggtgatgaggaagaagggccccaacacatagcccaccatggagtcgctgttggcctggggggcattgggcacagtggtgttactcatgacatcagcagccggagggctgggtggtcagcatgggcagtggcgcttcgggagggcgcctccactgggctccctcccgccgctgcagccccgacaggaacgccctcggttggctcccgggccccggaaaagccgtcaggcgc

SEQ ID NO: 261711 - DNA, 1261 bp, Homo Sapiens
gatgtggacattgagccttatgtaagcaaaatgttaggtactggaaaactgggcttctcttttgtgagaattacagctcttatggtgtcttgtaatcgtttgtgggtggggacaggaaatggtgtcattatctccatcccattgacagaaaccgtaatcctccaccagggacgtttactggggctgagggcaaataaaacctcaggtgtaccagggaaatcgtcctggaagtgtaatccgtgtatatggtgatgaaaacagtgataaagtgactccagggacatttataccctattgttcaatggcacatgcacagctttgcttccatgggcaccgggatgctgtgaaattctttgtggcagtcccaggtcaagtcatcagcccacaaagtagcagtagtggcacggatctgacgggtgacaaagcagggccatctgcacaggagcctggtagtcagacgcccttgaagtctatgcttgtcatcagtggaggagagggctacatcgacttccgaatgggtgatgaaggtggagaatcagaacttcttggagaggatcttccacttgaaccttctgtcaccaaagcagaaaggagtcacttgatagtgtggcaagtgatgtatggcaatgagtgagcccatgggaaacaggtggagatggggaaagccgtctcttctgcatggtttattttccctctatccttttatttaatgctcttttgtgagataagtttcaccacataatgtgtgagcattttttcctgttaactttatattacaaaatccgttctaccataacaatacagaggaactagctgtgttactgcaccagtgttataggtaacttcagtatattatgaacaaatcaaagaatgtttacttcctgcaaactggtgaattatagaaagcaatccagatgtgatttactctgccacgagtctaatgtcattcacttcatttgatggggtcacttgttagctgtcactaataatggaattaatgggaaacacttgataaatgaaactgtaccgttaaatacaatagctgagttttccccagtgtattgtaaaattgacacacactaatacaagatggattatcaggatgtatctaaatgtcccgagagggttaaaagctaactgtaaattactttaactttcactttcaaatctgacaaatcttgtttatatggtatataaaactttgttttcatcagatttgggggggttttatattaaagaaattaagactacactatttaaa

SEQ ID NO: 261712 - DNA, 745 bp, Homo Sapiens
  misc_feature (434)..(454): n is a, c, g, or t
cgtacctcaacaaagccatcccggacactcgcctcaccatcaagaagtacctggacgtgaagtttgagtacctgtcgtactgcctgaaggtgaaggagatggatgacgaggaatacagctgcattgccctaggcgagcccctttaccgggtgagcaccggcaactatgagtaccgcctgatcctgcgctgccgccaggaggcgcgcgcccgcttctcccagatgcgcaaggatgtgctggagaagatggagctgctggaccagaagcacgtccaggacatcgtgttccagctgcagcgcctcgtgtccaccatgtccaagtactacaacgactgctacgcagtgctgcgggatgccgacgtcttccccatcgaggtagacctggcgcacaccacattggcctatggcctcaaccaggaggagttcacagatggnnnnnnnnnnnnnnnnnnnnnagacacggcagctggggagccgtccagggatacacgaggggctgctgggcccttggacaagggtggaagctggtgtgactcctgagtgccccgcggctgtggtgccgggggcagggtgcgtgggaggacggagcctgggagcggggcggggccgccgcagcaagggggcgacgcataaaggctgctggcttggggcgcctgctccctgctcctctgtcctcgcacagcgaacctgggctcctggccaggacaggcaccagggtcatggcctgggacctggacactggcccc

SEQ ID NO: 261713 - DNA, 821 bp, Homo Sapiens
  misc_feature (285)..(346): n is a, c, g, or t
  misc_feature (491)..(524): n is a, c, g, or t
aagtctaggaattggttaagaaataaggggccatttctctgggggacctgaatgaagaatagaatcctttaagtgtgcttaagtgcgacaggtccagccctgttcagcaacaaagatgaccttgcactctggggttatccttcagcagcgaggcacagacacttgatgtgagaattccattccaacggggggtcttctgagggataattagaacatacataactcatatgacacttcatgtttgcaaaatcactttgcaatttctttgtcacccttaatataccnnnnnnnnnnnnnnnnnnnnnnnnnnnnnnnnnnnnnnnnnnnnnnnnnnnnnnnnnnnnnnacacagtgcccagagtcacaatcattacagtgcagagctgtagtgaaatttacagtaactgttacacaagtgtagcttaatgagtgagttactctggcttccgcattcttacatctatgattagattgagatggcaactgacccnnnnnnnnnnnnnnnnnnnnnnnnnnnnnnnnnncaggcagacaggcccaaagagacatcttttagccctgctccatcctgcccctaaggtctggcattaaacttttaggcctctttgctatctctgggggctcagggccctgcactcttgctgccaggaacacagggtcaactcaacgcagaccagtgcggttctgtggtgtacactgctcacatggccccagctgccaacccagagacaagcactcattggggaagttttgaggtcatgaccatttggattgggcccgcggtagatgcctcagagtgactggattatgaaaaatcttgt

SEQ ID NO: 261714 - DNA, 574 bp, Homo Sapiens
aatggcaggcgttcggtcactgaggtgtagcagaggatgcgctggcggctgtgagtgcggcgacaagggcaaatgcagcgactcctcgctgttgggcaagagactctccgaagactcgagccgccaccagctgttgcagaagtgggcgagcatgtggagctccatgagcgaagacgcgtcggtggccgacatggagagggcgcagctggaggaggaggcggcggctgcggaggagaggccgctggtgttcctgtgctccggctgccggcggccgctgggcgactcgctgagctgggtggccagccaggaggacaccaactgcatcctgcttcgctgtgtttcctgtaatgtttctgtggataaggaacagaagctatccaaacgtgaaaaggaaaatggttgcgtccttgagactttgtgctgcgcggggtgctcactcaatcttgggtatcgtgtgcagatgtgcgcgcaagaatattgatgattagagagagagacttggcttgcgctcagtgtgaagccattgaaagttatgtttagggtcctctgaaaaagcaaattgtgtcagaagata

SEQ ID NO: 261715 - DNA, 572 bp, Homo Sapiens
cttgaggatcagctaggctgcaaaggtggagtctctcatctgatccagaaggggtagaagagtctgcacaagcttctgtgcacctgggaatgtttcgtgcgttgagaggagaggtggggtctcagcaggaggaggtcctgcaggtggtgctgcaaggggtcggctggccgcagggaggccggcagcagggggactgcacagacacaggctggcagcaggtggtggcccagcagcagggcctgcacaccacagccgtgcacgacgaggggcagcaggtgatggggcggcagcagccttcctgcagggagcaggggtcgcagcacaccgggcggcggcagggctcgcagatggggcgcgtgcagcggggcacgcaggtcacggggcggcacacggtggtctggcaggtcacggggcggcagcagcaggggtcgcggcagcagcagggctggcagcagcctcccccgtagctcagggaggacaaggtggagccgcagcaggagccggtcatggtggtgtctgaggctggtgtgggttgggctgttgagaggagctggatgttctcaggtgtgaat

SEQ ID NO: 261716 - DNA, 632 bp, Homo Sapiens
gtaaaaaagccagacccaagggaccacatattgtatgattccattgatttgaactgtccagaaagggcaaatttatagagaaagtagattagtggttgccgggggtaagaacaggattaactgtaaaagagcatgaaggatcttattgggagggataaaaatgttctaaaactgagtaatagttacagctacaccactgagggaagttactaaaatcactgaaatgtacacttgaaatgggtgttttatgatatgtaacatatgcctcattaaagttgttttaagaaaaggattccctgcctcccaaaccatccttcaagcattaaacatttttggaggctcataatcaacaggacagaataactacttagtgatgatttacagagtgaaatattttactgttttgtagtaagcacattttagtaactgtacactagtacaatgtttttaagattttatctcatttttgtcatattagcctaaaatgtttatttttatttaaaaagtagccaataggaaggtaagattggggagaaagctcagtaaatgtcacaaaagagactcctagtaacacaatctgagggagctttttcttttgaaataaagatggtgcatctgtcccctgtgccgaa

SEQ ID NO: 261717 - DNA, 796 bp, Homo Sapiens
cccccagccccggggagcagccacgccgggcgtcctctcgaagcccaggggccggggcagcggcggcccctgcagcacctgctgctgctgaaccagctggccctggatgatgctgctgatctgcggtggcaagttagccgtggtgatgtggcttgggctggccaggggctgcaggccggccccacccgcggctgcagggctctggggtcccaggtggtggatggtgccccctgactgtgtgtggggctgggagggtctccgctctcggactgtgatgggcgtacccgggtgctggagctgaacctgggctccctgggcgatctgggtgagccctgacccatcctgaaacacaaagtgtccaccactggaggggctcaagctgatctgcctcaccagcacgctggcatccacgaagtcccctgtagggctgctgctgcagaggcccagcccagggccaggggcacctgcacgcacattctgcaaggcctgccccggccccggactgggctgcgtgggactctgggtctggaccatcagctgctgtagttggtggctgggggatggcagtgtgaggggcagggacggctgggagcacgctggctgctcctcgcccgcgccggggcaggccccaggccactggacatggcgctggctgctctgggagctgctgacgtgctgcatgactacgtcttcaggaaatgctccccagctcttgggcaagataagtgtctttattataaaaggcgtcaattcgcagcgtctttactgtaaaggtggtggtattattagattcttc

SEQ ID NO: 261718 - DNA, 1649 bp, Homo Sapiens
  misc_feature (23)..(23): n is a, c, g, or t
  misc_feature (29)..(29): n is a, c, g, or t
  misc_feature (57)..(57): n is a, c, g, or t
  misc_feature (98)..(98): n is a, c, g, or t
  misc_feature (1595)..(1595): n is a, c, g, or t
acggggccttccggcaactcctncaaaangggtaacctccatccaggaataaaaaancatcctgcccagaccttgtaacccccaattcccaatggggncgatggccgtttaatttgaataggccatgccctctggtacaggatagtagtttatatcaataattttatgcaaagtttcggacaacgactttagtgacttcagccaacttcttaaagtcgtatgtgtgttctgatatgacatacatattcagggccagggaagccaaattacaaacagcaacctcatctttgctggtgtactccactatttctgtgcacaggttgctgcatttgatggttcccaggttctgctggttgctctttcgattacaggaatctttgtagagcatatacggggtgcctgtttccgtctgagactcaatgatggcataccaaagctgctgagcttttacaacttttgcggaccacgaccttgttttctcataacttgcatatagtttctcaaattcctctccccaaacctcatccagaccaggacactcatttggacacatcaaagaccagtcctgattagtctccactcgtttcatgaagagatccggaatccaaagagcaaagaaaagatctctggcacgctgctcttcctttcctgtgttcttctttaaatcaaggaattcaaagatgtctaaatgccaaggctccaggtaaatagcaaatgccccaggacgcttgttcccaccttgatccacatatcgagctgtgttgttatatactctcagcatcggtacaaggccattggaattgccattagtcccagcaatgtagctgccagtagcccgaatacaactcacagcaacaccaattcctccagcagacttagaaatcaatgcacattgctttagagtgtcataaatgccttcaatgctgtcatctttcatactcagaagaaaacagctagaaagttgtgggcggttggtaccagcattgaagagagagggcgaagcatgagtaaaccacctctcagaaagaagattatatgtttcaattgctgcatcaatgtcttctttgtggatcccaacagatactctcatcaacatatgttgtggtctttcagccacttttccattgatcttcaacaaataagaccgctctagcgtcttaaagccgaagtaattgtaagagaaatctcggtcatagataatagcagaattcaggcgatctttattggccagaacaatatccaatgttgacttggccaccatgggagagtgtttgccattatgtggatttatgtagttatagaggtcttccatcacatcactgaacactttctttgtttctttgtgcaagttagagacagcgatcctggctgccaggatagcatagtcagggtgcttagtagtcaaggttgcagctgtttcagcagccaaagtatctagttccactgtggtgaccccactgtacaagccttggattactttcatggtgatctgagcaggatcaacaaaatccatattgagtccataacaaagcttctggattcgagatgtaattttgtcaaacatgactcgttcttggcggccatctaaagaatcnaatcatgttagcaattattaaattcatgttagcaattattaagactacaatgtc

SEQ ID NO: 261719 - DNA, 597 bp, Homo Sapiens
agaaaataaatctgaaaagcagaataagcctcagaaacaaaatgatggccaaaggaaagacccttctaaaaaccaaggaggtgggctctcatcaagtggagcaggagaagggcaggggcctaagaaacagaccaggttgggtcttgaggcaaaaaaagaagaaaatcttgctgattggtattctcaggtcatcacaaagtcagaaatgattgaataccatgacataagtggctgttatattcttcgtccctgggcctatgccatttgggaagccatcaaggacttttttgatgctgagatcaagaaacttggtgttgaaaactgctacttccccatgtttgtgtctcaaagtgcattagagaaagagaagactcatgttgctgactttgccccagaggttgcttgggttacaagatctggcaaaaccgagctggcagaaccaattgccattcgtcctactagtgaaacagtaatgtatcctgcatatgcaaaatgggtacagtcacacagagacctgcccatcaagctcaatcagtggtgcaatgtggtgcgttgggaattcaagcatcctcagcctttcctacgtactcgtgaatt

SEQ ID NO: 261720 - DNA, 1073 bp, Homo Sapiens
gagcgaggcctgggtggcgaattcggcacgagggtgagactttggatccttcctgaggacgtggagaaaacttgctgctgagaaggacattttgaaggttttgttggctgaaaaagctgtttctggaatcacccctagatctttcttgaagacttgaattagattacagcgatggggacacagaaggtcaccccagctctgatatttgccatcacagttgctacaatcggctctttccaatttggctacaacactggggtcatcaatgctcctgagaagatcataaaggaatttatcaataaaactttgacggacaagggaaatgccccaccctctgaggtgctgctcacgtctctctggtccttgtctgtggccatattttccgtcgggggtatgatcggctccttttccgtcggactcttcgtcaaccgctttggcaggcgcaattcaatgctgattgtcaacctgttggctgtcactggtggctgctttatgggactgtgtaaagtagctaagtcggttgaaatgctgatcctgggtcgcttggttattggcctcttctgcggactctgcacaggttttgtgcccatgtacattggagagatctcgcctactgccctgcggggtgcctttggcactctcaaccagctgggcatcgttgttggaattctggtggcccagatctttggtctggaattcatccttgggtctgaagagctatggccgctgctactgggttttaccatccttcctgctatcctacaaagtgcagcccttccattttgccctgaaagtcccagatttttggctcattaacagaaaagaagaggagaatgctaagcagatcctcccagcgggttgtgggggcacccaggatgtatcccaagacatccaaggagatgaaagatgagagtgccagggatgtcacaagaaaagcaagtcaccgggcctaaagcctctttagagtgtccaggctacggacagcccatcatcattttcattggggtccagctctctcagcagctctctgggatcaaagctggggttccattactccaccgggaatcttcaag

SEQ ID NO: 261721 - DNA, 729 bp, Homo Sapiens
  misc_feature (152)..(254): n is a, c, g, or t
cagccctgcccagggtataaggagtaaatgacctttttcctttgattaaatgaccccactaattttccccaccaatattgtctccatcttcagtcttggacaggatagatacaaagtttaattcccctagttgggggagggaccctcactannnnnnnnnnnnnnnnnnnnnnnnnnnnnnnnnnnnnnnnnnnnnnnnnnnnnnnnnnnnnnnnnnnnnnnnnnnnnnnnnnnnnnnnnnnnnnnnnnnnnnncttaaattctgaattcttgaaaccctacttaaaggaataatttccccaatccagaatcctaattcttgtgccccggcactcaccgtcctcaggagccattgatgacccccagtgttgtagcccaaactggaaagagccgattgtagccaactgtgatggcaaagatcagagctggggtgaccctggagagacagaggacagggaggagagaatagtccttaaaacttgtaattgatgactgtttcttattaattatggagctgtattaggagaatctgacctatgagtggtatgaaaaggacaaacatcaaacgagatttaggtaattaatcgggaagacaaagtaatagattatactaaagaacttatctggagataagaatgtgaagttaacttggtaaaagtggaaaagaaaattggagaaggaagaagttaagagaaactgggttggtcagtttggaaatatttaaaaacc

SEQ ID NO: 261722 - DNA, 1134 bp, Homo Sapiens
  misc_feature (286)..(286): n is a, c, g, or t
cagggacagaaggaaggagaaaattttctaaacagcagctggtccttcttcacaatttgcattacttatgcaaatacatcattaaataatactcatcttatatttacaaaatagaggaaagggaaaaacctaaagtatcaggatctttcatttcttatccctcttccaatcttctggatacattagtttacataccaactaaacatgtgatactagttaactatagttgagagcttatcaattaagtcatcaatagggtaaacaagaaggttgaatgtctgctttnttccctcattccggtgatcactgtgttttcggaggatgacatccacatctgtgctgagtactcgatcggcaacctgcattgatgtatgccaaggtacaatgtcatccttcatgccatggagcaatcttatggggcagttcacaggaattgggctatgtaacaagcagtgatgttcagcttctttaatgaaactgtactgaacgttataaactccttcttcagagtattttgatggcatgctccacacacctttcatctctacttccttttttagctcaacaggaagctgattaaactttgtcactaaggtatctgcagctgtagctacaccaataagagccacgaccttctctggtcgtgcaattgcagcatgaagcataagccaccctccaaggctagatccaacaagaatctgtggcccatcagctaagtcatcaattatagaaagaacatcttttctccatttccccagtgtgctttcctctgagttaccatctgaacttccaactcctgagtaatcaaaccttatgcaggcgtgacctagagatttgcaaaactcctcaatcgccaacgcttttgtaccattcatataagaaagatagccagggatgaagataattcctggacttttgccttttagcttcttataagccaggtttggaaggtctggtcgattaaggaatgagagtgacgtcttttgtctacaagctgggagccaccgtggcgcccgctgaggtatccgtgcaagcagcacgctgaggccacggtggggaccgaaggggacggctgcccagccccagctccgacaaggtacccaggccgccacagctgccaagcctcgtccgaat

SEQ ID NO: 261723 - DNA, 866 bp, Homo Sapiens
  misc_feature (731)..(769): n is a, c, g, or t
caagagggaaaagtttattgcaggttggggacacttgtaaaaggcaaaatctaacaatgagaacgaactatagggctcgccagtttagaagatgagcaggtaaaacaaatacacggattatgtacaattattaaaaagagcagggtggtggacaaaaaggaaaaactgccagcagccttccagaaggttcacagagtatatccagggagcaccttcccgcccagtcctggctgcctcgggcatgcctcctcctgtggttacctgccctgctccagatgaaatgcagatgaggaagcagctaccggggctcaggagcagagctcattctgctcggcaagtcgctggcttgcagggaagcagccgctgggtgccgcatgcgccaagcctctcattaaaaagcccagagggcaagttcacgggcatttcctaacacacgtgtgggaagagctgggggaaacccacaccgcccagggaagaagtggcttcttccatcgtctgtgtatgaatgaatactgagcattgtctctggggagcctggtgccccaagccgaatggctgagcccgccgccctgggcctctgagcgcttctcaaagcctgcaatccgtgtccaatgaccaaattgtcctctcaggcgctcacttcttctattagaaagccagtcctcttagcccccatatcacctctcacaggacacccacaaaaggacaaatgcaattctaagtctttcgtnnnnnnnnnnnnnnnnnnnnnnnnnnnnnnnnnnnnnnnggagtgttctgagtctacttaaataaggaaaaggccttggttcatccaaagtgtttccaaagtgtttctataaaaatgcatcgaatgctggaataaa

SEQ ID NO: 261724 - DNA, 606 bp, Homo Sapiens
taatacagtatcatggctgaggtggatggggcaggtgcatgatactcttcagagctatttgtgaaattttaaagacagaagtgtctcagtgacaagttggatgacactactcccaactttttaaatttggagaaaaccatcaaggtcgaggaagccctgggtatggccattaccatctgattagaagatgaacaggtattttgaatctgatctgacatggaacagtttacctcattgtaggtagggaacaagagaacccatctattaaaattgccttagatctgggaaagtaaccatccttctggcaaagtaggatggcacttttaagtttttcttccttttttccctctgtttatattgcacatcaagtcaaaaacatgtttgggaaagatggttttcaattctgaagttatacctagtgatgttttttgcagtacatttgaatggattgtagacactgcctcaacccttttgaggttttgatttggaaatagatttaaaagaaaacaggctaagataatatccttgttctcatttacaccctgcagtttggaccacatttgacctcataagtttttccttttaacagtaagaagcagtgtgagc

SEQ ID NO: 261725 - DNA, 1502 bp, Homo Sapiens
  misc_feature (166)..(255): n is a, c, g, or t
  misc_feature (1068)..(1085): n is a, c, g, or t
  misc_feature (1092)..(1109): n is a, c, g, or t
  misc_feature (1476)..(1476): n is a, c, g, or t
ggcctgggtggcgaattcggcacgagggccgagccgcccccaccccccaagctccctctccccgccttcagactgaagaatgactcggacctcttcgggctggggctggaggaggccggacccaaggagagcagtgaggaaggtaaggagggcaaaaccccctctnnnnnnnnnnnnnnnnnnnnnnnnnnnnnnnnnnnnnnnnnnnnnnnnnnnnnnnnnnnnnnnnnnnnnnnnnnnnnnnnnnnnnnnnnngaggagggcaaggaggagcggcgacggcggcagcagcggcccccgcgcagcagggagaggacggctgccgatgagctggaggctttcctggggggcggggccccgggcggccgccaccctgggggtggcgactacgaggagctctaggccggcgtgggcagtggccgccctggggcggggggcgtgcctgtcactgcctggggaggcatttgcctctgtaccatcgcctttgccgctgccccgtggctgccgtgtgcgcttctgagctggaagaggccgggcattggtggtccccaggctgggccctgcaggtgctgggccttcaggcccagtgtgagcctgctctgcaagaagggaggggacagctggcttcagccaggctcggtggacaccctggccctctcggggcagagccgccagtgtttctcagggatgtgactgaggcccaggagggacctgtgagggtctgtttacagaggctgggcaggggccgcttggctgtggggtgtgcgctgccccggcacctgcttgccctccgcgctcatctggggccgcagcatgcctatggttccgcttccggccgggagccctgaacacgggtgtgcagactcaccctaaagggcggcccaggccccacgctagaaggctggcgagaccgaaggcagcatgtgaggcctctcctgggagtgggggttgtgtttcccacagtggcctcagctgcgcccccgctcaggtgagcccgaaggcaggagccgggaggcactcctcccaaacactccactcagaccataaagcactcctgtttcactctgnnnnnnnnnnnnnnnnnnctcgagnnnnnnnnnnnnnnnnnngcttcaggccaacgtgactgcagtttatttatttgactattttatggaaagggaaaaaggttaagggcttcttttaaaacccctgatatccgtaaggggggattataccctctgccaccaaaaggaaaaggtgggaagggaaggccaattggctctcccttaaaggaaaaaatttgacccgtcactaaaaaggcggcaccctccccctttccaagtcccccattccccctaatcccaccacgaggaacggccggaacaatttttcctcccggggcccccccacaggggccctttaaacaagattgaacaaagtgttcggttttcgcacatatagacttcaagtggcggtgtcccccccctgggaggnggtcggggatccaaatcagggggtga

SEQ ID NO: 261726 - DNA, 1134 bp, Homo Sapiens
  misc_feature (25)..(25): n is a, c, g, or t
  misc_feature (112)..(112): n is a, c, g, or t
  misc_feature (314)..(392): n is a, c, g, or t
taagcaggccctcctcgtcggaaantgacccccgagggacccattgctgcacaaatgctgtccttcgtcatggatgaccccgactttgagagcgagggatcagacacacagncagggcggatgactttcccgtgcgagatgacccctccgatgtgactgacgaggatgaggccctgccgagccgcccccaccccccaagctccctctccccgccttcagactgaagaatgactcggacctcttcgggctggggctggaggaggccggacccaaggagagcagtgaggaaggtaaggagggcaaaaccccctctnnnnnnnnnnnnnnnnnnnnnnnnnnnnnnnnnnnnnnnnnnnnnnnnnnnnnnnnnnnnnnnnnnnnnnnnnnnnnnngcaaggacaaggaggagggcaaggaggagcggcgacggcggcagcagcggcccccgcgcagcagggagaggacggctgccgatgagctggaggctttcctggggggcggggccccgggcggccgccaccctgggggtggcgactacgaggagctctaggccggcgtgggcagtggccgccctggggcggggggcgtgcctgtcactgcctggggaggcatttgcctctgtaccatcgcctttgccgctgccccgtggctgccgtgtgcgcttctgagctggaagaaggccgggcattgggtggtccccaggctgggccctgcaggtgctgggccttcaagcccaaggtgagcctgctccgcaagaagggaggcgacagctggctttcagcaaggctcgggggaaaccctggccctctcggggcagagccgccagtgtttctcagggatgtgactgaggcccaggagggacctgggagggtctgtttacggaggctgggcaggggccgcttggctgtggggggggccctgccccggacctggttggccctccgcgctcatctggggccgaaacatggcaatggttcccgcttccggcgggagccccgaaacaggggtggccagaacccccctaaagggggggcccggcccccccgctaaaaggctggcgaaaaccaaaggagcatgggaggggctcccccggaaaaaggggggttttggggttcccaacaggggccctccccc

SEQ ID NO: 261727 - DNA, 764 bp, Homo Sapiens
  misc_feature (47)..(72): n is a, c, g, or t
  misc_feature (679)..(694): n is a, c, g, or t
tgtatgccgggggggaagaaaggtttcggtttgggccaaaagtaatnnnnnnnnnnnnnnnnnnnnnnnnnncccaagcaccttttccccggagtcacgggaaacgggaggcttgtttccaaacctcggctggaaggctggtcttggcactcgacgtcttagctagtggaattatcgcattaagactgtactggggcctttttcatgatgacttgggtctcaatccttggagcagctgaaagaacagctcgggcccccctgtggatgcacccacaatgaaatcagaggccactgcaaggcagagtggcctgcagttttaactcgggcactatggcaatgcagacccaaaccaattgtgccagttctttgctgggtggcaaagtgtttttcaggctttgtggtcactcctgatttctgtttggaagcacagttctctctctaaggagaatggaaacttggaaaggcctgtaaaatcggaaagcctgtaaaaggccgtagagtggagatgtataaaaatgtacggtcacccatgttttaggggttgacaccgtggacttttatctcgctcaccaaattcctcacacatacagctcactccctgtgccctcggccatctcaggcaccacaaaatcctcactgcttgaaattcacttatggagtccaacaaacaactttcttnnnnnnnnnnnnnnnnggcagtaaaatctcagaatttctgtgcaacgcttgcaacctgcccacttattaaataaacagaacacccc

SEQ ID NO: 261728 - DNA, 1333 bp, Homo Sapiens
  misc_feature (1032)..(1041): n is a, c, g, or t
tttggcctggctgggctccctggctcccctaagaagcgggtccgtattgaatgcaagtgtgggactgagtcctgccgcaaatacctcttctagcccttagaagtctgaggccagactgactgagggggcctgaagctacatgcacctcccccactgctgccctcctgtcgagaatgactgccagggcctcgcctgcctccacctgcccccacctgctcctacctgctctacgttcagggctgtggccgtggtgaggaccgactccaggagtcccctttccctgtcccagccccatctgtgggttgcacttacaaacccccacccaccttcagaaatagtttttcaacatcaagactctctgctcgcttgggattcatggcctattaacggaggtccaatggggtgagtcccaacccagccccagcaatatatcctgttctttgctaccttgctttctgctctggcagcatctgcagggcgctctgcttgcctgcgcctccttcccatgcttgccctcaaaggctatgcggcgcacagcacacccctagtcagctagcgtcagcaccatctagcaggccacgagatgccatagcccgacactgacagcctggttccccaaatcctactagacacacactcatgatacctagctgacaacgaacacgtggagcgatccactgccggctaccgcggcctgaacgtgcctgcatctcttgcctccgcctgactcacaagctgcctcggccctaacctgctcgggcccactaaagcagacatgataccgcgatcaacgtacccttcacgcggccttgaccactaatcctagcaagcaaacgctgcgcacagccccaactcctgcccacctgcaccaacccggaacccatgcgcaccacatccctcactggaccaccacacatgcaccgccaccaagcacacacggcgcacagcgccacctgccaaccaaccacctagggcactccaacgctccccttgtgccacgcgctcacgccaccatcaggcgaccccaatcgnnnnnnnnnnggccccacatcacccacgcctacctcaccctgacaccacgccacccccattaaccctcgcacttctttctgctcgactcgcatctcctatgtcgccgcattccaccacaaacttgtggttcaccctttgctcatatgtcaccattttgctgtcacattcatcaccgtcttagtatctatcgctcccttataagaaaactctttgtatctccctctgctattgtaatctaattttcgctccgtgtaagctatttatacgcccaacataactatcaacatatgtctacttgctc

SEQ ID NO: 261729 - DNA, 827 bp, Homo Sapiens
agactttagtgacgggatggcgtgtcacgtagattcatatgatcctttatgtagttaggaaatggttgacagaaggaattgtagtttactgcttttcagagggcgtgaagaacaacaggtcagccaggttgtctttaagatgttcttttagacagctgcacattgtagaccctttcacctgccctacaccaaagatgtacgatgcactaggaaactgctcataggatttctgtcagctgacttaaagctgtggttgtaattaaatagttggtgctatgattgatgcaaaatctagtagcaatgcaatgggaccctgtatttgctttatgggtggtggtttgggaatgtattctaagcttataaatctttggaaccacggggtgggaagggtgggggaacttactgatgacaatagactccctcctaaagggccttccatgtaagcagaacgaaccttggcacacaattcagtgtggatatttgggaaacagttccaagtggaatatataatatcagtctggaaaagatttcattaggatagctttttgtgtatgtatatgtatatttatttttaggaatagatctatagttgtacatgaattcctgttaggaatactctgaatgagcttaacccacttgccaaatatccttgtcccttccatcattttatttttgagatggggtcttgcagtgttgcccaggctggactcaaactctggggcttaatcatccttctgagtagctgggactacataaaggccaaagtataattgcttttgatttttaaaatcttcttgcccatcatttttataaaaataaagctgttt

SEQ ID NO: 261730 - DNA, 1128 bp, Homo Sapiens
aaaaaaagtctagagccaccgtccagggagcaggtagctgctgggctccggggacactttgcgttcgggctgggagcgtgctttccacgacggtgacacgcttccctggattggcagccagactgccttccgggtcactgccatggaggagccgcagtcagatcctagcgtcgagccccctctgagtcaggaaacattttcagacctatggaaactacttcctgaaaacaacgttctgtcccccttgccgtcccaagcaatggatgatttgatgctgtccccggacgatattgaacaatggttcactgaagacccaggtccagatgaagctcccagaatgccagaggctgctccccgcgtggcccctgcaccagcagctcctacaccggcggcccctgcaccagccccctcctggcccctgtcatcttctgtcccttcccagaaaacctaccagggcagctacggtttccgtctgggcttcttgcattctgggacagccaagtctgtgacttgcacgtactcccctgccctcaacaagatgttttgccaactggccaagacctgccctgtgcagctgtgggttgattccacacccccgcccggcacccgcgtccgcgccatggccatctacaagcagtcacagcacatgacggaggttgtgaggcgctgcccccaccatgagcgctgctcagatagcgatggtctggcccctcctcagcatcttatccgagtggaaggaaatttgcgtgtggagtattcggatgaccagaaacacttttcgacatagtgtggtggtgcactatgagccgcctgacggttggtctgatgtaccaccatcagttacaactacatgtgtaaccagctcctgcatggcgcggcatgaacggaggcccatcctcaacatcatcaccactggacgaatcccggtggtcaatctacctgggaccggaacaagcattgagggccgtagtaagtgcccgtcctggaagagcccggcgcccgcaggcaaaactctccgacgcaaggggagctcacagacgcgacccagcacccagcacagcacgcccacaaccagcccccagcaagaacacccgcggcgcacactccctcacacagcgcgacaccact

SEQ ID NO: 261731 - DNA, 604 bp, Homo Sapiens
cccgaagctccgccacccgccgccatgagtagctttggagctggcaaaaccaaagaagttatcttcagtgtggaggatggctccgtgaaaatgttcctgaggggccgccctgtgcccatgatgatcccagacgagctggcacccacctacagcctggacacacgctcggagctgccttcttgccggctcaagctggagtgggtctatggctaccgtggccgagactgccgggccaacctttatttgctgcccaccggggagatagtgtactttgtggcctccgtagccgtgctatacagcgtggaggagcagaggcagcgacactacctgggacacaacgatgacatcaaatgcttggccatccacccagatatgtgtcaccatcgccacgggacaggtggcgggaaccactaaggaagggaagccgctgccgccccacgtgcgcatcttgggactcagtttccctctccaccttacacgttgctgggcttggggggtgtttgacagagccgtgtgctgtgtgggcttctccaaatctaatggaggcaacctgctgtgtgcagtggatgaatccaatgatcacatgctctcggtgtgggactgg

SEQ ID NO: 261732 - DNA, 394 bp, Homo Sapiens
cggaggaggcagagccagacctcactttacaaacgcctgaagcttccgctcctggctgggtcacactaggaagacacagggccacaacatccatacttacgctctaggtctggagtcccaccctgtagaccctaagtggctgggtggcacccagggctggtttccttggggcaaggtgacccaagcagttgccgagcagcccaaccccattaggtcagcctgatagtaggaagaaggcaggatctctgtgctctgtgagctgctaagtttctcaaaaccagatggaattgccagagaccacctctgctctccaaaaatcttgaggcccccatagcctctatcttttatctgattaagacaaatcacctgctttgcataacagccaaactggaag

SEQ ID NO: 261733 - DNA, 939 bp, Homo Sapiens
cgggtgtgctccactttggcgtcagcatgctcccgcccacacggtcaatgggtaccacaacaatgtagaaccacctgacaagcgaggggtcttgcacatggggcatggagagatcgaagcggccgtcctctatgtaggcagaggcaggcagcggcttgtgaggcaggaggtcgggggctgtgcggatggacaccaggtgctgcaggccccctgcgctgctgccacggttcatcagcacaaacgagtactctgtgttgggctgcaggtctgcgatcagcttccgcatcgagtgcccgtccacctccacactctgcccattgtacagaatcttaaagggcacagctgacttataggagtcgggaacctcccagctgagcagcacagacgtcttcattgcagccgccacccggaagttcttggcaaacacttgctccaccggcatggtccgggactggatgctggggctgagtgggccagagcctttgctggtccatgcgcggaccttgatgtcgtaagtggtgtctggcttgaggccagtaagggtaaagcgggtgtctgtcgtgatgttctgcagctcctgttggctgttgatgtctcggaacaccacggtgtagctgatgatgcgcccgttcctctccgccagcactggcgggtcccaggccagttctgtggtagacgtggtcagtcctgtcacatgcaggttttgggggaagccgctgggcaggtcctcgggggtcctgatctccttctcgaactcctcacccaagccagcccggttcttggcagcaagccggaagatgtaggtggtccccttgtgcaggccggtgactgtgaagtgctggtcatccttgccgaaatctatggtgttgggccgcgcctcgtcggcccggcagtactgcagccggtagcccagcagctcgccaggcagttccttgggtg

SEQ ID NO: 261734 - DNA, 177 bp, Homo Sapiens
ataagcactcttgtcaatcatggaattggaaaaaaagatgtacatttagttaaacaagataacactatttttgtagcatgattttagattgtgtccttttaatattgttttcaacaatggtagttttgaggttttggccattttctctttacacttcgtatgtattttaaagaagaa

SEQ ID NO: 261735 - DNA, 1138 bp, Homo Sapiens
ggccttcaagcgcgggacgcgacaaagtcatggaccgcaacccctcgccgccgccgccgggtcgcgacaaggaggaggaggaggaggtggccggtggagactgcatagggagcacggtctacagcaaacactggctcttcggcgtcctcagcggactcatccagattgttagccctgaaaacaccaaatctagctcagatgatgaggagcagctgacggagcttgatgaagaaatggagaatgaaatttgcagagtatgggatatgtcaatggatgaggacgtggctttatttctccaagaatttaatgctcctgatatattcatgggagtactggccaagtccaagtgtcctcgattaagagaaatctgtgtgggaattttaggtaatatggcctgtttccaggagatatgtgtgtccatcagcagtgataaaaatcttgggcaggtgttattgcactgtttgtatgattcagacccacctactctgctggaaacaagcaggttgttgcttacttgcctttcccaggcagaagtggccagtgtttgggttgaaaggatccaggaacatccagctatttatgatagcatttgcttcattatgtcaagttcaacaaatgttgacttgctggtgaaggtgggggaggttgtggacaagctctttgatttggatgagaaactaatgttagaatgggtcagaaatggggctgctcagcctctggaccaaccccaggaagagtctgaagagcagccagtgtttcggcttgtgccctgtatacttgaagctgccaaacaagtacgttctgaaaatccagaaatggcttgatgtttacatgcacattttacaactgcttactacagggggatgatggaatttcagccattggtacatttgtcctgacactggaaaagacactttggaaatttacttttttgacccgggcctgccatgaaattctggccagtcctgatggatccaccccatcttctttcaagaaacaaaaaacaggggcttgccctctggttttttccaggggttgtcctgcccttctatggccttcccaaactgtgagccagaaggttcttcaggggttggaaaaggaccctccctccaaatggaagcccctctttccggggtca

SEQ ID NO: 261736 - DNA, 476 bp, Homo Sapiens
gagatgtacgaacttccggttctccgggcagctgccactgctgtagcttctgccacctgccacgaccgggcctctccctggcgtttggtcacctctgcttcattctccaccgcgcctatagtccctcttggagccagcgtggcgggcctggcggctcccgggtggtgagagagcggtccgggaacgatgaaggcctcgcagtgctgctgctgtctcagccacctcttggcttccgtcctcctcctgctgttgctgcctgaactaagcgggcccctggcagtcctgctgcaggcagccgaggccgcgccaggtcttgggcctcctgaccctagaccacggacattaccgccgctgccaccgggccctacccctgcccagcagccgggccgtggtctggctgaagctgcggggccgcggggctccgagggaggcaatggcagcaaccctgtggccgggcttgagacggacgatcacgg

SEQ ID NO: 261737 - DNA, 1255 bp, Homo Sapiens
gaaatgagattcttcaaaacgatgaaacctcatagctctgagaaaaggttttagggttttaaattctaagcaaagcgtgactatggctgacagactacacatttaattatacagcttctctttcttaaccacaggcagattaacctcattgtggattgtccttcagaccttagtcctcaggcatggtttctggtgcccactcctggaagccgctgttccctttctaccttcttaccagagcccaagggcaggcctggtcccggggaagcagcagcttgctgacataagtcagctgcaaaggctgaggagtgtgccctcagagaagcaccgccccccagtcttgtgccagcgcctagagccgcagctcccagggatgctccttccctgggaggcagcccagggagagggactctgggcagcgttcttcagatttgtggccactgtttctcatttgctggttgactgtttttatttcttaggcttttgctagttttagaaaatagggaagcagcccttgatttgtggattaaaagcaacatttgagcgatgatgcacaacagtccaggaaaatgggcggtggacacttgaggctgaggatgggagttgacatgagcagggagagggaggtgcgcgctgcttatctgtgattgttgctcacctgagtgtggctgattgtgtacatccagcagttacaattcttaacaaattatacttttacatttattttatattttctcacccccagtaatttccttccaaagaagttcacatgtaataagtagaaattctgtataggaaaaaagcattaaaaatactattataactgcttcatttgctggggacccattaaaagtaatataaattagctttttccagaaggaccctttttgtagcagtgtttatgaatgtaacccccagcaaaatatggctatatattaggggagccagtttggagcagaggcctgaaggtccctgctatgcacccgtggccacagctcgcagcccaagcactgtgggagcatccacacctttgatgggcaatgcaggattggtagcaggttccatagggcgtacaaaacagtattaaagcttcagtgtttttgcatattgttagcatttacaaatattttggctttagtatgaggaaagtaaggatgggcaaagaagcgatcaaaatagctattgctacaacattttcgaaaacaaagttggggctgtatttctttaaaaagataagcctctaaaaatgcttggc

SEQ ID NO: 261738 - DNA, 363 bp, Homo Sapiens
  misc_feature (23)..(23): n is a, c, g, or t
gcccgtacaaaacggtattaaangcccccgtgttttgcccaaattgttagccatttaccaaatatttttgcccttagtatgaggaaagtaaggatgggccaaagaagcgatccaaaatagcctattgcctacaacattttcgaaaacaaagttggggcctgtatttcctttaaaaagataagccctctaaaaatgcttggcaaaaaaaatatgggggttaaaataggaccagtgatattaatgagaaaatgaaagtatgtatcaggaataaagtgatattgcataggagtattgtatttttatgaattttatgccagttgtttacatgtactatatatgttaaattaaaaaaaatcatgagta

SEQ ID NO: 261739 - DNA, 508 bp, Homo Sapiens
  misc_feature (286)..(330): n is a, c, g, or t
aatgtaacccccagcaaaatatggctatatattaggggagccagtttggagcagaggcctgaaggtctccgctatgcagccgtggccacagctcgcagcccaagcactgtggagcatccacacctttgatggcaatgcagattggtagcaggttccataggcgtacaaaacagtattaaagctcagtgttttgcatattgttagcatttacaaatatttttgctttagtatgaggaaagtaaggatgggcaaagaagtgatcaaaatagctattgctacaacattnnnnnnnnnnnnnnnnnnnnnnnnnnnnnnnnnnnnnnnnnnnnnctaaaaatgcttggcaaaaaaaatatagtgttaaaataggccagtgatattaatgagaaaatgaaagtatgtatcaggaataaagtgatattgcataggagtattgtatttttatgaattttatgccagttgtttacatgtactatatatgttaaattaaaaaaaatcatgagaaatg

SEQ ID NO: 261740 - DNA, 536 bp, Homo Sapiens
ggggttgtgtcagtgaaggaatccagtccgggggccgagctggctgcgccctccgccaagcgccggcagcgcggggcgagctccggacggcgcgcggcccaggcagcggctcccgctcggcccgccctccgagccgcaggggccgccaccgccgcggcgcctcccctggcgaccgcgcccccgggccccggctccggcccgggacggaggagccggcgctcgacacagagagctcttcagaaaccaggctgctttcaggaacattgctgtggattcccagggcctattccactagaagcaagatggctgaactcaatactcatgtgaatgtcaaggaaaagatctatgcagttagatcagttgttcccaacaaaagcaataatgaaatagtcctggtgctccaacagtttgattttaatgtggataaagccgtgcaagcctttgtggatggcagtgcaattcaagttctaaaagaatggaatatgacaggaaaaaagaagaacaataaaagaaaaagaagcaagtccaagcagcat

SEQ ID NO: 261741 - DNA, 1071 bp, Homo Sapiens
  misc_feature (814)..(814): n is a, c, g, or t
  misc_feature (897)..(897): n is a, c, g, or t
  misc_feature (987)..(988): n is a, c, g, or t
tgggtggcgaattcggcacgaggcctcgtgccggcagagccaactggggcttttgtataagaagactttaatattctgtaaggagcttggtcctgtgagtttctgggctctggcctcctgaagaaccagccagaagaagaaaagtagaggtggctttgctgcctcctgggagcccagaacttgcagtaaccctttagggtcctgccccaggcccagccagggctgaggagctgtcacagagagggcctcagctctgacctgacacctgctctccccagcctgttttctcttttctaaaagacaaattatggtaccataagctgccaaagatcccctcctgcctcagacccctttgccaggggctttgggggctgagcagagccacatccagagtggggtaatagctcaggcggcccgcttcccatttctcaaaccccgctctgccccattgttctcctttcccttatactttttattaccttgctcaagggccagagatctcaagtgtcaaccttgaggtcccagctccatcccctagttgcagactcatcaccatggttaccatagtgactgcttcattgccatggttacatactaattgctgcagctctgtggcccagcccactgcttcagctgtgggccatctgagggtacgtgccatcatctctccagcccaggcccctgggcatctcatgctggggggaagggactgaatacctttttccttccccctgcctgtgtcttcagccctgatgcacaggctgccagccccccagtccagccctctcccttccactggtgccttgcttagagnccagaagggatgaagccgggggatctatggaacagaggaggagcgatgcagttggggagaggaagctagaaaggttaatgggntggagttctgtacagtggttgagtttcccgacagggaaagaaggatccctccaatgctcctagagagaaagcctgaacaggagagatgcnnccccccaaaggggaaggggcccctgtgggtgccgcccgccctttccttagacctcccgaaagggtggttgggaaaaaagggga

SEQ ID NO: 261742 - DNA, 1702 bp, Homo Sapiens
agacctacccgggcgaagcgggcgagcggtggtttggacgccggcggagacgcgggcgagtggttagcaggaagaagatgagccttaagtctgaacgccgaggaattcatgtggatcaatcggatctcctgtgcaagaaaggatgtggttactacggcaaccctacctggcagggtttctgctccaagtgctggagggaagagtaccacaaagccaggcagaagcagattcaggaggactgggagctggcggagcgactccagcgggaggaagaagaggcctttgccagcagtcagagcagccaaggggcccaatccctcacattctccaagtttgaagaaaagaaaaccaacgagaagacccgcaaggttaccacagtgaagaaattcttcagtgcatcttccagggtcggatcaaagaaggcagaaattcaggaagcaaaagctcccagtccttccataaaccggcaaaccagcattgaaacggatagagtgtctaaggagttcatagaatttctcaagaccttccacaagacaggccaagaaatctataaacagaccaagctgtttttggaaggaatgcattacaaaagctggagcgaagaatagaacaaagccaggcagaagcagactcaggagtactaccacaaggtggaacgaaaccactggcaagactctgtgcgactaagtgcctccagagaagagtagcacaaaaccaggcagaagcagattcaggagtactgggagatgatggaccgactccagcgggaggaagaagaggcagttaacagcagtcagagcagccaaggggcccaatccatcaaagtctccaagttcgaaggaaagaaaaccaacaagaagacccgcaacgttaccacagtgaagaaatctccagtatgtcttccagggtcggatcaaagaaagatattgaaatggattccaggcgtgtgcctcgagacaagctggcctgcatcaccaagtgcagcaagcacatcttcgatgccatcaagatcacctagaacgagctggcgtcagcagatgacttcctccccaccctcatctacattgttttgaagggcaacccccatgccttcagtctaatatccagtatatcacgagcttctgcaatccaagccgactgatgactggagaggatggctactatttcaccaatctggtgagtaagtgagttcttggcgttgtggaccaaggactagcgaaggtggctgcgtaacggggatgtgatagggtcactcaggcccatgacaggtgaatgcttctgtgtgacgaaggcagcacggctgaggaagctcatttgcatcaggcagcacaaggacagggcgtaccagaccactcggctccacggacgtgatcagagattggggtaatccttaagaaaccgatcaccattcttgggccttatcccagagcttgggtgagaagtcctccatggacaggcttttacccagtgaatggcatctttttaggacacgccttcaccagaaacatggcgcacacgacgtcactaacaagtgccgtcgggcccccatggacaaggctcatacccaaagaagtcccccttaagctgcatagtaacaagccctgcacagggtcgacgacatacattatgaactaacaatagtactcaccgcgaacaacatgtgaacggacgcacactgccgcaataatatagttcacacact

SEQ ID NO: 261743 - DNA, 587 bp, Homo Sapiens
agcccggagcctgcagcccagccccacccagacccatggctggacctgccacccagagccccatgaagctgatggccctgcagctgctgctgtggcacagtgcactctggacagtgcaggaagccacccccctgggccctgccagctccctgccccagagcttcctgctcaagtgcttagagcaagtgaggaagatccagggcgatggcgcagcgctccaggagaagctgtgtgccacctacaagctgtgccaccccgaggagctggtgctgctcggacactctctgggcatcccctgggctcccctgagcagctgccccagccaggccctgcagcctggcaggctgcttgagcccaactccataggcgggcctttttcctctaccaagggcctccctgcagggccctggaaagggaatcttcccccaagttgggtcccaaccttgaaacccctggaactggaagttccccaactttgccacaccatttgggccccaaagggaaaaaatgggaatggccccttgccctgggagcccccccaggggggcattgccggggcttttccccctgggtttttccaacccccg

SEQ ID NO: 261744 - DNA, 1115 bp, Homo Sapiens
ccagccccacccagacccatggctggacctgccacccagagccccatgaagctgatgggtgagtgtcttggcccaggatgggagagccgcctgccctggcatgggagggaggctggtgtgacagaggggctggggatccccgttctgggaatggggattaaaggcacccagtgtccccgagagggcctcaggtggtagggaacagcatgtctcctgagcccgctctgtccccagccctgcagctgctgctgtggcacagtgcactctggacagtgcaggaagccacccccctgggccctgccagctccctgccccagagcttcctgctcaagtgcttagagcaagtgaggaagatccagggcgatggcgcagcgctccaggagaagctgtgtgccacctacaagctgtgccaccccgaggagctggtgctgctcggacactctctgggcatcccctgggctcccctgagcagctgccccagccaggccctgcagctggcaggctgcttgagccaactccatagcggccttttcctctaccaggggctcctgcaggcccctggaagggatctcccccgagttgggtcccaccttggacacactgcagctggacgtcgccgactttgccaccaccatctggcagcagatggaagaactgggaatggcccctgccctgcagcccacccagggtgccatgccggccttcgcctctgctttccagcgccgggcaggaggggtcctagttgcctcccatctgcagagctttcctggaggtgtcgtaacgcgttctacgccacctttgcccagccctgagccaagccctcccccatcccaggaatttatctctatttaataattatggctattaaagcctcatatttaaagacagggaagagcagaacggagccccaggcctctgtgtccttccctgcatttctgagtttcattctcctgcctgtagcagtgagaaaaagctcctgtccctccatcccctgggactgggaaggtagatagggtaaataccaagtattttattactatggactggctccccagcccctgggctctgcaatgggggcactggggatgaagccgcctgtgagccccccgtgggtc

SEQ ID NO: 261745 - DNA, 1146 bp, Homo Sapiens
ttgggatgacgaccttggtggggacagtgctcgggagggctggctgggatgggagtgaaggagcggcgacccagccacggcgagtctcactcagcatccttccatccccagtgtgccacctacaagctgtgccaccccgaggagctggtgctgctcggacactctctgggcatcccctgggctcccctgagcagctgccccagccaggccctgcagctggcaggctgcttgagccaactccatagcggccttttcctctaccaggggctcctgcaggccctggaagggatctcccccgagttgggtcccaccttggacacactgcagctggacgtcgccgactttgccaccaccatctggcagcagatggaagaactgggaatggcccctgccctgcagcccacccagggtgccatgccggccttcgcctctgctttccagcgccgggcaggaggggtcctagttgcctcccatctgcagagcttcctggaggtgtcgtaccgcgttctacgccaccttgcccagccctgagccaagccctccccatcccatgtatttatctctatttaatatttatgtctatttaagcctcatatttaaagacagggaagagcagaacggagccccaggcctctgtgtcccttccctggcatttctgagtttcattctcctgcctgtaacagtgagaaaaagctcctgtcctcccatcccctggactgggagggagatacggaaattaccaagtatttattactatgaactgctccccaaacctggcctctgccatgggcactgggaatgacccgctgcgagcccctggaccctgagggcccccaccatggcaaccccttgacacgatatggtccgcgccccggccggagaaaaaaagcccccggctcataatatttacacccgccactgcactccccatcccgcgcaccctagcacgccccccattccagccaataaccccgacccgcacagacccacctacctgcagagtcccgtgacattgccccgacaacaccaatcgccaaacctaaggttagtacaccccaccaacgtccacgacccgcccccatcggtcacctcgcccccaccgtattggcgacaccgccacctactcaactactccctccaccaacg

SEQ ID NO: 261746 - DNA, 938 bp, Homo Sapiens
acaggcagtactcataacggttataaggtagcgaggcctgggtggcgaattcggcacgaggcgcgcttggcctccctagtgcgggctggcagtgcgggcagagcccggctgagaggggcggccctggaggagacggaggccgcgggtgggcccgaggcgcaagaggaagatgaggacgaagaagaggcgctgccgcactccgaggccatggacgtgttccaggagggtctggctatggtggtgcaggacccgctgctctgcgatctgccgatccaggttactctggaagaagtcaactcccaaatagccctagaatacggccaggcaatgacggtccgagtgtgcaagatggatggagaagtaatgcccgtggttgtagtgcagagtgccacagtcctggacctgaagaaggccatccagagatacgtgcagctcaagcaggagcgtgaagggggcattcagcacatcagctggtcctacgtgtggaggacgtaccatctgacctctgcaggagagaaactcacggaagacagaaagaagctccgagactacggcatccggaatcgagacgaggtttccttcatcaaaaagctgaggcaaaagtgagcctccagacaggacaaccctcttcatcactggtggctgagctttttcccagcaggaatgggtcctcgaatcatcgtgcctctttcacagaaaggacgttgtggtggcctcaccccaggcatgcccaacaggaactgtcagcataaacctgggggccctcaggactaggacagggtgagccagtgctccctcctttcatgtacttggcctgagactgacctctccctaggtccaaatgccctagtcacatggcagacccacggcctggcccactgtataaaataaacctgtttgcttcttagtttgaaaaaccactaaaaatcgagggccta

SEQ ID NO: 261747 - DNA, 1968 bp, Homo Sapiens
gtcaaaggggcggcccggcccggcccggaagctacagcagcggcgcggagactgcggggcgggccatggcggcgaacctgagccggaacgggccagcgctgcaagaggcctacgtgcgggtggtcaccgagaagtccccgaccgactgggctctctttacctatgaaggcaacagcaatgacatccgcgtggctggcacaggggagggtggcctggaggagatggtggaggagctcaacagcgggaaggtgatgtacgccttctgcagagtgaaggaccccaactctggactgcccaaatttgtcctcatcaactggacaggcgagggcgtgaacgatgtgcggaagggagcctgtgccagccacgtcagcaccatggccagcttcctgaagggggcccatgtgaccatcaacgcacgggccgaggaggatgtggagcctgagtgcatcatggagaaggtggccaaggcttcaggtgccaactacagctttcacaaggagagtggccgcttccaggacgtgggaccccaggccccagtgggctctgtgtaccagaagaccaatgccgtgtctgagattaaaagggttggtaaagacagcttctgggccaaagcagagaaggaggaggagaaccgtcggctggaggaaaagcggcgggccgaggaggcacagcggcagctggagcaggagcgccgggagcgtgagctgcgtgaggctgcacgccgggagcagcgctatcaggagcagggtggcgaggccagcccccagaggacgtgggagcagcagcaagaagtggtttcaaggaaccgaaatgagcaggagtctgccgtgcacccgagggagattttcaagcagaaggagagggccatgtccaccacctccatctccagtcctcagcctggcaagctgaggagccccttcctgcagaagcagctcacccaaccagagacccactttggcagagagccagctgctgccatctcaaggcccagggcagatctccctgctgaggagccggcgcccagcactcctccatgtctggtgcaggcagaagaggaggctgtgtatgaggaacctccagagcaggagaccttctacgagcagcccccactggtgcagcagcaaggtgctggctctgagcacattgaccaccacattcagggccaggggctcagtgggcaagggctctgtgcccgtgccctgtacgactaccaggcagccgacgacacagagatctcctttgaccccgagaacctcatcacggggcatcgaggtgatcgacgaaggctggtggcgtggctatgggccggatggccatttgggcatgttccctgccaactacgtggagctcattgagtgaggctgagggcacatcttgcccttcccctctcagacatggcttccttattgctggaagaggaggcctgggagttgacattcagcactcttccaggaataggacccccagtgaggatgaggcctcagggctccctccggcttggcagactcagcctgtcaccccaaatgcagcaatggcctggtgattcccacacatccttcctgcatcccccgaccctcccagacagcttggctcttgcccctgacaggatactgagccaagccctgcctgtggccaagccctgagtggccactgccaagcctgcggggaagggtcctgagcaggggcatctgggaggctctggctgccttctgcatttatttgccttttttctttttctcttgctcctaaaggggttggtggccaccactgtttagaatgacccttgggaacagtgaacggtagagcaattggttttttggcaggagtttgtggaccaaagtcagagtggatcatggtgggttggcagcaggcacttgtcttgttggagctgctctgtgctcccatccatttctcctgtccctctgcctgggctatgggcacgtgggatgcgcgtggccaagtcccacc

SEQ ID NO: 261748 - DNA, 504 bp, Homo Sapiens
agaacgaaactgcgcgggctctggggaaccccatggagaggagcacgtccagcgccgatccatgcttgatggtgccggggcgctgttggcggttcctccggggggtgactttgctgtacagctcctctctcgcagccatgccgagcggactggggtggccgtactgagccatggctcagcggccagccatcgccagggaaggagcccgagccggatggttcgggaaggaggagggagtcgggctgggccaggggagggggctcggggacccagagccaggcagaaggcggcggcagcggaggcggcgctccgagcttccccagtgtcgggactctgacgcttcctggtgaggccacaggagccagaacgccggcaagcggccgctgcgggaccagcctcagccactcgggcccccggctgcccccagctctgcgcctgcagtagacctgtctcctccgcccccttccctctcctcgcctagcagtccgggaatttgcaatgaat

SEQ ID NO: 261749 - DNA, 916 bp, Homo Sapiens
ggggctcagctgcccctgtctgaagggtcctggcttgattgcagaaggacaacctccgcacccacctaaagacatgtatatgtcttgggatcccagagattgggtccttgggcctggcttcttaagagttttgatgatgctgggaaaagtgactgcgattctgaagaaccgctgccttgcaaggtcaaggacattcagtggttgctggggtccgcagactactgccacccactcaccatcaactctgttagcccaattgccctgctgaacaactgcctgaatacaggctttaggttcccctggactccagccaaggctgttcaggtgggaccatggtgctctttaagcgtgatcggagggaagacacacagcagggccaccattccatgaatgggaggtgtacagatcactttctctttgtgctcaggtctcttctgtctccagcacctatattggtaagactagtacctgccagggagaggtgcccccaagtgaaagggtaccagtgggcacctgggaaaaagcacctggcaaggtttccatgtggcccagcccaccatggaaacagggtgcggaactctgcctgtgtcgccagaccctcactctactcaagtgggcttttttgaaaagcccctgcccattgtctgtggccaggccctgtgcctgcttcacacccctaacagctggcctgggaaaagggccggcccaccgctccctgtgtccccacactttccttgttccaaacaccttccctggtccaccaactgtcagcccggggcccttcttgcctatggggcacctaaattcaaagcacccgccttccaccttttgttttcgccactggggcattccccgcctttttttccctcggcggcttatgggctgggcgcctttggtacacaatgcttgttaatcc

SEQ ID NO: 261750 - DNA, 634 bp, Homo Sapiens
  misc_feature (410)..(410): n is a, c, g, or t
  misc_feature (461)..(461): n is a, c, g, or t
  misc_feature (476)..(476): n is a, c, g, or t
  misc_feature (483)..(483): n is a, c, g, or t
  misc_feature (511)..(511): n is a, c, g, or t
  misc_feature (533)..(533): n is a, c, g, or t
  misc_feature (569)..(569): n is a, c, g, or t
  misc_feature (579)..(579): n is a, c, g, or t
  misc_feature (588)..(588): n is a, c, g, or t
  misc_feature (610)..(610): n is a, c, g, or t
tactgtgggaaaaaggatattatgtatagaaaagtctacacttcttgatacaactaactaaaaaaagcttgatacactaaacaaaacccaaataatgtcttccctaaaagtgggtaacttgaaaagcaattcgagcaaaaatcaaggagttcaattataaataagtatatcaacaaagtgaaagatgggtttaatttttcccacaaaaagttaaaagaaataacagcagttttagaggaagaggaaaaaataataagaaaattacatgcagttgcaaaatgtgtgactatttacaaactctaacatataactacaaaacggaccagaagaatcattatcataggaagcaaagggtcatttcaaaaatcagaggagggatgattcatatttaatttaattctgtggaaaanatttaagtaacctttgaggacaaaaataggtgatatgttgaaatgcggganaccacagtggaaggnaaaaganttcaaggaaagctcagtttcagtaaccngtatctagtaaaatcttcaggncctagaggctacaatctggcattaatagtgtctgangacctaggantgtcctttnataccttttgggtattcttgtnggcttgaggtgtgtcttttaaggt

SEQ ID NO: 261751 - DNA, 1097 bp, Homo Sapiens
ccaattcccccaagggttttttctcccattcgggagggtccgggggttccttccagggcatccttcttttcaggctgggaggaagttttctatggcagagttcatccatgccccttccatcttccccggtcactgattatttagaagacaggagaatcacagaaaggggcaggggctttgcagtaacctcttaatccagtcggaatcttctgggacctgaatgccgggcaatactgtcatggagcaaacaccttcgatatatcaaactctggcaggactggtaggttaagaagcaccggagccaaatgtggccattggaacagactgcctgtttgcgatctgtgaatggcaagatctctttacacaaactacagtgctcagggaaagtctgtttgttcatcttctttgagatatgtccaatcagcacccgtgcagttctgtcatcatactcttcatcagacattaaaaagttacagagtccgcgggtggggatgctagtgttttctgtgatccaggtgtgcagatacacttctcctaagactcgcttcatgtgttccctggtcaagtgcatctccacagcttcgattttcccttggatttccaggagtttctcttccattggctcacggcctccagcatctccagtcgtggggagcgagtcatcagtgggctcctctacatctccttccttgctcctctcctgcaggccttgcttcaccacctgtttggaagaagtgccttcttcctgctgttcatcgtcagcattgcccatcccaggcgaatccactagtaagatttttgagtcctcatgggtgggtttccacaaggcttctgaaggggttttctgcattgactgatataaaatcctcaggaggaaaagcttaaaacgccaaaaataggtgactccactgctttcaatctttttttccaaagcttcttgtaaaaattgagggatatgtttatcttttaaaatcttccagcgtactaggtctattaaatctacctgcttaaaaaggttttgaactgaagattccaggagctgagcagctgcctcttcaaaggttttgagagtaacaaattggacctggtagtttttg

SEQ ID NO: 261752 - DNA, 877 bp, Homo Sapiens
ccctcaaaggtgtcacagttgctttggcccggtctgctgttggcccccagccccggttgggttttgttctgcaggttttgcaagggcccggtgcccacctggttgggccaagcctcgagcctctgggagaatctccctttcccccgttcttcgtagatctgctaattagaagtcagagcagatatttccccaagggaacgtagaatgtcatctctttctttaggatcatcacataattctgctattttccgagcttcagccaaagcacctcgaatctgctcttctccttccggtccaccatttggatctgcaagccagttctgagcagcatcgatcttctttgcaatgctctgctttgagttggtcatggcttccagcttgcgagctgcattttccacttttgctgtgagcacatccagaccctgagatacctgctgagctttctgcatggccaccggtgaggatcattgtcctctggcacggaggtcagccacttgatcagtcatctgccctagcattttgcaagttcccagaatctccctgcgttctttgcctgcacagagttcaccaacttttccagcttcatctaagatctgtctgatggcctgctcaccagcatcccctggggaggcactagggtcacggagccaacctttggcctggttcagtttggagtctatggaggccaatgctctcttcatggcttcagtgtccttgctggcacaggcatcttcatcccaagaggtgagttgtaacacacgaattatctcattaatttcagcactcattttttctacagtaaaattgcgattttttaaagcttcctctatgccttggttttttgagtttttagttgttacaaaaatcttcatagctg

SEQ ID NO: 261753 - DNA, 1138 bp, Homo Sapiens
  misc_feature (1015)..(1015): n is a, c, g, or t
  misc_feature (1076)..(1076): n is a, c, g, or t
  misc_feature (1108)..(1108): n is a, c, g, or t
  misc_feature (1121)..(1121): n is a, c, g, or t
gggagtcggaattttggggagccaaccgcgccgtctgtccctggcaagccagcggcggtttaaaggaggtggcgggaagcctgtgtgtgcttcaaatcgtcaccctcatggtcgctccggtttttcacgactgaaaacaacatagcaaaataagccaagatgtctgtggatccaatgacctacgaggcccagttctttggcttcacgccacaaacgtgcatgcttcggatctacattgcatttcaagactacctatttgaagtgatgcaggccgttgaacaggttattctgaagaagctggatggcatcccagactgtgacattagcccagtgcagattcgcaaatgcacagagaagtttctttgcttcatgaaaggacattttgataacctttttagcaaaatggagcaactgtttttgcagctgattttacgtattcccctcaaacatcttggcttcctgaagataaatgtaaggagacaccttatagtgaggaagattttcagcatctccaaaaacaaattgaacagttacaggagaagtaccagactgaattatgtactaagcaggcccttcttgcagaattagaagagcaaaaattgttcaggccaaactcaaacagacgttgactttctttgatgagcttcataatgttggcagagatcatgggactagtgattttagggagagtttagtatccctggttcagaactccagaaaactacagaacattaaagaaaatggggaaaaaggaatcgaaaccactgaaaatatcctaattgctcagtagtcaaaaggaggagcctgtctcaaagtagaatcatattgactgttcaaaccataaggactgttcaaatcataccagtgactgttcaaaccaaccatactttttattacatttgctttgtcaactctttcttgtattctgtgttttcctcttttttggtccactttgctgaggtatgaagtgtactactttgaactaggctgaagcatctgagtcttctaataagtnggaagggatccaacaaagaagccatgaccagttaaagatatttgcagagttacaccttggntcataagtcctttgtgaccttgattatttttngccttactctttnggatgagaccagacaag

SEQ ID NO: 261754 - DNA, 872 bp, Homo Sapiens
  misc_feature (668)..(668): n is a, c, g, or t
ggactgtccacgagggcctgaggaatcaggagctgaactccacagagtcagttatgattaatggaaaatattgctgtccaaagatatacttcaaccaccgttgcttctcagggccatatcttaacaaaggaagaattgctgagctgcctcaatgtgtaggacctgggaactgtgttctggtccttagagaggtcctcactttacttatcaatgcagcctacaaacccagccgtgtccttcgggagctccagctggacaaagactctgtggtggcacggatgtggggaagtcctaaagagccaaatataaaggaaagagttatcgggctactgttgagatagtgaaaacagcagatcgggtgactgaattctgccggcaaacctgtatcaaactggaatgctgtcctaacctcttcggtccacggatggttctggataagtgttctgagaactgttctgtacttacaaagaccaaatacacacactattacggaaagaagaaaaataaaagaattgggaggccacctggtgggcatagtaacttagcttgtgccctgaaaaaagccagtaagaggagaaagaggcggaaaaatgtttttgttcataagaagaaacgctcctctgcatctggtgataataccccagcgggctctccccagggaagtgggnggtgaagatgaggatgacccagatgaaggggatgatgattccctaagtgaaggcagtacatccgagcagcaggatgagctacaggaagaatcagaaatgtcagaaaaaaagtcatgctcctcttctcccacccaaagtgagatatccacatcgctgccctccagatagacaaaaggagaaaaagggaggcttcgcacttttcat

SEQ ID NO: 261755 - DNA, 1155 bp, Homo Sapiens
actttacggcagtgtggctggagccgcggctgacgggcccgcggtctgggcgtgagtgcagggaagtggagtatttgctgggccgggtaccatggacgtgggcgaacttctgagctaccagcccaataggggcacaaaacgtccccgggatgatgaagaggaggagcagaagatgcgtcggaaacaaactggtactcgagaacgcggccgctatcgggaagaagaaatgactgtggtggaggaagcggatgatgacaaaaaaaggctgctgcagattattgacagagatggggaagaggaagaggaagaggaggagccattggatgaaagctcagtgaagaaaatgatcctcacatttgaaaagagatcatataaaaaccaagaattgcggattaagtttccagacaatccagagaagttcatggaatccgagctggacctaaatgacatcattcaggagatgcacgtggtggccaccatgccagacctgtaccaccttctggtggagctgaatgctgtacagtcgcttctcggcttgctcggacacgataatacagatgtgtccatagctgtggtcgatttgcttcaggaattaacagatatagacacccctccatgagagtgaagagggagcagaagtgctcatcgatgctctggtggatgggcaggtggtagcactgctggtacagaatctggagcgcctggatgagtctgtgaaagaaggaggcagatggcgtccacaacactctggctattggggaaaaacatggctgagctccggcctgagatgggtacagagggggcccagcagggtcttctacagtggctgttgaaaaagctgaaggcaaagatgccttttgatgccaacaaactgtattggcgtgaagtgctgggccatattgctcccaggacaatgatgaaaaccgggaatttgccttgggggaactgggagggaaatcgatggggcttctttcagcaggttatcccgtgtttaaaaagacccattccccagaccggctgagggaacacggagatgatgggaaaatccgggttggattcccctccggctcccgggctaaatggctaagttcccaatcggggacggcttccctgaaagggccaagggtcccttcacccggatgaaatccccggccc

SEQ ID NO: 261756 - DNA, 1414 bp, Homo Sapiens
acctttcccggatgcggcggtcccgcctgggtggcgaattcggcacgaggaccatggacgtgggcgaacttctgagctaccagcccaataggggcacaaaacgtccccgggatgatgaagaggaggagcagaagatgcgtcggaaacaaactggtactcgagaacgcggccgctatcgggaagaagaaatgactgtggtggaggaagcggatgatgacaaaaaaaggctgctgcagattattgacagagatggggaagaggaagaggaagaggaggagccattggatgaaagctcagtgaagaaaatgatcctcacatttgaaaagagatcatataaaaaccaagaattgcggattaagtttccagacaatccagagaagttcatggaatccgagctggacctaaatgacatcattcaggagatgcacgtggtggccaccatgccagacctgtaccaccttctggtggagctgaatgctgtacagtcgcttctcggcttgctcggacacgataatacagatgtgtccatagctgtggtcgatttgcttcaggaattaacagatatagacaccctccatgagagtgaagagggagcagaagtgctcatcgatgctctggtggatgggcaggtggtagcactgctggtacagaatctggagcgcctggatgagtctgtgaaagaggaggcagatggcgtccacaacactctggctattgtggaaaacatggctgagttccggcctgagatgtgtacagagggtgcccagcagggtcttctacagtggctgttgaagaggctgaaggcaaagatgccttttgatgccaacaaactgtattgcagtgaagtgctggccatattgctccaggacaatgatgaaaacagggaattgcttggggagctggatggaatcgatgtgcttcttcagcagttatccgtgtttaaaagacacaatcccagcacggctgaggagcaggagatgatggagaatctgtttgattccctctggctcctgtctaatgcttagttccaatcgtgagcgcttcctgaagggcgagggtcttcagctgatgaatctcatgctcagggaaaagaagatctcccggagcagtgccctgaaagtgctggaccatgccatgattggcccccgaaggcacagacaactgccataagtttgttgacattcttggcttacgaaccatctttcccctctttatgaaatctcccacgaagatcaagaaagtgggaaccactgaaaaggaacatgaaaagcatgtctggtcgatccctggcttccctcctgcggaaactggggagggcagcagcgggacccggctttctggaataaattcactgaaaatgaccgtggaaaaagttgacaggactaatgggagttgcattttaaatatccggggg

SEQ ID NO: 261757 - DNA, 1641 bp, Homo Sapiens
  misc_feature (1333)..(1363): n is a, c, g, or t
  misc_feature (1365)..(1365): n is a, c, g, or t
  misc_feature (1367)..(1387): n is a, c, g, or t
  misc_feature (1389)..(1392): n is a, c, g, or t
  misc_feature (1394)..(1396): n is a, c, g, or t
  misc_feature (1398)..(1400): n is a, c, g, or t
  misc_feature (1407)..(1408): n is a, c, g, or t
  misc_feature (1410)..(1410): n is a, c, g, or t
  misc_feature (1454)..(1455): n is a, c, g, or t
  misc_feature (1461)..(1461): n is a, c, g, or t
  misc_feature (1517)..(1538): n is a, c, g, or t
tgcgaggcctgggtggcatctcggcacgaggggcggacaagaagattgaaggggaaaaacacgacatggtccggcgaggagagatcatcgacgctctggtggatgggcaggtggtagcactgctggtacagaatctggagcgcctggatgagtctgtgaaagaggaggcagatggcgtccacaacactctggctattgtggaaaacatggctgagttccggcctgagatgtgtacagagggtgcccagcagggtcttctacagtggctgttgaagaggctgaaggcaaagatgccttttgatgccaacaaactgtattgcagtgaagtgctggccatattgctccaggacaatgatgaaaacagggaattgcttggggagctggatggaatcgatgtgcttcttcagcagttatccgtgtttaaaagacacaatcccagcacggctgaggagcaggagatgatggagaatctgtttgattccctctgctcctgtctaatgcttagttccaatcgtgagcgcttcctgaagggcgagggtcttcagctgatgaatctcatgctcagggaaaagaagatctcccggagcagtgccctgaaagtgctggaccatgccatgattggccccgaaggcacagacaactgccataagtttgttgacattcttggcttacgaaccatctttcccctctttatgaaatctcccaggaagatcaagaaagtgggaaccactgagaaggaacatgaagagcatgtctgttcgatcctggcttcccctcctgcggaacctgagagggcagcagcggacccggcttctgaataaattcactgaaaatgacagtgagaaaggttgacagactaatggagttgcattttaaatatctgggtgcaatgcaggtggcggacaagaagattgaaggggaaaaacacgacatggtccggcgaggagagatcatcgacaatgacaccgaggaggagttctacctccggcgcctggatgcggggctctttgttctccagcacatctgctacatcatggccgagatctgcaatgccaatgtcccccagattcgccagagggttcaccagatcctaaacatgcgaggaagctccatcaaaattgtcaggcatatcatcaaggagtatgcagagaacatcggggacggccggagcccggagttccgggagaacgagcaaaagcgcatcctgggcttgctggagaacttctagaggcaccatggccctgcgcatcatggactctctcagcttccctcccaggatcagtttctacacaactctgtgtggcttttggacaaattaaagctagttttggtnnnnnnnnnnnnnnnnnnnnnnnnnnnnnnntncnnnnnnnnnnnnnnnnnnnnncnnnncnnntnnnccctttnncntccccccctccttctcttttcccctttgaaaccctcctcccccnncccttnctcctcccttttgtggggcgcccttcgggccctttaaaaaattcttctaaaaaccnnnnnnnnnnnnnnnnnnnnnncccccgtaagggaacgggcaaactggggcccaacacggtttccccaggaaaaaacccggggaataaacataaggggcctgggaattctcccccccaataaaaa

SEQ ID NO: 261758 - DNA, 931 bp, Homo Sapiens
  misc_feature (846)..(846): n is a, c, g, or t
  misc_feature (850)..(850): n is a, c, g, or t
aatgcagaagcgggggccgcgaggacgccagcgggcgctgtgcgtaggaaccgccgggtggccgctgccgatcggggccgacttggggacggaccggaagtgcccgagggcggccgcagaacggtcaatttgagccgcgtcgagctcccctgggacctgtggccgccgcccacagaccatgctcctggggcgcctgacttcccagctgttgagggccgttccttgggcaggcggccgcccgccttggcccgtctctggagtgctgggcagccgggtctgcgggcccctttacagcacatcgccggccggcccaggtagggcggcctctctccctcgcaagggggcccagctggagctggaggagatgctggtccccaggaagatgtccgtcagccccctggagagctggctcacggcccgctgcttcctgcccagactggataccgggaccgcagggactgtggctccaccgcaatcctaccagtgtccgcccagccagataggggaaggggccgagcagggggatgaaggcgtcgcggatgcgcctcaaattcagtgcaaaaacgtgctgaagatccgccggcggaagatgaaccaccacaagtaccggaagctggtgaagaagacgcggttcctgcggaggaaggtccaggagggacgcctgagacgcaagcagatcaagttcgagaaagacctgaggcgcatctggctgaaagcggggctaaaggaagcccccgaaagctggcagacccccaagatctacctgccggggcaaatgagtctggcgccgcccttcccgcccgttgctgctgtgatccgcaagtaataaattctcagaggactccnaccnaaacctccatcacctatatccccccctttttggtcggcctcgggccctcgagaaatttttcagaaccattcgtttgggggc

SEQ ID NO: 261759 - DNA, 877 bp, Homo Sapiens
ggcctgggtggcgaattcggcacgagggtcagcgggaggcctgagggcgccgggcgctgcggcaggcgggcccggggtccagccgagagggtccgggcgccaggcaacgcgattcgcgcgggggtgaacccggggagggggccggcctccccgttctgggacctttcgctcccctgggacctgtggccgccgcccacagaccatgctcctggggcgcctgacttcccagctgttgagggccgttccttgggcaggcggccgcccgccttggcccgtctctggagtgctgggcagccgggtctgcgggcccctttacagcacatcgccggccggcccaggtagggcggcctctctccctcgcaagggggcccagctggagctggaggagatgctggtccccaggaagatgtccgtcagccccctggagagctggctcacggcccgctgcttcctgcccagactggataccgggaccgcagggactgtggctccaccgcaatcctaccagtgtccgcccagccagataggggaaggggccgagcagggggatgaaggcgtcgcggatgcgcctcaaattcagtgcaaaaacgcgctgaacatcccgccggcggaagatgaaccaccacaagtaccggaagctggtgaagaagacgcggttcctgcggaggaaggtccaggagggacgcctgagacgcaagcagatcaatttcgagaaagaactgaggcgcatctgggctgaagcggggctaaaggaagcccccgaaggctggcaaaccccccagatctacctggggggcaaatgagtttgggggcggcccttcccgcccgtggctgctggggaccggaagaataaattccgcacaggaacttcgacaag

SEQ ID NO: 261760 - DNA, 885 bp, Homo Sapiens
tgggtggcgaattcggcacgaggtcgaggtcgggcttgggaagggtcagcgggaggcctgagggcgccgggcgctgcggcaggcgggcccggggtccagccgagagggtccgggcgccaggcaacgcgattcgcgcgggggtgaacccggggagggggccggcctccccgttctgggacctttcggtgcgtccgagcgcgacaccgcccgcgtcgggggcttgggagcctcggggcgcgagctgtgttggaagcaaagtcctccttgtgggttggggtggcggagggagaagggaagcgagggtcgcggcgggaccagacgccccagtcccggcccgcccgcgactactgaaggcgctgccgcctgacctgaacgggcacttgtgttccagctcccctgggacctgtggccgccgcccacagaccatgctcctggggcgcctgacttcccagctgttgagggccgttccttgggcaggcggccgcccgccttggcccgtctctggagtgctgggcagccgggtctgcgggcccctttacagcacatcgccggccggcccaggtagggcggcctctctccctccgcaaggggggcccagctggagctggaggagatgctggtccccaggaagatgtccgtcagccccctggagagctggctcacggcccgctgcttcctgcccagactggatacccggacccgcagggactgtggctccaccgcaatcctaccagtgtccgcccagccaagatagggggaaggggccgagcaggggggaatgaaggcgtcgcgggatgccgcctcaaatttcagtgcaaaaaccgtgcttgaaagatccccccggcgggaagatggaaccacccccaagtaccggaaagcttggtg

SEQ ID NO: 261761 - DNA, 872 bp, Homo Sapiens
caggctggtacggccggaattcccgggatatcgtcgacccacgcgtcggctgaatttttagaaagattgcacctcttcctagctagagaggggtggaccgtgcaagatgttgcccgtgtccttgggtttcagaaccctactccgaccccgggcccagagatgccagcagagatgctaaactatattttggataatgttattcagcctcttgttgagtccatatggtacaagaggctgacacttttctcggggagggacatcccagggcctggagaggaaacctttgatccctggctggagcacactaatgaggtcctagaggagtggcaggtgtccgatgtagaaaagaggcggcggttgatggagagtcttagaggccccgccgctgatgttattcgcatccttaagtccaaacaaacccccggataaccactgccgaatgcctgaaggcgcttgagcaggtgtttgggagcgttgagaagctctagggatgcccagatcaaaatttctgaacacttatccagaacccgggagaaaaattgtctgcttattgtcattcgtctgggagcctctgctacagaaggtggtagagaagggggccattgattacagattatgtgaaccaggccgccttagaagcagtcattggccggggccaaccaacgggcggggccatcccgaagcaggctgtggctttaccggggctgtggaagggccagcccaaaactctttttcagtgccgggggcacgaatcccggagaagaagcccaggcagaaggaggaggaggtgagccaccctctgtgcatagggccggaagggcctcttgctgccgaaagcgcttatgcgaaccgaatccgaggaattttgggcg

SEQ ID NO: 261762 - DNA, 468 bp, Homo Sapiens
  misc_feature (352)..(352): n is a, c, g, or t
gtctaagccccagctcctggcggagcgagctagcctgcgaatttcagcatgagtgtactgctgaggtcaggtttggggccgttgtgtgccgtggcgcgcgcagccattccttttatttggagagggaaatacttcagctccgggaatgagcctgcagaaaacccggtgacgccgatgctgcggcatcttatgtacaaaataaagtctactggtcccatcactgtggccgagtacatgaaggaggtgttgactaatccagccaagggttattatgtgtaccgtgacatgctaggcgaaaaaggagatttcattacttcacctgaaataagccaaatctttggggagctactangtatatggttcattagtgaatggatggccactggaaaaagcacagctttccagctggtggaactgggcccaggtaagggaaccctcgtgggagatattttgagggtgttcactcaa

SEQ ID NO: 261763 - DNA, 1120 bp, Homo Sapiens
actgaagacattatctcttcttgtctgaaaaaaggggttccctggagcacagaaagtatttatcaggggagtgcttctattctgttatcacaggagggcttgatgcagattctggccattcatacacatctggcagcagggaatcatatttcactccggccatgttctttctttaaacatatttggccttgtcttcaggttctgggtatcggaaagccattttattagcatataggtattctgtaactttaatagcaatgttaatagaaacttcctgaatattagcaagcggtgggtaaagtctcccttgggctagctcttcatctgtcaattggcttgtcagggcctttgcagcttctaggaaaacactgtcactaatatgccgggtgttacagagaataacagctaaagccacacctggaaaaatataaacattgtttccttgacctggtgtaaagactcgcccatctgtaagtttcactggcccaaatggaatgccactggcaaacaaacacctgccctctgtaagtgtatatgcttcttcagccgtgcactctgcctgtgctgtaggattacttaatgcaaatattacaggcctttcattgatagaggccatggctctgattacatcaggagtgaaaagacggccagcacctgcaactccaattatagttgaaggcttcagtatattcactgcatcttcaaaagtatcaggtatgctctctggggctgagtgagtaaatggttcctgataactatctatttttgctttccgtcccttaactaataaaccatacttgtcaaacatccagattttcttttgtgcctcttgttctgacaggccattttctaccatagacataactataagatttgcaattccaagagcagcctctcctgctccaaggaataagattttgtgttcggagattggtttactaataactttttgtgctgcaagaagacctgctagagctactgcagctgtcccttgaatatcatcattgaaagtacaatatttttctcggtactttctcaagaacctgaatgcattatgatttccaatctcagaactctccagcccgcagcaagtctttttttaaagggaggagccacacat

SEQ ID NO: 261764 - DNA, 626 bp, Homo Sapiens
ctattgtctcagctataaattcaaatttatacatactattgagtattaatattctctgatttcagggagaattctgtcagtcacatgatgattatgtttttgtttaacattctttccatgcacttgttattttattaatttgcctgaatgatgagaccagaccagtgtctacagattttcattgtcagaaaaatctataagtctgccctttttacaatgatgatttaaaaaaaacaacagcgtaaatattagcccacaagagcagtcctaaacaatcacaattacactgtactacccaagaagactgtttattgtgaagcatttacctttcaaaaaatcattacatttctatttcttggtggagcagcacattgtggagtgtgattcttaattcttcattgagtttgtcaataggacattgatgctggataggttgtcttttgtttttatgtctcagaccatcttgtgagattgtttgcctatctcataatacagttttatgcagaaaggttgaaactatgtaaatggtttttatggaaattatcagttacaatattttaaaggtgtagaatggcatctttgtttataggagaacatttgtaaataaagttaaatttctaagtcaa

SEQ ID NO: 261765 - DNA, 564 bp, Homo Sapiens
catggatttaaagtcagcatttggattacaacacacattattgtgtgtcgagaggcagcattggaaagagcctgattttctaaaatatgcatcaagtgcataaattacaaatcagagctgagtggggaggtgcttcagcagcagcgggatcaatacgatttccactgggaagagacaggaattctacctacacataggaaggccaaggttgatccacttaaccttgttattgtaattttaaagctggtatcggtagctgggaagctttatgtgtgtgtatgtcagctcagcatcttttaatcgtgtctgattttactctcgttacttctcgctgttggaagcatctctgggtttcttgtggcgtctggtgtggaatggccttcctctctaggtgcctgaggtgtccgctgacgggtggcctctcacccccctctagagaaacctgacatttacaatggattgtatttgtccggcaaaaaaggcggattcattcatagagcagaaagaacctgttggcgtaaggtcttccactagttaaatggtttcttttggggaaatgtttat

SEQ ID NO: 261766 - DNA, 899 bp, Homo Sapiens
  misc_feature (852)..(852): n is a, c, g, or t
ttacgcagcagtctaacaccaaccacgctttgaaatgtgtacagacagtgagctggtaagaaaacagtaattatgctagtgggcctttcagtcagcaaaagcatgctcgctctgtgtgttcccaatcatattaattatctatccggtggctgcaacacaccgcctgccattggccgcacatctcgccgtcgtaccccggcagtgcggcggtcactctgcagccagaggacctgctgttcatcactgcacatgccgcctgcggaggcttttggatatggggagtgatggtgtcctgtctgtctcccccctcggtgtctgccgttgacataggggccagccagccctagacgggatgacttccgttcctgaggacagacacagagggactcctgctcagcctcactaattgtttagacacattccttcctacccttctctagtctcaggagatggtaactgggtcgcatttcagtctctgactgaggcctcagccatttttacggaagttcttttctgtctgaccttgcttataaagcatcgacgagaaaattacagtcttcaaccctcttctggattgacaaattgtggctgggaagtggcgatctagctttcagcccagtaaccagtctttcatgcctactactcccagcattccctcctctccccacgtgtctgtccacacagtgaagaggcctgaccagccgtggtaccaggacaggacgtgtccagggaacgctgacacctgtcctcgcgccttctcagtggccagcgtgatgaaaccagcacgtctccgtggatgtgattggaaacccaggggcagtgccagggggagggctccctcgaggaggctgnttctaacagatttccccactcaaagatcagatcaccaacagagggag

SEQ ID NO: 261767 - DNA, 893 bp, Homo Sapiens
ggacagaaaaaaatgcatgagctccagtccaaagtggaagatcttcagcgccagctggaagagaaaagacaacaagtttataagttagaccttgaaggacagcgactacaaggaatcatgcaggaattccagaagcaagaactagaacgagaagaaaaacgagaaagtagaagaattctgtatcagaaccttaatgagccaaccacgtggagcttaaccagtgatagaactagaaattgggttcttcaacagaaaatagaaggagaaacaaaagaatcaaactacgctaaattgattgaaatgaatggaggaggaaccggctgtaatcatgaattagaaatgatcagacaaaagcttcaatgtgtagcttcaaaactacaggttctaccccagaaagcctctgagagactacagtttgaaacagcagatgatgaagatttcatttgggttcaggaaaatattgatgaaattattttacaactacagaaattaactggccagcaaggtgaagagcccagcttggtgtccccaagtacttcttgtggctcattgactgaaagactactgagacaaaatgctgagctgacagggcatatcagtcaactgactgaagagaagaatgacttaaggaacatggttatgaagctggaagagcagatcaggtggtatcgacagacaggagctggtagagataatgtatgtccatttttagcatctccatatatgagaattagtgcatgcttatcatttctgctgtctagttcaagttttaatcctggtaatgtaaaactatcacacacctgattcttaggatctgtagaaaattttatagggatgacaataataatattattactaagttataataatactggtaatttattgggaaacct

SEQ ID NO: 261768 - DNA, 1438 bp, Homo Sapiens
ggggagccccctattactctgcaggcgtgtgaagaaagaaggaaactagctcggaccgtgcaggtttgtaggtctgttggcctgtaggtttcggcacaagtttcagcgagagaaggagaaaactgccttggttggaaccttgcagattcatcacaagagagctacaagagcctggaagaagctgaagactgctaccctccatccttactcaccctggacctgagagacctcttcaatcaggtggagcaaggccctctcctgtcctgccccaaggctggcacagacttgagcatgggccgggctcgggaagtgggttggatggcggcaggactgatgattggggctggtgcctgctactgcgtttacaaactgaccataggaagagatgacagtgagaagctggaggaggagggggaagaggagtgggacgatgaccaggagctggatgaggaggagcctgatatttggtttgattttgaaactatggctcggccctggactgaggatggggattggactgaacctgcggccccaggtggcactgaggacaggccctcagggggaggcaaggccaaccgagcacacccaataaaacagcggccattcccctatgaacataaaaatacttggagtgctcaaaattgtaaaaatggcagttgtgttctggacctctccaagtgtcttttcattcagggaaaactgttgttgccgagcccaaggatgcgggctttccatttagccaggatatcaatagccatttggccagcctctcaatggctagaaacacgagccccactccagaccccactgttagagaggcttgtttgccccggataacttaaatgcgagtattgaaagtcagggccagattaagatgtacatcaatgaagtgtgtcgggagactgtgtcacgttgctgcaactcatttctgcagcaggccggattaaattcgttaataagcatgacagttattaataacatgcttgccaagtccgcttcagacttgaagtttcctttgatatcagagggaagtggatgtgctaaggttcaggtttcgaaaccgctgatgggtttgtctgaaaagccagtcttggcgggggagttagtcggtgcccagatgctcttctcattcatgtccctctttatcagaaatggaaacagagagattctcctggaaacccctgccccataaacggccctctcgaacacaatgggacggaatccacccacaacgcgcttggtttgcagactgtcccacgaatctgcacagggtgctactgcacgatccagcccttagccaattcaccacctcatcgcgtgtaccagttccagggctcctctcccggtaccacactcttatcggcccaggctggggctcccacagagctttgagctaacttctcggctgtgcagctctgcaggcactgtcggcctcgta

SEQ ID NO: 261769 - DNA, 434 bp, Homo Sapiens
ccccaaaaaaccttgaagtaacctcctggttgtgcaagcctgcaggcaatgttggccattgtaaaacccctcccctgcagcccccctcatgtggtgagggggatcaccttcagctgccctgctgtggacaaagaacatcaaattacagcatcacgagtgcctattgttgccctgtggtggtctccctgtcccaagcgggacccgctttgcagagaccagacgcatatcgcggcttgagctgaaaatgcatttgttgcagcttaggttgaattatttttcgtttgctctttcttctacacgcgcctgatggatagtgaacctattcatcaaaaaagtgcactgctcttctgtctattgtaccgacttaacctcttccacccaagtccgcatctgtgtgtatcatcaataaagttgtgtgctttgattgataaaaa

SEQ ID NO: 261770 - DNA, 485 bp, Homo Sapiens
  misc_feature (134)..(134): n is a, c, g, or t
  misc_feature (137)..(137): n is a, c, g, or t
gacagttattaataacatgcttgccaagtccgcttcagacttgaagtttcctttgatatcagagggaagtggatgtgctaaggttcaggttttgaaaccgctgatgggtttgtctgaaaagccagtcttggcgnggngagttagtcggtgcccagatgctcttctcattcatgtccctctttatcagaaatggaaacagagagattctcctgggaaacccctgccccataaacggccctctcgaacacaatgggacggaatccacccacaacgcgcttggtttgcagatgtcaaagaatctgcagagggtgctactgaagatccagccttaggccaattcaccaccttcattggggtggaaagttccaggggctcaatccagggaccacactcttattgggccaggcaggggcttcccacagagcttttgagtaacttcttgggttgtggcagttttgcagggcaatgtttgggcattgtaaaat

SEQ ID NO: 261771 - DNA, 525 bp, Homo Sapiens
  misc_feature (379)..(379): n is a, c, g, or t
  misc_feature (397)..(397): n is a, c, g, or t
  misc_feature (424)..(424): n is a, c, g, or t
  misc_feature (468)..(468): n is a, c, g, or t
  misc_feature (491)..(491): n is a, c, g, or t
  misc_feature (499)..(499): n is a, c, g, or t
aaggaaactagctcggaccgtgcaggtttgtaggtctgttggcctgtaggtttcggcacaagtttcagcgagagaaggagaaaactgccttggttggaaccttgcagattcatcacaagagagctacaagagcctggaagaagctgaagactgctaccctccatccttactcaccctggacctgagagacctcttcaatcagaaatggaaacagagagattctcctgggaaacccctgccccataaacggccctctcgaacacaatgggacggaatccacccacaacgcgcttggtttgcagatgtcaaagaattttgcagagggtgctacttgaagatccagcctttagccaatcaccacctcattgggtgaaagttncagggctcaatcccgggnccacattcttattgggccggcaggggntcccacagagttttgagttaatttcttggttgttgcagtttgcnggcaatgttgggcttgttaattncctccttngcagccttctttatgttggttagggg

SEQ ID NO: 261772 - DNA, 785 bp, Homo Sapiens
cggacgacaagtggggcggaggaggcctgcgtccggaaagtcagtagaattcatcacaagagagctacaagagcctggaagaagctgaagactgctaccctccatccttactcaccctggacctgagagacctcttcaatcagaaatggaaacagagagattctcctggaaacccctgccccataaacggccctctcgaacacaatgggacggaatccacccacaacgcgcttggtttgcagatgtcaaagaatctgcagagggtgctactgaagatccagccttagccaatcaccacctcattgggtgaaagttccagggctcaatccaggaccacactcttattggccaggcaggggctcccacagagctttgagtaacttcttggttgtgcagtctgcaggcaatgttggcattgtaaattcctcccttgcagcctccttcatgtggtgaggggatcacttcagctgcctgctgtggacaaagaacatcaaattacagcatcacgagtgctattgttgcctgtggtggtctccctgtccaagcgggaccgctttgcagagaccagacgcatatcgcggcttgagctgaaaatgcatttgttgcagcttaggttgaattatttttcgtttgctctttcttctacacgcgcctgatggatagtgaacctattcatcaaaaaagtgcactgctcttctgtctattgtaccgacttaacctcttccacccaagtccgcatctgtgtgtatcatcaataaagttgtgtgctttgattggcagaaaag
